United States Patent Application Publication US 2017/0114356 A1 - sequence listing, part 32

SEQ ID NO: 42424 - DNA, 5217 bp, Zea Mays
atgtcgatacatatttgcaagaacggttatatgccaggctatgaggtgtgggtgcaccatggttgggtcacccgcagatcaaggagtactggtgttggccttctgatggccgtgcgagggtccacatacatgatcaggcaatatataaaggagccaggattcaatgtagcgaatgagatggcatccatcaaccaggagataagacagattggtagaatgatggtcatatcaggcaatatattggagccgccggaatggattctgcaagcccaagacctggcctgtgatgtgcaggatttcacggatatctacacatggctgcaaagcaaatcgcggaggcgtgcccttgcacatataggctacatagcgcagctgaaggatcggatcagcagccttcgagagtggcaacagagaggaggcagcagcagcagcagcagccagcaggagcgtgctgctgccttgtccttctcgcggcgatcatgcgggccttgcgcccctgaggatgtgctagttggcattgatcagcccagaaaagaactttcggacctcattttcgaaagggaggatgttgtgcatatcgtgcaacagaagcccagggtggtctctgtcgttgggtatagtggcattggcaagacagccctggcaagagcagtctactacgaccgtagtgtccgttctgcctttgacgacgttgcttgggttgtggcatctgagtgcagccatgggtgcgaccttgtaagtaagatctgccagcaggtcaaggacgaacaagcagggaacggtgctgtcgtcgtccctgattgttataggttaaaagagattatgcgggataaaaggtttcttatcgttattgacgaccttcacggagctggcatgtggaacgatataaaaggtgtcttcagtgaaactcacagtggcagtcgaataatcgttaccacgagtattcagtcggtcgccgctgcctgcactcctgagccgcgatacatttacaggatgccaagtcttggtaatttggactctgaaaagctactgtggatgagggtcggcaggcatgcaagccgtacgcctgctctggagcatgctttaggcaacgacaccttgaaaaaatgcggcggtctacctctggcactgatcagtgttgccaatcatttgtgtcttgggaaagcattatttgaggagatggacagggttcttgccaaatgctatgacagcttgcctgacaatgctcacaggatgtgcttgctgtccctgagcacattccctcagggtcatgtgatgaagaggaagaggctaattagaagatggatagctgaaggattggctgtcgtcggagactgtgagctcagtgctgaacaagttgccggtaacatatttgatgtgttgattgacaggaacgttactgagcctgtgctgactgctggccacggttctcgtagtaaggtcaaggcatgcttagttcttggtgtgatcaaggacttcatcaacaaaacggcagtctcaaatgagactgtagctataatccagaacgatgagcttctccttcccaacaggatgctggtcgcccatcgccctgttcgtcgactgcttgttcatggaggcacaacaaagaaaagtgaagctgttgcaaaggcgatcggactggatcagggctgctggttgctgcgggtcttggacctggaggcttgccaggggatcgacaagagcatccttggcagcatatgcaagctggtgtttctcaagtacctgagccttaggggcaccgatgtttacggaatacccaagaaagtaaaaaagctccagtgtttggagacgctggacctcagggacacacgggttgaagaactgcccatccaagtcttgatgctcccacggttggcccatctgtttggcaagtttgagctacctccacagctcaagcatggtcatcgaaccgcaaggaggaggaggagtaggctgcaggcatttttctcccagagaagcaggctgcagactctttcaggattcgtcatggtggatgatagcaacagcttcgagcacatgatgataaccataaagtcactgaggaaggttaaggtatggtgcaagaattcaatctcctcccaccaagaacgccatctcgcttcttcccttcagcaacggctagtagcaggaaacagtaatcccctagaatctctgtcaattgattttggcaatgaatccatcaatttcctcaatgatgttggagctatcagtgcacttattggctctatgaagctacagggaaggctaacctcgctccctagcttcatgacttcgtacgatactacactctcccagctgcagctgtcctcaactggtttgggcatagaagccttgtccctgctgcagatcttacgtcggctggtttctctgaagctcgctcaggatggtgatggattttggggtgactgcttcgctgttaagaaggatggatttccaagccttttacgcctgtgcattcaggccagggagcttccccagttgcacatccatgaaggaggcatgagctctctcacctccctcgaactactctgtcccatgttcgctagtcgcggtcaatctgactctgactctgactctgactctgacaatctgtccccagttgcatttcggtacgcgtacgcggaaacctattcagagaagagatccaaacaagttctttcggtagagaagcccaaagcagttgatcccgggatcagcttcaaggaaccaagttctgagacaagatcagaaggaactgaaattcaggagattgattcccctaaaacgtccaaggaggctggtcccagcataggcttcaaggaaccaagttctgagacaagatcagaaggaactgaaattcaggagattgattcccctaaaacgtccaaggaggctggtcccagcataggcttcaaggatattattcttccggagaacacattcagaagaaacttttcgaagcaagtcaaaagtagatttgatctgaaacaacacttcaagggaatggagtacctccaatgtctcaatgagctggtactacatcgttctgttagcgacgaggtattggatgcctggacaaaacgagcaagcagtcacatcaataggccaaaggtgacaaggcaatgcacaagagcagcgctgtcgattggtagaggcccgggaacagcgaagcacgagaaagaagggcagcacagaagccagctcatgaaaaatagaggttcagaaacagcaatccatgaggaggtagcagagcaacacagctcagtagaaacgagccgtgaggaagcaggattattccaagaacagacctcagatacaagtcacaaagaagaagaagaagaagaaggagaaggagaagaagaagaagaagaagaagaagaagaagaagaagaagaatgtactagtgaagtaggagcgggtaaacacagctcagtaggaacgagccgtgaggaagcaggattattccaagaacagacctcagatacaggtcacaaagaagaagaagaagaatatatgagtgaagactgggcattaagtcaaccatgcgacatgctcattggcaacaggatgaccgtacgatgtctaggatggccagattcttggcgactacgaagtggcatgatatcttcccccatgctgatctgcaggccattgggtccgtgacctcagatcattgtcccttacttatgcaaggtttatctacctttagtttctatagggggtttagatttgaagttttttggacaaaaattgatgggttcaatgaggtggttcagcaagcttggacatctagtgttcgttcttccgatgccattcttaggctgcatgtgaagatgatccgcacggctaaagctctattgatctggagacgaaagacagtaggcaattttaaagatcaattagcaatcattcagaccgtccttactcttcttgagaaagcacaggaatccaggcaactttccggggacgagctagagttcagaagaagtctaaaaatgaaaatccttgggctagtgacagtccaaaaggcaagagctagacaacattccagacttgtctggatgcgtctgagagatgcaaacacaaaaaaaattcatctgatggcaaataatagaagaaggaaaattttcatcagatcgctggttcgtgatgacaggttgctcaccagtcaggaagacaaactgcatgaggcccaccatcatttcactgaagctattggtagaaggggtgagagacagagggccgttcggtggggtaacctaggctatagtccatttgacttatcagatctggatttcttgttcaacgaggatgagattaaaaatgtggttatagggatgcactctgaaaaggcgccgggtcgagatggttttatagggatcttctataagagttgttttgagctgattaaggatgatctatcaagtgcaattcatgatttctatcaccatagatgcaaaaacctaaacctcgttaatgaggcaaatatcgcgcttttacaaaaaaagggagggtgctgacaggattgacatgtttaggccgatcagtctcatcaatagcttcataaaaatattgaccaagattttagcaaacagacttgcgccaagaatgaatgagattgtctccactgcccaaaacgcgttcattcaaaaacgttcaattcatgataattttctctatgtccaaaaagttattcagaaacttcataggaacaatcagccaaccctttttgtcaaacttgacatatcaaaagctttcgattccatcaactgggcatatctgttagaggtactgagagctctaggtttttcccagaaatggagaaattggatcgcaacaatattagggtcttcctcttcaaaaatcatcatcaacggtcaacaaacaaatgcaattaagcacatgcgtggcgttcgtcagggtgacccgctatcctcgttcctgtttattctagcaatggaccctctgcagaggatgattgagatggcggcagatgctgggcttctggggcgggttctgccaaataaggctaaactgcgttgttctctttatgcaaatgatgcaggtgtgtttgttagagcagataaagaggatctgaacgaattgaaaaggattctggaagtttttgaagggtgttcagggctgaagatcaatttcgataaaaccaaaattttcccgattcgttacccccaaactctttggccagatctgatggag

SEQ ID NO: 42425 - DNA, 5094 bp, Zea Mays
atgtcgatacatatttgcaagaacggttatatgccaggctatgaggtgtgggtgcaccatggttgggtcacccgcagatcaaggagtactggtgttggccttctgatggccgtgcgagggtccacatacatgatcaggcaatatataaaggagccaggattcaatgtagcgaatgagatggcatccatcaaccaggagataagacagattggtagaatgatggtcatatcaggcaatatattggagccgccggaatggattctgcaagcccaagacctggcctgtgatgtgcaggatttcacggatatctacacatggctgcaaagcaaatcgcggaggcgtgcccttgcacatataggctacatagcgcagctgaaggatcggatcagcagccttcgagagtggcaacagagaggaggcagcagcagcagcagcagccagcaggagcgtgctgctgccttgtccttctcgcggcgatcatgcgggccttgcgcccctgaggatgtgctagttggcattgatcagcccagaaaagaactttcggacctcattttcgaaagggaggatgttgtgcatatcgtgcaacagaagcccagggtggtctctgtcgttgggtatagtggcattggcaagacagccctggcaagagcagtctactacgaccgtagtgtccgttctgcctttgacgacgttgcttgggttgtggcatctgagtgcagccatgggtgcgaccttgtaagtaagatctgccagcaggtcaaggacgaacaagcagggaacggtgctgtcgtcgtccctgattgttataggttaaaagagattatgcgggataaaaggtttcttatcgttattgacgaccttcacggagctggcatgtggaacgatataaaaggtgtcttcagtgaaactcacagtggcagtcgaataatcgttaccacgagtattcagtcggtcgccgctgcctgcactcctgagccgcgatacatttacaggatgccaagtcttggtaatttggactctgaaaagctactgtggatgagggtcggcaggcatgcaagccgtacgcctgctctggagcatgctttaggcaacgacaccttgaaaaaatgcggcggtctacctctggcactgatcagtgttgccaatcatttgtgtcttgggaaagcattatttgaggagatggacagggttcttgccaaatgctatgacagcttgcctgacaatgctcacaggatgtgcttgctgtccctgagcacattccctcagggtcatgtgatgaagaggaagaggctaattagaagatggatagctgaaggattggctgtcgtcggagactgtgagctcagtgctgaacaagttgccggtaacatatttgatgtgttgattgacaggaacgttactgagcctgtgctgactgctggccacggttctcgtagtaaggtcaaggcatgcttagttcttggtgtgatcaaggacttcatcaacaaaacggcagtctcaaatgagactgtagctataatccagaacgatgagcttctccttcccaacaggatgctggtcgcccatcgccctgttcgtcgactgcttgttcatggaggcacaacaaagaaaagtgaagctgttgcaaaggcgatcggactggatcaggtcaggtcgctgacaatctgcaatgctgtgccctttgacttccagggctgctggttgctgcgggtcttggacctggaggcttgccaggggatcgacaagagcatccttggcagcatatgcaagctggtgtttctcaagtacctgagccttaggggcaccgatgtttacggaatacccaagaaagtaaaaaagctccagtgtttggagacgctggacctcagggacacacgggttgaagaactgcccatccaagtcttgatgctcccacggttggcccatctgtttggcaagtttgagctacctccacagctcaagcatggtcatcgaaccgcaaggaggaggaggagtaggctgcaggcatttttctcccagagaagcaggctgcagactctttcaggattcgtcatggtggatgatagcaacagcttcgagcacatgatgataaccataaagtcactgaggaaggttaaggtatggtgcaagaattcaatctcctcccaccaagaacgccatctcgcttcttcccttcagcaacggctagtagcaggaaacagtaatcccctagaatctctgtcaattgattttggcaatgaatccatcaatttcctcaatgatgttggagctatcagtgcacttattggctctatgaagctacagggaaggctaacctcgctccctagcttcatgacttcgtacgatactacactctcccagctgcagctgtcctcaactggtttgggcatagaagccttgtccctgctgcagatcttacgtcggctggtttctctgaagctcgctcaggatggtgatggattttggggtgactgcttcgctgttaagaaggatggatttccaagccttttacgcctgtgcattcaggccagggagcttccccagttgcacatccatgaaggaggcatgagctctctcacctccctcgaactactctgtcccatgttcgctagtcgcggtcaatctgactctgactctgactctgactctgacaatctgtccccagttgcatttcggtacgcgtacgcggaaacctattcagagaagagatccaaacaagttctttcggtagagaagcccaaagcagttgatcccgggatcagcttcaaggaaccaagttctgagacaagatcagaaggaactgaaattcaggagattgattcccctaaaacgtccaaggaggctggtcccagcataggcttcaaggaaccaagttctgagacaagatcagaaggaactgaaattcaggagattgattcccctaaaacgtccaaggaggctggtcccagcataggcttcaaggatattattcttccggagaacacattcagaagaaacttttcgaagcaagtcaaaagtagatttgatctgaaacaacacttcaagggaatggagtacctccaatgtctcaatgagctggtactacatcgttctgttagcgacgaggtattggatgcctggacaaaacgagcaagcagtcacatcaataggccaaaggtgacaaggcaatgcacaagagcagcgctgtcgattggtagaggcccgggaacagcgaagcacgagaaagaagggcagcacagaagccagctcatgaaaaatagaggttcagaaacagcaatccatgaggaggtagcagagcaacacagctcagtagaaacgagccgtgaggaagcaggattattccaagaacagacctcagatacaggtcacaaagaagaagaagaagaatatatgagtgaagactgggcattaagtcaaccatgcgacatgctcattggcaacaggatgaccgtacgatgtctaggatggccagattcttggcgactacgaagtggcatgatatcttcccccatgctgatctgcaggccattgggtccgtgacctcagatcattgtcccttacttatgcaaggtttatctacctttagtttctatagggggtttagatttgaagttttttggacaaaaattgatgggttcaatgaggtggttcagcaagcttggacatctagtgttcgttcttccgatgccattcttaggctgcatgtgaagatgatccgcacggctaaagctctattgatctggagacgaaagacagtaggcaattttaaagatcaattagcaatcattcagaccgtccttactcttcttgagaaagcacaggaatccaggcaactttccggggacgagctagagttcagaagaagtctaaaaatgaaaatccttgggctagtgacagtccaaaaggcaagagctagacaacattccagacttgtctggatgcgtctgagagatgcaaacacaaaaaaaattcatctgatggcaaataatagaagaaggaaaattttcatcagatcgctggttcgtgatgacaggttgctcaccagtcaggaagacaaactgcatgaggcccaccatcatttcactgaagctattggtagaaggggtgagagacagagggccgttcggtggggtaacctaggctatagtccatttgacttatcagatctggatttcttgttcaacgaggatgagattaaaaatgtggttatagggatgcactctgaaaaggcgccgggtcgagatggttttatagggatcttctataagagttgttttgagctgattaaggatgatctatcaagtgcaattcatgatttctatcaccatagatgcaaaaacctaaacctcgttaatgaggcaaatatcgcgcttttacaaaaaaagggagggtgctgacaggattgacatgtttaggccgatcagtctcatcaatagcttcataaaaatattgaccaagattttagcaaacagacttgcgccaagaatgaatgagattgtctccactgcccaaaacgcgttcattcaaaaacgttcaattcatgataattttctctatgtccaaaaagttattcagaaacttcataggaacaatcagccaaccctttttgtcaaacttgacatatcaaaagctttcgattccatcaactgggcatatctgttagaggtactgagagctctaggtttttcccagaaatggagaaattggatcgcaacaatattagggtcttcctcttcaaaaatcatcatcaacggtcaacaaacaaatgcaattaagcacatgcgtggcgttcgtcagggtgacccgctatcctcgttcctgtttattctagcaatggaccctctgcagaggatgattgagatggcggcagatgctgggcttctggggcgggttctgccaaataaggctaaactgcgttgttctctttatgcaaatgatgcaggtgtgtttgttagagcagataaagaggatctgaacgaattgaaaaggattctggaagtttttgaagggtgttcagggctgaagatcaatttcgataaaaccaaaattttcccgattcgttacccccaaactctttggccagatctgatggag

SEQ ID NO: 42426 - DNA, 4979 bp, Zea Mays
atgtcgatacatatttgcaagaacggttatatgccaggctatgaggtgtgggtgcaccatggttgggtcacccgcagatcaaggagtactggtgttggccttctgatggccgtgcgagggtccacatacatgatcaggcaatatataaaggagccaggattcaatgtagcgaatgagatggcatccatcaaccaggagataagacagattggtagaatgatggtcatatcaggcaatatattggagccgccggaatggattctgcaagcccaagacctggcctgtgatgtgcaggatttcacggatatctacacatggctgcaaagcaaatcgcggaggcgtgcccttgcacatataggctacatagcgcagctgaaggatcggatcagcagccttcgagagtggcaacagagaggaggcagcagcagcagcagcagccagcaggagcgtgctgctgccttgtccttctcgcggcgatcatgcgggccttgcgcccctgaggatgtgctagttggcattgatcagcccagaaaagaactttcggacctcattttcgaaagggaggatgttgtgcatatcgtgcaacagaagcccagggtggtctctgtcgttgggtatagtggcattggcaagacagccctggcaagagcagtctactacgaccgtagtgtccgttctgcctttgacgacgttgcttgggttgtggcatctgagtgcagccatgggtgcgaccttgtaagtaagatctgccagcaggtcaaggacgaacaagcagggaacggtgctgtcgtcgtccctgattgttataggttaaaagagattatgcgggataaaaggtttcttatcgttattgacgaccttcacggagctggcatgtggaacgatataaaaggtgtcttcagtgaaactcacagtggcagtcgaataatcgttaccacgagtattcagtcggtcgccgctgcctgcactcctgagccgcgatacatttacaggatgccaagtcttggtaatttggactctgaaaagctactgtggatgagggtcggcaggcatgcaagccgtacgcctgctctggagcatgctttaggcaacgacaccttgaaaaaatgcggcggtctacctctggcactgatcagtgttgccaatcatttgtgtcttgggaaagcattatttgaggagatggacagggttcttgccaaatgctatgacagcttgcctgacaatgctcacaggatgtgcttgctgtccctgagcacattccctcagggtcatgtgatgaagaggaagaggctaattagaagatggatagctgaaggattggctgtcgtcggagactgtgagctcagtgctgaacaagttgccggtaacatatttgatgtgttgattgacaggaacgttactgagcctgtgctgactgctggccacggttctcgtagtaaggtcaaggcatgcttagttcttggtgtgatcaaggacttcatcaacaaaacggcagtctcaaatgagactgtagctataatccagaacgatgagcttctccttcccaacaggatgctggtcgcccatcgccctgttcgtcgactgcttgttcatggaggcacaacaaagaaaagtgaagctgttgcaaaggcgatcggactggatcagggctgctggttgctgcgggtcttggacctggaggcttgccaggggatcgacaagagcatccttggcagcatatgcaagctggtgtttctcaagtacctgagccttaggggcaccgatgtttacggaatacccaagaaagtaaaaaagctccagtgtttggagacgctggacctcagggacacacgggttgaagaactgcccatccaagtcttgatgctcccacggttggcccatctgtttggcaagtttgagctacctccacagctcaagcatggtcatcgaaccgcaaggaggaggaggagtaggctgcaggcatttttctcccagagaagcaggctgcagactctttcaggattcgtcatggtggatgatagcaacagcttcgagcacatgatgataaccataaagtcactgaggaaggttaaggtatggtgcaagaattcaatctcctcccaccaagaacgccatctcgcttcttcccttcagcaacggctagtagcaggaaacagtaatcccctagaatctctgtcaattgattttggcaatgaatccatcaatttcctcaatgatgttggagctatcagtgcacttattggctctatgaagctacagggaaggctaacctcgctccctagcttcatgacttcgtacgatactacactctcccagctgcagctgtcctcaactggtttgggcatagaagccttgtccctgctgcagatcttacgtcggctggtttctctgaagctcgctcaggatggtgatggattttggggtgactgcttcgctgttaagaaggatggatttccaagccttttacgcctgtgcattcaggccagggagcttccccagttgcacatccatgaaggaggcatgagctctctcacctccctcgaactactctgtcccatgttcgctagtcgcggtcaatctgactctgactctgactctgactctgacaatctgtccccagttgcatttcggtacgcgtacgcggaaacctattcagagaagagatccaaacaagttctttcggtagagaagcccaaagcagttgatcccgggatcagcttcaaggaaccaagttctgagacaagatcagaaggaactgaaattcaggagattgattcccctaaaacgtccaaggaggctggtcccagcataggcttcaaggaaccaagttctgagacaagatcagaaggaactgaaattcaggagattgattcccctaaaacgtccaaggaggctggtcccagcataggcttcaaggatattattcttccggagaacacattcagaagaaacttttcgaagcaagtcaaaagtagatttgatctgaaacaacacttcaagggaatggagtacctccaatgtctcaatgagctggtactacatcgttctgttagcgacgaggtattggatgcctggacaaaacgagcaagcagtcacatcaataggccaaaggtgacaaggcaatgcacaagagcagcgctgtcgattggtagaggcccgggaacagcgaagcacgagaaagaagggcagcacagaagccagctcatgaaaaatagaggttcagaaacagcaatccatgaggagatacaggtcacaaagaagaagaagaagaatatatgagtgaagactgggcattaagtcaaccatgcgacatgctcattggcaacaggatgaccgtacgatgtctaggatggccagattcttggcgactacgaagtggcatgatatcttcccccatgctgatctgcaggccattgggtccgtgacctcagatcattgtcccttacttatgcaaggtttatctacctttagtttctatagggggtttagatttgaagttttttggacaaaaattgatgggttcaatgaggtggttcagcaagcttggacatctagtgttcgttcttccgatgccattcttaggctgcatgtgaagatgatccgcacggctaaagctctattgatctggagacgaaagacagtaggcaattttaaagatcaattagcaatcattcagaccgtccttactcttcttgagaaagcacaggaatccaggcaactttccggggacgagctagagttcagaagaagtctaaaaatgaaaatccttgggctagtgacagtccaaaaggcaagagctagacaacattccagacttgtctggatgcgtctgagagatgcaaacacaaaaaaaattcatctgatggcaaataatagaagaaggaaaattttcatcagatcgctggttcgtgatgacaggttgctcaccagtcaggaagacaaactgcatgaggcccaccatcatttcactgaagctattggtagaaggggtgagagacagagggccgttcggtggggtaacctaggctatagtccatttgacttatcagatctggatttcttgttcaacgaggatgagattaaaaatgtggttatagggatgcactctgaaaaggcgccgggtcgagatggttttatagggatcttctataagagttgttttgagctgattaaggatgatctatcaagtgcaattcatgatttctatcaccatagatgcaaaaacctaaacctcgttaatgaggcaaatatcgcgcttttacaaaaaaagggagggtgctgacaggattgacatgtttaggccgatcagtctcatcaatagcttcataaaaatattgaccaagattttagcaaacagacttgcgccaagaatgaatgagattgtctccactgcccaaaacgcgttcattcaaaaacgttcaattcatgataattttctctatgtccaaaaagttattcagaaacttcataggaacaatcagccaaccctttttgtcaaacttgacatatcaaaagctttcgattccatcaactgggcatatctgttagaggtactgagagctctaggtttttcccagaaatggagaaattggatcgcaacaatattagggtcttcctcttcaaaaatcatcatcaacggtcaacaaacaaatgcaattaagcacatgcgtggcgttcgtcagggtgacccgctatcctcgttcctgtttattctagcaatggaccctctgcagaggatgattgagatggcggcagatgctgggcttctggggcgggttctgccaaataaggctaaactgcgttgttctctttatgcaaatgatgcaggtgtgtttgttagagcagataaagaggatctgaacgaattgaaaaggattctggaagtttttgaagggtgttcagggctgaagatcaatttcgataaaaccaaaattttcccgattcgttacccccaaactctttggccagatctgatggag

SEQ ID NO: 42427 - DNA, 1639 bp, Zea Mays
ccggcccatcctgtcgtcgaggcgaaccacggaagctagctagctgcagctatagaagcctagaacagaccgctgctcgatggcgcctgctgctaggacgcgagtgtgcttggtcgcgctggtggtggctctagcgtttctcttcctcttggacggcggtgtgcatgccgcgtcgtcggcggcagagcagcggcggcgacaggttcggagcctgctcaggcgtctcaacaagcccgctgtcgcgaccatcgagagcccagatggagataccatagactgtgtggacatctcgaaacagcctgcgttcgaccatccttccctcaagaaccataccattcagatgatgccctcctgccacccacaacaaggcggcctctataacaagtcaaacgacgttgcgcacagtgctttgacgcaaacatggcatcagaatggcaagtgcccagagaacacagtgccaatccggaggaccagagaagaggacgtcctcgacatcgtccagagatatggcagaaagaagtggccatcgtcttggagcaacgaccctaaccgttatgacgacgacgtcccggacgcagcgagcgtactaagaggccaccagcatgcaatagcatctgcaccgggggatgacaactactatggtacccaagcaaccttcaacctgtgggaaccaacggttgagaggaaccaaggattcagtttggcccagctgtggattaccagtggatcctacgcaaacaacgacctcaatactatagaagcagggtggcaggtctgtacaaggatagccatacaagactcttcgtctactggactcgggatgcgtacaacaaaacaggatgttacaacctaatatgctcagggtttgtacagacaagcaaccagatcgccatcggcgctagcaactcctatttttcccctgtctccatctatggtggctcacagtatgacatcactattttagtttggaaggacccaaagcaaggcaattggtggttgcaagtaggaggccaggatttgggctactggccatcatcgatcttctctaagttgtcaggcagcgcagcctctgtcgactggggaggtgaagtggcatcgtcgccggatgccggccaaacatccacacagatgggtagcggacacttccctgatgaaggtttcagcaaggccagctacatcaagaacatccaattggtagattcgaccaacagtctcaaatcggctagtggtgtgaagttgacagctaagtggcccatgtgctacaatgttcaaaacggtactagtgctgattggggcacttacatcttctatggaggacccgggaagaaccctaactgcccatagtaaaaattcaactggttgccgcgcccaaacgtctcattgatacaggaatagatctacgtacttgtgaaatgcattatgtcctagtcggtgccgaataattataattaggatcatgtcaatggatgtcgtagtatagtatgcattttcactcgtgttgcaaaggtaaattgatacatatacgtctacattgtagctgtaaacaaaaatggatgtttgaaggatataaccaccaccagagaatgggacatcaataccatctggaaccgattacagtatcggattccaaacgttgcta

SEQ ID NO: 42428 - DNA, 504 bp, Zea Mays
cttattagtcgtcatcgtggccaccgctcgctgcgccatggtggaccaccgaagcaatgcacctaccgaaggacggggagcgcgcgagggcagtggtaccgcggggggtggccggccgtttttaaggaaatgtgacttgactgaacatctaaagcagctccagtgtagaaccttgatttttgtcagcgagaattctcagttaaactctgagaccgttcacttgacatcgaagctcgacatgagatattgtgctctagttgaggcaactaacaatcatctacgtgtttaccactatacatccttttttgcaactattatgtctacctatggtaccatttatgcatactacaaaggctgatttacgctaaaagtttacacatttacgctgttttggttcatgttttacactgaaatccgtatgagccagaaacagggcacaatcagatatgcgtgatttttatgctataattttgggcaccattcgctgttatgaaacaaatcgat

SEQ ID NO: 42429 - DNA, 1263 bp, Zea Mays
cccccacgggatcatatcaccaatcgccctcgtctcctcacgccaatccaaaccctagccgtcgccaatatgcagctccatcctggtgctcgcccagatgagtcgccccgcaaggagagaacgtgactaggtctagcaggagacagagcttcctgttccatctccaccgcaatcgatcgtgccaattaacaggctcccaaggaggagatccaatcttgctagcgggcgtccccattgcccatccatcgatctgaatctgcagttaccaatcaaccactggctgaatcagctctcggcctgcccggccttatctccaccggtacaggctagtgaccaccgccgctaggagcacctcgccaggaacgtgcgtacctccctccagtgtatccttcaacccgccatgaatttcttggtttcactcgctggatgatcgactgactgacacacgtactctcctgtctttaagtcaatccatgatcctatccacatcaagcgtggcaatcaatcatcaaatagtatttttctttggtcggttccatcaagcgtggcagtaatgttttgttcttgcaaattatagatgtaaattcagatcaagtatatgcatttgtagtttatatcacaaagggaaactaaacatttcgagctgcaagatcccactgtatgcattattactgtacatatagaacaaaaattgcattcatttcacctttcacacccaaaatcgcatccccttcaatcgtttgaaggatccttggtgtgaggtgaagtcgatctaacacactgttgatttcatcttgattctcctattctcttcattctcgagctcattgcaaacttaaccttgtgcgtatttgttactcttagaaccttgtgttccttgatggttagaggttgcttgggagtctccaaatttgtgaacgaccccaagaagtttgtatcacccactctttgagcaaatttgagaagagactgccttgaccttggtggtcggcttgtggaggattagggttggaaaagacccggccctttgtgggctcctcaacgaggagtaggatacctttgtggtgattgccgaacctcgggttaaatcgtgtgttcttgtgtgttcttgataagcactttaattggttggttagttcatattcggttatattgtgtgcaaatcgtgtgaaaacaattcacatcgatttgtcatctatttgagtggattttctctaggacaagactttagcatattctctaactacttcgtcacatttgttt

SEQ ID NO: 42430 - DNA, 1229 bp, Zea Mays
cccaagcgctacccggctagccccattcacccccacgggatcatatcaccaatcgccctcgtctcctcacgccaatccaaaccctagccgtcgccaatatgcagctccatcctggtgctcgcccagatgagtcgccccgcaaggagagaacgtgactaggtctagcaggagacagagcttcctgttccatctccaccgcaatcgatcgtgccaattaacaggctcccaaggaggagatccaatcttgctagcgggcgtccccattgcccatccatcgatctgaatctgcaggctagtgaccaccgccgctaggagcacctcgccaggaacgtgcgtacctccctccagtgtatccttcaacccgccatgaatttcttggtttcactcgctggatgatcgactgactgacacacgtactctcctgtctttaagtcaatccatgatcctatccacatcaagcgtggcaatcaatcatcaaatagtatttttctttggtcggttccatcaagcgtggcagtaatgttttgttcttgcaaattatagatgtaaattcagatcaagtatatgcatttgtagtttatatcacaaagggaaactaaacatttcgagctgcaagatcccactgtatgcattattactgtacatatagaacaaaaattgcattcatttcacctttcacacccaaaatcgcatccccttcaatcgtttgaaggatccttggtgtgaggtgaagtcgatctaacacactgttgatttcatcttgattctcctattctcttcattctcgagctcattgcaaacttaaccttgtgcgtatttgttactcttagaaccttgtgttccttgatggttagaggttgcttgggagtctccaaatttgtgaacgaccccaagaagtttgtatcacccactctttgagcaaatttgagaagagactgccttgaccttggtggtcggcttgtggaggattagggttggaaaagacccggccctttgtgggctcctcaacgaggagtaggatacctttgtggtgattgccgaacctcgggttaaatcgtgtgttcttgtgtgttcttgataagcactttaattggttggttagttcatattcggttatattgtgtgcaaatcgtgtgaaaacaattcacatcgatttgtcatctatttgagtggattttctctaggacaagactttagcatattctctaactacttcgtcacatttgttt

SEQ ID NO: 42431 - DNA, 2267 bp, Zea Mays
gccgattaccataaagacttggcccatcacgtttacgggccgctaggaggaaaagaggccgacatccctgctagcctctcgttgtagtaaggagaagaaaaaaaaacaagaataataaaaagccgggccccggccgaagaaacttgcgagcaacccggcgaaagccccccaaaccctcgcaccctaaaacagcggcgcacaagatgtccgacgaccccaccaacggcggcggcggtgatcgcgtggaggacgtcgtccgcgccgagggtgaaacacaacctcgtgatgatggcttgtcgaaatccaaggatagggacaaagatagagaaaaggacaaggacagagatcgtcgccgagaccgtgacagagatcgagggagagacagggaccgtgatagggatagggacagggacagggatcgggacagagacaaggatcgccaaagtaggcatcaccgtgaaagacgggaacagcgagaccgtcctgatgatcacagagtccgtgattctgaaagaagaagagaacgcgacaaagatgggcatcgtaggcatcgttctcggtctcgttcaaggggtagagatcgaagatctaggtcacgttcaagaagcaagcgagttagtggattcgacgccccacccccgcaagcaatgggttcaacatttccagttattccaaccccaagcaaccatgtatggtaacaaggccaatcttgggtcacttgcctcacttctaccagtggaatgagctgcctactatagctttaatgtacaaggaagaatcagtgcgccggtttgatatcgtcatgttcatcttcaactagctagtactaggtcagttaccaggctcttcgcttcccaacattggtggcatgtttccaaacatgctccctttcggtgttgctgggcagttcaatccccttgtcatccagccacaagcaatgactcaacaggctactcgtcatgctcggcgtgtttatgtcggtggccttcctccatctgctaacgaacagacagtggcaatttactttaatcaagtcatggctgctattgggggaaacactgctggtccaggtgatgctgttctcaatgtatacataaatcatgacaagaaatttgcttttgtggagatgagatctgttgaggaagcaagcaatgcaatggccctggatggcattatgttcgaaggggcaccggtgaaggttagaaggccaacagactacaacccttcccttgcagccgccctgggcccaagccagccaagccccaatctgaatcttgctgcagttggcctaacagcaggatctaatggaggactagaaggtccagaccgtatttttgtgggtggcctcccgtattacttcactgaagcgcaagttcgggagttgcttgaatcattcggtcctcttcgagggtttgatcttgtgaaggatagggaaactggtaactcaaaaggctatgcattctgtgtttaccaggacctcaccgtcactgacatcgcttgtgctgcactaaatggtatcaagatgggtgacaaaacccttactgtcagacgagcaaaccagggggcatctcagcccagaccagagcaggaaagtatcctattgcaggcacaacaacaggtgcagttgcagaaacttgtgtatcaagttggagcgcttcctacaaaggttgtatgcctcacacaggtggtaactgcagatgaattgaaagatgatgaagagtatgaggacattatggaagacatgaggctagaagcaggcaaatatggtaatttggtgaaagttatcatcccacgccctgaccccagcggacagccagttgtaggagttgggaaggtgttcctggaatatgcagatatcgatggtgctgccaaagcaaagacagcgctgcatggaaggaaatttggtgggaacccagtggtcgctgtctgctatgcggaggacaagtttgccaatggggaatatgatggatgaaaatcttatccctcttgaactatagcagtagccggtctttgtctttggctctatgctacctgcttgtttaattgcaacaaagatgaacggtctctcatttaagctgaacctctacctgtattgatatccctggattttttctgagccaccacctgttgtgatttgtgaacgttgtaagaataggtttctttgcttgggttcgcttgttgctgtcgaaaatatgtaacgaatgttattaataaagaatttcttgtatgactttactaccgtgtgtttgatttggtttgagtttttt

SEQ ID NO: 42432 - DNA, 2270 bp, Zea Mays
gccgattaccataaagacttggcccatcacgtttacgggccgctaggaggaaaagaggccgacatccctgctagcctctcgttgtagtaaggagaagaaaaaaaaacaagaataataaaaagccgggccccggccgaagaaacttgcgagcaacccggcgaaagccccccaaaccctcgcaccctaaaacagcggcgcacaagatgtccgacgaccccaccaacggcggcggcggtgatcgcgtggaggacgtcgtccgcgccgagggtgaaacacaacctcgtgatgatggcttgtcgaaatccaaggatagggacaaagatagagaaaaggacaaggacagagatcgtcgccgagaccgtgacagagatcgagggagagacagggaccgtgatagggatagggacagggacagggatcgggacagagacaaggatcgccaaagtaggcatcaccgtgaaagacgggaacagcgagaccgtcctgatgatcacagagtccgtgattctgaaagaagaagagaacgcgacaaagatgggcatcgtaggcatcgttctcggtctcgttcaaggggtagagatcgaagatctaggtcacgttcaagaagcaagcgagttagtggattcgacgccccacccccgcaagcaatgggttcaacatttccagttattccaaccccaaaaggcaaccatgtatggtaacaaggccaatcttgggtcacttgcctcacttctaccagtggaatgagctgcctactatagctttaatgtacaaggaagaatcagtgcgccggtttgatatcgtcatgttcatcttcaactagctagtactaggtcagttaccaggctcttcgcttcccaacattggtggcatgtttccaaacatgctccctttcggtgttgctgggcagttcaatccccttgtcatccagccacaagcaatgactcaacaggctactcgtcatgctcggcgtgtttatgtcggtggccttcctccatctgctaacgaacagacagtggcaatttactttaatcaagtcatggctgctattgggggaaacactgctggtccaggtgatgctgttctcaatgtatacataaatcatgacaagaaatttgcttttgtggagatgagatctgttgaggaagcaagcaatgcaatggccctggatggcattatgttcgaaggggcaccggtgaaggttagaaggccaacagactacaacccttcccttgcagccgccctgggcccaagccagccaagccccaatctgaatcttgctgcagttggcctaacagcaggatctaatggaggactagaaggtccagaccgtatttttgtgggtggcctcccgtattacttcactgaagcgcaagttcgggagttgcttgaatcattcggtcctcttcgagggtttgatcttgtgaaggatagggaaactggtaactcaaaaggctatgcattctgtgtttaccaggacctcaccgtcactgacatcgcttgtgctgcactaaatggtatcaagatgggtgacaaaacccttactgtcagacgagcaaaccagggggcatctcagcccagaccagagcaggaaagtatcctattgcaggcacaacaacaggtgcagttgcagaaacttgtgtatcaagttggagcgcttcctacaaaggttgtatgcctcacacaggtggtaactgcagatgaattgaaagatgatgaagagtatgaggacattatggaagacatgaggctagaagcaggcaaatatggtaatttggtgaaagttatcatcccacgccctgaccccagcggacagccagttgtaggagttgggaaggtgttcctggaatatgcagatatcgatggtgctgccaaagcaaagacagcgctgcatggaaggaaatttggtgggaacccagtggtcgctgtctgctatgcggaggacaagtttgccaatggggaatatgatggatgaaaatcttatccctcttgaactatagcagtagccggtctttgtctttggctctatgctacctgcttgtttaattgcaacaaagatgaacggtctctcatttaagctgaacctctacctgtattgatatccctggattttttctgagccaccacctgttgtgatttgtgaacgttgtaagaataggtttctttgcttgggttcgcttgttgctgtcgaaaatatgtaacgaatgttattaataaagaatttcttgtatgactttactaccgtgtgtttgatttggtttgagtttttt

SEQ ID NO: 42433 - DNA, 1926 bp, Zea Mays
gccgattaccataaagacttggcccatcacgtttacgggccgctaggaggaaaagaggccgacatccctgctagcctctcgttgtagtaaggagaagaaaaaaaaacaagaataataaaaagccgggccccggccgaagaaacttgcgagcaacccggcgaaagccccccaaaccctcgcaccctaaaacagcggcgcacaagatgtccgacgaccccaccaacggcggcggcggtgatcgcgtggaggacgtcgtccgcgccgagcaagcgagttagtggattcgacgccccacccccgcaagcaatgggttcaacatttccagttattccaaccccaagcaaccatgtatggtaacaaggccaatcttgggtcacttgcctcacttctaccagtggaatgagctgcctactatagctttaatgtacaaggaagaatcagtgcgccggtttgatatcgtcatgttcatcttcaactagctagtactaggtcagttaccaggctcttcgcttcccaacattggtggcatgtttccaaacatgctccctttcggtgttgctgggcagttcaatccccttgtcatccagccacaagcaatgactcaacaggctactcgtcatgctcggcgtgtttatgtcggtggccttcctccatctgctaacgaacagacagtggcaatttactttaatcaagtcatggctgctattgggggaaacactgctggtccaggtgatgctgttctcaatgtatacataaatcatgacaagaaatttgcttttgtggagatgagatctgttgaggaagcaagcaatgcaatggccctggatggcattatgttcgaaggggcaccggtgaaggttagaaggccaacagactacaacccttcccttgcagccgccctgggcccaagccagccaagccccaatctgaatcttgctgcagttggcctaacagcaggatctaatggaggactagaaggtccagaccgtatttttgtgggtggcctcccgtattacttcactgaagcgcaagttcgggagttgcttgaatcattcggtcctcttcgagggtttgatcttgtgaaggatagggaaactggtaactcaaaaggctatgcattctgtgtttaccaggacctcaccgtcactgacatcgcttgtgctgcactaaatggtatcaagatgggtgacaaaacccttactgtcagacgagcaaaccagggggcatctcagcccagaccagagcaggaaagtatcctattgcaggcacaacaacaggtgcagttgcagaaacttgtgtatcaagttggagcgcttcctacaaaggttgtatgcctcacacaggtggtaactgcagatgaattgaaagatgatgaagagtatgaggacattatggaagacatgaggctagaagcaggcaaatatggtaatttggtgaaagttatcatcccacgccctgaccccagcggacagccagttgtaggagttgggaaggtgttcctggaatatgcagatatcgatggtgctgccaaagcaaagacagcgctgcatggaaggaaatttggtgggaacccagtggtcgctgtctgctatgcggaggacaagtttgccaatggggaatatgatggatgaaaatcttatccctcttgaactatagcagtagccggtctttgtctttggctctatgctacctgcttgtttaattgcaacaaagatgaacggtctctcatttaagctgaacctctacctgtattgatatccctggattttttctgagccaccacctgttgtgatttgtgaacgttgtaagaataggtttctttgcttgggttcgcttgttgctgtcgaaaatatgtaacgaatgttattaataaagaatttcttgtatgactttactaccgtgtgtttgatttggtttgagtttttt

SEQ ID NO: 42434 - DNA, 1917 bp, Zea Mays
gccgattaccataaagacttggcccatcacgtttacgggccgctaggaggaaaagaggccgacatccctgctagcctctcgttgtagtaaggagaagaaaaaaaaacaagaataataaaaagccgggccccggccgaagaaacttgcgagcaacccggcgaaagccccccaaaccctcgcaccctaaaacagcggcgcacaagatgtccgacgaccccaccaacggcggcggcggtgatcgcgtggaggacgtcgtccgcgccgagaagaagagaacgcgacaaagatgggcatcgtaggcatcgttctcggtctcgttcaaggggtagagatcgaagatctaggtcacgttcaagaagcaagcgagttagtggattcgacgccccacccccgcaagcaatgggttcaacatttccagttattccaaccccaagcaaccatgtatggtaacaaggccaatcttgggtcacttgcctcacttctaccagtggaatgagctgcctactatagctttaatgtacaaggaagaatcagtgcgccggtttgatatcgtcatgttcatcttcaactagctagtactaggtcagttaccaggctcttcgcttcccaacattggtggcatgtttccaaacatgctccctttcggtgttgctgggcagttcaatccccttgtcatccagccacaagcaatgactcaacaggctactcgtcatgctcggcgtgtttatgtcggtggccttcctccatctgctaacgaacagacagtggcaatttactttaatcaagtcatggctgctattgggggaaacactgctggtccaggtgatgctgttctcaatgtatacataaatcatgacaagaaatttgcttttgtggagatgagatctgttgaggaagcaagcaatgcaatggccctggatggcattatgttcgaaggggcaccggtgaaggttagaaggccaacagactacaacccttcccttgcagccgccctgggcccaagccagccaagccccaatctgaatcttgctgcagttggcctaacagcaggatctaatggaggactagaaggtccagaccgtatttttgtgggtggcctcccgtattacttcactgaagcgcaagacctcaccgtcactgacatcgcttgtgctgcactaaatggtatcaagatgggtgacaaaacccttactgtcagacgagcaaaccagggggcatctcagcccagaccagagcaggaaagtatcctattgcaggcacaacaacaggtgcagttgcagaaacttgtgtatcaagttggagcgcttcctacaaaggttgtatgcctcacacaggtggtaactgcagatgaattgaaagatgatgaagagtatgaggacattatggaagacatgaggctagaagcaggcaaatatggtaatttggtgaaagttatcatcccacgccctgaccccagcggacagccagttgtaggagttgggaaggtgttcctggaatatgcagatatcgatggtgctgccaaagcaaagacagcgctgcatggaaggaaatttggtgggaacccagtggtcgctgtctgctatgcggaggacaagtttgccaatggggaatatgatggatgaaaatcttatccctcttgaactatagcagtagccggtctttgtctttggctctatgctacctgcttgtttaattgcaacaaagatgaacggtctctcatttaagctgaacctctacctgtattgatatccctggattttttctgagccaccacctgttgtgatttgtgaacgttgtaagaataggtttctttgcttgggttcgcttgttgctgtcgaaaatatgtaacgaatgttattaataaagaatttcttgtatgactttactaccgtgtgtttgatttggtttgagtttttt

SEQ ID NO: 42435 - DNA, 2016 bp, Zea Mays
gccgattaccataaagacttggcccatcacgtttacgggccgctaggaggaaaagaggccgacatccctgctagcctctcgttgtagtaaggagaagaaaaaaaaacaagaataataaaaagccgggccccggccgaagaaacttgcgagcaacccggcgaaagccccccaaaccctcgcaccctaaaacagcggcgcacaagatgtccgacgaccccaccaacggcggcggcggtgatcgcgtggaggacgtcgtccgcgccgagggtgaaacacaacctcgtgatgatggcttgtcgaaatccaaggatagggacaaagatagagaaaaggacaaggacagagatcgtcgccgagaccgtgacagagatcgagggagagacagggaccgtgatagggatagggacagggacagggatcgggacagagacaaggatcgccaaagtaggcatcaccgtgaaagacgggaacagcgagaccgtcctgatgatcacagagtccgtgattctgaaagaagaagagaacgcgacaaagatgggcatcgtaggcatcgttctcggtctcgttcaaggggtagagatcgaagatctaggtcacgttcaagaagcaagcgagttagtggattcgacgccccacccccgcaagcaatgggttcaacatttccagttattccaaccccaagtcagttaccaggctcttcgcttcccaacattggtggcatgtttccaaacatgctccctttcggtgttgctgggcagttcaatccccttgtcatccagccacaagcaatgactcaacaggctactcgtcatgctcggcgtgtttatgtcggtggccttcctccatctgctaacgaacagacagtggcaatttactttaatcaagtcatggctgctattgggggaaacactgctggtccaggtgatgctgttctcaatgtatacataaatcatgacaagaaatttgcttttgtggagatgagatctgttgaggaagcaagcaatgcaatggccctggatggcattatgttcgaaggggcaccggtgaaggttagaaggccaacagactacaacccttcccttgcagccgccctgggcccaagccagccaagccccaatctgaatcttgctgcagttggcctaacagcaggatctaatggaggactagaaggtccagaccgtatttttgtgggtggcctcccgtattacttcactgaagcgcaagacctcaccgtcactgacatcgcttgtgctgcactaaatggtatcaagatgggtgacaaaacccttactgtcagacgagcaaaccagggggcatctcagcccagaccagagcaggaaagtatcctattgcaggcacaacaacaggtgcagttgcagaaacttgtgtatcaagttggagcgcttcctacaaaggttgtatgcctcacacaggtggtaactgcagatgaattgaaagatgatgaagagtatgaggacattatggaagacatgaggctagaagcaggcaaatatggtaatttggtgaaagttatcatcccacgccctgaccccagcggacagccagttgtaggagttgggaaggtgttcctggaatatgcagatatcgatggtgctgccaaagcaaagacagcgctgcatggaaggaaatttggtgggaacccagtggtcgctgtctgctatgcggaggacaagtttgccaatggggaatatgatggatgaaaatcttatccctcttgaactatagcagtagccggtctttgtctttggctctatgctacctgcttgtttaattgcaacaaagatgaacggtctctcatttaagctgaacctctacctgtattgatatccctggattttttctgagccaccacctgttgtgatttgtgaacgttgtaagaataggtttctttgcttgggttcgcttgttgctgtcgaaaatatgtaacgaatgttattaataaagaatttcttgtatgactttactaccgtgtgtttgatttggtttgagtttttt

SEQ ID NO: 42436 - DNA, 2134 bp, Zea Mays
gcgggaggtagcgatagggatccgcggcggcggttgtttgccgggaggctggcaggcacgacgtgcacgaggcggctggaacctcggcggggcagttagccgtgcgcgcgcaggattcgcgggaggcaggggcgagcgggggcagtctacacatgactcttaatatttgtagagataaagaatacctccaagaagacttggggaggtcaatgtcacaatcagcttttatcatgtagtaataagcatctctctaacaagtaacaagtacaaagactagttctttcctcttcccacgacccacatcttctctttctcctgtaaaagaaaagaaagggcaatcccatggcaaaaacttcggaagtgattgcagggatagccctgggcatcccactaatgaacggggtgctggtacccatcatcaccatcctcgtgaacagattcttctccatcctcctcaccgacacatccagaaaactcagtaacctggagaacctcaccatcccaagtctgaaggagactctggtacaagtggaggagcagaggatggtgagagcacccaaagatgcgcagtccgagtctgatctgaggactctcgatgggctgacgacggagctcaaagctgccttgtacgaagcggaggaaatcctggatctggtagactattaccggatcaagaagagaatagccgatgacgccgaagagaatggaagaagccgctgggtgcagcagaccctccgcgcttttcgcacctctatggcccgctgccagggcagcagctgggtgcggcacctgcacgactgcgtcggcctttgcgtcgcctgctgcaaggggaccttgttcagaagatcaggtgagcagcttccaatctcccatgcgtcctccgtttccatggcgcagaggctccgtggctggtataggcacctcgtgcaccatatccccagcagcagtcgatctgtgatgcagtggctccgtcactggttccagcacctcgtattcaacttcgctaagctatgtgaatccggcactcagacgctccctggtttgccggccgccgatgtgattgcaactaaccaggattggtcatataaagttattggcatcaacagtaatcagaacgatggcacagcaacagcttctttcttgctaaccattgctagacataacttgacgaaaagaatagagcacatagaaaacgttctcaatgatttgaagaaatcacatctgttgaatcagcaaagcaccatcagcagcagcagtaacaaagaaaagagtagcaggcatgaggatattcagtacctgtacagaagcattgagcggaaggtaattggtcgagataaggagcgtgagaagcttatcagtatgcttcgtaggggacctggtccggacacaccaagctccagtagcagtaaacattattctgtgattggtatatatggcattgcagggtctgggaagagtaccctggcacaatatgtctgtgattatgagaaggccgaaggccaacattttgaccctgtcatgttcattcatgtgtctcagacatttagggtggataagatatttcgtgacatgctgagggagatcaggaaggacaggcaatctgacagcaacagtgttaaatgcctacacgatgagctgaaggaaaagttgagaggaaaatgtttcttgttggtactggatgatctctgggtcagtcgtgagaatcaggaggagcgtgctattctacttactgtgctcgatgctgggcagagtggaagtcgggttctggtgacagctcagaagaaagatgtagctgcagcgttaggcgctgaggagcagatcccgattccggatatggaagaggagcagtacttttcgatgttcatgcactacgccctagaagggattaacagacttgtcctgaagggcatcgagcaaactagctcatcagttatgtaatgaagtgatgcaagtaagggtgtgcaagtgtgccttcaactaataacagaaaagaagaaaagaaaatagagaattgaacaacttcaggagtactttagaacaatgtacaataaagtatggttgcttctatattaattgtaggctaatgttgtctattaatttacaatgatattttttagggaaatacagtagcgag

SEQ ID NO: 42437 - DNA, 1925 bp, Zea Mays
gcgggaggtagcgatagggatccgcggcggcggttgtttgccgggaggctggcaggcacgacgtgcacgaggcggctggaacctcggcggggcagttagccgtgcgcgcgcaggattcgcgggaggcaggggcgagcgggggcagtctacacatgactcttaatatttgtagagataaagaatacctccaagaagacttggggaggtcaatgtcacaatcagcttttatcatgtagtaataagcatctctctaacaagtaacaagtacaaagactagttctttcctcttcccacgacccacatcttctctttctcctgtaaaagaaaagaaagggcaatcccatggcaaaaacttcggaagtgattgcagggatagccctgggcatcccactaatgaacggggtgctggtacccatcatcaccatcctcgtgaacagattcttctccatcctcctcaccgacacatccagaaaactcagtaacctggagaacctcaccatcccaagtctgaaggagactctggtacaagtggaggagcagaggatggtgagagcacccaaagatgcgcagtccgagtctgatctgaggactctcgatgggctgacgacggagctcaaagctgccttgtacgaagcggaggaaatcctggatctggtagactattaccggatcaagaagagaatagccgatgacgccgaagagaatggaagaagccgctgggtgcagcagaccctccgcgcttttcgcacctctatggcccgctgccagggcagcagctgggtgcggcacctgcacgactgcgtcggcctttgcgtcgcctgctgcaaggggaccttgttcagaagatcaggtgagcagcttccaatctcccatgcgtcctccgtttccatggcgcagaggctccgtggctggtataggcacctcgtgcaccatatccccagcagcagtcgatctgtgatgcagtggctccgtcactggttccagcacctcgtattcaacttcgctaagctatgtgaatccggcactcagacgctccctggtttgccggccgccgatgtgattgcaactaaccaggattggtcatataaagttattggcatcaacagtaatcagaacgatggcacagcaacagcttctttcttgctaaccattgctagacataacttgacgaaaagaatagagcacatagaaaacgttctcaatgatttgaagaaatcacatctgttgaatcagcaaagcaccatcagcagcagcagtaacaaagaaaagagtagcaggcatgaggatattcagtacctgtacagaagcattgagcggaaggtaattggtcgagataaggagcgtgagaagcttatcagtatgcttcgtaggggacctggtccggacacaccaagctccagtagcagtaaacattattctgtgattggtatatatggcattgcagggtctgggaagagtaccctggcacaatatgtctgtgattatgagaaggccgaaggccaacattttgaccctgtcatgttcattcatgtgtctcagacatttagggtggataagatatttcgtgacatgctgagggagatcaggaaggacaggcaatctgacagcaacagtgttaaatgcctacacgatgagctgaaggaaaagttgagaggaaaatgtttcttgttggtactggatgatctctgggtcagtcgtgagaatcaggaggagcgtgctattctacttactgtgctcgatgctgggcagagtggaagtcgggttctggtgacagctcagaagaaagatgtagctgcagcgttaggcgctgaggagcagatcccgattccggatatggaagaggagcagtacttttcgatgttcatgcactacgccctagaaggaacgttttttggatctgttgcataatccttatgtgaaatgtg

SEQ ID NO: 42438 - DNA, 1930 bp, Zea Mays
gcgggaggtagcgatagggatccgcggcggcggttgtttgccgggaggctggcaggcacgacgtgcacgaggcggctggaacctcggcggggcagttagccgtgcgcgcgcaggattcgcgggaggcaggggcgagcgggggcagtctacacatgactcttaatatttgtagagataaagaatacctccaagaagacttggggaggtcaatgtcacaatcagcttttatcatgtagtaataagcatctctctaacaagtaacaagtacaaagactagttctttcctcttcccacgacccacatcttctctttctcctgtaaaagaaaagaaagggcaatcccatggcaaaaacttcggaagtgattgcagggatagccctgggcatcccactaatgaacggggtgctggtacccatcatcaccatcctcgtgaacagattcttctccatcctcctcaccgacacatccagaaaactcagtaacctggagaacctcaccatcccaagtctgaaggagactctggtacaagtggaggagcagaggatggtgagagcacccaaagatgcgcagtccgagtctgatctgaggactctcgatgggctgacgacggagctcaaagctgccttgtacgaagcggaggaaatcctggatctggtagactattaccggatcaagaagagaatagccgatgacgccgaagagaatggaagaagccgctgggtgcagcagaccctccgcgcttttcgcacctctatggcccgctgccagggcagcagctgggtgcggcacctgcacgactgcgtcggcctttgcgtcgcctgctgcaaggggaccttgttcagaagatcaggtgagcagcttccaatctcccatgcgtcctccgtttccatggcgcagaggctccgtggctggtataggcacctcgtgcaccatatccccagcagcagtcgatctgtgatgcagtggctccgtcactggttccagcacctcgtattcaacttcgctaagctatgtgaatccggcactcagacgctccctggtttgccggccgccgatgtgattgcaactaaccaggattggtcatataaagttattggcatcaacagtaatcagaacgatggcacagcaacagcttctttcttgctaaccattgctagacataacttgacgaaaagaatagagcacatagaaaacgttctcaatgatttgaagaaatcacatctgttgaatcagcaaagcaccatcagcagcagcagtaacaaagaaaagagtagcaggcatgaggatattcagtacctgtacagaagcattgagcggaaggtaattggtcgagataaggagcgtgagaagcttatcagtatgcttcgtaggggacctggtccggacacaccaagctccagtagcagtaaacattattctgtgattggtatatatggcattgcagggtctgggaagagtaccctggcacaatatgtctgtgattatgagaaggccgaaggccaacattttgaccctgtcatgttcattcatgtgtctcagacatttagggtggataagatatttcgtgacatgctgagggagatcaggaaggacaggcaatctgacagcaacagtgttaaatgcctacacgatgagctgaaggaaaagttgagaggaaaatgtttcttgttggtactggatgatctctgggtcagtcgtgagaatcaggaggagcgtgctattctacttactgtgctcgatgctgggcagagtggaagtcgggttctggtgacagctcagaagaaagatgtagctgcagcgttaggcgctgaggagcagatcccgattccggatatggaagaggagcagtacttttcgatgttcatgcactacgccctagaagctcttcgtcgtcgatgggattcgcaaacgttggcaggctgacgtcgct

SEQ ID NO: 42439 - DNA, 2166 bp, Zea Mays
gcgggaggtagcgatagggatccgcggcggcggttgtttgccgggaggctggcaggcacgacgtgcacgaggcggctggaacctcggcggggcagttagccgtgcgcgcgcaggattcgcgggaggcaggggcgagcgggggcagtctacacatgactcttaatatttgtagagataaagaatacctccaagaagacttggggaggtcaatgtcacaatcagcttttatcatgtagtaataagcatctctctaacaagtaacaagtacaaagactagttctttcctcttcccacgacccacatcttctctttctcctgtaaaagaaaagaaagggcaatcccatggcaaaaacttcggaagtgattgcagggatagccctgggcatcccactaatgaacggggtgctggtacccatcatcaccatcctcgtgaacagattcttctccatcctcctcaccgacacatccagaaaactcagtaacctggagaacctcaccatcccaagtctgaaggagactctggtacaagtggaggagcagaggatggtgagagcacccaaagatgcgcagtccgagtctgatctgaggactctcgatgggctgacgacggagctcaaagctgccttgtacgaagcggaggaaatcctggatctggtagactattaccggatcaagaagagaatagccgatgacgccgaagagaatggaagaagccgctgggtgcagcagaccctccgcgcttttcgcacctctatggcccgctgccagggcagcagctgggtgcggcacctgcacgactgcgtcggcctttgcgtcgcctgctgcaaggggaccttgttcagaagatcaggtgagcagcttccaatctcccatgcgtcctccgtttccatggcgcagaggctccgtggctggtataggcacctcgtgcaccatatccccagcagcagtcgatctgtgatgcagtggctccgtcactggttccagcacctcgtattcaacttcgctaagctatgtgaatccggcactcagacgctccctggtttgccggccgccgatgtgattgcaactaaccaggattggtcatataaagttattggcatcaacagtaatcagaacgatggcacagcaacagcttctttcttgctaaccattgctagacataacttgacgaaaagaatagagcacatagaaaacgttctcaatgatttgaagaaatcacatctgttgaatcagcaaagcaccatcagcagcagcagtaacaaagaaaagagtagcaggcatgaggatattcagtacctgtacagaagcattgagcggaaggtaattggtcgagataaggagcgtgagaagcttatcagtatgcttcgtaggggacctggtccggacacaccaagctccagtagcagtaaacattattctgtgattggtatatatggcattgcagggtctgggaagagtaccctggcacaatatgtctgtgattatgagaaggccgaaggccaacattttgaccctgtcatgttcattcatgtgtctcagacatttagggtggataagatatttcgtgacatgctgagggagatcaggaaggacaggcaatctgacagcaacagtgttaaatgcctacacgatgagctgaaggaaaagttgagaggaaaatgtttcttgttggtactggatgatctctgggtcagtcgtgagaatcaggaggagcgtgctattctacttactgtgctcgatgctgggcagagtggaagtcgggttctggtgacagctcagaagaaagatgtagctgcagcgttaggcgctgaggagcagatcccgattccggatatggaagaggagcagtacttttcgatgttcatgcactacgccctagaagccaatctagcactagatctcttgccaataggagatggacttacacccgcagccacagcaggctgaaatgaacaccccacaaccaaactgtttgaagctaagctagagctgggaggcgatcgaattagcggagcatcaggagctttagagatagatgcaacaaattcatctatattaatgcttgagggatctgggatgctacatgacagcgaagaggtgaataaatctggattgcacggcatgacagatgcactattaatatttgaatgtggaggcacatgagat

SEQ ID NO: 42440 - DNA, 2169 bp, Zea Mays
gcgggaggtagcgatagggatccgcggcggcggttgtttgccgggaggctggcaggcacgacgtgcacgaggcggctggaacctcggcggggcagttagccgtgcgcgcgcaggattcgcgggaggcaggggcgagcgggggcagtctacacatgactcttaatatttgtagagataaagaatacctccaagaagacttggggaggtcaatgtcacaatcagcttttatcatgtagtaataagcatctctctaacaagtaacaagtacaaagactagttctttcctcttcccacgacccacatcttctctttctcctgtaaaagaaaagaaagggcaatcccatggcaaaaacttcggaagtgattgcagggatagccctgggcatcccactaatgaacggggtgctggtacccatcatcaccatcctcgtgaacagattcttctccatcctcctcaccgacacatccagaaaactcagtaacctggagaacctcaccatcccaagtctgaaggagactctggtacaagtggaggagcagaggatggtgagagcacccaaagatgcgcagtccgagtctgatctgaggactctcgatgggctgacgacggagctcaaagctgccttgtacgaagcggaggaaatcctggatctggtagactattaccggatcaagaagagaatagccgatgacgccgaagagaatggaagaagccgctgggtgcagcagaccctccgcgcttttcgcacctctatggcccgctgccagggcagcagctgggtgcggcacctgcacgactgcgtcggcctttgcgtcgcctgctgcaaggggaccttgttcagaagatcaggtgagcagcttccaatctcccatgcgtcctccgtttccatggcgcagaggctccgtggctggtataggcacctcgtgcaccatatccccagcagcagtcgatctgtgatgcagtggctccgtcactggttccagcacctcgtattcaacttcgctaagctatgtgaatccggcactcagacgctccctggtttgccggccgccgatgtgattgcaactaaccaggattggtcatataaagttattggcatcaacagtaatcagaacgatggcacagcaacagcttctttcttgctaaccattgctagacataacttgacgaaaagaatagagcacatagaaaacgttctcaatgatttgaagaaatcacatctgttgaatcagcaaagcaccatcagcagcagcagtaacaaagaaaagagtagcaggcatgaggatattcagtacctgtacagaagcattgagcggaaggtaattggtcgagataaggagcgtgagaagcttatcagtatgcttcgtaggggacctggtccggacacaccaagctccagtagcagtaaacattattctgtgattggtatatatggcattgcagggtctgggaagagtaccctggcacaatatgtctgtgattatgagaaggccgaaggccaacattttgaccctgtcatgttcattcatgtgtctcagacatttagggtggataagatatttcgtgacatgctgagggagatcaggaaggacaggcaatctgacagcaacagtgttaaatgcctacacgatgagctgaaggaaaagttgagaggaaaatgtttcttgttggtactggatgatctctgggtcagtcgtgagaatcaggaggagcgtgctattctacttactgtgctcgatgctgggcagagtggaagtcgggttctggtgacagctcagaagaaagatgtagctgcagcgttaggcgctgaggagcagatcccgattccggatatggaagaggagcagtacttttcgatgttcatgcactacgccctagaaggattttgtttcactgtatatatccatttgcaaccaactattttcttacccaatggataaggcacaagatcccaagttttgtttttttctagagcagttagttcttcaagcatggcctctttccactttgggtccaattttgcttccctccaatcttttggaatagtcacagattgtaaggatgccagaaaaacattatattcagaagatagtgaggtataagacacataattgcttatgtcgtgatcaaatccatacctctgaggagggactcctgcaccagttctt

SEQ ID NO: 42441 - DNA, 3476 bp, Zea Mays
gcgggaggtagcgatagggatccgcggcggcggttgtttgccgggaggctggcaggcacgacgtgcacgaggcggctggaacctcggcggggcagttagccgtgcgcgcgcaggattcgcgggaggcaggggcgagcgggggcagtctacacatgactcttaatatttgtagagataaagaatacctccaagaagacttggggaggtcaatgtcacaatcagcttttatcatgtagtaataagcatctctctaacaagtaacaagtacaaagactagttctttcctcttcccacgacccacatcttctctttctcctgtaaaagaaaagaaagggcaatcccatggcaaaaacttcggaagtgattgcagggatagccctgggcatcccactaatgaacggggtgctggtacccatcatcaccatcctcgtgaacagattcttctccatcctcctcaccgacacatccagaaaactcagtaacctggagaacctcaccatcccaagtctgaaggagactctggtacaagtggaggagcagaggatggtgagagcacccaaagatgcgcagtccgagtctgatctgaggactctcgatgggctgacgacggagctcaaagctgccttgtacgaagcggaggaaatcctggatctggtagactattaccggatcaagaagagaatagccgatgacgccgaagagaatggaagaagccgctgggtgcagcagaccctccgcgcttttcgcacctctatggcccgctgccagggcagcagctgggtgcggcacctgcacgactgcgtcggcctttgcgtcgcctgctgcaaggggaccttgttcagaagatcaggtgagcagcttccaatctcccatgcgtcctccgtttccatggcgcagaggctccgtggctggtataggcacctcgtgcaccatatccccagcagcagtcgatctgtgatgcagtggctccgtcactggttccagcacctcgtattcaacttcgctaagctatgtgaatccggcactcagacgctccctggtttgccggccgccgatgtgattgcaactaaccaggattggtcatataaagttattggcatcaacagtaatcagaacgatggcacagcaacagcttctttcttgctaaccattgctagacataacttgacgaaaagaatagagcacatagaaaacgttctcaatgatttgaagaaatcacatctgttgaatcagcaaagcaccatcagcagcagcagtaacaaagaaaagagtagcaggcatgaggatattcagtacctgtacagaagcattgagcggaaggtaattggtcgagataaggagcgtgagaagcttatcagtatgcttcgtaggggacctggtccggacacaccaagctccagtagcagtaaacattattctgtgattggtatatatggcattgcagggtctgggaagagtaccctggcacaatatgtctgtgattatgagaaggccgaaggccaacattttgaccctgtcatgttcattcatgtgtctcagacatttagggtggataagatatttcgtgacatgctgagggagatcaggaaggacaggcaatctgacagcaacagtgttaaatgcctacacgatgagctgaaggaaaagttgagaggaaaatgtttcttgttggtactggatgatctctgggtcagtcgtgagaatcaggaggagcgtgctattctacttactgtgctcgatgctgggcagagtggaagtcgggttctggtgacagctcagaagaaagatgtagctgcagcgttaggcgctgaggagcagatcccgattccggatatggaagaggagcagtacttttcgatgttcatgcactacgccctagaaggtaagcgtgttggttttttttttgaaagagaaaggcaaaagatttgccattccaatatattagaagaggtaaaaataaactttacaaacagacacagcccgataaaacttaacaataaggacctagatagaacactgacgcaaaaagaaaacgacccaaaaaaccccccctgaccaggactccagccgctacagacaggctacacctccaccaatgagctctttcaccacctgcaccatttgctctgtcgttctctgctgacccttaaaaattctgttgtttctttccagccataaactccaccagaaatatattatgaggccatcaaaatgttttcttgattgcttactacagagcttcctcagtctgaaccaccactcgtgaagagatccggttttggaaataccgtccaggaaccgcaaatcagcccaagtcaggatcatgctccatgcttcctcggcgaaggggcaatccttacaaaggtgagcagctgtctccggagacccattacaaagcgaacaattttggttgcaaggccaaccccgtttctgcagattgtctgaagttaatattttgttatgcaacaaagtccaagcaaagaaacgacattttggttcagttttggctttccaaatgggattgatgttggttttacagaagttcgttgtgaactgaattttgtaggcgctacttgaactgtattccccatctgccgaccatctccaagaaatggtgtcatcgagttcattgagaccttgcacgttgctgatcgcttgccaaagtaatacgaattctctcacttcctcctcccgagagaaaggcgcacaaaactgcatccagaaattgttcctaagagccttgaaaaccgagatattctttcttcttgctttcttatatagcttaggtgccatattctttggagcctgcccttcaatccaactagatccctagaagtccgccattttcccattgccaatagtcacaactgttgatgcgttaaaaagatctatatccgccttgtcacacggtagctgcatgccaacccatgctttatctttaactttccaccttaaccacagccatcttagcctaagcgctcttgcaaaacgctccagatctagaactcccagaccccccctattctttggaaggcaagttgtggaccagttaatcaaacagtgacccccattacaaaattctggactattacctatccaaaggaagcttcttcttagcttgtcaattcttttaagaagccatttctgcgcaggaaaaaccgtcagatggtataaaggctgagcagaaatcaccgctttaaccaaggtttccctacctgcctttgagagtagtctgcctttccatcctgctagccttttattaattttgtcaattagcggttggacatctattctcctaacgtttctgacatgcagaggtagaccaagatacctccccggaaattttgagtatttgcccgggaacacatccatcagatctggccaaagagtttgggaatatcgaatcgggaaaatttcagttttatcaaaattaatcttcatccctgaacacccttcaaaaacttccagaatctttt

SEQ ID NO: 42442 - DNA, 3915 bp, Zea Mays
cacgaagcatagatatgaccttgacgcgatcctcgtcgcggccaattactaaacgtggaggggccacagtagtgactgcaccgcgtgaattctcagcaacaatttgtctcttgtcaacattactgccgcttggcaagttcaaaagctgcaaaattttgtgtgcttcagtcacaatattttctattttctccaggattttactgagctccatttttgacaccctaagaggtgggccatttgaagtagcaccgtttacctgtacaataaaaatagtagcatgagattttctaagaggaacttttgcctggggatacacatcttcttcttttgcctcggaatcaatacagatttaaagaaaataagacttctgcattcacaggaaggctgacactaaacttcattgcacataagaccgataatgtagatgtaacctggatgagataggcacaataaacttggggcaccaacagatgtaaaggatttgtttggctaaatatataaacaagtagactcatttaagttggaaatgtattgataaaaatgggaacatatctggtgaacagtcacaataaacttgggaaaatacctgtctttttaggcgtgacgtcttgtgttgagtttgtgatccaaattctgaagaaggcggccaagttggcgagcgaagcggaggcccgtcgccgggaggcttgggccggaggggatgttgatgatcatgctactaaccagaattctgagtctatcagtgtgcaggtggagcacggaggggatgttgatgatcatgctccaccatctgctgaacctgctgaaaattctgtttctgaaatttcatcacctgttgtggagtctcatccccagtctcttgctgaaggccgaactaggaggcagatagtacggccccaaagactgattcaagagtgcaatgttgcttttgctttagctgttgctgaagaagttgataatgttcaggaaccattgaattattcagaagctatattgtgtactgatagtgaaaagtggatgggtgctatgcatgaagaaatggagtctcttgataagaatggcacttgggaactagctcggctgccttctggtaaaaaggcaattaagtgcaaatggatcttcaaaagaaaagaaggtatgactccaaaagagcctccgcgctttaaagcaaggctagttgcaaaaggttttagtcagattccaggaattgattactctgatgtctattctcctgttgtcaagcatagttcaattcgtacctttcttagtcttgttgctgtacatgactatgagcttgaacagttagatgtgaaaactgctttcttacatggtgatttggaggaggacatttatatggaccagccagaggggttcattgttcctggaaaagaagactatgtgtgcaggttgaagaagtccttatatggtctgaaacaatctcccagacaatggtataagaggtttgattcatttatgctttctaagggctttcagaggtctcaatatgatagttgtgtttatctaaaatttgttaatggatcacctacatatttgctgctatatgttgatgatatgttgattgctgccaagagcatgaaggaaatcactgctttaaaggcacagcttagtagcgaatttgatatgaaggatctgggtgctgcaaagaaaatccttggcatagagatagtcagggataggaagtctggactgctgtacttgagccagaagaattatattgagaaggtccttcgtcgtttcaacatgcaaaatactaaacctgtgagtactccgttggctcctcattttaaactgtctgctaaacagtgtgctgaaactgatgctgagcttgaatatatgtcaaaagttccatactctagtgctgttgggtcactcatgtatgctatggtttgttctcgtcctgatttgtctcatgctatgagcgttgttgctagatacatgtctaatcctggtaaagagcattggaaagctgttcagtggattttcagatatctacgtggttcttctagtgcttgtttatgttttggtaaatctggagatggtctgattggctatgttgattcagattatggtggtgatttagacaggaggagatctctttcaggttatgtctttactattggagattgtgctgtgagttggaaagctcgtttacaggatactgttgctttgtctaccacagaagctgagtatatggcaattgcagaagttactaaggaagccttatggttgaaaggtatatattcagagctatgtggaattaagtcttgcattaccatctattgtgatagccagagtgccattcatctcaccaaagatcagatgattactgagaaatccaaacatattgatattcgttatcacttcattcgtgatatcattgataaagggttggtgaaggtatgcaagatcagtactgataataatccagctgatatgatgacgaagcatgtttctgttgctaagtttgagctatgctcaaacttagttggtattataaattagcccttagtggctgttggcgccggcaagatgatgatgtatttgtttaaggtggaggttgctattatgatgctacaaggaatttgtctcaaggtggagtttgttgagtttgtgatccaaaatatctttgtaagccgcaggagatatctatctctattgtaaatctcctgcgatctgtaaccacccaaaaatagtgagaagttgccggccggcgcccgtggttttttccccttcactttggaggggttttccacgttaaatccgtgtcttctctgtgattgatcctatttgtgtcgcatttatttataacatcttgggcagggcagagtggatcttgctcacccagttcttgccactagaaggcatgctctgggaatccaacttgtcaccggggtgagataaagataaggcctgcctttccagactgcagtactcgacatcgtccaggatgtcttcagcctcgtagaaggcagacctgagatcctgaaacaatctctccagctggtttctgcgaggactctcctcaaccgcttccatcaacagctccagctgtaaaactttagtctcgagctctttcagcttcttggctccgtcgacaccgaggtaggaaaaggctttgttgagaagcctggtgatgatgggcgagacgagccagcctacagcagcgatgccccagcccactgcagcaatggtcactgggtctgccattcgaccaccccgaacgactaggctacagatctgcgtttgctcgtcgtggtaggtttatctacttgcctgcatataagaagaagccatgtggccgtcaattggcaggggccaggcagggcatcctccgcccacccttctccggcgagaagcgtcgccaatgtgtgctggcctgctgggagtgggtgaaggtgtcggcaagaggcgaggacatcggaagcggctctcctcggagtcaacggcttgattgggcctactggatcccaaacaacatgggcctttgctcttggaaccatcagtagcgactagcgatagcgagtgcgaggcttccaccaccaccagtagcgagtgcgaggccgaccgtcaccgcgagcggcgccgaacgcggcaatcccccctcgatgacggtggctccaggccggggcgtcaactccaacggcagcggcgtgctcccaatcaggtcagccgtcagaaaacgcgtgaccgccgctgtgtcctggaatttctcgcgtatttcgtcctgtgttttttcttccattttgtgtacacaatttcctttttggtgataggtttggtcatttacttatgtaaagtagcagtgctcaaaattggaactagctagtttgtttgccacactcgcagtatttcaatcatttttcattgtgtctgcctgcctgggttgctgggaac

SEQ ID NO: 42443 - DNA, 3904 bp, Zea Mays
cacgaagcatagatatgaccttgacgcgatcctcgtcgcggccaattactaaacgtggaggggccacagtagtgactgcaccgcgtgaattctcagcaacaatttgtctcttgtcaacattactgccgcttggcaagttcaaaagctgcaaaattttgtgtgcttcagtcacaatattttctattttctccaggattttactgagctccatttttgacaccctaagaggtgggccatttgaagtagcaccgtttacctgtacaataaaaatagtagcatgagattttctaagaggaacttttgcctggggatacacatcttcttcttttgcctcggaatcaatacagatttaaagaaaataagacttctgcattcacaggaaggctgacactaaacttcattgcacataagaccgataatgtagatgtaacctggatgagataggcacaataaacttggggcaccaacagatgtaaaggatttgtttggctaaatatataaacaagtagactcatttaagttggaaatgtattgataaaaatgggaacatatctggtgaacagtcacaataaacttgggaaaatacctgtctttttaggcgtgacgtcttgtgttgagtttgtgatccaaattctgaagaaggcggccaagttggcgagcgaagcggaggcccgtcgccgggaggcttgggccggaggggatgttgatgatcatgctactaaccagaattctgagtctatcagtgtgcaggtggagcacggaggggatgttgatgatcatgctccaccatctgctgaacctgctgaaaattctgtttctgaaatttcatcacctgttgtggagtctcatccccagtctcttgctgaaggccgaactaggaggcagatagtacggccccaaagactgattcaagagtgcaatgttgcttttgctttagctgttgctgaagaagttgataatgttcaggaaccattgaattattcagaagctatattgtgtactgatagtgaaaagtggatgggtgctatgcatgaagaaatggagtctcttgataagaatggcacttgggaactagctcggctgccttctggtaaaaaggcaattaagtgcaaatggatcttcaaaagaaaagaaggtatgactccaaaagagcctccgcgctttaaagcaaggctagttgcaaaaggttttagtcagattccaggaattgattactctgatgtctattctcctgttgtcaagcatagttcaattcgtacctttcttagtcttgttgctgtacatgactatgagcttgaacagttagatgtgaaaactgctttcttacatggtgatttggaggaggacatttatatggaccagccagaggggttcattgttcctggaaaagaagactatgtgtgcaggttgaagaagtccttatatggtctgaaacaatctcccagacaatggtataagaggtttgattcatttatgctttctaagggctttcagaggtctcaatatgatagttgtgtttatctaaaatttgttaatggatcacctacatatttgctgctatatgttgatgatatgttgattgctgccaagagcatgaaggaaatcactgctttaaaggcacagcttagtagcgaatttgatatgaaggatctgggtgctgcaaagaaaatccttggcatagagatagtcagggataggaagtctggactgctgtacttgagccagaagaattatattgagaaggtccttcgtcgtttcaacatgcaaaatactaaacctgtgagtactccgttggctcctcattttaaactgtctgctaaacagtgtgctgaaactgatgctgagcttgaatatatgtcaaaagttccatactctagtgctgttgggtcactcatgtatgctatggtttgttctcgtcctgatttgtctcatgctatgagcgttgttgctagatacatgtctaatcctggtaaagagcattggaaagctgttcagtggattttcagatatctacgtggttcttctagtgcttgtttatgttttggtaaatctggagatggtctgattggctatgttgattcagattatggtggtgatttagacaggaggagatctctttcaggttatgtctttactattggagattgtgctgtgagttggaaagctcgtttacaggatactgttgctttgtctaccacagaagctgagtatatggcaattgcagaagttactaaggaagccttatggttgaaaggtatatattcagagctatgtggaattaagtcttgcattaccatctattgtgatagccagagtgccattcatctcaccaaagatcagatgattactgagaaatccaaacatattgatattcgttatcacttcattcgtgatatcattgataaagggttggtgaaggtatgcaagatcagtactgataataatccagctgatatgatgacgaagcatgtttctgttgctaagtttgagctatgctcaaacttagttggtattataaattagcccttagtggctgttggcgccggcaagatgatgatgtatttgtttaaggtggaggttgctattatgatgctacaaggaatttgtctcaaggtggagtttgttgagtttgtgatccaaaatatctttgtaagccgcaggagatatctatctctattgtaaatctcctgcgatctgtaaccacccaaaaatagtgagaagttgccggccggcgcccgtggttttttccccttcactttggaggggttttccacgttaaatccgtgtcttctctgtgattgatcctatttgtgtcgcatttatttataacatcttgggcagggcagagtggatcttgctcacccagttcttgccactagaaggcatgctctgggaatccaacttgtcaccggggtgagataaagataaggcctgcctttccagactgcagtactcgacatcgtccaggatgtcttcagcctcgtagaaggcagacctgagatcctgaaacaatctctccagctggtttctgcgaggactctcctcaaccgcttccatcaacagctccagctgtaaaactttagtctcgagctctttcagcttcttggctccgtcgacaccgaggtaggaaaaggctttgttgagaagcctggtgatgatgggcgagacgagccagcctacagcagcgatgccccagcccactgcagcaatggtcactgggtctgccattcgaccaccccgaacgactaggctacagatctgcgtttgctcgtcgtggggctgctgacctgctagaagaagccatgtggccgtcaattggcaggggccaggcagggcatcctccgcccacccttctccggcgagaagcgtcgccaatgtgtgctggcctgctgggagtgggtgaaggtgtcggcaagaggcgaggacatcggaagcggctctcctcggagtcaacggcttgattgggcctactggatcccaaacaacatgggcctttgctcttggaaccatcagtagcgactagcgatagcgagtgcgaggcttccaccaccaccagtagcgagtgcgaggccgaccgtcaccgcgagcggcgccgaacgcggcaatcccccctcgatgacggtggctccaggccggggcgtcaactccaacggcagcggcgtgctcccaatcaggtcagccgtcagaaaacgcgtgaccgccgctgtgtcctggaatttctcgcgtatttcgtcctgtgttttttcttccattttgtgtacacaatttcctttttggtgataggtttggtcatttacttatgtaaagtagcagtgctcaaaattggaactagctagtttgtttgccacactcgcagtatttcaatcatttttcattgtgtctgcctgcctgggttgctgggaac

SEQ ID NO: 42444 - DNA, 1311 bp, Zea Mays
ggcttggtaatttataaaaatgcaaggggtatgaattatcttcaccattgtagccctcctattgttcaccgtgatttaaaatcgtcaaatttgttggtagacaagaactggactgtaaaggttgcagatttcggtctttcacgtctaaaactcgaaacgtttttacgaacaaaaactggaaaaggaacgccacaatggatggccccagaggtgttatgtaatgaaccttcagatgagaagtctgacgtgtacagctatggggttattctatgggaacttgtgacccagaagataccctgggataatctcaatacaatgcaggttattggagctgtcggctttatggatcagaggttggacattccaagcgatacagatcctaaatgggcatcgatgatcgagagttgttgggataggtaagcatattgtttttccctactaagcaacaactagttgaatgcatatggtggagatcatgtttgaagaccataggaagcccaaatcaattttttttgagaaaatcatagttccattctgatgaacagtgtgattagaagtccctgatacatgtatatccttttatttgagcagcgacccgcagaaacgcccttcgttcctagaggtcctggacaggcttagagatctgcagaagcagtacagcctgcaggctcagatgcagcgtaacctgtccgcggatgctctcctgaaaggcgctgtgaaatgagcgtcgaggaatgctagctctcggaatgtaatggaacatggcactggacacattgacagcgaccagggcaagcgttcatcgacatttgtagcgtctgcgtgctgatgaggaaggctggctacgtgcatcttggtggccttcgtatagaagaggaggagctacagtccggactccggaggctgtaccggcaaaggcggccggtgcatgcatggcttcatgtatctcaaggcctcaacgaagcttcataatgcggtaatcttcggccaagaaggccggacacttgtgaaacgagaatggctaagaaggccggactactttttgtattaacgccccagtttttcaatgggggaaaaatcgaattgtttataaattgtatacttagtctcgataacgttcttgcctgcatatagaaccgggtgtcttcagacgcatggatgggtggtagtagtgtgttcagatgcatagaaagatggtaagcatgtctctgctgctgctttccttactgaatggacctttgatgtcgtcgctcattgcagcgttttctgaacagtgaccacattacagccggctgcacgcctgcacttgca

SEQ ID NO: 42445 - DNA, 1970 bp, Zea Mays
aatataatgatatgcagctctcctgcatattcgagaaaaaaaaagacaagaggtagacatctattgatctatatctattcatgcatatgaagttgatttcctttttcttcttcttgaagcaaatgctatggaaattgtcgatatagatactttagtattaaaattatgatacataccatgggaaaacaacacattacttgaaatgttttttagaacatttgctgtatgcttgcaccattgttagccaaccactagctgctgcactcatcttgctagagcattaaaacatctatgtttaggcaaaacacatttaacttccacataggaaggactaggagaaataagcaaagatggaataaagagaggagatcaatattgattttattttaattttttttatcttctctatatgcttgtactgatctgtgtcagatgtgtgtgttttgcttccattatgacttgtaaacttctgaagggaaaatgttggcaggactttcatgtactcaaggaaaccataaaaatcttttcactcttgtatattttttctgtaaaaaccaaaaatacaatattgacaatcctgagcgttatgttttgcttattgtgtttatgtacgctctaggctatactattcattatgttgttaactttcaaaatacatatccttcatatgcgcaggtatctctgatgaagaaactacgtcatccaaatattatactcttcatgggagcagttgcatctccagaacgactttgtattgttacagaatttcttccacgggggagtttgttccgcttacttcaaaagaacactgccaagctggatccaagacgacgagttcacatggctatagacattgcaaggggtatgaattatcttcaccattgtagccctcctattgttcaccgtgatttaaaatcgtcaaatttgttggtagacaagaactggactgtaaaggttgcagatttcggtctttcacgtctaaaactcgaaacgtttttacgaacaaaaactggaaaaggaacgccacaatggatggccccagaggtgttatgtaatgaaccttcagatgagaagtctgacgtgtacagctatggggttattctatgggaacttgtgacccagaagataccctgggataatctcaatacaatgcaggttattggagctgtcggctttatggatcagaggttggacattccaagcgatacagatcctaaatgggcatcgatgatcgagagttgttgggatagcgacccgcagaaacgcccttcgttcctagaggtcctggacaggcttagagatctgcagaagcagtacagcctgcaggctcagatgcagcgtaacctgtccgcggatgctctcctgaaaggcgctgtgaaatgagcgtcgaggaatgctagctctcggaatgtaatggaacatggcactggacacattgacagcgaccagggcaagcgttcatcgacatttgtagcgtctgcgtgctgatgaggaaggctggctacgtgcatcttggtggccttcgtatagaagaggaggagctacagtccggactccggaggctgtaccggcaaaggcggccggtgcatgcatggcttcatgtatctcaaggcctcaacgaagcttcataatgcggtaatcttcggccaagaaggccggacacttgtgaaacgagaatggctaagaaggccggactactttttgtattaacgccccagtttttcaatgggggaaaaatcgaattgtttataaattgtatacttagtctcgataacgttcttgcctgcatatagaaccgggtgtcttcagacgcatggatgggtggtagtagtgtgttcagatgcatagaaagatggtaagcatgtctctgctgctgctttccttactgaatggacctttgatgtcgtcgctcattgcagcgttttctgaacagtgaccacattacagccggctgcacgcctgcacttgca

SEQ ID NO: 42446 - DNA, 3011 bp, Zea Mays
gttagctgggtcgcggaagcctccaaaggcgccattttcgccgccgacctcgcgcgcgccggaagcaacaactccccctcccctgatgcttgccatttgacacacagcaaccgggcgctctgctgccggtgatggcggcggaggagctgctgcggaagttacgggagctggaggaaggccaggcggagctcaagcgggagatttccaagctcgtgccggagcagcagcaacagcaccaccaccaccactaccactcctcgcgccgcccgccgcagccttcgccggtgcgccgcgccctccccgcggcgccttccttgccgtcgcggctgcagcgcgtgggccgcgtcgggctcactgaccgccagcacatcagggccctgcacgcgctgggacaggccgtgcatatcattgcccccggcgggaagctcatttactggaaccgttatgccgagcaaatgtatggctattctacatcagaagcagtcggtcacgatgccgttgagttattggtccatcctgatgatgctgaggcagcaaacaatataattgggaatatatttatggggaaatgttggagagggaagtttcctgttaaaaagaagtcaggagagcggtttttcattgtggccaataatactcctttgtatgatgatgatggaagcttggtaggtctcatttgtctctcagttgatacgaagacattagaagatataatcggcccttcaacttcaatgaagtctcatacacatccagtgaagcctcgctttcaagtcaacaatcggcctaaatgcaatttgttaaataaaagttctattgagtctgagcaaactgtccaatcttctatagcctccaagataacaactttgacaggtcagaactgcggcgggtctgagtgtccgtactctgaagatgattccaaggaagaactgacatctagtggaaacacccctagaggtgatgtactgcatggtggcattgttaaaggagataatttccctgggaagtcgagtaaaacaagtagtgaagactcaggggacggaaacgaaaggctttgcaagattagttcaaagacagaggacttattggccaagaaggggatatcatggccctggaaagggcacgaacatagtggtcctgacaagggtcacatgaacccattgcagttccatgataagcaagacaatgatcagatacatctggtcggtccagagtcaattataattccagactaccaagattctgatagcacccaggaaagcagatatgaagtaacgggtaactggtggtctttcaacaacgatagcttcaatagtttgggtagcagtttaagttctaatagcagtgctattgagagagttgatcttgaagcagattgcctagactatgagattctatgggaagacctagtacttggagaacaagtaggtcaaggttcttgcggaacggtgtatcatgctcagtggtatggctcggatgtagcagttaaactattctctaagcaggaatattcagatgaaatgatagataccttcagacaagaggtatctctgatgaagaaactacgtcatccaaatattatactcttcatgggagcagttgcatctccagaacgactttgtattgttacagaatttcttccacgggggagtttgttccgcttacttcaaaagaacactgccaagctggatccaagacgacgagttcacatggctatagacattgcaaggggtatgaattatcttcaccattgtagccctcctattgttcaccgtgatttaaaatcgtcaaatttgttggtagacaagaactggactgtaaaggttgcagatttcggtctttcacgtctaaaactcgaaacgtttttacgaacaaaaactggaaaaggaacgccacaatggatggccccagaggtgttatgtaatgaaccttcagatgagaagtctgacgtgtacagctatggggttattctatgggaacttgtgacccagaagataccctgggataatctcaatacaatgcaggttattggagctgtcggctttatggatcagaggttggacattccaagcgatacagatcctaaatgggcatcgatgatcgagagttgttgggataggtaagcatattgtttttccctactaagcaacaactagttgaatgcatatggtggagatcatgtttgaagaccataggaagcccaaatcaattttttttgagaaaatcatagttccattctgatgaacagtgtgattagaagtccctgatacatgtatatccttttatttgagcagcgacccgcagaaacgcccttcgttcctagaggtcctggacaggcttagagatctgcagaagcagtacagcctgcaggctcagatgcagcgtaacctgtccgcggatgctctcctgaaaggcgctgtgaaatgagcgtcgaggaatgctagctctcggaatgtaatggaacatggcactggacacattgacagcgaccagggcaagcgttcatcgacatttgtagcgtctgcgtgctgatgaggaaggctggctacgtgcatcttggtggccttcgtatagaagaggaggagctacagtccggactccggaggctgtaccggcaaaggcggccggtgcatgcatggcttcatgtatctcaaggcctcaacgaagcttcataatgcggtaatcttcggccaagaaggccggacacttgtgaaacgagaatggctaagaaggccggactactttttgtattaacgccccagtttttcaatgggggaaaaatcgaattgtttataaattgtatacttagtctcgataacgttcttgcctgcatatagaaccgggtgtcttcagacgcatggatgggtggtagtagtgtgttcagatgcatagaaagatggtaagcatgtctctgctgctgctttccttactgaatggacctttgatgtcgtcgctcattgcagcgttttctgaacagtgaccacattacagccggctgcacgcctgcacttgca

SEQ ID NO: 42447 - DNA, 3102 bp, Zea Mays
actccctctcccaatcctcgtcactgctgcctctccaagcaacaaggccgcggaagaacagaccacgcggtcagcagcagcaggggagcaagaagaactcctgttgggctgggttcacggttcaccccatttctgaattccgtcctgaggtgtggcagctcacagaagcttccagaaggcgggattgagccaagttcgctccccggatcgccgggaaaccaacaaaagcagccgctttatgcttcttgggccagacgaggaatcctcgagaaaccgatagaaggtgcaggcaggcagttagctgggtcgcggaagcctccaaaggcgccattttcgccgccgacctcgcgcgcgccggaagcaacaactccccctcccctgatgcttgccatttgacacacagcaaccgggcgctctgctgccggtgatggcggcggaggagctgctgcggaagttacgggagctggaggaaggccaggcggagctcaagcgggagatttccaagctcgtgccggagcagcagcaacagcaccaccaccaccactaccactcctcgcgccgcccgccgcagccttcgccggtgcgccgcgccctccccgcggcgccttccttgccgtcgcggctgcagcgcgtgggccgcgtcgggctcactgaccgccagcacatcagggccctgcacgcgctgggacaggccgtgcatatcattgcccccggcgggaagctcatttactggaaccgttatgccgagcaaatgtatggctattctacatcagaagcagtcggtcacgatgccgttgagttattggtccatcctgatgatgctgaggcagcaaacaatataattgggaatatatttatggggaaatgttggagagggaagtttcctgttaaaaagaagtcaggagagcggtttttcattgtggccaataatactcctttgtatgatgatgatggaagcttggtaggtctcatttgtctctcagttgatacgaagacattagaagatataatcggcccttcaacttcaatgaagtctcatacacatccagtgaagcctcgctttcaagtcaacaatcggcctaaatgcaatttgttaaataaaagttctattgagtctgagcaaactgtccaatcttctatagcctccaagataacaactttggctaccaaagttacaaacagagttcgttctcggatgaagacaggtcagaactgcggcgggtctgagtgtccgtactctgaagatgattccaaggaagaactgacatctagtggaaacacccctagaggtgatgtactgcatggtggcattgttaaaggagataatttccctgggaagtcgagtaaaacaagtagtgaagactcaggggacggaaacgaaaggctttgcaagattagttcaaagacagaggacttattggccaagaaggggatatcatggccctggaaagggcacgaacatagtggtcctgacaagggtcacatgaacccattgcagttccatgataagcaagacaatgatcagatacatctggtcggtccagagtcaattataattccagactaccaagattctgatagcacccaggaaagcagatatgaagtaacgggtaactggtggtctttcaacaacgatagcttcaatagtttgggtagcagtttaagttctaatagcagtgctattgagagagttgatcttgaagcagattgcctagactatgagattctatgggaagacctagtacttggagaacaagtaggtcaaggttcttgcggaacggtgtatcatgctcagtggtatggctcggtatctctgatgaagaaactacgtcatccaaatattatactcttcatgggagcagttgcatctccagaacgactttgtattgttacagaatttcttccacgggggagtttgttccgcttacttcaaaagaacactgccaagctggatccaagacgacgagttcacatggctatagacattgcaaggggtatgaattatcttcaccattgtagccctcctattgttcaccgtgatttaaaatcgtcaaatttgttggtagacaagaactggactgtaaaggttgcagatttcggtctttcacgtctaaaactcgaaacgtttttacgaacaaaaactggaaaaggaacgccacaatggatggccccagaggtgttatgtaatgaaccttcagatgagaagtctgacgtgtacagctatggggttattctatgggaacttgtgacccagaagataccctgggataatctcaatacaatgcaggttattggagctgtcggctttatggatcagaggttggacattccaagcgatacagatcctaaatgggcatcgatgatcgagagttgttgggatagcgacccgcagaaacgcccttcgttcctagaggtcctggacaggcttagagatctgcagaagcagtacagcctgcaggctcagatgcagcgtaacctgtccgcggatgctctcctgaaaggcgctgtgaaatgagcgtcgaggaatgctagctctcggaatgtaatggaacatggcactggacacattgacagcgaccagggcaagcgttcatcgacatttgtagcgtctgcgtgctgatgaggaaggctggctacgtgcatcttggtggccttcgtatagaagaggaggagctacagtccggactccggaggctgtaccggcaaaggcggccggtgcatgcatggcttcatgtatctcaaggcctcaacgaagcttcataatgcggtaatcttcggccaagaaggccggacacttgtgaaacgagaatggctaagaaggccggactactttttgtattaacgccccagtttttcaatgggggaaaaatcgaattgtttataaattgtatacttagtctcgataacgttcttgcctgcatatagaaccgggtgtcttcagacgcatggatgggtggtagtagtgtgttcagatgcatagaaagatggtaagcatgtctctgctgctgctttccttactgaatggacctttgatgtcgtcgctcattgcagcgttttctgaacagtgaccacattacagccggctgcacgcctgcacttgca

SEQ ID NO: 42448 - DNA, 2518 bp, Zea Mays
ctcacttgggtcgacagagatcatcccctggcaccaccatccagttccaattccaactccaactccctctcccaatcctcgtcactgctgcctctccaagcaacaaggccgcggaagaacagaccacgcggtcagcagcagcaggggagcaagaagaactcctgttgggctgggttcacggttcaccccatttctgaattccgtcctgaggtgtggcagctcacagaagcttccagaaggcgggattgagccaagttcgctccccggatcgccgggaaaccaacaaaagcagccgctttatgcttcttgggccagacgaggaatcctcgagaaaccgatagaaggtgcaggcaggcagttagctgggtcgcggaagcctccaaaggcgccattttcgccgccgacctcgcgcgcgccggaagcaacaactccccctcccctgatgcttgccatttgacacacagcaaccgggcgctctgctgccggtgatggcggcggaggagctgctgcggaagttacgggagctggaggaaggccaggcggagctcaagcgggagatttccaagctcgtgccggagcagcagcaacagcaccaccaccaccactaccactcctcgcgccgcccgccgcagccttcgccggtgcgccgcgccctccccgcggcgccttccttgccgtcgcggctgcagcgcgtgggccgcgtcgggctcactgaccgccagcacatcagggccctgcacgcgctgggacaggccgtgcatatcattgcccccggcgggaagctcatttactggaaccgttatgccgagcaaatgtatggctattctacatcagaagcagtcggtcacgatgccgttgagttattggtccatcctgatgatgctgaggcagcaaacaatataattgggaatatatttatggggaaatgttggagagggaagtttcctgttaaaaagaagtcaggagagcggtttttcattgtggccaataatactcctttgtatgatgatgatggaagcttggtaggtctcatttgtctctcagttgatacgaagacattagaagatataatcggcccttcaacttcaatgaagtctcatacacatccagtgaagcctcgctttcaagtcaacaatcggcctaaatgcaatttgttaaataaaagttctattgagtctgagcaaactgtccaatcttctatagcctccaagataacaactttggtatctctgatgaagaaactacgtcatccaaatattatactcttcatgggagcagttgcatctccagaacgactttgtattgttacagaatttcttccacgggggagtttgttccgcttacttcaaaagaacactgccaagctggatccaagacgacgagttcacatggctatagacattgcaaggggtatgaattatcttcaccattgtagccctcctattgttcaccgtgatttaaaatcgtcaaatttgttggtagacaagaactggactgtaaaggttgcagatttcggtctttcacgtctaaaactcgaaacgtttttacgaacaaaaactggaaaaggaacgccacaatggatggccccagaggtgttatgtaatgaaccttcagatgagaagtctgacgtgtacagctatggggttattctatgggaacttgtgacccagaagataccctgggataatctcaatacaatgcaggttattggagctgtcggctttatggatcagaggttggacattccaagcgatacagatcctaaatgggcatcgatgatcgagagttgttgggatagcgacccgcagaaacgcccttcgttcctagaggtcctggacaggcttagagatctgcagaagcagtacagcctgcaggctcagatgcagcgtaacctgtccgcggatgctctcctgaaaggcgctgtgaaatgagcgtcgaggaatgctagctctcggaatgtaatggaacatggcactggacacattgacagcgaccagggcaagcgttcatcgacatttgtagcgtctgcgtgctgatgaggaaggctggctacgtgcatcttggtggccttcgtatagaagaggaggagctacagtccggactccggaggctgtaccggcaaaggcggccggtgcatgcatggcttcatgtatctcaaggcctcaacgaagcttcataatgcggtaatcttcggccaagaaggccggacacttgtgaaacgagaatggctaagaaggccggactactttttgtattaacgccccagtttttcaatgggggaaaaatcgaattgtttataaattgtatacttagtctcgataacgttcttgcctgcatatagaaccgggtgtcttcagacgcatggatgggtggtagtagtgtgttcagatgcatagaaagatggtaagcatgtctctgctgctgctttccttactgaatggacctttgatgtcgtcgctcattgcagcgttttctgaacagtgaccacattacagccggctgcacgcctgcacttgca

SEQ ID NO: 42449 - DNA, 3323 bp, Zea Mays
catgcgtccacaccacacgatcctggattgatgattaataaataaagcaagacaaagacttttgtgcgatgcgatgccctcacttgggtcgacagagatcatcccctggcaccaccatccagttccaattccaactccaactccctctcccaatcctcgtcactgctgcctctccaagcaacaaggccgcggaagaacagaccacgcggtcagcagcagcaggggagcaagaagaactcctgttgggctgggttcacggttcaccccatttctgaattccgtcctgaggtgtggcagctcacagaagcttccagaaggcgggattgagccaagttcgctccccggatcgccgggaaaccaacaaaagcagccgctttatgcttcttgggccagacgaggaatcctcgagaaaccgatagaaggtgcaggcaggcagttagctgggtcgcggaagcctccaaaggcgccattttcgccgccgacctcgcgcgcgccggaagcaacaactccccctcccctgatgcttgccatttgacacacagcaaccgggcgctctgctgccggtgatggcggcggaggagctgctgcggaagttacgggagctggaggaaggccaggcggagctcaagcgggagatttccaagctcgtgccggagcagcagcaacagcaccaccaccaccactaccactcctcgcgccgcccgccgcagccttcgccggtgcgccgcgccctccccgcggcgccttccttgccgtcgcggctgcagcgcgtgggccgcgtcgggctcactgaccgccagcacatcagggccctgcacgcgctgggacaggccgtgcatatcattgcccccggcgggaagctcatttactggaaccgttatgccgagcaaatgtatggctattctacatcagaagcagtcggtcacgatgccgttgagttattggtccatcctgatgatgctgaggcagcaaacaatataattgggaatatatttatggggaaatgttggagagggaagtttcctgttaaaaagaagtcaggagagcggtttttcattgtggccaataatactcctttgtatgatgatgatggaagcttggtaggtctcatttgtctctcagttgatacgaagacattagaagatataatcggcccttcaacttcaatgaagtctcatacacatccagtgaagcctcgctttcaagtcaacaatcggcctaaatgcaatttgttaaataaaagttctattgagtctgagcaaactgtccaatcttctatagcctccaagataacaactttgaataacaccacaggctaccaaagttacaaacagagttcgttctcggatgaagacaggtcagaactgcggcgggtctgagtgtccgtactctgaagatgattccaaggaagaactgacatctagtggaaacacccctagaggtgatgtactgcatggtggcattgttaaaggagataatttccctgggaagtcgagtaaaacaagtagtgaagactcaggggacggaaacgaaaggctttgcaagattagttcaaagacagaggacttattggccaagaaggggatatcatggccctggaaagggcacgaacatagtggtcctgacaagggtcacatgaacccattgcagttccatgataagcaagacaatgatcagatacatctggtcggtccagagtcaattataattccagactaccaagattctgatagcacccaggaaagcagatatgaagtaacgggtaactggtggtctttcaacaacgatagcttcaatagtttgggtagcagtttaagttctaatagcagtgctattgagagagttgatcttgaagcagattgcctagactatgagattctatgggaagacctagtacttggagaacaagtaggtcaaggttcttgcggaacggtgtatcatgctcagtggtatggctcggatgtagcagttaaactattctctaagcaggaatattcagatgaaatgatagataccttcagacaagaggtatctctgatgaagaaactacgtcatccaaatattatactcttcatgggagcagttgcatctccagaacgactttgtattgttacagaatttcttccacgggggagtttgttccgcttacttcaaaagaacactgccaagctggatccaagacgacgagttcacatggctatagacattgcaaggggtatgaattatcttcaccattgtagccctcctattgttcaccgtgatttaaaatcgtcaaatttgttggtagacaagaactggactgtaaaggttgcagatttcggtctttcacgtctaaaactcgaaacgtttttacgaacaaaaactggaaaaggaacgccacaatggatggccccagaggtgttatgtaatgaaccttcagatgagaagtctgacgtgtacagctatggggttattctatgggaacttgtgacccagaagataccctgggataatctcaatacaatgcaggttattggagctgtcggctttatggatcagaggttggacattccaagcgatacagatcctaaatgggcatcgatgatcgagagttgttgggatagcgacccgcagaaacgcccttcgttcctagaggtcctggacaggcttagagatctgcagaagcagtacagcctgcaggctcagatgcagcgtaacctgtccgcggatgctctcctgaaaggcgctgtgaaatgagcgtcgaggaatgctagctctcggaatgtaatggaacatggcactggacacattgacagcgaccagggcaagcgttcatcgacatttgtagcgtctgcgtgctgatgaggaaggctggctacgtgcatcttggtggccttcgtatagaagaggaggagctacagtccggactccggaggctgtaccggcaaaggcggccggtgcatgcatggcttcatgtatctcaaggcctcaacgaagcttcataatgcggtaatcttcggccaagaaggccggacacttgtgaaacgagaatggctaagaaggccggactactttttgtattaacgccccagtttttcaatgggggaaaaatcgaattgtttataaattgtatacttagtctcgataacgttcttgcctgcatatagaaccgggtgtcttcagacgcatggatgggtggtagtagtgtgttcagatgcatagaaagatggtaagcatgtctctgctgctgctttccttactgaatggacctttgatgtcgtcgctcattgcagcgttttctgaacagtgaccacattacagccggctgcacgcctgcacttgca

SEQ ID NO: 42450 - DNA, 3481 bp, Zea Mays
ttgcttcggctttgcgccttcctcctcctcgccgacatgcggtcttttcatcattcttcttcttttctgacttgtggccgtcgtcaaccgctagtagttaaatggaaaatgtaaacttttctgcgcacaccaagaagcaaacaagcgtccagagtccagacaaacagtacacatgcgtccacaccacacgatcctggattgatgattaataaataaagcaagacaaagacttttgtgcgatgcgatgccctcacttgggtcgacagagatcatcccctggcaccaccatccagttccaattccaactccaactccctctcccaatcctcgtcactgctgcctctccaagcaacaaggccgcggaagaacagaccacgcggtcagcagcagcaggggagcaagaagaactcctgttgggctgggttcacggttcaccccatttctgaattccgtcctgaggtgtggcagctcacagaagcttccagaaggcgggattgagccaagttcgctccccggatcgccgggaaaccaacaaaagcagccgctttatgcttcttgggccagacgaggaatcctcgagaaaccgatagaaggtgcaggcaggcagttagctgggtcgcggaagcctccaaaggcgccattttcgccgccgacctcgcgcgcgccggaagcaacaactccccctcccctgatgcttgccatttgacacacagcaaccgggcgctctgctgccggtgatggcggcggaggagctgctgcggaagttacgggagctggaggaaggccaggcggagctcaagcgggagatttccaagctcgtgccggagcagcagcaacagcaccaccaccaccactaccactcctcgcgccgcccgccgcagccttcgccggtgcgccgcgccctccccgcggcgccttccttgccgtcgcggctgcagcgcgtgggccgcgtcgggctcactgaccgccagcacatcagggccctgcacgcgctgggacaggccgtgcatatcattgcccccggcgggaagctcatttactggaaccgttatgccgagcaaatgtatggctattctacatcagaagcagtcggtcacgatgccgttgagttattggtccatcctgatgatgctgaggcagcaaacaatataattgggaatatatttatggggaaatgttggagagggaagtttcctgttaaaaagaagtcaggagagcggtttttcattgtggccaataatactcctttgtatgatgatgatggaagcttggtaggtctcatttgtctctcagttgatacgaagacattagaagatataatcggcccttcaacttcaatgaagtctcatacacatccagtgaagcctcgctttcaagtcaacaatcggcctaaatgcaatttgttaaataaaagttctattgagtctgagcaaactgtccaatcttctatagcctccaagataacaactttggctaccaaagttacaaacagagttcgttctcggatgaagacaggtcagaactgcggcgggtctgagtgtccgtactctgaagatgattccaaggaagaactgacatctagtggaaacacccctagaggtgatgtactgcatggtggcattgttaaaggagataatttccctgggaagtcgagtaaaacaagtagtgaagactcaggggacggaaacgaaaggctttgcaagattagttcaaagacagaggacttattggccaagaaggggatatcatggccctggaaagggcacgaacatagtggtcctgacaagggtcacatgaacccattgcagttccatgataagcaagacaatgatcagatacatctggtcggtccagagtcaattataattccagactaccaagattctgatagcacccaggaaagcagatatgaagtaacgggtaactggtggtctttcaacaacgatagcttcaatagtttgggtagcagtttaagttctaatagcagtgctattgagagagttgatcttgaagcagattgcctagactatgagattctatgggaagacctagtacttggagaacaagtaggtcaaggttcttgcggaacggtgtatcatgctcagtggtatggctcggatgtagcagttaaactattctctaagcaggaatattcagatgaaatgatagataccttcagacaagaggtatctctgatgaagaaactacgtcatccaaatattatactcttcatgggagcagttgcatctccagaacgactttgtattgttacagaatttcttccacgggggagtttgttccgcttacttcaaaagaacactgccaagctggatccaagacgacgagttcacatggctatagacattgcaaggggtatgaattatcttcaccattgtagccctcctattgttcaccgtgatttaaaatcgtcaaatttgttggtagacaagaactggactgtaaaggttgcagatttcggtctttcacgtctaaaactcgaaacgtttttacgaacaaaaactggaaaaggaacgccacaatggatggccccagaggtgttatgtaatgaaccttcagatgagaagtctgacgtgtacagctatggggttattctatgggaacttgtgacccagaagataccctgggataatctcaatacaatgcaggttattggagctgtcggctttatggatcagaggttggacattccaagcgatacagatcctaaatgggcatcgatgatcgagagttgttgggatagcgacccgcagaaacgcccttcgttcctagaggtcctggacaggcttagagatctgcagaagcagtacagcctgcaggctcagatgcagcgtaacctgtccgcggatgctctcctgaaaggcgctgtgaaatgagcgtcgaggaatgctagctctcggaatgtaatggaacatggcactggacacattgacagcgaccagggcaagcgttcatcgacatttgtagcgtctgcgtgctgatgaggaaggctggctacgtgcatcttggtggccttcgtatagaagaggaggagctacagtccggactccggaggctgtaccggcaaaggcggccggtgcatgcatggcttcatgtatctcaaggcctcaacgaagcttcataatgcggtaatcttcggccaagaaggccggacacttgtgaaacgagaatggctaagaaggccggactactttttgtattaacgccccagtttttcaatgggggaaaaatcgaattgtttataaattgtatacttagtctcgataacgttcttgcctgcatatagaaccgggtgtcttcagacgcatggatgggtggtagtagtgtgttcagatgcatagaaagatggtaagcatgtctctgctgctgctttccttactgaatggacctttgatgtcgtcgctcattgcagcgttttctgaacagtgaccacattacagccggctgcacgcctgcacttgca

SEQ ID NO: 42451 - DNA, 5447 bp, Zea Mays
aggagcggcagttagggttaggaaaccctaaccggccactaccttcccaaacggcggcggtcagcacctggcggcggtgggcgcgaccccggtccccggcctcccctggcggtcgtacgggcagcaccgacgcgaggccactcggtccctcggcgtaggccggcgcacgcccgcggcggcatggcgtcccggtgacgctggcggccagggcgtagctctctggcggcgcgggcgcggctgtgggtgtagccccggcgtcccacggcgtggacacgaggcgtggccggtggagccccggtgcagcgcggtcgcgcacccggctcaggccatcccggcccaaatggcgcggcggcgccccctggtggccggatccgcccggcatggccaccccacaaggggcgggcgcagctcggcggtccccctgcgcaggctcgcgcgaaccggcgcggcttcctggagggcgcgcggctccctggtgcgatgaggggcggcggctggggggcttgggctccctggtggcgcgcaggcgcgggatcagcccgactcgggcggatcggctactgccacggcgcggagggtccggcctcggcggctcggcggcccccagccccggctacctggcgcggacggtccggccacggtggcacagggcgcggagggtccggcctcggcggctcggcggcccccagccccggctacctggcgcggacggtccggccacggtggcacagggcgcggcccctgttgacgcgctagcgcggtcccctgacggcggcgcgcgggctcgcggccctcctgcgcgcgcgagcacggccccccggcggtggtccggttgccaggcgcggcgagcccgctgtgtcctcccggcatcagcgcgggcgtatggcccctcggcatggcggccccctcgacgtgcaggcgcagtggccctgtcaatgcgctgccccgacgaccggtccggcgcgggctaggccagcgcgtgtgcgcagccccgacggggcgcagtaccatgggcaggacgcgtgcgaagcccccgcagaacccctggtggcccgtggccctgatccggcttggaacatggccggtggccccgatgagccatggccgtgaatggcgaagcaaccatcagaaacaagaaagattaaacaaaatagtgataatgcgtaccacataatccttctgcacatttctgtttcttaacttctgtgagcgattccttctctcagcaacttcaacttctctctgtttctcacgagcagtgctgataacgtgttaaactctatcacaacgctcagtggcaaatgaagattaacagagacaaagacaaatcgctgggacaatcctttattgcagagtagtgaagtatatatacaagagttcccaaggggtgtgtcccttgggaaataactgtcactacgacatatggatggattagatcacatgtataaaatgttttataacaatgtgaaaccacatctgtggaactttcagtgtgtgatgactgggtcactggtggaataccgtgttttctgagctggtcgctttcagttcgcggccaaagtcgatagctcaactatcttttgagtttagctcccaggttctttggcttcatttcaacaagcccgatcttcttctgacctctaaggtaaacctgcgaggaaaccattcccaaagagcatggcactctggaacggcataggtcaggtggcaagcatcgcacagttagccggggtcgatgcctatgggctcatctccatgatcgtggaggctgcaaagacggtgaagaggaaccgggagacctgccagctactggcacgccgtgcaaggatgattggggaccttctacatcagcttgaaaggacacagctgatgcagcacatggagacgaggaacccagtggagcatctggaggagacgcttcggcatgcgtatgtcctcatcacatcctgtcgcaacagcagctacctatacaactgctgtatgggagggaagcaggctgatcggcttcgagaggtgcagaatgagattaccttctacctccaacttttcccccttgtcagctttgtcgacaacacccgtacttgggagcggcttctgagtagagcttgtcctctgtgcacaacagaaaacatggatgagttacatgcagcagcacatcatgtggaacatgaagatggatcagaggccatcaaggcaactaaattcgaaaatctcggaagtcatcctaccctaaaacctgacatagatcaaatggaaggccaagtcatgaggatgggaggattagtaaatctcattggtggtacaaaaggagcagagttatcatgttttaccttttctcatattttggcggcgacagacaacttttcagagaaaaatttggttggtaagggtggatttggttatgtctacaagggcaatcttattaatggtcttaacgttgccattaaaagatttgatgcatgttcatcatatcaaggtccacatgagttcagaactgagattgatgccattccaaatcttcgacacaagaacataattggtctacttgggtactgtgttcaaggagaagaaagcatacttgtctatgaatatatgtcaaataaatgcttggcatctgtcattgctggcaagtttttggggttgctaaattggtccaagcgtcttcaaataatcaaaggcatagcagatggtcttgcttttctgcatgggcattctcagatgtgcattgtccacagggacataaaaccaagcaacatcctgctggaccatgaaatgaatgccaagattactgattttggtctggcattaatgttggctccaaaatcgactgcagaggttcctgttttgggcacatatggctatgcagatcctgaatatattgttactggaaaaatctcggagaaggcagacatatatggatttggcatagtactttttgagataataagtggaaggtcgatccattcttatatgaaggcagagggcactcgagagctaccataccctgcttatgcacacaaatacaacccaaagacgctgcacaagcttgttgatccattgttgcgcgtggacgagcatgaacgggctcagattatggaatgcgtgagggtggcgcagttatgcgttgaccatcgtgccaagcatcggcctgtgatgtcagaagttgtcaccatgcttggcatggcagcatcaaagggatagttgtagctttgcaagacccacaaagggatagctgtgaatgatgcaagtgtgaactaattaatgagctctactcaactattttcccccttctcatgcatgattgtgtaaacatcagggagattagtcagtgaaatatttggcatgcaccttacttgagcgctgtggctaataaattgtggttggctggaatgcaaattgctccatggtgttgttaatttggtctaagctggagatgaagtgactgactccatgggcatgtggttcacctccctgctggtggtggacgacaaatatcaggctggcattcacgtagaatgtgcggcaaagactgatgactgatgagtgatgactggtgaggaaccagacaaatgatgagttgaatctttcaaagtttgacagttcagtctccaatttttttttctcaaatcattggtactgtgtacaagcttgaagcttcctggaaacagcccctcctccacgggtttgttcaaccatgtgagcttccacaccagtacaggtcatcagtgtcttggactttctctgccactcccagaccttggtatcctttttaagggcgctcattctgtcattcaccacacctgtctcgttcctcactaccacaggtccaaagcaagcaagaagaaacgaaggacgataatggctctggtcgggcaggtggcgacggtggcgcagctggtgggcgtggacgcgttcagcctcatcacgatgatcgcggaggcggcgcagacggcgcggcggaaccgcgccgtgtgccggcagctggcccggcgcgtggagatgatcggcagcctgctccggcggctgcgcgagcaggacgacaacgacgacatgcggctgctgcggcacgcggagacgcgcggccccgtggaggcgctggaggagacgctccggcgcgcctacctgctggtgcggtcctgccagcggcgcgggtacgcgttccgctgcctgatgggggcgcggcacgcggacgagctccgcgagatgcagggcgagatcggcttctacctcgacctcttccccctcatcagctacgtcgactgggcgaggcgtcgcggcaacggcaacggcaaggccgcctgtggtgacactcgttctttgcaagaggcacctatggtaagaccatgtcttgtgccgttcctgtttctctcgctcctgcgatggatgcaattgttcagggagtacgtcatgcacctgctctgcttatcagcttatgtttactgacgtgtgtatctgtgaaatcattttgcatgttaattttcattaacaatgatctagctagctagctagcaccttaattttcattgctgggaaacaagctagctagctactagtatgcagctgttgttggtcctctgtttttcggactactatctgtcgagttcaggtgaaattgcctttcttttttgaaccagattaaataggtatgttggaataatcctatttttttcctcttgggaacgcaaccagcacacgttcatcaggagtgtttctgtttggcctggctatctgtttcggtttggatacatacagatagcttaccttcttggttcatcaggagtgcaaagttgcaggatctcaggcggcgctgacgatgacgcagcagccctggagccttccacggccgagcaaggacgagtaggaaggagggccacatgcgtcgtggccccgtgacacctgcttcacgttctctcagattttaattttatgacgcacagcgaaaagcccaaaaggaggggggggaagatgctgtcgatacagatcgttcgatccacacgggaagatctgaagcatgagagcatgtctgaaacagtcgagatgtcagacatgtcctgccgccattttattttttacccgctcatgtacgggggttatttttttttcgtatttctttcctcagcggcgctgcagaatagaaccgatcgaggcggagttgtctgtcatctcatcatctctcagtaatattcacacgcgctgcgtctctcccaagggcgccgccaacttgtacatatagcagcatttttttttgggtttttttaagatggtgccctcgattttggtggtgtgctcagttttaccctcagtggtgttttttgctcagttttgcccttctgttctatagcactggaagggcaaaactgagcaaaaaacaccactaagggtaaaactgagcacaccaccaaaatcgagggcaccaccttaaaaaacccttttttttttggttcttc

SEQ ID NO: 42452 - DNA, 5362 bp, Zea Mays
aggagcggcagttagggttaggaaaccctaaccggccactaccttcccaaacggcggcggtcagcacctggcggcggtgggcgcgaccccggtccccggcctcccctggcggtcgtacgggcagcaccgacgcgaggccactcggtccctcggcgtaggccggcgcacgcccgcggcggcatggcgtcccggtgacgctggcggccagggcgtagctctctggcggcgcgggcgcggctgtgggtgtagccccggcgtcccacggcgtggacacgaggcgtggccggtggagccccggtgcagcgcggtcgcgcacccggctcaggccatcccggcccaaatggcgcggcggcgccccctggtggccggatccgcccggcatggccaccccacaaggggcgggcgcagctcggcggtccccctgcgcaggctcgcgcgaaccggcgcggcttcctggagggcgcgcggctccctggtgcgatgaggggcggcggctggggggcttgggctccctggtggcgcgcaggcgcgggatcagcccgactcgggcggatcggctactgccacggcgcggagggtccggcctcggcggctcggcggcccccagccccggctacctggcgcggacggtccggccacggtggcacagggcgcggagggtccggcctcggcggctcggcggcccccagccccggctacctggcgcggacggtccggccacggtggcacagggcgcggcccctgttgacgcgctagcgcggtcccctgacggcggcgcgcgggctcgcggccctcctgcgcgcgcgagcacggccccccggcggtggtccggttgccaggcgcggcgagcccgctgtgtcctcccggcatcagcgcgggcgtatggcccctcggcatggcggccccctcgacgtgcaggcgcagtggccctgtcaatgcgctgccccgacgaccggtccggcgcgggctaggccagcgcgtgtgcgcagccccgacggggcgcagtaccatgggcaggacgcgtgcgaagcccccgcagaacccctggtggcccgtggccctgatccggcttggaacatggccggtggccccgatgagccatggccgtgaatggcgaagcaaccatcagaaacaagaaagattaaacaaaatagtgataatgcgtaccacataatccttctgcacatttctgtttcttaacttctgtgagcgattccttctctcagcaacttcaacttctctctgtttctcacgagcagtgctgataacgtgttaaactctatcacaacgctcagtggcaaatgaagattaacagagacaaagacaaatcgctgggacaatcctttattgcagagtagtgaagtatatatacaagagttcccaaggggtgtgtcccttgggaaataactgtcactacgacatatggatggattagatcacatgtataaaatgttttataacaatgtgaaaccacatctgtggaactttcagtgtgtgatgactgggtcactggtggaataccgtgttttctgagctggtcgctttcagttcgcggccaaagtcgatagctcaactatcttttgagtttagctcccaggttctttggcttcatttcaacaagcccgatcttcttctgacctctaaggtaaacctgcgaggaaaccattcccaaagagcatggcactctggaacggcataggtcaggtggcaagcatcgcacagttagccggggtcgatgcctatgggctcatctccatgatcgtggaggctgcaaagacggtgaagaggaaccgggagacctgccagctactggcacgccgtgcaaggatgattggggaccttctacatcagcttgaaaggacacagctgatgcagcacatggagacgaggaacccagtggagcatctggaggagacgcttcggcatgcgtatgtcctcatcacatcctgtcgcaacagcagctacctatacaactgctgtatgggagggaagcaggctgatcggcttcgagaggtgcagaatgagattaccttctacctccaacttttcccccttgtcagctttgtcgacaacacccgtacttgggagcggcttctgagtagagcttgtcctctgtgcacaacagaaaacatggatgagttacatgcagcagcacatcatgtggaacatgaagatggatcagaggccatcaaggcaactaaattcgaaaatctcggaagtcatcctaccctaaaacctgacatagatcaaatggaaggccaagtcatgaggatgggaggattagtaaatctcattggtggtacaaaaggagcagagttatcatgttttaccttttctcatattttggcggcgacagacaacttttcagagaaaaatttggttggtaagggtggatttggttatgtctacaagggcaatcttattaatggtcttaacgttgccattaaaagatttgatgcatgttcatcatatcaaggtccacatgagttcagaactgagattgatgccattccaaatcttcgacacaagaacataattggtctacttgggtactgtgttcaaggagaagaaagcatacttgtctatgaatatatgtcaaataaatgcttggcatctgtcattgctggcaagtttttggggttgctaaattggtccaagcgtcttcaaataatcaaaggcatagcagatggtcttgcttttctgcatgggcattctcagatgtgcattgtccacagggacataaaaccaagcaacatcctgctggaccatgaaatgaatgccaagattactgattttggtctggcattaatgttggctccaaaatcgactgcagaggttcctgttttgggcacataatcctgaatatattgttactggaaaaatctcggagaaggcagacatatatggatttggcatagtactttttgagataataagtggaaggtcgatccattcttatatgaaggcagagggcactcgagagctaccataccctgcttatgcacacaaatacaacccaaagacgctgcacaagcttgttgatccattgttgcgcgtggacgagcatgaacgggctcagattatggaatgcgtgagggtggcgcagttatgcgttgaccatcgtgccaagcatcggcctgtgatgtcagaagttgtcaccatgcttggcatggcagcatcaaagggatagttgtagctttgcaagacccacaaagggatagctgtgaatgatgcaagtgtgaactaattaatgagctctactcaactattttcccccttctcatgcatgattgtgtaaacatcagggagattagtcagtgaaatatttggcatgcaccttacttgagcgctgtggctaataaattgtggttggctggaatgcaaattgctccatggtgttgttaatttggtctaagctggagatgaagtgactgactccatgggcatgtggttcacctccctgctggtggtggacgacaaatatcaggctggcattcacgtagaatgtgcggcaaagactgatgactgatgagtgatgactggtgaggaaccagacaaatgatgagttgaatctttcaaagtttgacagttcagtctccaatttttttttctcaaatcattggtactgtgtacaagcttgaagcttcctggaaacagcccctcctccacgggtttgttcaaccatgtgagcttccacaccagtacaggtcatcagtgtcttggactttctctgccactcccagaccttggtatcctttttaagggcgctcattctgtcattcaccacacctgtctcgttcctcactaccacaggtccaaagcaagcaagaagaaacgaaggacgataatggctctggtcgggcaggtggcgacggtggcgcagctggtgggcgtggacgcgttcagcctcatcacgatgatcgcggaggcggcgcagacggcgcggcggaaccgcgccgtgtgccggcagctggcccggcgcgtggagatgatcggcagcctgctccggcggctgcgcgagcaggacgacaacgacgacatgcggctgctgcggcacgcggagacgcgcggccccgtggaggcgctggaggagacgctccggcgcgcctacctgctggtgcggtcctgccagcggcgcgggtacgcgttccgctgcctgatgggggcgcggcacgcggacgagctccgcgagatgcagggcgagatcggcttctacctcgacctcttccccctcatcagctacgtcgactgggcgaggcgtcgcggcaacggcaacggcaaggccgcctgtggtgacactcgttctttgcaagaggcacctatggtaagaccatgtcttgtgccgttcctgtttctctcgctcctgcgatggatgcaattgttcagggactagctagcaccttaattttcattgctgggaaacaagctagctagctactagtatgcagctgttgttggtcctctgtttttcggactactatctgtcgagttcaggtgaaattgcctttcttttttgaaccagattaaataggtatgttggaataatcctatttttttcctcttgggaacgcaaccagcacacgttcatcaggagtgtttctgtttggcctggctatctgtttcggtttggatacatacagatagcttaccttcttggttcatcaggagtgcaaagttgcaggatctcaggcggcgctgacgatgacgcagcagccctggagccttccacggccgagcaaggacgagtaggaaggagggccacatgcgtcgtggccccgtgacacctgcttcacgttctctcaggaaaaaaaatctgcaaaaaaatctgcaattttaattttatgacgcacagcgaaaagcccaaaaggaggggggggaagatgctgtcgatacagatcgttcgatccacacgggaagatctgaagcatgagagcatgtctgaaacagtcgagatgtcagacatgtcctgccgccattttattttttacccgctcatgtacgggggttatttttttttcgtatttctttcctcagcggcgctgcagaatagaaccgatcgaggcggagttgtctgtcatctcatcatctctcagtaatattcacacgcgctgcgtctctcccaagggcgccgccaacttgtacatatagcagcatttttttttgggtttttttaagatggtgccctcgattttggtggtgtgctcagttttaccctcagtggtgttttttgctcagttttgcccttctgttctatagcactggaagggcaaaactgagcaaaaaacaccactaagggtaaaactgagcacaccaccaaaatcgagggcaccaccttaaaaaacccttttttttttggttcttc

SEQ ID NO: 42453 - DNA, 5448 bp, Zea Mays
aaagtctattatattcataataaacagtcaggtatgtacaatatatgtaatagtttgcagtctaaatatcgaatttagacgcacttatacgagttagaatctgaaattacatataaaacaatcttgtactgaaattcaaaatttaaaatagtaaagtagactattctggatcctggaaaaacggcccaggcagcctgccagaggcggcccattttggcctggtcgcacaacatgggtgcaaaaaaaaagggagggggcgtatgggcctggacggcggcctcattaggagcggcagttagggttaggaaaccctaaccggccactaccttcccaaacggcggcggtcagcacctggcggcggtgggcgcgaccccggtccccggcctcccctggcggtcgtacgggcagcaccgacgcgaggccactcggtccctcggcgtaggccggcgcacgcccgcggcggcatggcgtcccggtgacgctggcggccagggcgtagctctctggcggcgcgggcgcggctgtgggtgtagccccggcgtcccacggcgtggacacgaggcgtggccggtggagccccggtgcagcgcggtcgcgcacccggctcaggccatcccggcccaaatggcgcggcggcgccccctggtggccggatccgcccggcatggccaccccacaaggggcgggcgcagctcggcggtccccctgcgcaggctcgcgcgaaccggcgcggcttcctggagggcgcgcggctccctggtgcgatgaggggcggcggctggggggcttgggctccctggtggcgcgcaggcgcgggatcagcccgactcgggcggatcggctactgccacggcgcggagggtccggcctcggcggctcggcggcccccagccccggctacctggcgcggacggtccggccacggtggcacagggcgcggagggtccggcctcggcggctcggcggcccccagccccggctacctggcgcggacggtccggccacggtggcacagggcgcggcccctgttgacgcgctagcgcggtcccctgacggcggcgcgcgggctcgcggccctcctgcgcgcgcgagcacggccccccggcggtggtccggttgccaggcgcggcgagcccgctgtgtcctcccggcatcagcgcgggcgtatggcccctcggcatggcggccccctcgacgtgcaggcgcagtggccctgtcaatgcgctgccccgacgaccggtccggcgcgggctaggccagcgcgtgtgcgcagccccgacggggcgcagtaccatgggcaggacgcgtgcgaagcccccgcagaacccctggtggcccgtggccctgatccggcttggaacatggccggtggccccgatgagccatggccgtgaatggcgaagcaaccatcagaaacaagaaagattaaacaaaatagtgataatgcgtaccacataatccttctgcacatttctgtttcttaacttctgtgagcgattccttctctcagcaacttcaacttctctctgtttctcacgagcagtgctgataacgtgttaaactctatcacaacgctcagtggcaaatgaagattaacagagacaaagacaaatcgctgggacaatcctttattgcagagtagtgaagtatatatacaagagttcccaaggggtgtgtcccttgggaaataactgtcactacgacatatggatggattagatcacatgtataaaatgttttataacaatgtgaaaccacatctgtggaactttcagtgtgtgatgactgggtcactggtggaataccgtgttttctgagctggtcgctttcagttcgcggccaaagtcgatagctcaactatcttttgagtttagctcccaggttctttggcttcatttcaacaagcccgatcttcttctgacctctaaggtaaacctgcgaggaaaccattcccaaagagcatggcactctggaacggcataggtcaggtggcaagcatcgcacagttagccggggtcgatgcctatgggctcatctccatgatcgtggaggctgcaaagacggtgaagaggaaccgggagacctgccagctactggcacgccgtgcaaggatgattggggaccttctacatcagcttgaaaggacacagctgatgcagcacatggagacgaggaacccagtggagcatctggaggagacgcttcggcatgcgtatgtcctcatcacatcctgtcgcaacagcagctacctatacaactgctgtatgggagggaagcaggctgatcggcttcgagaggtgcagaatgagattaccttctacctccaacttttcccccttgtcagctttgtcgacaacacccgtacttgggagcggcttctgagtagagcttgtcctctgtgcacaacagaaaacatggatgagttacatgcagcagcacatcatgtggaacatgaagatggatcagaggccatcaaggcaactaaattcgaaaatctcggaagtcatcctaccctaaaacctgacatagatcaaatggaaggccaagtcatgaggatgggaggattagtaaatctcattggtggtacaaaaggagcagagttatcatgttttaccttttctcatattttggcggcgacagacaacttttcagagaaaaatttggttggtaagggtggatttggttatgtctacaagggcaatcttattaatggtcttaacgttgccattaaaagatttgatgcatgttcatcatatcaaggtccacatgagttcagaactgagattgatgccattccaaatcttcgacacaagaacataattggtctacttgggtactgtgttcaaggagaagaaagcatacttgtctatgaatatatgtcaaataaatgcttggcatctgtcattgctgatgaaacaaaaagggggttgctaaattggtccaagcgtcttcaaataatcaaaggcatagcagatggtcttgcttttctgcatgggcattctcagatgtgcattgtccacagggacataaaaccaagcaacatcctgctggaccatgaaatgaatgccaagattactgattttggtctggcattaatgttggctccaaaatcgactgcagaggttcctgttttgggcacatatggctatgcagatcctgaatatattgttactggaaaaatctcggagaaggcagacatatatggatttggcatagtactttttgagataataagtggaaggtcgatccattcttatatgaaggcagagggcactcgagagctaccataccctgcttatgcacacaaatacaacccaaagacgctgcacaagcttgttgatccattgttgcgcgtggacgagcatgaacgggctcagattatggaatgcgtgagggtggcgcagttatgcgttgaccatcgtgccaagcatcggcctgtgatgtcagaagttgtcaccatgcttggcatggcagcatcaaagggatagttgtagctttgcaagacccacaaagggatagctgtgaatgatgcaagtgtgaactaattaatgagctctactcaactattttcccccttctcatgcatgattgtgtaaacatcagggagattagtcagtgaaatatttggcatgcaccttacttgagcgctgtggctaataaattgtggttggctggaatgcaaattgctccatggtgttgttaatttggtctaagctggagatgaagtgactgactccatgggcatgtggttcacctccctgctggtggtggacgacaaatatcaggctggcattcacgtagaatgtgcggcaaagactgatgactgatgagtgatgactggtgaggaaccagacaaatgatgagttgaatctttcaaagtttgacagttcagtctccaatttttttttctcaaatcattggtactgtgtacaagcttgaagcttcctggaaacagcccctcctccacgggtttgttcaaccatgtccaaagcaagcaagaagaaacgaaggacgataatggctctggtcgggcaggtggcgacggtggcgcagctggtgggcgtggacgcgttcagcctcatcacgatgatcgcggaggcggcgcagacggcgcggcggaaccgcgccgtgtgccggcagctggcccggcgcgtggagatgatcggcagcctgctccggcggctgcgcgagcaggacgacaacgacgacatgcggctgctgcggcacgcggagacgcgcggccccgtggaggcgctggaggagacgctccggcgcgcctacctgctggtgcggtcctgccagcggcgcgggtacgcgttccgctgcctgatgggggcgcggcacgcggacgagctccgcgagatgcagggcgagatcggcttctacctcgacctcttccccctcatcagctacgtcgactgggcgaggcgtcgcggcaacggcaacggcaaggccgcctgtggtgacactcgttctttgcaagaggcacctatggtaagaccatgtcttgtgccgttcctgtttctctcgctcctgcgatggatgcaattgttcagggagtacgtcatgcacctgctctgcttatcagcttatgtttactgacgtgtgtatctgtgaaatcattttgcatgttaattttcattaacaatgatctagctagctagctagcaccttaattttcattgctgggaaacaagctagctagctactagtatgcagctgttgttggtcctctgtttttcggactactatctgtcgagttcaggtgaaattgcctttcttttttgaaccagattaaataggtatgttggaataatcctatttttttcctcttgggaacgcaaccagcacacgttcatcaggagtgtttctgtttggcctggctatctgtttcggtttggatacatacagatagcttaccttcttggttcatcaggagtgcaaagttgcaggatctcaggcggcgctgacgatgacgcagcagccctggagccttccacggccgagcaaggacgagtaggaaggagggccacatgcgtcgtggccccgtgacacctgcttcacgttctctcagattttaattttatgacgcacagcgaaaagcccaaaaggaggggggggaagatgctgtcgatacagatcgttcgatccacacgggaagatctgaagcatgagagcatgtctgaaacagtcgagatgtcagacatgtcctgccgccattttattttttacccgctcatgtacgggggttatttttttttcgtatttctttcctcagcggcgctgcagaatagaaccgatcgaggcggagttgtctgtcatctcatcatctctcagtaatattcacacgcgctgcgtctctcccaagggcgccgccaacttgtacattgagcacaccaccaaaatcgagggcaccaccttaaaaaacccttttttttttggttcttc

SEQ ID NO: 42454 - DNA, 5597 bp, Zea Mays
aaagtctattatattcataataaacagtcaggtatgtacaatatatgtaatagtttgcagtctaaatatcgaatttagacgcacttatacgagttagaatctgaaattacatataaaacaatcttgtactgaaattcaaaatttaaaatagtaaagtagactattctggatcctggaaaaacggcccaggcagcctgccagaggcggcccattttggcctggtcgcacaacatgggtgcaaaaaaaaagggagggggcgtatgggcctggacggcggcctcattaggagcggcagttagggttaggaaaccctaaccggccactaccttcccaaacggcggcggtcagcacctggcggcggtgggcgcgaccccggtccccggcctcccctggcggtcgtacgggcagcaccgacgcgaggccactcggtccctcggcgtaggccggcgcacgcccgcggcggcatggcgtcccggtgacgctggcggccagggcgtagctctctggcggcgcgggcgcggctgtgggtgtagccccggcgtcccacggcgtggacacgaggcgtggccggtggagccccggtgcagcgcggtcgcgcacccggctcaggccatcccggcccaaatggcgcggcggcgccccctggtggccggatccgcccggcatggccaccccacaaggggcgggcgcagctcggcggtccccctgcgcaggctcgcgcgaaccggcgcggcttcctggagggcgcgcggctccctggtgcgatgaggggcggcggctggggggcttgggctccctggtggcgcgcaggcgcgggatcagcccgactcgggcggatcggctactgccacggcgcggagggtccggcctcggcggctcggcggcccccagccccggctacctggcgcggacggtccggccacggtggcacagggcgcggagggtccggcctcggcggctcggcggcccccagccccggctacctggcgcggacggtccggccacggtggcacagggcgcggcccctgttgacgcgctagcgcggtcccctgacggcggcgcgcgggctcgcggccctcctgcgcgcgcgagcacggccccccggcggtggtccggttgccaggcgcggcgagcccgctgtgtcctcccggcatcagcgcgggcgtatggcccctcggcatggcggccccctcgacgtgcaggcgcagtggccctgtcaatgcgctgccccgacgaccggtccggcgcgggctaggccagcgcgtgtgcgcagccccgacggggcgcagtaccatgggcaggacgcgtgcgaagcccccgcagaacccctggtggcccgtggccctgatccggcttggaacatggccggtggccccgatgagccatggccgtgaatggcgaagcaaccatcagaaacaagaaagattaaacaaaatagtgataatgcgtaccacataatccttctgcacatttctgtttcttaacttctgtgagcgattccttctctcagcaacttcaacttctctctgtttctcacgagcagtgctgataacgtgttaaactctatcacaacgctcagtggcaaatgaagattaacagagacaaagacaaatcgctgggacaatcctttattgcagagtagtgaagtatatatacaagagttcccaaggggtgtgtcccttgggaaataactgtcactacgacatatggatggattagatcacatgtataaaatgttttataacaatgtgaaaccacatctgtggaactttcagtgtgtgatgactgggtcactggtggaataccgtgttttctgagctggtcgctttcagttcgcggccaaagtcgatagctcaactatcttttgagtttagctcccaggttctttggcttcatttcaacaagcccgatcttcttctgacctctaaggtaaacctgcgaggaaaccattcccaaagagcatggcactctggaacggcataggtcaggtggcaagcatcgcacagttagccggggtcgatgcctatgggctcatctccatgatcgtggaggctgcaaagacggtgaagaggaaccgggagacctgccagctactggcacgccgtgcaaggatgattggggaccttctacatcagcttgaaaggacacagctgatgcagcacatggagacgaggaacccagtggagcatctggaggagacgcttcggcatgcgtatgtcctcatcacatcctgtcgcaacagcagctacctatacaactgctgtatgggagggaagcaggctgatcggcttcgagaggtgcagaatgagattaccttctacctccaacttttcccccttgtcagctttgtcgacaacacccgtacttgggagcggcttctgagtagagcttgtcctctgtgcacaacagaaaacatggatgagttacatgcagcagcacatcatgtggaacatgaagatggatcagaggccatcaaggcaactaaattcgaaaatctcggaagtcatcctaccctaaaacctgacatagatcaaatggaaggccaagtcatgaggatgggaggattagtaaatctcattggtggtacaaaaggagcagagttatcatgttttaccttttctcatattttggcggcgacagacaacttttcagagaaaaatttggttggtaagggtggatttggttatgtctacaagggcaatcttattaatggtcttaacgttgccattaaaagatttgatgcatgttcatcatatcaaggtccacatgagttcagaactgagattgatgccattccaaatcttcgacacaagaacataattggtctacttgggtactgtgttcaaggagaagaaagcatacttgtctatgaatatatgtcaaataaatgcttggcatctgtcattgctgatgaaacaaaaagggggttgctaaattggtccaagcgtcttcaaataatcaaaggcatagcagatggtcttgcttttctgcatgggcattctcagatgtgcattgtccacagggacataaaaccaagcaacatcctgctggaccatgaaatgaatgccaagattactgattttggtctggcattaatgttggctccaaaatcgactgcagaggttcctgttttgggcacatatggctatgcagatcctgaatatattgttactggaaaaatctcggagaaggcagacatatatggatttggcatagtactttttgagataataagtggaaggtcgatccattcttatatgaaggcagagggcactcgagagctaccataccctgcttatgtaagtatttgccttgccgcagcacacaaatacaacccaaagacgctgcacaagcttgttgatccattgttgcgcgtggacgagcatgaacgggctcagattatggaatgcgtgagggtggcgcagttatgcgttgaccatcgtgccaagcatcggcctgtgatgtcagaagttgtcaccatgcttggcatggcagcatcaaagggatagttgtagctttgcaagacccacaaagggatagctgtgaatgatgcaagtgtgaactaattaatgagctctactcaactattttcccccttctcatgcatgattgtgtaaacatcagggagattagtcagtgaaatatttggcatgcaccttacttgagcgctgtggctaataaattgtggttggctggaatgcaaattgctccatggtgttgttaatttggtctaagctggagatgaagtgactgactccatgggcatgtggttcacctccctgctggtggtggacgacaaatatcaggctggcattcacgtagaatgtgcggcaaagactgatgactgatgagtgatgactggtgaggaaccagacaaatgatgagttgaatctttcaaagtttgacagttcagtctccaatttttttttctcaaatcattggtactgtgtacaagcttgaagcttcctggaaacagcccctcctccacgggtttgttcaaccatgtgagcttccacaccagtacaggtcatcagtgtcttggactttctctgccactcccagaccttggtatcctttttaagggcgctcattctgtcattcaccacacctgtctcgttcctcactaccacaggtccaaagcaagcaagaagaaacgaaggacgataatggctctggtcgggcaggtggcgacggtggcgcagctggtgggcgtggacgcgttcagcctcatcacgatgatcgcggaggcggcgcagacggcgcggcggaaccgcgccgtgtgccggcagctggcccggcgcgtggagatgatcggcagcctgctccggcggctgcgcgagcaggacgacaacgacgacatgcggctgctgcggcacgcggagacgcgcggccccgtggaggcgctggaggagacgctccggcgcgcctacctgctggtgcggtcctgccagcggcgcgggtacgcgttccgctgcctgatgggggcgcggcacgcggacgagctccgcgagatgcagggcgagatcggcttctacctcgacctcttccccctcatcagctacgtcgactgggcgaggcgtcgcggcaacggcaacggcaaggccgcctgtggtgacactcgttctttgcaagaggcacctatggtaagaccatgtcttgtgccgttcctgtttctctcgctcctgcgatggatgcaattgttcagggagtacgtcatgcacctgctctgcttatcagcttatgtttactgacgtgtgtatctgtgaaatcattttgcatgttaattttcattaacaatgatctagctagctagctagcaccttaattttcattgctgggaaacaagctagctagctactagtatgcagctgttgttggtcctctgtttttcggactactatctgtcgagttcaggtgaaattgcctttcttttttgaaccagattaaataggtatgttggaataatcctatttttttcctcttgggaacgcaaccagcacacgttcatcaggagtgtttctgtttggcctggctatctgtttcggtttggatacatacagatagcttaccttcttggttcatcaggagtgcaaagttgcaggatctcaggcggcgctgacgatgacgcagcagccctggagccttccacggccgagcaaggacgagtaggaaggagggccacatgcgtcgtggccccgtgacacctgcttcacgttctctcagattttaattttatgacgcacagcgaaaagcccaaaaggaggggggggaagatgctgtcgatacagatcgttcgatccacacgggaagatctgaagcatgagagcatgtctgaaacagtcgagatgtcagacatgtcctgccgccattttattttttacccgctcatgtacgggggttatttttttttcgtatttctttcctcagcggcgctgcagaatagaaccgatcgaggcggagttgtctgtcatctcatcatctctcagtaatattcacacgcgctgcgtctctcccaagggcgccgccaacttgtacattgagcacaccaccaaaatcgagggcaccaccttaaaaaacccttttttttttggttcttc

SEQ ID NO: 42455 - DNA, 5435 bp, Zea Mays
aaagtctattatattcataataaacagtcaggtatgtacaatatatgtaatagtttgcagtctaaatatcgaatttagacgcacttatacgagttagaatctgaaattacatataaaacaatcttgtactgaaattcaaaatttaaaatagtaaagtagactattctggatcctggaaaaacggcccaggcagcctgccagaggcggcccattttggcctggtcgcacaacatgggtgcaaaaaaaaagggagggggcgtatgggcctggacggcggcctcattaggagcggcagttagggttaggaaaccctaaccggccactaccttcccaaacggcggcggtcagcacctggcggcggtgggcgcgaccccggtccccggcctcccctggcggtcgtacgggcagcaccgacgcgaggccactcggtccctcggcgtaggccggcgcacgcccgcggcggcatggcgtcccggtgacgctggcggccagggcgtagctctctggcggcgcgggcgcggctgtgggtgtagccccggcgtcccacggcgtggacacgaggcgtggccggtggagccccggtgcagcgcggtcgcgcacccggctcaggccatcccggcccaaatggcgcggcggcgccccctggtggccggatccgcccggcatggccaccccacaaggggcgggcgcagctcggcggtccccctgcgcaggctcgcgcgaaccggcgcggcttcctggagggcgcgcggctccctggtgcgatgaggggcggcggctggggggcttgggctccctggtggcgcgcaggcgcgggatcagcccgactcgggcggatcggctactgccacggcgcggagggtccggcctcggcggctcggcggcccccagccccggctacctggcgcggacggtccggccacggtggcacagggcgcggagggtccggcctcggcggctcggcggcccccagccccggctacctggcgcggacggtccggccacggtggcacagggcgcggcccctgttgacgcgctagcgcggtcccctgacggcggcgcgcgggctcgcggccctcctgcgcgcgcgagcacggccccccggcggtggtccggttgccaggcgcggcgagcccgctgtgtcctcccggcatcagcgcgggcgtatggcccctcggcatggcggccccctcgacgtgcaggcgcagtggccctgtcaatgcgctgccccgacgaccggtccggcgcgggctaggccagcgcgtgtgcgcagccccgacggggcgcagtaccatgggcaggacgcgtgcgaagcccccgcagaacccctggtggcccgtggccctgatccggcttggaacatggccggtggccccgatgagccatggccgtgaatggcgaagcaaccatcagaaacaagaaagattaaacaaaatagtgataatgcgtaccacataatccttctgcacatttctgtttcttaacttctgtgagcgattccttctctcagcaacttcaacttctctctgtttctcacgagcagtgctgataacgtgttaaactctatcacaacgctcagtggcaaatgaagattaacagagacaaagacaaatcgctgggacaatcctttattgcagagtagtgaagtatatatacaagagttcccaaggggtgtgtcccttgggaaataactgtcactacgacatatggatggattagatcacatgtataaaatgttttataacaatgtgaaaccacatctgtggaactttcagtgtgtgatgactgggtcactggtggaataccgtgttttctgagctggtcgctttcagttcgcggccaaagtcgatagctcaactatcttttgagtttagctcccaggttctttggcttcatttcaacaagcccgatcttcttctgacctctaaggtaaacctgcgaggaaaccattcccaaagagcatggcactctggaacggcataggtcaggtggcaagcatcgcacagttagccggggtcgatgcctatgggctcatctccatgatcgtggaggctgcaaagacggtgaagaggaaccgggagacctgccagctactggcacgccgtgcaaggatgattggggaccttctacatcagcttgaaaggacacagctgatgcagcacatggagacgaggaacccagtggagcatctggaggagacgcttcggcatgcgtatgtcctcatcacatcctgtcgcaacagcagctacctatacaactgctgtatgggagggaagcaggctgatcggcttcgagaggtgcagaatgagattaccttctacctccaacttttcccccttgtcagctttgtcgacaacacccgtacttgggagcggcttctgagtagagcttgtcctctgtgcacaacagaaaacatggatgagttacatgcagcagcacatcatgtggaacatgaagatggatcagaggccatcaaggcaactaaattcgaaaatctcggaagtcatcctaccctaaaacctgacatagatcaaatggaaggccaagtcatgaggatgggaggattagtaaatctcattggtggtacaaaaggagcagagttatcatgttttaccttttctcatattttggcggcgacagacaacttttcagagaaaaatttggttggtaagggtggatttggttatgtctacaagggcaatcttattaatggtcttaacgttgccattaaaagatttgatgcatgttcatcatatcaaggtccacatgagttcagaactgagattgatgccattccaaatcttcgacacaagaacataattggtctacttgggtactgtgttcaaggagaagaaagcatacttgtctatgaatatatgtcaaataaatgcttggcatctgtcattgctgggggttgctaaattggtccaagcgtcttcaaataatcaaaggcatagcagatggtcttgcttttctgcatgggcattctcagatgtgcattgtccacagggacataaaaccaagcaacatcctgctggaccatgaaatgaatgccaagattactgattttggtctggcattaatgttggctccaaaatcgactgcagaggttcctgttttgggcacatatggctatgcagatcctgaatatattgttactggaaaaatctcggagaaggcagacatatatggatttggcatagtactttttgagataataagtggaaggtcgatccattcttatatgaaggcagagggcactcgagagctaccataccctgcttatgcacacaaatacaacccaaagacgctgcacaagcttgttgatccattgttgcgcgtggacgagcatgaacgggctcagattatggaatgcgtgagggtggcgcagttatgcgttgaccatcgtgccaagcatcggcctgtgatgtcagaagttgtcaccatgcttggcatggcagcatcaaagggatagttgtagctttgcaagacccacaaagggatagctgtgaatgatgcaagtgtgaactaattaatgagctctactcaactattttcccccttctcatgcatgattgtgtaaacatcagggagattagtcagtgaaatatttggcatgcaccttacttgagcgctgtggctaataaattgtggttggctggaatgcaaattgctccatggtgttgttaatttggtctaagctggagatgaagtgactgactccatgggcatgtggttcacctccctgctggtggtggacgacaaatatcaggctggcattcacgtagaatgtgcggcaaagactgatgactgatgagtgatgactggtgaggaaccagacaaatgatgagttgaatctttcaaagtttgacagttcagtctccaatttttttttctcaaatcattggtactgtgtacaagcttgaagcttcctggaaacagcccctcctccacgggtttgttcaaccatgtccaaagcaagcaagaagaaacgaaggacgataatggctctggtcgggcaggtggcgacggtggcgcagctggtgggcgtggacgcgttcagcctcatcacgatgatcgcggaggcggcgcagacggcgcggcggaaccgcgccgtgtgccggcagctggcccggcgcgtggagatgatcggcagcctgctccggcggctgcgcgagcaggacgacaacgacgacatgcggctgctgcggcacgcggagacgcgcggccccgtggaggcgctggaggagacgctccggcgcgcctacctgctggtgcggtcctgccagcggcgcgggtacgcgttccgctgcctgatgggggcgcggcacgcggacgagctccgcgagatgcagggcgagatcggcttctacctcgacctcttccccctcatcagctacgtcgactgggcgaggcgtcgcggcaacggcaacggcaaggccgcctgtggtgacactcgttctttgcaagaggcacctatggtaagaccatgtcttgtgccgttcctgtttctctcgctcctgcgatggatgcaattgttcagggagtacgtcatgcacctgctctgcttatcagcttatgtttactgacgtgtgtatctgtgaaatcattttgcatgttaattttcattaacaatgatctagctagctagctagcaccttaattttcattgctgggaaacaagctagctagctactagtatgcagctgttgttggtcctctgtttttcggactactatctgtcgagttcaggtgaaattgcctttcttttttgaaccagattaaataggtatgttggaataatcctatttttttcctcttgggaacgcaaccagcacacgttcatcaggagtgtttctgtttggcctggctatctgtttcggtttggatacatacagatagcttaccttcttggttcatcaggagtgcaaagttgcaggatctcaggcggcgctgacgatgacgcagcagccctggagccttccacggccgagcaaggacgagtaggaaggagggccacatgcgtcgtggccccgtgacacctgcttcacgttctctcagattttaattttatgacgcacagcgaaaagcccaaaaggaggggggggaagatgctgtcgatacagatcgttcgatccacacgggaagatctgaagcatgagagcatgtctgaaacagtcgagatgtcagacatgtcctgccgccattttattttttacccgctcatgtacgggggttatttttttttcgtatttctttcctcagcggcgctgcagaatagaaccgatcgaggcggagttgtctgtcatctcatcatctctcagtaatattcacacgcgctgcgtctctcccaagggcgccgccaacttgtacattgagcacaccaccaaaatcgagggcaccaccttaaaaaacccttttttttttggttcttc

SEQ ID NO: 42456 - DNA, 1419 bp, Zea Mays
ggacggatgcgaaatctcaggccacggccacaccacacccctctcccctccctccaccttctccctcccacgccggtccttcttgagcgccgtgagtcgctcgcccgtgtccgccgcacactattccatgtcagccggcgtccgccctctccaccgagcgctgcatcaacgctggccacgccgcggggcagaagcagcagggcagccacagccctgacgccttgcgtcgaccttggaccctcttttggcgccaacaataggaggaggagcggagccacgttccccgcgccgccgctcctgtcccggatgctgtcacccaccacgcggccggcagctcggactgacgagagatctggcaccagcccggagaagcccctgttgcgccggtgggtactgcgggcgccgtcgagaggatctacgtggttagggttgcagtccccaagtgcgatgagatccagaacgccatctccgacgaccttgtgcaccgggtccggaacgatgtcggcgggaggtgaagcagagatgaaggagctgcccgaggagcttgcctgcctcgcatgcgaaacatcggcccaagtggtggcggcgggacctgccgcgtcggcaccgcttatgtgtcgcatgaagaagggcgagcccatcaagctcgtcttcaccggcaagaagaagggaatcactcccgtcgcctccttcagcgccctcgacaaggagggcgaggaccccaccccgtctgccgcagccgagccgaagcccagcaacgatccagccgaggacgacataagcactttatagaaaataattctcacaggtggaagcttgttgcagtctacagaattaggcgacactcttactggttgccttttgatttaactaccattcaaattagcaactcttgagcagatttattagatccaattgctgtcaaaggataagatgacctttatatagatttttcagttgccatttcaacgatttattgtgattgtaatgctcgcccctatatcaggaaggtgggcatatcagtatcttggatgacgactctactgaatgatgtccataatacacttgcggagtatttggtttgtagagtcactttatgtttcatgaagtgatgcattataagttcattccatcaattttggtggaatcaactcactcctcgtatatatactaattattagcttatgaagaatggagtggtgatgtatcaacccattttattccacaaaccaaataaaaaagtgagaaatgagaagaagatggatcacttcattactcaaaccaaacagcctattaatgtgccatgatcatgtgcctaactgctttaccggttaattgagccgcataccattgaatattgtgcatcagttatatcattgggaagtgttattctcaccggtaattgcaagttattgtaat

SEQ ID NO: 42457 - DNA, 1578 bp, Zea Mays
ggacggatgcgaaatctcaggccacggccacaccacacccctctcccctccctccaccttctccctcccacgccggtccttcttgagcgccgtgagtcgctcgcccgtgtccgccgcacactattccatgtcagccggcgtccgccctctccaccgagcgctgcatcaacgctggccacgccgcggggcagaagcagcagggcagccacagccctgacgccttgcgtcgaccttggaccctcttttggcgccaacaataggaggaggagcggagccacgttccccgcgccgccgctcctgtcccggatgctgtcacccaccacgcggccggcagctcggactgacgagagatctggcaccagcccggagaagcccctgttgcgccggtgggtactgcgggcgccgtcgagaggatctacgtggttagggttgcagtccccaagtgcgatgagatccagaacgccatctccgacgaccttgtgcaccgggtccggaacgatgtcggcgggaggtgaagcagagatgaaggagctgcccgaggagcttgcctgcctcgcatgcgaaacatcggcccaagtggtggcggcgggacctgccgcgtcggcaccgcttatgtgtcgcatgtgagcttcttttccgtttgtctgccgacactaggacctcccctgcccccacgagatttgtatctgtacctgactacgatgaggagtacaatgactgtgatgatgatgactatgatggaaccgaatatggcatcaaccatcctgttaatatggggaaaggaagaagggcgagcccatcaagctcgtcttcaccggcaagaagaagggaatcactcccgtcgcctccttcagcgccctcgacaaggagggcgaggaccccaccccgtctgccgcagccgagccgaagcccagcaacgatccagccgaggacgacataagcactttatagaaaataattctcacaggtggaagcttgttgcagtctacagaattaggcgacactcttactggttgccttttgatttaactaccattcaaattagcaactcttgagcagatttattagatccaattgctgtcaaaggataagatgacctttatatagatttttcagttgccatttcaacgatttattgtgattgtaatgctcgcccctatatcaggaaggtgggcatatcagtatcttggatgacgactctactgaatgatgtccataatacacttgcggagtatttggtttgtagagtcactttatgtttcatgaagtgatgcattataagttcattccatcaattttggtggaatcaactcactcctcgtatatatactaattattagcttatgaagaatggagtggtgatgtatcaacccattttattccacaaaccaaataaaaaagtgagaaatgagaagaagatggatcacttcattactcaaaccaaacagcctattaatgtgccatgatcatgtgcctaactgctttaccggttaattgagccgcataccattgaatattgtgcatcagttatatcattgggaagtgttattctcaccggtaattgcaagttattgtaat

SEQ ID NO: 42458 - DNA, 1395 bp, Zea Mays
gccaatcgaagtcttctttccatagttgttctttggcttctgatttcaacaaaaaaaatggtgtttctctaaaacccacaaagccctcctctgctctccatccctgtctctcgctttccctaacccacaccagaataccagatcgagcaccgatctagggttgcacctcttctgctagccggctggcgaggagccgttcggcatctggacgcggccaagggagatgaagctcgcggggctcaagtctgtggacggcgcccacgaggagtccatctgggcggcggcgtgggcgcccgccgctgaccaccgccccacggcggtgctcctcactggcgcgctcgacgagaccgtccgcgcttggctccccgacgacctcgctgccttggggtcccccacacggggccacgcgctcggagtcgtctccctcgccgcccaccccgccggctcgctcgccgccgccgtgtcgctcgacagcttcatccgcgtctttgacgtcgacacgggggcatccgtcgccacgctggaggcgccgccgtccgagatttggggcgtccagttccatcccaagggtaatgctctggccgcagccggtggtggcagtggatcagtgaagctgtgggacacggagaagtggaaggcgatcaccagcctcgccgtcccacgcccggagggagctcgccccgacaagacaggcagcggcaagttcgtcctgtcagtcgcctggagccccgacggaaggctcctagcatgcgggtccatggacggcacgatcgccgtctacgacgcggtccgcatgaagttcctgcaccacctggagggccaccacatgccggtgcggtccatggtgttctccccggtggacccgcacgtgcttttcacggcctgcgacgactgccacgtccacatctacgacgccagggagaagggcctcgtcggggccatgtcgggccacgcgagctgggtgctgagcatcgacgcgagccccgacggcctggcggtggccacggggtcgagcgaccgcaccgtccggctctgggacctcaacatgaggacctcggtgcagaccatgagcaaccactccgatcaggtgtgggccgtggccttcaggccaccaggcggtgccggagtccgagcagggcgtctggctagcgcgtcggatgacaagagcgtctccctgtacgattactcgtaggtttttgtttccttataaaccgttgcaaatgcctctgttgtaccgaccagagatttgaattcgggcatggtggttggaagaattgttgtacgcagcacagtagtcaccacacctgtgagcactccgagagcagcttcgcccatggcactgcgggttgctgttgctcctgctccttcctccgctttgaactctctgcagcggcg

SEQ ID NO: 42459 - DNA, 1170 bp, Zea Mays
gtcggatttagtttgccagtgcgaggagaaggttgcgcgggtatgaatgaggttgctcaagatggtttcttctatgaatgaggttgctcaagatggttagtcaatatatctatcatgcctttttgcatgagaccctaatttgagaaagttgtgcgttgactatgctttaacttacactgtttttatttaatagtgattaacttaggaatcatatgtacaaccttaaaataattattcatatgtatttgcaataagactatactcatgtaataaactagatgttatataccaaacatatcaagaaattaaaaagactatttacctacccacctaatataattagttatttttacttggtggtttctttaatgcagattctagtggaggaagacgaagcgccagtctcccaccaaaagaaactgacaccaccacaaaaaaaatcaagaaaacagagacaagtagatcttgtatagcatttatagagaagttgttgatccacatgagctgaagcccttttagaagaaaccggaaacatgctggtcggggccaataattagagacacatgaattatcttcctaacaaacgtacttaaagaaataaggatcaaactcccgaggggtgatagctgaattaccccctaacaaaacttaatatttgtattaagttactagaactatgtaatgactaactgatttaaaaatcattttgttagaaggaaaaagagtataatcagctatatacaaagctcgtaagttgttcataacaaaagtaaaattacatcacacactccaattcaaacctagaaaaacatctaactaacatcatctcaagctttgtgttctttatcaagtacataaaagtatgaaatgaagtatgattttaatgattatatgggtcatttcgtgtctgcattaaactggccgtttttgtgcctgccaatgggccgcgacctcgattcaaacctggtctgacactaatatttcgagtcgtgccgtatgtgggatgtgtttttttgtacttttggcagcccatctggcccgacctaaatgtgtacatgtagttttttattggagataagttgctatttttagttgtctctcaatcaaaactacttaaagtgttttaaacaaaaactactaaaaggtgttgaaagactagttggattacat

SEQ ID NO: 42460 - DNA, 927 bp, Zea Mays
cagcaactgacggccactccttacgtgaggacacatgtcggatttagtttgccagtgcgaggagaaggttgcgcgggtatgaatgaggttgctcaagatggtttcttctatgaatgaggttgctcaagatgattctagtggaggaagacgaagcgccagtctcccaccaaaagaaactgacaccaccacaaaaaaaatcaagaaaacagagacaagtagatcttgtatagcatttatagagaagttgttgatccacatgagctgaagcccttttagaagaaaccggaaacatgctggtcggggccaataattagagacacatgaattatcttcctaacaaacgtacttaaagaaataaggatcaaactcccgaggggtgatagctgaattaccccctaacaaaacttaatatttgtattaagttactagaactatgtaatgactaactgatttaaaaatcattttgttagaaggaaaaagagtataatcagctatatacaaagctcgtaagttgttcataacaaaagtaaaattacatcacacactccaattcaaacctagaaaaacatctaactaacatcatctcaagctttgtgttctttatcaagtacataaaagtatgaaatgaagtatgattttaatgattatatgggtcatttcgtgtctgcattaaactggccgtttttgtgcctgccaatgggccgcgacctcgattcaaacctggtctgacactaatatttcgagtcgtgccgtatgtgggatgtgtttttttgtacttttggcagcccatctggcccgacctaaatgtgtacatgtagttttttattggagataagttgctatttttagttgtctctcaatcaaaactacttaaagtgttttaaacaaaaactactaaaaggtgttgaaagactagttggattacat

SEQ ID NO: 42461 - DNA, 1180 bp, Zea Mays
atgggatctcaacacagcgatcgagttgatggatcatcagcatctgcttacttatatattatatataagagcttattgatcgacatatatattctttataagcacaccaaacccccatacgtgaaacgaatcaaacacctacacatatcaccaccaacacacacacaggcaaaacacatcaagctcaacacacatggctgacaatgccggtctagtaggcctgctcttggagcagcaccagctgcgcccaccagcagcagcatcaagagcaccacctcaaatcacaagcaaggccactcgtcccctcctcgccaccgccaagaacgacgtcgtcgacaagggcagctccgccgccgcttccttcagccgctcttcctcttcttcttcttcccgtgcaccggcgccgacggtgtcgccgacgaccgcctgccctttcctgcaccggtgcttcttctgccacggggagctcgccgacggcagggacatatacatgtacagaggcgagagggcgttctgcagcgaggagtgccgctgccgccatatcctggcagaggaggacgatgacgacactactacctcggtcggggtcgtggcagcggcagcggactgctccacccagctccgccatcaggcccttgctgccagcttcacgttctgaggtggtgtccggccgagcgggcgggcgggtagaccaccgaggactcgtacggtgggcctgccaccggcggcttgccgtggaggaagcaacgatgtccatcaccttgagtcagatagcttgtccaaacacagatgggtgtcacggactcatgcacggctgatataatctgattgggcttcaatttcaacgtttcaaaatgatgggttaagtttcttgttttttgttggaggtgaatgttttttttttgcaaattgtcttcttatacagtatattattctgtcgaaactaccttcttgttttcagtgctctatgattatctcttgttaagtaagttggatagtaagtttgtacatttctatcctctttaagcttttgtatttatataattatatcatataccttggttgcatgttttacctctctacatttgtgtttaggctagtggataggtttataatataggttgtataggttgtataacttcttgcagtatagataacaacactttagttaaaaccgtag

SEQ ID NO: 42462 - DNA, 743 bp, Zea Mays
agataggtggcgtggcgtccaatgggatctcaacacagcgatcgagttgatggatcatcagaggcgagagggcgttctgcagcgaggagtgccgctgccgccatatcctggcagaggaggacgatgacgacactactacctcggtcggggtcgtggcagcggcagcggactgctccacccagctccgccatcaggcccttgctgccagcttcacgttctgaggtggtgtccggccgagcgggcgggcgggtagaccaccgaggactcgtacggtgggcctgccaccggcggcttgccgtggaggaagcaacgatgtccatcaccttgagtcagatagcttgtccaaacacagatgggtgtcacggactcatgcacggctgatataatctgattgggcttcaatttcaacgtttcaaaatgatgggttaagtttcttgttttttgttggaggtgaatgttttttttttgcaaattgtcttcttatacagtatattattctgtcgaaactaccttcttgttttcagtgctctatgattatctcttgttaagtaagttggatagtaagtttgtacatttctatcctctttaagcttttgtatttatataattatatcatataccttggttgcatgttttacctctctacatttgtgtttaggctagtggataggtttataatataggttgtataggttgtataacttcttgcagtatagataacaacactttagttaaaaccgtag

SEQ ID NO: 42463 - DNA, 1036 bp, Zea Mays
tggatcacctagataggtggcgtggcgtccaatgggatctcaacacagcgatcgagttgatggatcatcagtaggcctgctcttggagcagcaccagctgcgcccaccagcagcagcatcaagagcaccacctcaaatcacaagcaaggccactcgtcccctcctcgccaccgccaagaacgacgtcgtcgacaagggcagctccgccgccgcttccttcagccgctcttcctcttcttcttcttcccgtgcaccggcgccgacggtgtcgccgacgaccgcctgccctttcctgcaccggtgcttcttctgccacggggagctcgccgacggcagggacatatacatgtacagaggcgagagggcgttctgcagcgaggagtgccgctgccgccatatcctggcagaggaggacgatgacgacactactacctcggtcggggtcgtggcagcggcagcggactgctccacccagctccgccatcaggcccttgctgccagcttcacgttctgaggtggtgtccggccgagcgggcgggcgggtagaccaccgaggactcgtacggtgggcctgccaccggcggcttgccgtggaggaagcaacgatgtccatcaccttgagtcagatagcttgtccaaacacagatgggtgtcacggactcatgcacggctgatataatctgattgggcttcaatttcaacgtttcaaaatgatgggttaagtttcttgttttttgttggaggtgaatgttttttttttgcaaattgtcttcttatacagtatattattctgtcgaaactaccttcttgttttcagtgctctatgattatctcttgttaagtaagttggatagtaagtttgtacatttctatcctctttaagcttttgtatttatataattatatcatataccttggttgcatgttttacctctctacatttgtgtttaggctagtggataggtttataatataggttgtataggttgtataacttcttgcagtatagataacaacactttagttaaaaccgtag

SEQ ID NO: 42464 - DNA, 1084 bp, Zea Mays
aaaactgtagtgtggtggtgccactggcactggcagtgtggaaagacctgatggatcacctagataggtggcgtggcgtccaatgggatctcaacacagcgatcgagttgatggatcatcaggcctgctcttggagcagcaccagctgcgcccaccagcagcagcatcaagagcaccacctcaaatcacaagcaaggccactcgtcccctcctcgccaccgccaagaacgacgtcgtcgacaagggcagctccgccgccgcttccttcagccgctcttcctcttcttcttcttcccgtgcaccggcgccgacggtgtcgccgacgaccgcctgccctttcctgcaccggtgcttcttctgccacggggagctcgccgacggcagggacatatacatgtacagaggcgagagggcgttctgcagcgaggagtgccgctgccgccatatcctggcagaggaggacgatgacgacactactacctcggtcggggtcgtggcagcggcagcggactgctccacccagctccgccatcaggcccttgctgccagcttcacgttctgaggtggtgtccggccgagcgggcgggcgggtagaccaccgaggactcgtacggtgggcctgccaccggcggcttgccgtggaggaagcaacgatgtccatcaccttgagtcagatagcttgtccaaacacagatgggtgtcacggactcatgcacggctgatataatctgattgggcttcaatttcaacgtttcaaaatgatgggttaagtttcttgttttttgttggaggtgaatgttttttttttgcaaattgtcttcttatacagtatattattctgtcgaaactaccttcttgttttcagtgctctatgattatctcttgttaagtaagttggatagtaagtttgtacatttctatcctctttaagcttttgtatttatataattatatcatataccttggttgcatgttttacctctctacatttgtgtttaggctagtggataggtttataatataggttgtataggttgtataacttcttgcagtatagataacaacactttagttaaaaccgtag

SEQ ID NO: 42465 - DNA, 83 bp, Zea Mays
ctcgctacggctgccagcccgtcatcagttacagcgctgcagctgcgtgggaaacagaacgatagaacaggaggtgcatgcgc

SEQ ID NO: 42466 - DNA, 421 bp, Zea Mays
agctcggtggagagcacggacctcagcccgcccagcagcttcagcttcttcagcctcccacacgcggcccgcagcgccatctcgaacccttcgatggagacccaggagaggtgcaccatcttcacgtcctggaggcacctcagcgaccccagcagatggcacagccccagcccagtcacttggcagtaggacacagtaagctgcatgcatgccaaacacacacacacacacacacacacacacatgcaatgttcatattcctgacgcttttcacaagctatacaaaagcggtgagatcatgcaagctgtcgatcggctccttttattacctgtctaaggttctgggagtatcttgagagagcccacaggccggcatcatccacggagtaacagcgtttgaggtccagctctaccaggctac

SEQ ID NO: 42467 - DNA, 3025 bp, Zea Mays
gtagcttatacatagttcctccgtatgcttttatgattcctgaaagaaataggataaatgagatgaaaaatgaaagaatacaatccaaaactttagtaacttacttctttatcctctagcatttctttagaacaattattatacatttctagtaccacaatcgagccatacaaaaattttaaagcccaatgtttcttgtttatcccatgaaatggaaggacatgatgcccaaataagcacacacacgcaatggatagaaacttgactgagttcagctacatgcatctctatggataccctcaattccatttctgctataaattgcaaagtaagtaccaaatgccacaccaggaaatacatagaggaaatgaaagtgcatagtagctgctcaactatataataaaccattatgttgctagcattttagacagaagataaaataaaatatctaatatcatgataatgcaaaccattacaatatgttatataatgcatgatgagcaacgaaggctattccagctagaacacaagcttcaattgcttgtggataaatgatgccagcaacataaatcatatataacaagtgtttgttaaccaacaaagttgcatatcacccattcgcaggtattggttctcaatcaaaatcaaatcaaatttcttacacaacataatctaaaagatctcatcccacaacaccatccagcacccacaaaacccccatacccattcaacaaagaattagaacattatacaaggaaaagttacgggacacccaggaaaacaaaacaaaccttatagaatgaagggacaccctaatttgcatcatgttcctgaccagcatagccctcaccccaactgggtcatcaccgggaaccaaaacaataataagaattgttcagttatggcataaggtgcatctggaatgatatcatctaaccatttcatagcacgaaccattatcattctatattatcagaacaaaaaaatcatcatatttgatattccctagcataaagaagcagagacaaaaatctttgtacaaccatgtcacacgtgaaggaataccacaatataaaagctgatacaaaattaagaaaaatgatcatttaagatttttttgcataaatatgcataaagtgtaaaaacaagtaacatgcctccttcatgaaagcgacaacataaacactagtgctattacccttaaggcctaacaacattagcaatcacataaatcaaatagatttgcatagcagaatcgaatcatattgttgtatttcgactcatggccaaccacattgttgtgctcatccacaaaaatgcatttgtgaaaaaaaatcagtcaagcattgttgtgaagaattgtcagtgaatggcttgaatatgataaaacgatcatgtacaagatcacaagaaaaatggaaggaattgatccacaaattctaaaagtttctctttaatccatgttcacccacacgaatttccacactccactcaaaactgtgtactataataacttgctagaagtacactttgtaagcataatattgccctgactttcgaacaccatccaaaatttacataaacaaaatttgcatcaattatacacttaaatacttaattgattcataaagaattactcatctatcatcatcaattatacagacagtacatccatatccagattattcttttttaattacatactgaacctgaattccggatgcaaaaacaacttcaaatcatggctctttcttatagtcaaatgttgtgagacatcgagcagcacaaacaatgtaaattgttgattttctttgtataccacataaactcgacgatgcattattaattgcagtgtagagttggaagtatggtaaagtctacattctcaggtacacttcaaatcatgtaactctaatactaatagttccagcccattcatcaagcaaatcttgcatttatttgagtttaagcaaattatccatattccatccgctactttaccattggttaatatttggcactagtaccttgtctgaagattagcatataaataaacatgtatcattgttagcaagattccataattatttttatttcgtctgataattgatagttgaaaattgaaatcatgtgttccaattgtgtgtttgaagggacatatacccatggagttttttttcaaaactcagaacatggtacttcataaacctcaaagttacggcatcggtgcacactaaataaaagtactcaaagatgttttatttttttaatgttatgtacttaaataatatataaaaaaaaacttgacctgcggggggtaagacagcccccgggtattgtattaagaagaagaccttctcacacaggtcaagaaaatccccgaacccctgccccacccatacacagcggcatcgaagcccatgtgagaacgaccacgaccggggctgagccttagacctgtgctttggcgtgggacagacgaggggatttttttaaccacagcctgaaattcgctcccacggggagtcgaacccaggacctgaggagtgctactcagaccacctaaccaactcagctagaggccctttcgctacttaaataatatatatacactaaaaaaccaatatatatgcataaccaaaatatatataaaaatataaaatgtctcataattgtaaagaatgaagcaacaaatatcattaggacgagtatatatgaataattgacaaacaacactagctaattatgataagattattacttgccattaaccaaaagtggataacacaaccccgggctcatgactattgattgatagagaacccagttgatttatttgtactgtgtagctagcaacggaccatatagcctaattatgtaatggaaatcacctatatacaatgttttatgcatgtttgcatagcatacaagaaatcaccttggcattccgccgttgcatctcatcaactcctcgagctgcaagcaatactggaagtagcactccagccctgcgcgaagaactctc

SEQ ID NO: 42468 - DNA, 1954 bp, Zea Mays
ctcgtatggtgtcgtgacggatgccatgacgctgtcgtcgtccacaaccacacggtaggaaaggaatccatcgcgtcgctccctgcctgcactcattcggagcatcggcacacgtagcattggacacggaccggcagcatcagatgcacacggacgacgtctttctggcatcgctactaccagacagagaggacaggggaggtcagactcagaaacgctcgctcacgacggcagcagccatggcagcatcgtgcggcggccgcgtggtggtcttcccgttcccgttccagggccacttcaacccggtgatgcgcctggcccgcgcgctgcacgcccggggcgtcgggatcaccgtgttccacaccgccggcgcgcgggcgccggacccggccgactaccccgccgactaccgcttcgtgcccgtgcccgtggaggtggccccggagctgatggcgtccgaggacatcgccgccatcgtcacggcgctcaacgccgcctgcgaggcgcccttccgggaccgcctctcggcgctgctctccgccgccgacggcgaggcgggggaggcggggggccgcgtccgctgcgtcctcaccgacgtcagctgggacgccgtgctgtcggcggcccgcggcctcggcgtgcccgcgctcggcgtcatgacggccagcgccgccacgttccgcgtctacatggcgtaccgcaccttggtcgacaagggatacctgccggtgagagaggagcgcaaggacgacgcggtcgccgagctacccccgtaccgcgtgaaggacctgctgcggcacgagacgtgcgacctggaggagttcgcggacctgctgggccgcgtggtcgcggcggcgcggctgtcctcggggctcatcttccacacgttccccttcatcgaggccggcacgctgggcgagatccgggacgacatgtcggtgccggtgtacgccgtggcgccgctcaacaagctggtgccggcggccacggccagcctgcacggcgaggtgcaggcggaccggggctgcctgcgctggctggacgcgcagcgggcgcgctccgtgctgtacgtgagcttcgggagcatggcggccatggacccgcacgagttcgtggagctggcgtgggggctggccgacgccggccgccccttcgtgtgggtggtccggcccaacctcatccgcggcttcgagtcgggcgcgctgcccgacggcgtggaggaccgggtgcgcggccgcggcgtcgtcgtcagctgggcgccgcaggaggaggtgctcgcgcacccggccgtgggcggcttcttcacccactgcggctggaactccaccgtggaggccgtgtcggagggcgtgcccatgatctgccacccgcgccacggggaccagtacggcaacgcgaggtacgtgtgccacgtctggaaggtgggcacggaggtcgccggggaccagctggagagaggggagatcaaggccgccatcgacaggctcatgggcggcagcgaggaaggggagggcatcaggaagaggatgaacgagctcaagatcgctgcggacaagggcatcgatgaatctgctgggtcggatttaactaatttggttcatctcataaactcctactgatcgatccttgtattgggtaccatgttccggatgatgagttggaataaatcaaaacttgtgttccagtcgatctacgcttctcatcattcatcatcatcaatggacaacaaaacctacagctacagggtttagaacattaacagacttgttttcgagcttcctcaggattcaacccagttgtgctagagcatcgtctctaacagattatggatgttctcctgatattagtaacagattatggatgttctcctgatattagcactgtagcttattgatcgagctgcaaattaagatctgtataaaaacaagcctctattctcaaatatttattgccc

SEQ ID NO: 42469 - DNA, 599 bp, Zea Mays
aatgggttagtagccaaaacaaaatgctacaaacatagaataaggataacagagtgacagaccatcgcttaaagatgaactttgagctgacaagcttccttttaggagacatcgaatcggctattcagtcttgtgctacgatggagcagcaggagctgttggaggaaatggccagttccgtgggcgcagtaaacgtatgattcaggcaaattcggcgttgaggccaggccatcaaactgaaccgcgaaactcatgacgtgctcggactcggtgaagatgattgatagctgtacatgaagaaaactgacaagatgaactccccccataggaactttttccccccctgtagtccgcagggtacaacacacacccacccatgcatctcagcttccttgacggcagcagagttactagtagaaaatatacatggtttgtgcagttcaacgcttcaactgctccagtattcacagtttaatgcattttaggtatgttgctccagtttctcaacaattcactgcttgcaattaaatctacagagcaaagttctcagctagctacatttgaaccaatcaatcaaccacttttctttttgaaacgag

SEQ ID NO: 42470 - DNA, 2504 bp, Zea Mays
catcctcctagtttttttcttttctatttttcagctaaccttatcttcttcccgcgtcctttccagcctcccgtcccgtgtggcgtctggcgtgtgcgcacgcacctccccaggccccagtgccaccttccctcctcggctcgacccgcccggcgctccgccgcagctggctcatcccaatcccctcgtacagtcgtgctccgcgcccgcttcaccgcctgaacaaagatggaggccttcctagccggcctcttcagggcgcctccacgggccgtccccgcccctcggggcacgcctctccccagccttcctctcttctacggcaggcgccgcaggaggccgtcctcctccgtggtctgcatggcggagccctatctgattgccaagctggactctgcggagaaggcctggaaagaaatgtcggttaggttggcagatcctgacattgtctcggatccaagcgaataccaaaaaatcgcgcagtctgtttctgaactggatcaggcaattcaaggattgtgagaggcaacttgaagcgacaaaagctctggaaaaagagaacgaaggtgaccccgatatgttagagatgatagcttctgagttggaggctctatctaaccagctcgcagagcttgaagaaaaaatgaagtttctactgcttcccagcgatcctctagattcacgcaacatcttacttgaagtaagagcaggtgctggtggtgatgaagctgggatttgggctggtgaccttgtaggttcgcatgtaccagagatactgtgagcgcaacaattggaagtttaagccagtttcttgctcagaagcagaaatgggtgggtacaagacatacgtgatggaggtcaaggggaaacaagtctatagtaaactgaagtttgagtcaggtgtacaccgtgttcagcgtgttcccttgacagaggctatgggtcgtgttcatacgtcaacagcaactgtagctattatgccagaggctgatgaagttgatgtggttattgatccgaaagatattgagcttaaaacagcaagatctggtggagctggagaatgttaacaaggtggagacggctgttgatcttattcacaagccgacaggaatacggatattctgtacggaagagagatcacagctacagaacagagagcgggcatttcaattgttgagagcaaaactttacgagataaaattaagggagcaacaagaatcattaagaaaccagaggaaattgcaggtacgttgtcaattcttcttaaaaagatcgtatcttccgaaggtcgtagctgttgagtccaactgaaatcaacaaaaaaaaactgtcttgtagatgataaatgctcaaattgaacagagtagcagtgtggtagacattttcgagaacagtattagtataatatccagatgaaattggcagaaatttaaaccatgacaagacaaccaaatctattgccttcagtttgtgtaggaaatagagttggcccttatgaaagattttgtaagagcatctccaacaagagccctaaatgggtcttatttaaaatatagggccctaccctaacaccataaaacaggttccaacgtgggacctattttacaaaaaatcatcaaacgattatagggttcggtctctcggattctaaatgtagtatcccatatacttgagccctatcctcattttgtacattatttctaaccttttatttcttaaataacatgatttatttcctaataatatgatataggctcaattgttggagccgcaaacatttttatggccctaaacactttaaatgaggtcctattttaattttgaggacccaaatataggacttcttgttggagatgctctaaaccgctttgtcaatgttactaatacctgttcaactgaaggttggtactggtgcccgatccgagaagataaggacgtacaactacaaggataacagagtgacagaccatcgcttaaagatgaactttgagctgacaagcttccttttaggagacatcgaatcggctattcagtcttgtgctacgatggagcagcaggagctgttggaggaaatggccagttccgtgggcgcagtaaacgtatgattcaggcaaattcggcgttgaggccaggccatcaaactgaaccgcgaaactcatgacgtgctcggactcggtgaagatgattgatagctgtacatgaagaaaactgacaagatgaactccccccataggaactttttccccccctgtagtccgcagggtacaacacacacccacccatgcatctcagcttccttgacggcagcagagttactagtagaaaatatacatggtttgtgcagttcaacgcttcaactgctccagtattcacagtttaatgcattttaggtatgttgctccagtttctcaacaattcactgcttgcaattaaatctacagagcaaagttctcagctagctacatttgaaccaatcaatcaaccacttttctttttgaaacgag

SEQ ID NO: 42471 - DNA, 2521 bp, Zea Mays
catcctcctagtttttttcttttctatttttcagctaaccttatcttcttcccgcgtcctttccagcctcccgtcccgtgtggcgtctggcgtgtgcgcacgcacctccccaggccccagtgccaccttccctcctcggctcgacccgcccggcgctccgccgcagctggctcatcccaatcccctcgtacagtcgtgctccgcgcccgcttcaccgcctgaacaaagatggaggccttcctagccggcctcttcagggcgcctccacgggccgtccccgcccctcggggcacgcctctccccagccttcctctcttctacggcaggcgccgcaggaggccgtcctcctccgtggtctgcatggcggagccctatctgattgccaagctggactctgcggagaaggcctggaaagaaatgtcggttaggttggcagatcctgacattgtctcggatccaagcgaataccaaaaaatcgcgcagtctgtttctgaactggatcaggtcgtgaccacatacaggcaattcaaggattgtgagaggcaacttgaagcgacaaaagctctggaaaaagagaacgaaggtgaccccgatatgttagagatgatagcttctgagttggaggctctatctaaccagctcgcagagcttgaagaaaaaatgaagtttctactgcttcccagcgatcctctagattcacgcaacatcttacttgaagtaagagcaggtgctggtggtgatgaagctgggatttgggctggtgaccttgtaggttcgcatgtaccagagatactgtgagcgcaacaattggaagtttaagccagtttcttgctcagaagcagaaatgggtgggtacaagacatacgtgatggaggtcaaggggaaacaagtctatagtaaactgaagtttgagtcaggtgtacaccgtgttcagcgtgttcccttgacagaggctatgggtcgtgttcatacgtcaacagcaactgtagctattatgccagaggctgatgaagttgatgtggttattgatccgaaagatattgagcttaaaacagcaagatctggtggagctggagaatgttaacaaggtggagacggctgttgatcttattcacaagccgacaggaatacggatattctgtacggaagagagatcacagctacagaacagagagcgggcatttcaattgttgagagcaaaactttacgagataaaattaagggagcaacaagaatcattaagaaaccagaggaaattgcaggtacgttgtcaattcttcttaaaaagatcgtatcttccgaaggtcgtagctgttgagtccaactgaaatcaacaaaaaaaaactgtcttgtagatgataaatgctcaaattgaacagagtagcagtgtggtagacattttcgagaacagtattagtataatatccagatgaaattggcagaaatttaaaccatgacaagacaaccaaatctattgccttcagtttgtgtaggaaatagagttggcccttatgaaagattttgtaagagcatctccaacaagagccctaaatgggtcttatttaaaatatagggccctaccctaacaccataaaacaggttccaacgtgggacctattttacaaaaaatcatcaaacgattatagggttcggtctctcggattctaaatgtagtatcccatatacttgagccctatcctcattttgtacattatttctaaccttttatttcttaaataacatgatttatttcctaataatatgatataggctcaattgttggagccgcaaacatttttatggccctaaacactttaaatgaggtcctattttaattttgaggacccaaatataggacttcttgttggagatgctctaaaccgctttgtcaatgttactaatacctgttcaactgaaggttggtactggtgcccgatccgagaagataaggacgtacaactacaaggataacagagtgacagaccatcgcttaaagatgaactttgagctgacaagcttccttttaggagacatcgaatcggctattcagtcttgtgctacgatggagcagcaggagctgttggaggaaatggccagttccgtgggcgcagtaaacgtatgattcaggcaaattcggcgttgaggccaggccatcaaactgaaccgcgaaactcatgacgtgctcggactcggtgaagatgattgatagctgtacatgaagaaaactgacaagatgaactccccccataggaactttttccccccctgtagtccgcagggtacaacacacacccacccatgcatctcagcttccttgacggcagcagagttactagtagaaaatatacatggtttgtgcagttcaacgcttcaactgctccagtattcacagtttaatgcattttaggtatgttgctccagtttctcaacaattcactgcttgcaattaaatctacagagcaaagttctcagctagctacatttgaaccaatcaatcaaccacttttctttttgaaacgag

SEQ ID NO: 42472 - DNA, 2522 bp, Zea Mays
catcctcctagtttttttcttttctatttttcagctaaccttatcttcttcccgcgtcctttccagcctcccgtcccgtgtggcgtctggcgtgtgcgcacgcacctccccaggccccagtgccaccttccctcctcggctcgacccgcccggcgctccgccgcagctggctcatcccaatcccctcgtacagtcgtgctccgcgcccgcttcaccgcctgaacaaagatggaggccttcctagccggcctcttcagggcgcctccacgggccgtccccgcccctcggggcacgcctctccccagccttcctctcttctacggcaggcgccgcaggaggccgtcctcctccgtggtctgcatggcggagccctatctgattgccaagctggactctgcggagaaggcctggaaagaaatgtcggttaggttggcagatcctgacattgtctcggatccaagcgaataccaaaaaatcgcgcagtctgtttctgaactggatcaggtcgtgaccacatacaggcaattcaaggattgtgagaggcaacttgaagcgacaaaagctctggaaaaagagaacgaaggtgaccccgatatgttagagatgatagcttctgagttggaggctctatctaaccagctcgcagagcttgaagaaaaaatgaagtttctactgcttcccagcgatcctctagattcacgcaacatcttacttgaagtaagagcaggtgctggtggtgatgaagctgggatttgggctggtgaccttgttcgcatgtaccagagatactgtgagcgcaacaattggaagtttaagccagtttcttgctcagaagcagaaatgggtgggtacaagacatacgtgatggaggtcaaggggaaacaagtctatagtaaactgaagtttgagtcaggtgtacaccgtgttcagcgtgttcccttgacagaggctatgggtcgtgttcatacgtcaacagcaactgtagctattatgccagaggctgatgaagttgatgtggttattgatccgaaagatattgagcttaaaacagcaagatctggtggagctggagggcagaatgttaacaaggtggagacggctgttgatcttattcacaagccgacaggaatacggatattctgtacggaagagagatcacagctacagaacagagagcgggcatttcaattgttgagagcaaaactttacgagataaaattaagggagcaacaagaatcattaagaaaccagaggaaattgcaggtacgttgtcaattcttcttaaaaagatcgtatcttccgaaggtcgtagctgttgagtccaactgaaatcaacaaaaaaaaactgtcttgtagatgataaatgctcaaattgaacagagtagcagtgtggtagacattttcgagaacagtattagtataatatccagatgaaattggcagaaatttaaaccatgacaagacaaccaaatctattgccttcagtttgtgtaggaaatagagttggcccttatgaaagattttgtaagagcatctccaacaagagccctaaatgggtcttatttaaaatatagggccctaccctaacaccataaaacaggttccaacgtgggacctattttacaaaaaatcatcaaacgattatagggttcggtctctcggattctaaatgtagtatcccatatacttgagccctatcctcattttgtacattatttctaaccttttatttcttaaataacatgatttatttcctaataatatgatataggctcaattgttggagccgcaaacatttttatggccctaaacactttaaatgaggtcctattttaattttgaggacccaaatataggacttcttgttggagatgctctaaaccgctttgtcaatgttactaatacctgttcaactgaaggttggtactggtgcccgatccgagaagataaggacgtacaactacaaggataacagagtgacagaccatcgcttaaagatgaactttgagctgacaagcttccttttaggagacatcgaatcggctattcagtcttgtgctacgatggagcagcaggagctgttggaggaaatggccagttccgtgggcgcagtaaacgtatgattcaggcaaattcggcgttgaggccaggccatcaaactgaaccgcgaaactcatgacgtgctcggactcggtgaagatgattgatagctgtacatgaagaaaactgacaagatgaactccccccataggaactttttccccccctgtagtccgcagggtacaacacacacccacccatgcatctcagcttccttgacggcagcagagttactagtagaaaatatacatggtttgtgcagttcaacgcttcaactgctccagtattcacagtttaatgcattttaggtatgttgctccagtttctcaacaattcactgcttgcaattaaatctacagagcaaagttctcagctagctacatttgaaccaatcaatcaaccacttttctttttgaaacgag

SEQ ID NO: 42473 - DNA, 1907 bp, Zea Mays
cggggcagtcacacgctggagaagggctgctgagggtgcgcaaccgcgcggacaacggctattgtgctgctactgtggtacaggtttcgtggggaaagaatgttattcttgtgggagggaaaagtgatcaaccttatgacaagatatcagtatggaccttcaatacagagagtgagctctggtctcatatggaagcgaagggtgacattccggtgtctcgaagtgggcatacggtgattagagccggtcctgttttaattctctttggaggtgaagatgccaaagggaagaaactacatgaccttcatatgtttgatctgaagtcattaacatggcttcctctgaactataagggtgctggaccttctccaagatcaaatcatgtagccgccctttacgatgatagagtcctattgatttttggaggtcagtcgaagtccaagaccctgaatgatattcatgctctagattttgaaacaatggtatggtcaagggtcaaaacccatgggcatcatccatcacctcgagcaggttgctgcggagctctttgtggaactaaatggtatattgcaggaggtggaagcaagaaaaaacggcaccctgaaacatgggttttcgatgtccttgagtccagatggtctgtttgtgtagtgcctcctagttcctcaatcactacaaagaaaggtttcagcatggttccattgtactacagggacaagatcgtgcttgttgcttttggagggaacaaaaaggaaccatccgacaaggttgaagtactagtggtgctgcaaaacgagcactgtttcagctggcggtctgcgcccgaggtggaacccttactgtacgacgagtctcctccaggctcaagggaactcgccgaccatctcagcagctgcgctccaccgtatcctactagctccgcggcgaggagcggtctcgccgccacagcggagaactcctgcgggaggaaacccctcccggactcactgctacggacctcgaacctcgggggctcgtcgctccgcaggcagttccgtcaggaagaggagtgcagcagcctggcgcaaaagctgcagaaaccgatcgacgacgacaggtacaaggacgccgccgacgagtgctccgagcatcaaccaccctcggccacgaaccctaaaccgcggaacgacgcgcggcggtcgtccccggaggtcgtcgtcgacgcaaaagcgaggaggctgctgggcaggagctcgtcggacatgaacaaccaccaggacgcaagggtggccgccctggtcaggaggaacgtggcgctggaagagcagctgtcggcggcgctggcgagcaaggacgaggcggagaagaacctgtccctggtcatcgacagcaaggacggcctggagaagaggctggccgagaaggacagggaggtcgaggcgctgagggagaaggcgacggggttggagctggcgcaggaggaggccaacagcctctccaacaccgtccacgccgacaacgtgcggctggagcgcgaggtggcgttcctgaaggccgtcatggacgagacccagaaggaactgcactcgactcgcggagttcttgcaggagaacgcgcacgggcattccagcttcaggttgaagtctttcatctgaagcagcgcctgcagacgatggaagggaggtcacccgcagcaccaagaaagcctcagaatgcgtagggtagggtgcaggcgtgtagagtttttgagcgatagatctgctgtagattcattcagtgatgtaatgtaactgtagtaggtgccggagctactgtaatttgtaatattattcgacgcgatgcgatgcaaacgtatttcgcaactgggacgtacgtaattgtgtagaatgagttgcggtcgactatatatgcaagatgtcttttatct

SEQ ID NO: 42474 - DNA, 2283 bp, Zea Mays
ctctcgtggaacgactcagtgttgatatctggttatactgtggtgactggttgaagggccatctgcacgaccatttccatggccctcgaagcccgtctcggaccaccaagcgttccagcagtcatcacaacgcagaggatccattggctacctcagtgagtgggcgcgccgacgacctcgcctggcgctgctcgtccgacactttcgatctcaatgggcgcgatttcgagagctccgagaactgggcggtcctgtccaccgagggtgacaagccagctcctcgtttcgatcatgcagcagccatggttgggagcaaaatggtggtgtttggtggcgactccggtcaatctttgctagatgatactaagatattgagcttagacaagcttacctgggattctgttgctcctaaagttcgaccaccattgaacgggcgttctctgaagctgaggccatgcagaggtcattgcctggtttcgtggggaaagaatgttattcttgtgggagggaaaagtgatcaaccttatgacaagatatcagtatggaccttcaatacagagagtgagctctggtctcatatggaagcgaagggtgacattccggtgtctcgaagtgggcatacggtgattagagccggtcctgttttaattctctttggaggtgaagatgccaaagggaagaaactacatgaccttcatatgtttgatctgaagtcattaacatggcttcctctgaactataagggtgctggaccttctccaagatcaaatcatgtagccgccctttacgatgatagagtcctattgatttttggaggtcagtcgaagtccaagaccctgaatgatattcatgctctagattttgaaacaggtcaaaacccatgggcatcatccatcacctcgagcaggttgctgcggagctctttgtggaactaaatggtatattgcaggaggtggaagcaagaaaaaacggcaccctgaaacatgggttttcgatgtccttgagtccagatggtctgtttgtgtagtgcctcctagttcctcaatcactacaaagaaaggtttcagcatggttccattgtactacagggacaagatcgtgcttgttgcttttggagggaacaaaaaggaaccatccgacaaggttgaagtactagtggtgctgcaaaacgagcactgtttcagctggcggtctgcgcccgaggtggaacccttactgtacgacgagtctcctccaggctcaagggaactcgccgaccatctcagcagctgcgctccaccgtatcctactagctccgcggcgaggagcggtctcgccgccacagcggagaactcctgcgggaggaaacccctcccggactcactgctacggacctcgaacctcgggggctcgtcgctccgcaggcagttccgtcaggaagaggagtgcagcagcctggcgcaaaagctgcagaaaccgatcgacgacgacaggtacaaggacgccgccgacgagtgctccgagcatcaaccaccctcggccacgaaccctaaaccgcggaacgacgcgcggcggtcgtccccggaggtcgtcgtcgacgcaaaagcgaggaggctgctgggcaggagctcgtcggacatgaacaaccaccaggacgcaagggtggccgccctggtcaggaggaacgtggcgctggaagagcagctgtcggcggcgctggcgagcaaggacgaggcggagaagaacctgtccctggtcatcgacagcaaggacggcctggagaagaggctggccgagaaggacagggaggtcgaggcgctgagggagaaggcgacggggttggagctggcgcaggaggaggccaacagcctctccaacaccgtccacgccgacaacgtgcggctggagcgcgaggtggcgttcctgaaggccgtcatggacgagacccagaaggaactgcactcgactcgcggagttcttgcaggagaacgcgcacgggcattccagcttcaggttgaagtctttcatctgaagcagcgcctgcagacgatggaagggaggtcacccgcagcaccaagaaagcctcagaatgcgtagggtagggtgcaggcgtgtagagtttttgagcgatagatctgctgtagattcattcagtgatgtaatgtaactgtagtaggtgccggagctactgtaatttgtaatattattcgacgcgatgcgatgcaaacgtatttcgcaactgggacgtacgtaattgtgtagaatgagttgcggtcgactatatatgcaagatgtcttttatct

SEQ ID NO: 42475 - DNA, 2642 bp, Zea Mays
cgcgaggccgacccacgccacgctcctcctcagctacagtccctcctccaccgctgctgcgctcacgctcctcgacctcccacactcactgtcagtgtaaagctcacgccggaggccggagctagctgccccctgcccgtgagctagtcactcacagcacaggtgacagggtggtggtgggcggcgggattgcggttgcggcagtagggttcaggctcggataccagcctcctcctcctcctcctcctcctccgcctccgtttccagaagggggcgagcgctaccggggagctcgacagacgccgagccgcaatgcccaagatgttcgggttctctcggcgccggatgaagctgggcaggttgaagggccatctgcacgaccatttccatggccctcgaagcccgtctcggaccaccaagcgttccagcagtcatcacaacgcagaggatccattggctacctcagtgagtgggcgcgccgacgacctcgcctggcgctgctcgtccgacactttcgatctcaatgggcgcgatttcgagagctccgagaactgggcggtcctgtccaccgagggtgacaagccagctcctcgtttcgatcatgcagcagccatggttgggagcaaaatggtggtgtttggtggcgactccggtcaatctttgctagatgatactaagatattgagcttagacaagcttacctgggattctgttgctcctaaagttcgaccaccattgaacgggcgttctctgaagctgaggccatgcagaggtcattgcctggtttcgtggggaaagaatgttattcttgtgggagggaaaagtgatcaaccttatgacaagatatcagaaacaattaggaattcatcatttgttctactgcagtatggaccttcaatacagagagtgagctctggtctcatatggaagcgaagggtgacattccggtgtctcgaagtgggcatacggtgattagagccggtcctgttttaattctctttggaggtgaagatgccaaagggaagaaactacatgaccttcatatgtttgatctgaagtcattaacatggcttcctctgaactataagggtgctggaccttctccaagatcaaatcatgtagccgccctttacgatgatagagtcctattgatttttggaggtcagtcgaagtccaagaccctgaatgatattcatgctctagattttgaaacaatggtatggtcaagggtcaaaacccatgggcatcatccatcacctcgagcaggttgctgcggagctctttgtggaactaaatggtatattgcaggaggtggaagcaagaaaaaacggcaccctgaaacatgggttttcgatgtccttgagtccagatggtctgtttgtgtagtgcctcctagttcctcaatcactacaaagaaaggtttcagcatggttccattgtactacagggacaagatcgtgcttgttgcttttggagggaacaaaaaggaaccatccgacaaggttgaagtactagtggtgctgcaaaacgagcactgtttcagctggcggtctgcgcccgaggtggaacccttactgtacgacgagtctcctccaggctcaagggaactcgccgaccatctcagcagctgcgctccaccgtatcctactagctccgcggcgaggagcggtctcgccgccacagcggagaactcctgcgggaggaaacccctcccggactcactgctacggacctcgaacctcgggggctcgtcgctccgcaggcagttccgtcaggaagaggagtgcagcagcctggcgcaaaagctgcagaaaccgatcgacgacgacaggtacaaggacgccgccgacgagtgctccgagcatcaaccaccctcggccacgaaccctaaaccgcggaacgacgcgcggcggtcgtccccggaggtcgtcgtcgacgcaaaagcgaggaggctgctgggcaggagctcgtcggacatgaacaaccaccaggacgcaagggtggccgccctggtcaggaggaacgtggcgctggaagagcagctgtcggcggcgctggcgagcaaggacgaggcggagaagaacctgtccctggtcatcgacagcaaggacggcctggagaagaggctggccgagaaggacagggaggtcgaggcgctgagggagaaggcgacggggttggagctggcgcaggaggaggccaacagcctctccaacaccgtccacgccgacaacgtgcggctggagcgcgaggtggcgttcctgaaggccgtcatggacgagacccagaaggaactgcactcgactcgcggagttcttgcaggagaacgcgcacgggcattccagcttcaggttgaagtctttcatctgaagcagcgcctgcagacgatggaagggaggtcacccgcagcaccaagaaagcctcagaatgcgtagggtagggtgcaggcgtgtagagtttttgagcgatagatctgctgtagattcattcagtgatgtaatgtaactgtagtaggtgccggagctactgtaatttgtaatattattcgacgcgatgcgatgcaaacgtatttcgcaactgggacgtacgtaattgtgtagaatgagttgcggtcgactatatatgcaagatgtcttttatct

SEQ ID NO: 42476 - DNA, 2665 bp, Zea Mays
cgcgaggccgacccacgccacgctcctcctcagctacagtccctcctccaccgctgctgcgctcacgctcctcgacctcccacactcactgtcagtgtaaagctcacgccggaggccggagctagctgccccctgcccgtgcgtgttcatcctggctgctcatctatctctcttgctccgatccaagatccaacaagtgagctagtcactcacagcacaggtgacagggtggtggtgggcggcgggattgcggttgcggcagtagggttcaggctcggataccagcctcctcctcctcctcctcctcctccgcctccgtttccagaagggggcgagcgctaccggggagctcgacagacgccgagccgcaatgcccaagatgttcgggttctctcggcgccggatgaagctgggcaggttgaagggccatctgcacgaccatttccatggccctcgaagcccgtctcggaccaccaagcgttccagcagtcatcacaacgcagaggatccattggctacctcagtgagtgggcgcgccgacgacctcgcctggcgctgctcgtccgacactttcgatctcaatgggcgcgatttcgagagctccgagaactgggcggtcctgtccaccgagggtgacaagccagctcctcgtttcgatcatgcagcagccatggttgggagcaaaatggtggtgtttggtggcgactccggtcaatctttgctagatgatactaagatattgagcttagacaagcttacctgggattctgttgctcctaaagttcgaccaccattgaacgggcgttctctgaagctgaggccatgcagaggtcattgcctggtttcgtggggaaagaatgttattcttgtgggagggaaaagtgatcaaccttatgacaagatatcagtatggaccttcaatacagagagtgagctctggtctcatatggaagcgaagggtgacattccggtgtctcgaagtgggcatacggtgattagagccggtcctgttttaattctctttggaggtgaagatgccaaagggaagaaactacatgaccttcatatgtttgatctgaagtcattaacatggcttcctctgaactataagggtgctggaccttctccaagatcaaatcatgtagccgccctttacgatgatagagtcctattgatttttggaggtcagtcgaagtccaagaccctgaatgatattcatgctctagattttgaaacaatggtatggtcaagggtcaaaacccatgggcatcatccatcacctcgagcaggttgctgcggagctctttgtggaactaaatggtatattgcaggaggtggaagcaagaaaaaacggcaccctgaaacatgggttttcgatgtccttgagtccagatggtctgtttgtgtagtgcctcctagttcctcaatcactacaaagaaaggtttcagcatggttccattgtactacagggacaagatcgtgcttgttgcttttggagggaacaaaaaggaaccatccgacaaggttgaagtactagtggtgctgcaaaacgagcactgtttcagctggcggtctgcgcccgaggtggaacccttactgtacgacgagtctcctccaggctcaagggaactcgccgaccatctcagcagctgcgctccaccgtatcctactagctccgcggcgaggagcggtctcgccgccacagcggagaactcctgcgggaggaaacccctcccggactcactgctacggacctcgaacctcgggggctcgtcgctccgcaggcagttccgtcaggaagaggagtgcagcagcctggcgcaaaagctgcagaaaccgatcgacgacgacaggtacaaggacgccgccgacgagtgctccgagcatcaaccaccctcggccacgaaccctaaaccgcggaacgacgcgcggcggtcgtccccggaggtcgtcgtcgacgcaaaagcgaggaggctgctgggcaggagctcgtcggacatgaacaaccaccaggacgcaagggtggccgccctggtcaggaggaacgtggcgctggaagagcagctgtcggcggcgctggcgagcaaggacgaggcggagaagaacctgtccctggtcatcgacagcaaggacggcctggagaagaggctggccgagaaggacagggaggtcgaggcgctgagggagaaggcgacggggttggagctggcgcaggaggaggccaacagcctctccaacaccgtccacgccgacaacgtgcggctggagcgcgaggtggcgttcctgaaggccgtcatggacgagacccagaaggaactgcactcgactcgcggagttcttgcaggagaacgcgcacgggcattccagcttcaggttgaagtctttcatctgaagcagcgcctgcagacgatggaagggaggtcacccgcagcaccaagaaagcctcagaatgcgtagggtagggtgcaggcgtgtagagtttttgagcgatagatctgctgtagattcattcagtgatgtaatgtaactgtagtaggtgccggagctactgtaatttgtaatattattcgacgcgatgcgatgcaaacgtatttcgcaactgggacgtacgtaattgtgtagaatgagttgcggtcgactatatatgcaagatgtcttttatct

SEQ ID NO: 42477 - DNA, 2607 bp, Zea Mays
cgcgaggccgacccacgccacgctcctcctcagctacagtccctcctccaccgctgctgcgctcacgctcctcgacctcccacactcactgtcagtgtaaagctcacgccggaggccggagctagctgccccctgcccgtgagctagtcactcacagcacaggtgacagggtggtggtgggcggcgggattgcggttgcggcagtagggttcaggctcggataccagcctcctcctcctcctcctcctcctccgcctccgtttccagaagggggcgagcgctaccggggagctcgacagacgccgagccgcaatgcccaagatgttcgggttctctcggcgccggatgaagctgggcaggttgaagggccatctgcacgaccatttccatggccctcgaagcccgtctcggaccaccaagcgttccagcagtcatcacaacgcagaggatccattggctacctcagtgagtgggcgcgccgacgacctcgcctggcgctgctcgtccgacactttcgatctcaatgggcgcgatttcgagagctccgagaactgggcggtcctgtccaccgagggtgacaagccagctcctcgtttcgatcatgcagcagccatggttgggagcaaaatggtggtgtttggtggcgactccggtcaatctttgctagatgatactaagatattgagcttagacaagcttacctgggattctgttgctcctaaagttcgaccaccattgaacgggcgttctctgaagctgaggccatgcagaggtcattgcctggtttcgtggggaaagaatgttattcttgtgggagggaaaagtgatcaaccttatgacaagatatcagtatggaccttcaatacagagagtgagctctggtctcatatggaagcgaagggtgacattccggtgtctcgaagtgggcatacggtgattagagccggtcctgttttaattctctttggaggtgaagatgccaaagggaagaaactacatgaccttcatatgtttgatctgaagtcattaacatggcttcctctgaactataagggtgctggaccttctccaagatcaaatcatgtagccgccctttacgatgatagagtcctattgatttttggaggtcagtcgaagtccaagaccctgaatgatattcatgctctagattttgaaacaatggtatggtcaagggtcaaaacccatgggcatcatccatcacctcgagcaggttgctgcggagctctttgtggaactaaatggtatattgcaggaggtggaagcaagaaaaaacggcaccctgaaacatgggttttcgatgtccttgagtccagatggtctgtttgtgtagtgcctcctagttcctcaatcactacaaagaaaggtttcagcatggttccattgtactacagggacaagatcgtgcttgttgcttttggagggaacaaaaaggaaccatccgacaaggttgaagtactagtggtgctgcaaaacgagcactgtttcagctggcggtctgcgcccgaggtggaacccttactgtacgacgagtctcctccaggctcaagggaactcgccgaccatctcagcagctgcgctccaccgtatcctactagctccgcggcgaggagcggtctcgccgccacagcggagaactcctgcgggaggaaacccctcccggactcactgctacggacctcgaacctcgggggctcgtcgctccgcaggcagttccgtcaggaagaggagtgcagcagcctggcgcaaaagctgcagaaaccgatcgacgacgacaggtacaaggacgccgccgacgagtgctccgagcatcaaccaccctcggccacgaaccctaaaccgcggaacgacgcgcggcggtcgtccccggaggtcgtcgtcgacgcaaaagcgaggaggctgctgggcaggagctcgtcggacatgaacaaccaccaggacgcaagggtggccgccctggtcaggaggaacgtggcgctggaagagcagctgtcggcggcgctggcgagcaaggacgaggcggagaagaacctgtccctggtcatcgacagcaaggacggcctggagaagaggctggccgagaaggacagggaggtcgaggcgctgagggagaaggcgacggggttggagctggcgcaggaggaggccaacagcctctccaacaccgtccacgccgacaacgtgcggctggagcgcgaggtggcgttcctgaaggccgtcatggacgagacccagaaggaactgcactcgactcgcggagttcttgcaggagaacgcgcacgggcattccagcttcaggttgaagtctttcatctgaagcagcgcctgcagacgatggaagggaggtcacccgcagcaccaagaaagcctcagaatgcgtagggtagggtgcaggcgtgtagagtttttgagcgatagatctgctgtagattcattcagtgatgtaatgtaactgtagtaggtgccggagctactgtaatttgtaatattattcgacgcgatgcgatgcaaacgtatttcgcaactgggacgtacgtaattgtgtagaatgagttgcggtcgactatatatgcaagatgtcttttatct

SEQ ID NO: 42478 - DNA, 2610 bp, Zea Mays
gtcaatctgccactggccgcgaggccgacccacgccacgctcctcctcagctacagtccctcctccaccgctgctgcgctcacgctcctcgacctcccacactcactgtcagtgtaaagctcacgccggaggccggagctagctgccccctgcccgtgagctagtcactcacagcacaggtgacagggtggtggtgggcggcgggattgcggttgcggcagtagggttcaggctcggataccagcctcctcctcctcctcctcctcctccgcctccgtttccagaagggggcgagcgctaccggggagctcgacagacgccgagccgcaatgcccaagatgttcgggttctctcggcgccggatgaagctgggcaggttgaagggccatctgcacgaccatttccatggccctcgaagcccgtctcggaccaccaagcgttccagcagtcatcacaacgcagaggatccattggctacctcagtgagtgggcgcgccgacgacctcgcctggcgctgctcgtccgacactttcgatctcaatgggcgcgatttcgagagctccgagaactgggcggtcctgtccaccgagggtgacaagccagctcctcgtttcgatcatgcagcagccatggttgggagcaaaatggtggtgtttggtggcgactccggtcaatctttgctagatgatactaagatattgagcttagacaagcttacctgggattctgttgctcctaaagttcgaccaccattgaacgggcgttctctgaagctgaggccatgcagaggtcattgcctggtttcgtggggaaagaatgttattcttgtgggagggaaaagtgatcaaccttatgacaagatatcagtatggaccttcaatacagagagtgagctctggtctcatatggaagcgaagggtgacattccggtgtctcgaagtgggcatacggtgattagagccggtcctgttttaattctctttggaggtgaagatgccaaagggaagaaactacatgaccttcatatgtttgatctgaagtcattaacatggcttcctctgaactataagggtgctggaccttctccaagatcaaatcatgtagccgccctttacgatgatagagtcctattgatttttggaggtcagtcgaagtccaagaccctgaatgatattcatgctctagattttgaaacaggtcaaaacccatgggcatcatccatcacctcgagcaggttgctgcggagctctttgtggaactaaatggtatattgcaggaggtggaagcaagaaaaaacggcaccctgaaacatgggttttcgatgtccttgagtccagatggtctgtttgtgtagtgcctcctagttcctcaatcactacaaagaaaggtttcagcatggttccattgtactacagggacaagatcgtgcttgttgcttttggagggaacaaaaaggaaccatccgacaaggttgaagtactagtggtgctgcaaaacgagcactgtttcagctggcggtctgcgcccgaggtggaacccttactgtacgacgagtctcctccaggctcaagggaactcgccgaccatctcagcagctgcgctccaccgtatcctactagctccgcggcgaggagcggtctcgccgccacagcggagaactcctgcgggaggaaacccctcccggactcactgctacggacctcgaacctcgggggctcgtcgctccgcaggcagttccgtcaggaagaggagtgcagcagcctggcgcaaaagctgcagaaaccgatcgacgacgacaggtacaaggacgccgccgacgagtgctccgagcatcaaccaccctcggccacgaaccctaaaccgcggaacgacgcgcggcggtcgtccccggaggtcgtcgtcgacgcaaaagcgaggaggctgctgggcaggagctcgtcggacatgaacaaccaccaggacgcaagggtggccgccctggtcaggaggaacgtggcgctggaagagcagctgtcggcggcgctggcgagcaaggacgaggcggagaagaacctgtccctggtcatcgacagcaaggacggcctggagaagaggctggccgagaaggacagggaggtcgaggcgctgagggagaaggcgacggggttggagctggcgcaggaggaggccaacagcctctccaacaccgtccacgccgacaacgtgcggctggagcgcgaggtggcgttcctgaaggccgtcatggacgagacccagaaggaactgcactcgactcgcggagttcttgcaggagaacgcgcacgggcattccagcttcaggttgaagtctttcatctgaagcagcgcctgcagacgatggaagggaggtcacccgcagcaccaagaaagcctcagaatgcgtagggtagggtgcaggcgtgtagagtttttgagcgatagatctgctgtagattcattcagtgatgtaatgtaactgtagtaggtgccggagctactgtaatttgtaatattattcgacgcgatgcgatgcaaacgtatttcgcaactgggacgtacgtaattgtgtagaatgagttgcggtcgactatatatgcaagatgtcttttatct

SEQ ID NO: 42479 - DNA, 3852 bp, Zea Mays
ccacactctacagcggttccccctatatcaaacctctataccccaccacaccaatattatatactttcatcttcaactaactcaactaccatacaatttttgttttatttttatttgctatatgaatagtgcgcggctacagtgttaaagataactactaatgctaaagcatgtgattagtattctttccagctcacgttgttttgttctaaaaaaataacagtataacacagcatcaaacaaataggccaaagaagaatagaatctgaggtctatctttgacattagcccgtgtgtccacttttgtctaatatgaaactgcggtgctctgatttaaagattgcagctaagaacacgaaaaaggaaaaagaaagcaggggctgaaaataatggaaaccaacttgaatatatcaatctaaatgtatgttaacataatgaactcaaaatgtcaattagaatgttgatgctaaaatatatggacactagaaatgtgctaagctttggatccaaataatagaccacagacaccatgttaaacataaacataactaatttataaacataatgtctatttaaagcactgattgatgaaacagtaagcctacttaattaaaaacagaaaaaagcatacccaatcaacatgagactcaaaagttcctgagaagcttgcatccccattatttaattcccatcttttcaaggtaccatcacggctcccgcaaaaaagatgatcacttgtactaaatatggaaccatctagataagccaagcaattgatccccacacaatgctgaaaaacaaacagaaacgaatgcattagcatcgccattgagtggaatatgaattgtttcgaatgtatatagagtacctcgtcggcatcaagaatttattacaacacatgaataattaatttttgtagtagtttagaattctgaatcttctcttaatggttatgttttggattaggatgttattgtatctgatctatgtggcctttagtcttgacggactccagaaggagagagacggactgttgcagctgcagcagcaacaactaggagacgagcgataaaaaatagcgtagtagatagacgcctggaaagacaaagagagtgtgatcccgcaaaatttctcccaaaaatcatgacgcctttctggagcccggccctcattcttctgccaaatctctgcaagaataaaagatacgcagaagatatacgggactaattgctggattaattatctcgtggcgccggctgattagcgtggtacgtagaggaagactaatgctaataaacaaaatcaaggagctccaccagcatctggatcgatcatactcataccgggagaagacgcaggcccactggcggtggccgctgtgcttgcggcggaagtgcttcttgatgccgacgaggtcgcccagcgcgtgcgaggggtcgtggtgcaggcagctcggctccgggcacaggaacacgcgcttccgcgccgcctccccggcctcccgcttcagcagcttccacggcaccttgtgccgccgccggtgcatctgcaggttctggtcgcgctggaacccctgcccgcagatctcgcacacgtaccggtccgacacggattggtgcggagtattccgagcgagcgggcgtgtgggcgaagaagcggctggaacccctgcccgcagctaggattggtgcggagtattccgagcgcgcgggcgaagaagcggctgcggggctgcggggaaggaatacggcgtagcgtgcccatcgatttagcgggagagagaaagaatcaggaagggagaggaggaggaggaggacgccgttgaaggagcggctacagtgttaggggagggggaaaccgagagcaaccgttgaacacagtctcatccttcttcccccctcatccgtcctctcgagggacacgtggctccatctggttggcctttggacgacgcggtagcccaaccgtgggggccggcccgttcgggtcgctgtccaccgttccgtaacttgacggagtcacggaacggtgtgcttgctcctcgctgccgccgtcttcttcttcttctttcttaccagtctcctccggtgcgggcgagggagacgacgacgacggcgatggcctggctgaggcggacggagacgctggtgctgctgctcgtggtgcttctggcctccgcttcaacctccgcggcggcggcggcggcgggagaggaggaggaaagagtgatcaggctgaagcacagtgacggtggctattcttataaccatactctggctcatattcttgtcgaatacgcgtctgcggtgtacacatctgacttgacatcacttttctcatggacctgtccaaggtgcaaaggccacacaaagggatttgaggtcatagagatcatagtagatgtggagaactgcttacaggcgtttgttggagttgcacctgaccctcgatccataatcattgcttttagaggcactcaacagcacagtgtctcaaattggatcgaagatcttttctggaagcagcttgatgtgacatacccaggcatgccggatgcaatggtccatcatgggttttattctgcatattataatacaactctgcgatatgagatcctgaagtctattaaatgggcaagaaaaacatatggaaatctacccataaatgttgtgggacactccatgggaggggctttagcttcgttttgtgcccttgatctatctgttaaatttggatcgcaggaggttgaactcatgacctttggacagcctcggataggcaatcctgcatttgctgtatactttggtgaacaagtcccaagaacaatccgtgtgacccatcagaatgatattgtgccgcatttaccaccgtattattattacctaggtgaatggacataccaccacttcgctagagaggtttggcttcatgagagcatagatggaaatgtagttaccagaaacgagacggtatgtgatgattctggtgaagacccgacctgtagcaggtcggtctatgggatgagcgtagcagatcatcttgagtactatgatgtcacactacatgctgattcaagaggaacctgtcaattcgtgattggtgcagccaaccaagtatacaactacgttcgtgaagttgatggatccatcatcctgtcaagatacccgcaagaaccacaagctctagaatctatgtgactttgtatgccacggaatgcacccctgtacagtatttttcattttcattttgtgtacagctcatgaaatgctgggcgctcctggagctctccagaggataaggagaggctcacctttttaaatgtgccccctttgctcaagtgagaatcgtgcatatatgcttctgcagatcaaagcacgcaaccctttgcaaacacgaggagccaagaactgatcaggctcaggaaggaatctcaagatgcaaagctctacagagggtcagcactgccagggtagatcttgaggataaggatacatgtctatccacatattctccattgccgtctacttgtcctggggggtttgcatcatacaatgagaagaaccatcgcggcagcatatcaacggcgactgttccacaccatcacttacacagcatgcaccttgctgatacgcaatgctatgccagggcaaatgcctgcgtatctgataacatgttgcggccagtgattggtcagaaaatgcttcagagaacaaaatatagaaaaactaggcagaattatcaaacggttgtcttggctaatgatttactcacaaggtatggtgtaactgttcaaaggaatgacagatagcaaatgttgcagattctgccactgcagataaggtaagaagagag

SEQ ID NO: 42480 - DNA, 1285 bp, Zea Mays
gatcatatcgccaaccgccctcgtctcctcactccaatccaaaccctagtcgtcgccaatatgcagctccatcccggtgctcgcctagatgggtcgccccgcaaggagagaacgtgactagatctagcaggagacagagcttcctgttccatctccaccgcaatcgaccgtgccaattaacaggctcccaaggaggagatccaatcctgctagcgggcatccccattgcatccatcgatctgaatctgcagatgagcagtctcattggggtcttctcttttttagaaatgactcatgggtttctcaccatcccttccacttggggatttcaatcgaatggtgaaatggagttaccaatcaaccactggctgaatcagctcccggcctgcccgggcttatctccaccggtacaggctagtgaccaccgccgctgggagcacatcgctaggaacgtgcgtacctccctccagtcctttcctcacgctctttgttctttggtcggttccatcaagcgtggcagtaatgttttgttattgcaaattatagatgtaaattcagatcaagtatatgcatttgtagtttatatcacaaagggaagctaaacatttcgagctgcaagatcccactgtatgcattactatacatatagaacaaaaattgtagttaccacaacatatttgttttagtatccagagtcctttgtccagtaagctttatgtctcacaaattagacaaattagggttatctacgtgtacactttgtgttttgtttttattcagtcatgaatgttctacaacaagcaaaatttatgacctgatcaactatgtaaggagtccatcagtgataatataagaagggaggacctacaattctgatgaaaaaggtttgatcatgagttttatttcattacatatataaattgggtgtcaaagttaattcagtaaccaggacataatgaaatatttacacttacctattctacttttaatagtatatcaagccattaagtttttaccgtctatttattagaattgaatcataattggtttgcgctactttcaatttacaataattataactagcattacaaatagtgaaaatacagttgtagttacaaccttgtctccattatgcgtgtgcgcatatacattgctacctctacattttgcattcgagtgaagtgatctctggcaaattaaataactgcaatttatacgacactgtttgttgctatatcatgcatatagtaataatgtttgtactactatattcttcgtccatgac

SEQ ID NO: 42481 - DNA, 1303 bp, Zea Mays
ccaagcgctagccggctagccccattcacccccacgagatcatatcgccaaccgccctcgtctcctcactccaatccaaaccctagtcgtcgccaatatgcagctccatcccggtgctcgcctagatgggtcgccccgcaaggagagaacgtgactagatctagcaggagacagagcttcctgttccatctccaccgcaatcgaccgtgccaattaacaggctcccaaggaggagatccaatcctgctagcgggcatccccattgcatccatcgatctgaatctgcagatgagcagtctcattggggtcttctcttttttagaaatgactcatgggtttctcaccatcccttccacttggggatttcaatcgaatggtgaaatggagttaccaatcaaccactggctgaatcagctcccggcctgcccgggcttatctccaccggtacaggctagtgaccaccgccgctgggagcacatcgctaggaaccctttcctcacgctctttgttctttggtcggttccatcaagcgtggcagtaatgttttgttattgcaaattatagatgtaaattcagatcaagtatatgcatttgtagtttatatcacaaagggaagctaaacatttcgagctgcaagatcccactgtatgcattactatacatatagaacaaaaattgtagttaccacaacatatttgttttagtatccagagtcctttgtccagtaagctttatgtctcacaaattagacaaattagggttatctacgtgtacactttgtgttttgtttttattcagtcatgaatgttctacaacaagcaaaatttatgacctgatcaactatgtaaggagtccatcagtgataatataagaagggaggacctacaattctgatgaaaaaggtttgatcatgagttttatttcattacatatataaattgggtgtcaaagttaattcagtaaccaggacataatgaaatatttacacttacctattctacttttaatagtatatcaagccattaagtttttaccgtctatttattagaattgaatcataattggtttgcgctactttcaatttacaataattataactagcattacaaatagtgaaaatacagttgtagttacaaccttgtctccattatgcgtgtgcgcatatacattgctacctctacattttgcattcgagtgaagtgatctctggcaaattaaataactgcaatttatacgacactgtttgttgctatatcatgcatatagtaataatgtttgtactactatattcttcgtccatgac

SEQ ID NO: 42482 - DNA, 1925 bp, Zea Mays
tttccttctcatcttacttcttaagtttgatttattgtaaacattgcagagctcagattgcaacttcggcttctaaagagggagactatagacactagagatgacaacgagctttttacattgagtgatgtgatgtgaaaacatgtcaatcacttcctgagatgggggaatcccacgcttttaggaatatggaagaaatggatttcttctatgtgtttgatatgcttgttgctttgggcattcatgcacccaatgaggatgacctccttgataactgctacttactgcagtgtcctctaggggtttattcagcgaggccgcaagggggaaacaaccggagactacacaacatatcgagacggctctatctaacctgaggtctatgtcttgcttgctgacccgcacctctctccatcccacctcgaactcatctccttcgattcagcagaggacaacgctctgcctctccactgtacttgacagtcacggctccacccctcacctagcgaacataccctcccattttccattcggatgcatgcgtgggtgaccagcacatcgaggagttccacaagcatgcatgaggtattcaaattctgtttctctgaagttgcagcttgatacttcgattggaggacctgttcttggggttcttagatttttttccctctttgcttcgacactttaggttttatcggattcgaggcagtttcagtggcgcataacaactaatcaccaattcaccatggcatcctccacctatccagtccggtcctcctcgcccttctcctccaacccgcgctcacaacagcgacctcgctctcggtgctgctgttctcaatggtgtcgtggtggattgtaggtgtggatgggcagcgcttgaagctggtgtgcgcgaagtgggctttgcatttggagcccgcagccgcagagggcctagcgcagcgcggcacatcggacatcacaggacgtgtggcatcggtgggattcaactatgtcaggctcacctgaccgacctacctcctcaccaacgtcgtgctcgttggagcgtgtcggcgtgcaagagtgcgttgttttgtagtccctatttttggtccgtggaaaatccagacgcaaagtgaagcgtagttttctaagaaaaaaggtacatagcaaagcttctgatctttatgcattcttttgttgttgacatttgatttttttttatttttttctccaccgtctccttctcaaattgatttggaaagcctaaagcacaatgcattagtgccggctacctatccaagagttgtctccagcaagaaatagagataaatgagtagaaatagggagagatgcagtgaaagaactagagaaagagagataaagagacacaaatagaaagaaaatcgttcttcccttacattttactgtttcattcccaactttagttacttatttatgcaagatgctccgttcgatcaatcttttccgttccagtattttattttccctctttttttagttttcatatctttaacaagtgctcatatgtgcaggtgtcagtttatagaccaggagaattcattgtcggtgcttcaaaacatctctttctttcattatttttgctgcctaatcttcctcttttttcctattcatctgaaaaacattggtatatgcaggcaaacaattcacaactaacaaaaattgtagacttcaatatttgatagctccaaattttaaccactttggttatgatgcgtcattgattgcttttgtttgcaatctttttggattctcttacaatctttattgcgctattgcaagctaattataatacagaaaaagctcttacattatagtgtttattcattgaatctagcatcctaatttgtgcaattgctaccgattacctcctcccatagaatacatgatttttgtttccc

SEQ ID NO: 42483 - DNA, 565 bp, Zea Mays
atggctggcggcgtgggcgcaaaatcagcggcggtcgtggggattccagcaaaatcacggcggtcgtggcaggctgcggcgcgcggggtgcgcgggagcaggggtttcacagcggctgtggcgcgcgggcgtgcggaggacggcgtggcgtgctgtgcgggaggctgttgcaggtgcgggcagggagcgggggtttcacagcggttgcggcgcgtgcggaggacggcgtggcgtgctgtgcaggaggccgttgcgggtgcgggcagggagctggggtttcgcggcggctgcggcgcgcgggtgcgggaggcagttgctggtgcgggtagggagcgggggcagtctacactgcccccttaatagttagtacagatataatgaataaggggaacccctccactggacatgaaaaataatgtgtttaccataacatgttttggttgcaatattcaacaagtacccatataacatatacatataactggatctcaattttctaggcaaaatactgagtagaaccagcagccgtgtgtaggctgtctctctctattcggagcaagctggc

SEQ ID NO: 42484 - DNA, 1504 bp, Zea Mays
atggagcaagagaagacccgggcgccaccatccatcagcgtcaagcctcctagaccccaaccttgttcctacagcacccatccaccgtcggcacttgccacagccggagtggcgatccaaaaactctcggttctccttctagacctcgatgtcgctgtacacctccttcttccatatgtacaccaccttctccatgacgtcagcatggtgtgtggtggaggcggccacaaacatgctggcttgcttggggcatgcgcgtggggaggtgggggcatgggggagatctccactggaatcacgggggaggtggttgcgccgacggcttgctcggggtgtgcgcgcgtggaggcggggacacggggagagatctccactggaagcgctaatggggtaggcggtcgcgcttgcgacggcggcttggtcgggggggcttcgaggagggggtttggagcattggaatcgcaggcccaacgaagcccaatggccggaggcccaaatttcccccaacccaatcggccccaatctccgcttctcccctctcctttcacatttcgcgaaactaatatgcctcaagttggtgtgatacaattggctcttcaaaataattcaactggtttagtattgagttggcagaatgatgtatttgtggtcgctgaacccggggaacttgcagacaggtttctgcaatctgtcaaaactatcttgtcaaccttgttgcgtgggtgtaatagaaagggtgcatattcgctgtccaagatttcatgtttatctgagttggttgctgaatggccatcttttgaaatcggtgggatacaccaccgctatataggtcgacaaacacaattggtcttaaatcgagttctcatgcttggttcacaagctcaaacagttattgggaggccaatactacctgatgctgttgttcatgctgttgtagaagaacatgtacttacaacactttagcagagatttgggtgggtagcgcaaaggatatggaggcattgctggtcgattaccaatactgtgtttcccaagtcaacttgaaggaggaagagaccaaggtctgcagtgagtccttgtattgtagtatgaagccagggacatggatgaacttcagtcgaagctgaaccaagcgatgcaagagttgggtgagcttctgcaagatagaagaagcctagctgcttgcaacgggagtacgctggaatggtgcatttcctgatctgttggcttgcaaatcttgtaagctggtaaccctactgtgcaaaattgataatgagtgttttctatttgagcagtaaatggtgtttgttcttgtatttaatggcagatccaaaaaagaaggaagagaagcatgtgagaaagagaattgtgaacggatgcaactcaccgtacacaaatcatactattagctaagccttcccactatcattagatgaatagcatcaacctctatagacaggaagcatgcatataaactttacactaccccaataaatacccgaaa

SEQ ID NO: 42485 - DNA, 1530 bp, Zea Mays
atggagcaagagaagacccgggcgccaccatccatcagcgtcaagcctcctagaccccaaccttgttcctacagcacccatccaccgtcggcacttgccacagccggagtggcgatccaaaaactctcggttctccttctagacctcgatgtcgctgtacacctccttcttccatatgtacaccaccttctccatgacgtcagcatggtgtgtggtggaggcggccacaaacatgctggcttgcttggggcatgcgcgtggggaggtgggggcatgggggagatctccactggaatcacgggggaggtggttgcgccgacggcttgctcggggtgtgcgcgcgtggaggcggggacacggggagagatctccactggaagcgctaatggggtaggcggtcgcgcttgcgacggcggcttggtcgggggggcttcgaggagggggtttggagcattggaatcgcaggcccaacgaagcccaatggccggaggcccaaatttcccccaacccaatcggccccaatctccgcttctcccctctcctttcacatttcgcgaaactgtaagtggcggccggcggacaccggcgaggaggcgacggaccgacggcgcactccgtcgaggggacgcggaagaggtattcggcaacctacgagccaaggaggcgacgcggtgcggcgctgagcacggtgccggaggcccggagcggcgggcgcaaccggcttggcggggcggtgtccgtgcttgaggcaccgagcggaacggaggccgcagggcggctgccaccggggctgtcggcttcacctagtggctgctatcggagaggcgttgggcggggctagtggacagccagcggctagaagccatattttggtcttaaatcgagttctcatgcttggttcacaagctcaaacagttattgggaggccaatactacctgatgctgttgttcatgctgttgtagaagaacatgtacttacaacactttagcagagatttgggtgggtagcgcaaaggatatggaggcattgctggtcgattaccaatactgtgtttcccaagtcaacttgaaggaggaagagaccaaggtctgcagtgagtccttgtattgtagtatgaagccagggacatggatgaacttcagtcgaagctgaaccaagcgatgcaagagttgggtgagcttctgcaagatagaagaagcctagctgcttgcaacgggagtacgctggaatggtgcatttcctgatctgttggcttgcaaatcttgtaagctggtaaccctactgtgcaaaattgataatgagtgttttctatttgagcagtaaatggtgtttgttcttgtatttaatggcagatccaaaaaagaaggaagagaagcatgtgagaaagagaattgtgaacggatgcaactcaccgtacacaaatcatactattagctaagccttcccactatcattagatgaatagcatcaacctctatagacaggaagcatgcatataaactttacactaccccaataaatacccgaaa

SEQ ID NO: 42486 - DNA, 1271 bp, Zea Mays
atggagcaagagaagacccgggcgccaccatccatcagcgtcaagcctcctagaccccaaccttgttcctacagcacccatccaccgtcggcacttgccacagccggagtggcgatccaaaaactctcggttctccttctagacctcgatgtcgctgtacacctccttcttccatatgtacaccaccttctccatgacgtcagcatggtgtgtggtggaggcggccacaaacatgctggcttgcttggggcatgcgcgtggggaggtgggggcatgggggagatctccactggaatcacgggggaggtggttgcgccgacggcttgctcggggtgtgcgcgcgtggaggcggggacacggggagagatctccactggaagcgctaatggggtaggcggtcgcgcttgcgacggcggcttggtcgggggggcttcgaggagggggtttggagcattggaatcgcaggcccaacgaagcccaatggccggaggcccaaatttcccccaacccaatcggccccaatctccgcttctcccctctcctttcacatttcgcgaaactgtaagtggcggccggcggacaccggcgaggaggcgacggaccgacggcgcactccgtcgaggggacgcggaagaggtattcggcaacctacgagccaaggaggcgacgcggtgcggcgctgagcacggtgccggaggcccggagcggcgggcgcaaccggcttggcggggcggtgtccgtgcttgaggcaccgagcggaacggaggccgcagggcggctgccaccggggctgtcggcttcacctagtggctgctatcggagaggcgttgggcggggctagtggacagccagcggctagaagccatattttggtcttaaatcgagttctcatgcttggttcacaagctcaaacagttattgggaggccaatactacctgatgctgttgttcatgctgttgtagaagaacatgtacttacaacactttagcagagatttgggtgggtagcgcaaaggatatggaggcattgctggtcgattaccaatactgtgtttcccaagtcaacttgaaggaggaagagaccaaggtctgcaatccaaaaaagaaggaagagaagcatgtgagaaagagaattgtgaacggatgcaactcaccgtacacaaatcatactattagctaagccttcccactatcattagatgaatagcatcaacctctatagacaggaagcatgcatataaactttacactaccccaataaatacccgaaa

SEQ ID NO: 42487 - DNA, 2633 bp, Zea Mays
gacgacggtgactggcggagccgggccgggcgagtagcgggcggggcggaacgacaacggctggccacgcgtgccgcgacggctggcggagccgggtgggcgagcaggagacgacgggatgtggggcggctaagcacccagcggcggggaggcggccgagcaggcgggcgcgcgaccgatcaggcggcggtggagcaggccgagcaggcgggcgcgcggccgagttggcggacgcgcggggcgagcgcagctggcggcggtggagcgcggcggcgcgttccggcgagcaggcggcgcgtggggcgagcgcagcaggcgacggtggagcgcggcggcgcgttccggcgagcaggcggcggtggagcggcgatggagcgcggatgacggcgtagcggacgctggaaaatgggagacggacagagacgggcgcgcgccgttagcctaaaaatgataacttccgagaggccctgtacaaaaccgtcggaagttaaggcctacctcgatcggtcaacgtctgaatatgtaacttccgagaggccacgggccagccgtcggaagttaacttaacttccgagagactcttggccggccgtcggaatttaatttaacttccgagaggcactagtcgcctctcggaaattattaatgtcctacggttttgaaaaaaaaccgtaggaagttatttgcctctcggaagttgcttattttggtgtagtgcgcgacctcggcccaaacccggccccgcactaaaatatttcgggtcgtgccgtgtctgagccgtgttttttttcgtgcttcgggccggcctaaatgtacacctatagctgagccgcgctagcctttgagtgaagtggagtgaggtagcaagtggtgagatcaaggggccgttttgcgaaagagttgctctgcagaggagctagagcgagagctattgttagaggactcggagccccgctaaacagggcctaaaactctaaagagtaacttcataaatttgacacacacatcattgacgattcaatttacttgatattttctctttaatattttttctattttttgatgacttgaatttacttctatagtaactttaattttctgtttaggacttgaagccatcatatacttctcagcttaataacttccatggtaacagttgagacttctagtcaatttaaagagacaaaatgaggaaaaaaagaaactattaatcggaggagcttccaacctggggtcaccaagaaaaagcaccgacctggggccaccaagtccaagcaatccaaataagatgacgagctagttgagtacatagtactgaataaatcctgcctgcctaccattaagcgccatgacagagatttttaggtcaatttatgtaaaccctgaataataggctttattattttataataataataataataaaagtttatttggatctgagttttatcctaaagcatgtttcttatcatataaaggataaataaaagttttaattaacgcatcatgctggatttattgtttgtgcattatgtttggatttgtgattcaaactttactaaaactaattaataatgggtgaataaataaataaatagaatcgtttttatatacgaagataaaaactttgtatcatgttgggatgaatttcatttgtcgcatctcaattgggaaattaaaaatttaaatgttgggattaatttcgtttgtcgcatctatctcaattgggaaattaaaattttaaaaccttatttcaaacctgtatttcagatttgaattgaaatttggaatagaaaaggaatttagaatggaaaaaaagaaatagaaaagaaaagaaactcacccggtgctctcgcaagtcgcaacagactcaccgtgcgtgaagccaggagaagccatcgggatcccaacgaactagctatatccctttcgtcctccgattcatccttgcccctatatatgcaatcgcgcacacggaccttcgacctggaactcgtcgccttgcagccacgcaccccatcgccatagcagagaggagggagaagtgcctccatcattggcctggcctgtgcctccatcgccatatatatagcagagaggagggggaagccctacgacccgagcaccgctccaatcgccaagagatcgactgcatccagatcatctgcaatcagccagccatgtcgtcaagctcgagctcttcccagaggaaggaggaggagaaggccatggcaccggccgcggatgcggaagccaagaagaacccacggcttcagcggatgacgcaggagcagatcgactccttgatccggtaccagaccgtgcacatgcccgaggaagccttccgcaggttgagccgaaggaccaaggagctgctgaccccggaggagctggcgtaccagggcgacttccccgtccccatgggccagatcgacgactacctcgccaacatctgcagagagatcaaccagaccgaggcgcggttcctgcgggagagggaccgcatcctcaacgactactacaacaaaggctacgcctacgccgatcaacaaccttcgtcgtcatcgtcgggtaaccggaggaggttcccacctgggctcaccaagaaaaagcaaaccaaacaagtggtttaa

SEQ ID NO: 42488 - DNA, 238 bp, Zea Mays
cttgtctccactcctctgtctcttcctcatcttcaggttcatcctatagatcaaaattaataatttagttattcaaactcatacaaatattacattacaaaacaaatatattggttacctcattcctctgtacgccgactgcctgaccctgtaactctggaactcgaagtgtgaatatctcgtttttgtagcaatcgtatgcttcgactcctttccataactttttgagatcatcgat

SEQ ID NO: 42489 - DNA, 4184 bp, Zea Mays
gtccttcgtctcccttctctgttcttcctaaaaccccatctaccttctcctcctactactgctaacaacctggtatcagattcagtcgatcttcctccgcccatggcgccgccatctacctcagattcggcccttacccttgctctggagaaccagacccgctccctgcttgccgagctggacaagcgtatccagtccatggatagcaagtgggagtcgcgggtgtccgtcctggagaacacggcgacggatgcagccagatccgtcaccgaattttccactgccctccgcgccgatgtggaggcccatctcacagcctcggatgccgctacagaagggcgtctgcaccacttcgaagtggagactggcaaccgcatcgctgctctcgagtccgcgatgcagatgttcgacttttggcgtcctcgagttgactcttccatcgactcgctccagtcgaacatggactggatgcgcgccgagatcgccaagatggatgctcagtggtcccacggagcgcgcgtcggcggcgccaccatgccaggtgtccttggttcccccggttcccttgctgcgtcgcccagcatcctcggaactccgggcgcgttcgcctccactggatcgggtccggggcacccacctgctgccgtcgactacactgatggccctagattcggacacggcttcgacagctacctccgggatagtggacttcggcatccaactgccgatggccgctacccggtcacgggtatgtggcgtccccccttctccaacattttcgtttgctcaaccaaatgggttcggcgggggcgacgtagatctcagaggggctctaaacaaacatggtggcgggttgcccaaacttacattccccacgtttgatggctccagtcccaagttatggcaacgacgttgcgaaaaatactttgaaatgtatgccacagaggagatggtctgggtcaaagttgccaccatgtattttgaaggggcagctggccgctggctccaatcagtggaaccccgcctgccttctctgtcgtgggttcagttctgtcgtttggttcaagaccgattcggtcgcgaacagcacgaactggtgattcgcaaactttttcatatccgacagacctccaccgtgcaagactacgtcgatcgttttagtgaattggttgatctgttagtaacctatgaacataccacagatcccctttactataccatgcgatttatcgatggcttacgcgacgacattaaatctgtaattttagtccaacgtcctagtactttggatactgcctgtgcgctggccttgttgcaggaggaggcggaggcgtctcgccctcgtgaggtccgtcgcggtgatgcccacttgtcttacaagactccaacgaagacatcatcatatcaggattgggacaaacattctccacaagcttctgacagacctacttcaatggtttcagatccttcgtcgtctgacagtaaggttgcgtccctccgcgcttaccgtcgggcacgaggtctctgtcaatactgtgctgacaaatgggttaaaggccacaagtgctctcccactatccagttgcatgtgatgcaggaactttgggatctactcactccagagtcccaggaaccagaggctgaatttcaagatacatcagaacagttcatgatactgctttctactgaagctgtgtcctccaagtcctctcggtccaccttccggttatcgggttcgctgttcggccaggaattgttgatgttactagattctggcagctctcattgttttcttaacacgtcactggcaagctctctcacaggggtgaatcaattggctcaaccattgtcagtaacagtggctaatggcaacaagttgcagtgtacggctgaattaacaaatgcagagtggacttgtcaggggctctcgtttacttcatcatttaagcttcttcctataccttgttatgatgccatcatcggcatggactggcttgaaagctgtagcccaatgtatgtggactggaaacacaagtggatatccctctcacatctgggcaaatctgcgcttcttcaaggagtccagccaacaacaccgtctgcatccctgttggagttacgacacacagctccggaccagtctgaaatattccagctgcagatagcccatgattcatcagttccagaggcgctcgcccagttaatatccggccttaccgtttctcaccaacaatgaaggatgaaatagagactcaggtggctgatatgttacgccaaggtttgattcagcacagttccagttccttttcctcaccggtcctgctagtgcgcaagaaggacaatacatggcgcttctgtgtggattacaggcacctcaatgccctcacggtgaagtcaaaatacccagttcctattattgatgagttgctagatgaattgtttggagcctcctatttctccattttggacctccgggctggattccaccaagtgttgctcaaggccggtgaggagcacaaaacagccttccagacgcacatgggccactacaagtttcgcgtcatggcatttggactcacaggagctcctggcaccttccaacgggctatgaaccacaccttgtctccattattgcgcaagtgtgccttggtgttctttgacgacatactggtgtatagtgattccttggagagtcatgtgcagcacttgcatcaggtcttcagtttgctcgctcaggatcagtggaaagtcaagcgatccaaatgttccttcgctcagtccagtgtctcctacttaggccacgtggtcagtaaagatggagtggctacagacccgggtaaaattcaggcaattcctcctggcccgtaccatgttcacttaaggatctgcgcagttttttgggtctggccggttattatagaaaatttattcgccacttcggggttatctgtcagcctctcacacagttattgaagaaaggtgtgcacttcatttggacatctgagcatgacaccgccttttccaccctcaagcaagctcttacgtcggctcctgtgttatcattaccagattttgcttctcccttcacagtggaaacggacgccagtgcagtcggtattggagctgtattgatgcagcatgggcacccagttgcattcctcagcaaggctttgggccctaagacccgtggtctctccacttatgaaaaggaatacatggcgattattgtcgcagtccagcagtggcgttcctacctccaacatggcgaattcacaatcctcacggaccacaaaagccttactcagcttaacgagcagcgcctgcacacgccctggcaacacaaagtcttcaccaaacttttgggcttgaattaccgcatccagtacagaagtggctctgacaaccgtgctgctgacgccctgtcacggcatagttttgcagaatgtcaagccgtctccgttattgttcctcaatggctggttgccgtccaagatagttatcaccaagataaacaagcactttccctcatctctaaattggctgttgacccagcggctgtacccaattttaccctgcatgatggtctactccgatacaaggaacgcatttgggtgggtgaggacacacatctgcagcaccgcattgtcgaagctttacacagttccccattgggcggacattctggcataccagtgacatacagccgtgtgaaaaaactctttgcctggactaagttgaagccctttgtgcagaagttcgtgcaggaatgtcaggtctgtctgcaagcaaagccagatcgagctgcttatcccgggttgctgcaaccgcttcctgtgtgtaacacctcaaatccatcaattaaaataatacattattagttgctaaactaagtagagagtaaattaaaaatttatcaagtgtttgaatgcattcattatcggtgcatgatttctttgtttgttaatgaattgcaacacctttattttaatttattctctttgtgaagctctatttacttaaataataaaaaaattgcctagaagcttatttataatatatattatttaataaaatattgttattagatttattatactttttggaatatttaaaatatagttctttttgaataatctaatgttttttaaaataaggggaatgaatttcgaaatttaaaaaaaaaa

SEQ ID NO: 42490 - DNA, 1572 bp, Zea Mays
accatttggacaccgatccatccatccatccagccccgtacgtgtctcgctggccgtccgtatatatagagagaggcatcggagattggccgccacgttgccatcgcgcgcggcgcccgccggccaaggccaaccatgctggcgagggctcctccgccgcggccgtgctccagcggcggcagaggccgcttctaacgggtcagcggcggcggccgtcgcagggatcagcagcagcagcagcgcgctggtgacctcgaccgtcgggaaatcgacgaacatcctgtggcatgagtgcgccatcgggcagaaggagcgacagggtctgctgaaccagaagggctgcgtcgtgtggatcactggcctaagcggttcagggaaaagcacgctcgcgtgcgcgctgagccgcgagctgcacggcagaggccacctcacgtacgtcctcgacggcgacaacctcaggcacgggctgaacagggacctcagcttcggagcagaggaccgcgccgagaacatccgcagagggaagtagcgaagctgttcgccgacgctggcctcgtctgcatcgccagcctcatatcgccctacagaagcgaccgaagcgcgtgtcgcgatctgctgcccaagcactcgtttatcgaggtgttcctggacgtgccgcttcaagtgtgcgaagccagggaccccaaaggcctctacaagctcgcacgcgccggcaaaatcaaagggttcaccggcatcgacgatccttacgaaccgccgtcggactgtgagatagtgatccagtgtaaagtcggcgactgcccttcgcctgaatcgatggctggtcacgttgtgtcgtaccttgagacgaatggtttcctccaggactagacatggaatgcgatcgatgcgtctgatgtgtatatatgtagcagcagccggagcggcattgccaaggctgtgtaatctcatggctgtctttctctttaagaccaaaacaaacaagagatggcagtgtaaaaaggaaaaaaaaaactgcgtctgacagagtcgctgaatcaaccatgcttctgataaaagctattgtttgtaggtacggcgttgattcttacgacatttatgacaatgctttcgaaaggtcggttccaaaaaaaaaacaaattccatttattgcaatgatggagatggcccatacatgtagtaaagaacagccgtcctgaagattgaaaacaagggcaattttgatgcaaaatggccaggtctatttaatgtcatcactcagggtctagaccaaggcaatagaaatgtttggttgctactggtaccatcacggaaggttgcgtgcgtcaaggtgaatcaaatctgtgaagggaacgtggccgtcagatctacgggttgggagttagatcaattatatcttttgctaaatggtttagctctaaaacatctagcggaaaatgttgacaatgtttaatggacaacataaataagaggagggttggctccaactacctatctttctagcatctatctggtggtttaattttcacgccttctctcttgtaggtctcaccctcacttgtgtaacttgag

SEQ ID NO: 42491 - DNA, 1722 bp, Zea Mays
accatttggacaccgatccatccatccatccagccccgtacgtgtctcgctggccgtccgtatatatagagagaggcatcggagattggccgccacgttgccatcgcgcgcggcgcccgccggccaaggccaaccatgctggcgagggctcctccgccgcggccgtgctccagcggcggcagaggccgcttctaacgggtcagcggcggcggccgtcgcagggatcagcagcagcagcagcgcgctggtgacctcgaccgtcgggaaatcgacgaacatcctgtggcatgagtgcgccatcgggcagaaggagcgacagggtctgctgaaccagaagggctgcgtcgtgtggatcactggcctaagcggttcagggaaaagcacgctcgcgtgcgcgctgagccgcgagctgcacggcagaggccacctcacgtacgtcctcgacggcgacaacctcaggcacgggctgaacagggacctcagcttcggagcagaggaccgcgccgagaacatccgcagagtaggggaagtagcgaagctgttcgccgacgctggcctcgtctgcatcgccagcctcatatcgccctacagaagcgaccgaagcgcgtgtcgcgatctgctgcccaagcactcgtttatcgaggtgttcctggacgtgccgcttcaagtgtgcgaagccagggaccccaaaggcctctacaagctcgcacgcgccggcaaaatcaaagcttaaacgacgacgccctgcatgcagggttcaccggcatcgacgatccttacgaaccgccgtcggactgtgaggttgttagcagagctctagcttcctctactataccagattctattcagtgtcgtctctgtagattatcaaaaggactagctagctagctagctaatggaagatgacgattctttttgcagatagtgatccagtgtaaagtcggcgactgcccttcgcctgaatcgatggctggtcacgttgtgtcgtaccttgagacgaatggtttcctccaggactagacatggaatgcgatcgatgcgtctgatgtgtatatatgtagcagcagccggagcggcattgccaaggctgtgtaatctcatggctgtctttctctttaagaccaaaacaaacaagagatggcagtgtaaaaaggaaaaaaaaaactgcgtctgacagagtcgctgaatcaaccatgcttctgataaaagctattgtttgtaggtacggcgttgattcttacgacatttatgacaatgctttcgaaaggtcggttccaaaaaaaaaacaaattccatttattgcaatgatggagatggcccatacatgtagtaaagaacagccgtcctgaagattgaaaacaagggcaattttgatgcaaaatggccaggtctatttaatgtcatcactcagggtctagaccaaggcaatagaaatgtttggttgctactggtaccatcacggaaggttgcgtgcgtcaaggtgaatcaaatctgtgaagggaacgtggccgtcagatctacgggttgggagttagatcaattatatcttttgctaaatggtttagctctaaaacatctagcggaaaatgttgacaatgtttaatggacaacataaataagaggagggttggctccaactacctatctttctagcatctatctggtggtttaattttcacgccttctctcttgtaggtctcaccctcacttgtgtaacttgag

SEQ ID NO: 42492 - DNA, 1228 bp, Zea Mays
accatttggacaccgatccatccatccatccagccccgtacgtgtctcgctggccgtccgtatatatagagagaggcatcggagattggccgccacgttgccatcgcgcgcggcgcccgccggccaaggccaaccatgctggcgagggctcctccgccgcggccgtgctccagcggcggcagaggccgcttctaacgggtcagcggcggcggccgtcgcagggatcagcagcagcagcagcgcgctggtgacctcgaccgtcgggaaatcgacgaacatcctgtggcatgagtgcgccatcgggcagaaggagcgacagggtctgctgaaccagaagggctgcgtcgtgtggatcactggcctaagcggttcagggaaaagcacgctcgcgtgcgcgctgagccgcgagctgcacggcagaggccacctcacgtacgtcctcgacggcgacaacctcaggcacgggctgaacagggacctcagcttcggagcagaggaccgcgccgagaacatccgcagagtaggggaagtagcgaagctgttcgccgacgctggcctcgtctgcatcgccagcctcatatcgccctacagaagcgaccgaagcgcgtgtcgcgatctgctgcccaagcactcgtttatcgaggtgttcctggacgtgccgcttcaagtgtgcgaagccagggaccccaaaggcctctacaagctcgcacgcgccggcaaaatcaaaggtacggcgttgattcttacgacatttatgacaatgctttcgaaaggtcggttccaaaaaaaaaacaaattccatttattgcaatgatggagatggcccatacatgtagtaaagaacagccgtcctgaagattgaaaacaagggcaattttgatgcaaaatggccaggtctatttaatgtcatcactcagggtctagaccaaggcaatagaaatgtttggttgctactggtaccatcacggaaggttgcgtgcgtcaaggtgaatcaaatctgtgaagggaacgtggccgtcagatctacgggttgggagttagatcaattatatcttttgctaaatggtttagctctaaaacatctagcggaaaatgttgacaatgtttaatggacaacataaataagaggagggttggctccaactacctatctttctagcatctatctggtggtttaattttcacgccttctctcttgtaggtctcaccctcacttgtgtaacttgag

SEQ ID NO: 42493 - DNA, 1523 bp, Zea Mays
ccagcgcgcaaatcccgtctccgcgccgccatcaaggggatctcctaccaacaacggacgcctgcgccccaccctcctccccacgctgtcgatggaaggtggcctcggatccgccccatcgcgcctcctaggtatgtgcccgtgcgccggggccaggccatcgacagccacagcctcaccgagcgggtacgctgtcggtagacacccacctttgcttcgattcagcattataaatgggagaaatcaaggagttcatgcttttgtagctcaaattatggatgaagatggaactgtgttgcctaatatccatatagctgattgtggccataagattggactgaatggcgttgataatgggcggatttggtgggtgatatgttagcatgatagataatccagatcaggtccccctctatctctctctgaatatgttagcaatcttgatttcttattcttcttattgacggagcaagacctacatacgactattaaagaaatccagaggaatgacacagtcgaggccgccacccacccccatccttggtcgcatcttcctcgttttagaatcgcccatttggacctttgtcacctcggacaacagaatccctgctactctcccccccataagtctatcatacgtggtaatttgcaatatgcttatctaagtgcactaagaaggctttcacttgatcctggtaatcaaacattcctccaacgagatgtgcaaggtttgaggaaccttcgttacagtgcatggttactttgtttctatgacttggataaatacagttacttctttttggagatattctccgcaatgatatgtccagtttgtcgtggcatctataattgcagtatatgcagaactaagaaaggatggttccctactggttctgcatgtaggaaggcggtcggacttgggtacaaatctgtagcacactttctaattgccaagcataataacaaacaagtgccactgatatagtgaacaacgcggaggagctccaataatctgatgtgggaacaggacctgccatgtttgaggataagaagataggtgatgagttcttttcctttattgttgactgtaaagatctgaaggcatgtactattttgttgatgggagcaagttgaaaattggtgcccactaaaagtctggtgatctagctggatgaaattgtcgacaaggccattagcatcatgcaagttacctcgaagcatctcatgtatatatgcaagaagccgcactcacggaaaaggcattgagtgcaatagaggtgaaggaactgcgtgaagccctttaagcaattgctaaaggtttggacctagattcactcttgtgccagagtttggtgtagtcctcgattataaactgtgtaccatgttaatgtagtgacatagtttgtatgatgcaattcatagtgatgttgtttgaagctgtttgtatggattatgatgtctgatgcagtttgtatgaactatgtcatattatgttgaatgaagctattgaatgcccttattct

SEQ ID NO: 42494 - DNA, 2211 bp, Zea Mays
attatagtaatagagaagggattatagaagtgcgggtgattataaagaaatatgagatttttttaaaaaatattgacacaagtcaacggttgaaactgattgtttaatatagtagagaaaaaaaaaccatttatcaaatcatctcgtgacgccacgtcaccggaagagcgcagcctggccactccacggcacgccagcatgacgaaagaagctcgacagcacgcggtggcggtgatcacacaacaagcgtcgatggacgtcccacctaatcctttctcgcactcgcaccgtctgtggagaagcgagaggaggaaggagacaaggaaaggaagggaggggaatctccgtagagcactaggcagcgacggagtcagcgcagcttcgtctccttccttccttcccctttcgctggccgctggccgtcggcaccatcacctacggccacgggcgcagcgcggcgccgctccataccgggtccgcgggcctctcgccaaggaaacccgataagcctccgctgctctgctcggctgctcttgccttctctcccgtccacggtccacttagctagaaacacacaacaaacaaggagaaatcgcaaggaggagcagcgcctgccgccgcgccgtatccagcgaggcagcccccccgccccgatctgccggcccgacacgctgggatcttcctttccttagccgaccggtcaacgccgcagatattctccttccctgcggctctggaggatctcgccttcgctcggcgcttcccgattcgcggccggcggggcggactccggctgtgtgggtggacgcaaggtagtcggcaaaaggtatcgacgatcagacggagcagttgcttcaatctcgacttcgacctccatctgcattgaacccatttgggattttggagaggggggtgcttgcttgtattgcacagcatctgcatcagttcacattctttgggcatttgctatcttgtcaggcttgctgactatacagttctggttcaaggaacgcctttctgaggtctcttggattatgggagctttctgttcatgtctgcaacctgattattcggaccaccatggaaaccaaacttcttcagcgtttaggaactgcatgtgcctcagatgctttacccagcagctgatcaatgcgtatactgttttgttccgagctggagcagtgcattctgtttcccccgctattgaagccactcctgttgattcaactgaaagctccttcgatacatatcgttcgcccccaagacctctgccctatgatgatccacgattttcccctcctgctcgtgactggttaaggagtgagaacccaagccattccccagaggaatcggaaccacttagagcaaatgaggatgatgaagaaatggaaacaccaagtataatacagaaggcaagtaaaacaaactacaacacaaaaatgaaaatctgcagctctacttatggtgataaggtgccaccaagggaacatggaaattacttcagctatttttccccatctgctgaagatgaagatgtctgtccaacttgtcttgaagattatgattctgagaatcctaggatagtaatgcagtgctcacaccatttccaccttggctgtatttatgagtggatggaaagaagtgaggcatgccctgtctgtggaaagaagatggagtttgacgagacaacataatcctctggctggactctacaccatggcccatggattaacaaaccttctcatatgacattctgaaaatacagatggtctagcccagcaagttctctgtaaatacgccctgtaaatattggactggtagtgtgggtccctcttggccatacgagtgctctccaaatgctggaacggtgcacataaacattcttttccgatttgttacaaatagtcggcaggggaaggttgccccccctctgcctgtctgcgcctctgcctctgccttgtcgaggcttagaggtgcattggttgtccggtgatagattcatcggaagcctgtaaattaaagacctaggctcatataataatcatatggagtcccgtggttctggaagttcttgcaatgacaactatttggcttcagagactgaaatgctgtcatagtagtggtgtttatcatgccaacatttgcttctgtggtgtcgctaattgtgactcatggacacatatgaagagttatttattacacttaatgcca

SEQ ID NO: 42495 - DNA, 2891 bp, Zea Mays
attatagtaatagagaagggattatagaagtgcgggtgattataaagaaatatgagatttttttaaaaaatattgacacaagtcaacggttgaaactgattgtttaatatagtagagaaaaaaaaaccatttatcaaatcatctcgtgacgccacgtcaccggaagagcgcagcctggccactccacggcacgccagcatgacgaaagaagctcgacagcacgcggtggcggtgatcacacaacaagcgtcgatggacgtcccacctaatcctttctcgcactcgcaccgtctgtggagaagcgagaggaggaaggagacaaggaaaggaagggaggggaatctccgtagagcactaggcagcgacggagtcagcgcagcttcgtctccttccttccttcccctttcgctggccgctggccgtcggcaccatcacctacggccacgggcgcagcgcggcgccgctccataccgggtccgcgggcctctcgccaaggaaacccgataagcctccgctgctctgctcggctgctcttgccttctctcccgtccacggtccacttagctagaaacacacaacaaacaaggagaaatcgcaaggaggagcagcgcctgccgccgcgccgtatccagcgaggcagcccccccgccccgatctgccggcccgacacgctgggatcttcctttccttagccgaccggtcaacgccgcagatattctccttccctgcggctctggaggtttccgtaaacccgtcgcccccctccttctattccttgcaggtgaatccaccgtcgcccctttcctcgttcctccttcccttcgtctccccccaggatctcgccttcgctcggcgcttcccgattcgcggccggcggggcggactccggctgtgtgggtggacgcaaggtagtcggcaaaaggtgcgattttgatcttgtattcttgtttccggggccagctgcgttgcgtgatggctggtccgtcgaaccttcgctgttcatggttttccgtgatatacgattgagtagttcgattcaatagacactagaatcgatttgggtgccgccgacctgattgttcggtcccgaatgctgttgggttggatggggactacggggatggtattttggtgcgcggtgctgccggggcccaaagctttgcgtccaagtcccagattgcaggaagaggaaactttgttgtcaatttcagatttcttttctctgtggacgtgtgtgtctgtccaacaacgccttctctggaattacctgattttgctgcctgccattgataggtatcgacgatcagacggagcagttgcttcaatctcgacttcgacctccatctgcattgaacccatttgggattttggagaggggggtgcttgcttgtattgcacagcatctgcatcagttcacattctttgggcatttgctatcttgtcaggcttgctgactatacagttctggttcaaggaacgcctttctgaggtctcttggattatgggagctttctgttcatgtctgcaacctgattattcggaccaccatggaaaccaaacttcttcagcgtttaggaactgcatgtgcctcagatgctttacccagcagctgatcaatgcgtatactgttttgttccgagctggagcagtgcattctgtttcccccgctattgaagccactcctgttgattcaactgaaagctccttcgatacatatcgttcgcccccaagacctctgccctatgatgatccacgattttcccctcctgctcgtgactggttaaggagtgagaacccaagccattccccagaggaatcggaaccacttagagcaaatgaggatgatgaagaaatggaaacaccaagtataatacagaaggcaagtaaaacaaactacaacacaaaaatgaaaatctgcagctctacttatggtgataaggtgccaccaagggaacatggaaattacttcagctatttttccccatctgctgaagatgaagatgtctgtccaacttgtcttgaaggtattatcgcaataatcatttttttctcttaagtgtattggaaagatgctctgatatttttcaaaacgctacagtaaaatttccattacataagactttggtacatgcgaattgaacgaaaggtgttcaaaactatgagcattacattttttctgttgatactttataatcacattctcactattgttatatattaatgtaactaaattgcagattatgattctgagaatcctaggatagtaatgcagtgctcacaccatttccaccttggctgtatttatgagtggatggaaagaagtgaggcatgccctgtctgtggaaagaagatggagtttgacgagacaacataatcctctggctggactctacaccatggcccatggattaacaaaccttctcatatgacattctgaaaatacagatggtctagcccagcaagttctctgtaaatacgccctgtaaatattggactggtagtgtgggtccctcttggccatacgagtgctctccaaatgctggaacggtgcacataaacattcttttccgatttgttacaaatagtcggcaggggaaggttgccccccctctgcctgtctgcgcctctgcctctgccttgtcgaggcttagaggtgcattggttgtccggtgatagattcatcggaagcctgtaaattaaagacctaggctcatataataatcatatggagtcccgtggttctggaagttcttgcaatgacaactatttggcttcagagactgaaatgctgtcatagtagtggtgtttatcatgccaacatttgcttctgtggtgtcgctaattgtgactcatggacacatatgaagagttatttattacacttaatgcca

SEQ ID NO: 42496 - DNA, 2126 bp, Zea Mays
attatagtaatagagaagggattatagaagtgcgggtgattataaagaaatatgagatttttttaaaaaatattgacacaagtcaacggttgaaactgattgtttaatatagtagagaaaaaaaaaccatttatcaaatcatctcgtgacgccacgtcaccggaagagcgcagcctggccactccacggcacgccagcatgacgaaagaagctcgacagcacgcggtggcggtgatcacacaacaagcgtcgatggacgtcccacctaatcctttctcgcactcgcaccgtctgtggagaagcgagaggaggaaggagacaaggaaaggaagggaggggaatctccgtagagcactaggcagcgacggagtcagcgcagcttcgtctccttccttccttcccctttcgctggccgctggccgtcggcaccatcacctacggccacgggcgcagcgcggcgccgctccataccgggtccgcgggcctctcgccaaggaaacccgataagcctccgctgctctgctcggctgctcttgccttctctcccgtccacggtccacttagctagaaacacacaacaaacaaggagaaatcgcaaggaggagcagcgcctgccgccgcgccgtatccagcgaggcagcccccccgccccgatctgccggcccgacacgctgggatcttcctttccttagccgaccggtcaacgccgcagatattctccttccctgcggctctggaggtttccgtaaacccgtcgcccccctccttctattccttgcaggtgaatccaccgtcgcccctttcctcgttcctccttcccttcgtctccccccaggatctcgccttcgctcggcgcttcccgattcgcggccggcggggcggactccggctgtgtgggtggacgcaaggtagtcggcaaaaggaacgcctttctgaggtctcttggattatgggagctttctgttcatgtctgcaacctgattattcggaccaccatggaaaccaaacttcttcagcgtttaggaactgcatgtgcctcagatgctttacccagcagctgatcaatgcgtatactgttttgttccgagctggagcagtgcattctgtttcccccgctattgaagccactcctgttgattcaactgaaagctccttcgatacatatcgttcgcccccaagacctctgccctatgatgatccacgattttcccctcctgctcgtgactggttaaggagtgagaacccaagccattccccagaggaatcggaaccacttagagcaaatgaggatgatgaagaaatggaaacaccaagtataatacagaaggcaagtaaaacaaactacaacacaaaaatgaaaatctgcagctctacttatggtgataaggtgccaccaagggaacatggaaattacttcagctatttttccccatctgctgaagatgaagatgtctgtccaacttgtcttgaagattatgattctgagaatcctaggatagtaatgcagtgctcacaccatttccaccttggctgtatttatgagtggatggaaagaagtgaggcatgccctgtctgtggaaagaagatggagtttgacgagacaacataatcctctggctggactctacaccatggcccatggattaacaaaccttctcatatgacattctgaaaatacagatggtctagcccagcaagttctctgtaaatacgccctgtaaatattggactggtagtgtgggtccctcttggccatacgagtgctctccaaatgctggaacggtgcacataaacattcttttccgatttgttacaaatagtcggcaggggaaggttgccccccctctgcctgtctgcgcctctgcctctgccttgtcgaggcttagaggtgcattggttgtccggtgatagattcatcggaagcctgtaaattaaagacctaggctcatataataatcatatggagtcccgtggttctggaagttcttgcaatgacaactatttggcttcagagactgaaatgctgtcatagtagtggtgtttatcatgccaacatttgcttctgtggtgtcgctaattgtgactcatggacacatatgaagagttatttattacacttaatgcca

SEQ ID NO: 42497 - DNA, 2155 bp, Zea Mays
attatagtaatagagaagggattatagaagtgcgggtgattataaagaaatatgagatttttttaaaaaatattgacacaagtcaacggttgaaactgattgtttaatatagtagagaaaaaaaaaccatttatcaaatcatctcgtgacgccacgtcaccggaagagcgcagcctggccactccacggcacgccagcatgacgaaagaagctcgacagcacgcggtggcggtgatcacacaacaagcgtcgatggacgtcccacctaatcctttctcgcactcgcaccgtctgtggagaagcgagaggaggaaggagacaaggaaaggaagggaggggaatctccgtagagcactaggcagcgacggagtcagcgcagcttcgtctccttccttccttcccctttcgctggccgctggccgtcggcaccatcacctacggccacgggcgcagcgcggcgccgctccataccgggtccgcgggcctctcgccaaggaaacccgataagcctccgctgctctgctcggctgctcttgccttctctcccgtccacggtccacttagctagaaacacacaacaaacaaggagaaatcgcaaggaggagcagcgcctgccgccgcgccgtatccagcgaggcagcccccccgccccgatctgccggcccgacacgctgggatcttcctttccttagccgaccggtcaacgccgcagatattctccttccctgcggctctggaggtttccgtaaacccgtcgcccccctccttctattccttgcaggtgaatccaccgtcgcccctttcctcgttcctccttcccttcgtctccccccaggatctcgccttcgctcggcgcttcccgattcgcggccggcggggcggactccggctgtgtgggtggacgcaaggtagtcggcaaaaggcttgctgactatacagttctggttcaaggaacgcctttctgaggtctcttggattatgggagctttctgttcatgtctgcaacctgattattcggaccaccatggaaaccaaacttcttcagcgtttaggaactgcatgtgcctcagatgctttacccagcagctgatcaatgcgtatactgttttgttccgagctggagcagtgcattctgtttcccccgctattgaagccactcctgttgattcaactgaaagctccttcgatacatatcgttcgcccccaagacctctgccctatgatgatccacgattttcccctcctgctcgtgactggttaaggagtgagaacccaagccattccccagaggaatcggaaccacttagagcaaatgaggatgatgaagaaatggaaacaccaagtataatacagaaggcaagtaaaacaaactacaacacaaaaatgaaaatctgcagctctacttatggtgataaggtgccaccaagggaacatggaaattacttcagctatttttccccatctgctgaagatgaagatgtctgtccaacttgtcttgaagattatgattctgagaatcctaggatagtaatgcagtgctcacaccatttccaccttggctgtatttatgagtggatggaaagaagtgaggcatgccctgtctgtggaaagaagatggagtttgacgagacaacataatcctctggctggactctacaccatggcccatggattaacaaaccttctcatatgacattctgaaaatacagatggtctagcccagcaagttctctgtaaatacgccctgtaaatattggactggtagtgtgggtccctcttggccatacgagtgctctccaaatgctggaacggtgcacataaacattcttttccgatttgttacaaatagtcggcaggggaaggttgccccccctctgcctgtctgcgcctctgcctctgccttgtcgaggcttagaggtgcattggttgtccggtgatagattcatcggaagcctgtaaattaaagacctaggctcatataataatcatatggagtcccgtggttctggaagttcttgcaatgacaactatttggcttcagagactgaaatgctgtcatagtagtggtgtttatcatgccaacatttgcttctgtggtgtcgctaattgtgactcatggacacatatgaagagttatttattacacttaatgcca

SEQ ID NO: 42498 - DNA, 1985 bp, Zea Mays
attatagtaatagagaagggattatagaagtgcgggtgattataaagaaatatgagatttttttaaaaaatattgacacaagtcaacggttgaaactgattgtttaatatagtagagaaaaaaaaaccatttatcaaatcatctcgtgacgccacgtcaccggaagagcgcagcctggccactccacggcacgccagcatgacgaaagaagctcgacagcacgcggtggcggtgatcacacaacaagcgtcgatggacgtcccacctaatcctttctcgcactcgcaccgtctgtggagaagcgagaggaggaaggagacaaggaaaggaagggaggggaatctccgtagagcactaggcagcgacggagtcagcgcagcttcgtctccttccttccttcccctttcgctggccgctggccgtcggcaccatcacctacggccacgggcgcagcgcggcgccgctccataccgggtccgcgggcctctcgccaaggaaacccgataagcctccgctgctctgctcggctgctcttgccttctctcccgtccacggtccacttagctagaaacacacaacaaacaaggagaaatcgcaaggaggagcagcgcctgccgccgcgccgtatccagcgaggcagcccccccgccccgatctgccggcccgacacgctgggatcttcctttccttagccgaccggtcaacgccgcagatattctccttccctgcggctctggaggtttccgtaaacccgtcgcccccctccttctattccttgcaggaacgcctttctgaggtctcttggattatgggagctttctgttcatgtctgcaacctgattattcggaccaccatggaaaccaaacttcttcagcgtttaggaactgcatgtgcctcagatgctttacccagcagctgatcaatgcgtatactgttttgttccgagctggagcagtgcattctgtttcccccgctattgaagccactcctgttgattcaactgaaagctccttcgatacatatcgttcgcccccaagacctctgccctatgatgatccacgattttcccctcctgctcgtgactggttaaggagtgagaacccaagccattccccagaggaatcggaaccacttagagcaaatgaggatgatgaagaaatggaaacaccaagtataatacagaaggcaagtaaaacaaactacaacacaaaaatgaaaatctgcagctctacttatggtgataaggtgccaccaagggaacatggaaattacttcagctatttttccccatctgctgaagatgaagatgtctgtccaacttgtcttgaagattatgattctgagaatcctaggatagtaatgcagtgctcacaccatttccaccttggctgtatttatgagtggatggaaagaagtgaggcatgccctgtctgtggaaagaagatggagtttgacgagacaacataatcctctggctggactctacaccatggcccatggattaacaaaccttctcatatgacattctgaaaatacagatggtctagcccagcaagttctctgtaaatacgccctgtaaatattggactggtagtgtgggtccctcttggccatacgagtgctctccaaatgctggaacggtgcacataaacattcttttccgatttgttacaaatagtcggcaggggaaggttgccccccctctgcctgtctgcgcctctgcctctgccttgtcgaggcttagaggtgcattggttgtccggtgatagattcatcggaagcctgtaaattaaagacctaggctcatataataatcatatggagtcccgtggttctggaagttcttgcaatgacaactatttggcttcagagactgaaatgctgtcatagtagtggtgtttatcatgccaacatttgcttctgtggtgtcgctaattgtgactcatggacacatatgaagagttatttattacacttaatgcca

SEQ ID NO: 42499 - DNA, 2293 bp, Zea Mays
attatagtaatagagaagggattatagaagtgcgggtgattataaagaaatatgagatttttttaaaaaatattgacacaagtcaacggttgaaactgattgtttaatatagtagagaaaaaaaaaccatttatcaaatcatctcgtgacgccacgtcaccggaagagcgcagcctggccactccacggcacgccagcatgacgaaagaagctcgacagcacgcggtggcggtgatcacacaacaagcgtcgatggacgtcccacctaatcctttctcgcactcgcaccgtctgtggagaagcgagaggaggaaggagacaaggaaaggaagggaggggaatctccgtagagcactaggcagcgacggagtcagcgcagcttcgtctccttccttccttcccctttcgctggccgctggccgtcggcaccatcacctacggccacgggcgcagcgcggcgccgctccataccgggtccgcgggcctctcgccaaggaaacccgataagcctccgctgctctgctcggctgctcttgccttctctcccgtccacggtccacttagctagaaacacacaacaaacaaggagaaatcgcaaggaggagcagcgcctgccgccgcgccgtatccagcgaggcagcccccccgccccgatctgccggcccgacacgctgggatcttcctttccttagccgaccggtcaacgccgcagatattctccttccctgcggctctggaggtttccgtaaacccgtcgcccccctccttctattccttgcaggtgaatccaccgtcgcccctttcctcgttcctccttcccttcgtctccccccaggatctcgccttcgctcggcgcttcccgattcgcggccggcggggcggactccggctgtgtgggtggacgcaaggtagtcggcaaaagacggagcagttgcttcaatctcgacttcgacctccatctgcattgaacccatttgggattttggagaggggggtgcttgcttgtattgcacagcatctgcatcagttcacattctttgggcatttgctatcttgtcaggcttgctgactatacagttctggttcaaggaacgcctttctgaggtctcttggattatgggagctttctgttcatgtctgcaacctgattattcggaccaccatggaaaccaaacttcttcagcgtttaggaactgcatgtgcctcagatgctttacccagcagctgatcaatgcgtatactgttttgttccgagctggagcagtgcattctgtttcccccgctattgaagccactcctgttgattcaactgaaagctccttcgatacatatcgttcgcccccaagacctctgccctatgatgatccacgattttcccctcctgctcgtgactggttaaggagtgagaacccaagccattccccagaggaatcggaaccacttagagcaaatgaggatgatgaagaaatggaaacaccaagtataatacagaaggcaagtaaaacaaactacaacacaaaaatgaaaatctgcagctctacttatggtgataaggtgccaccaagggaacatggaaattacttcagctatttttccccatctgctgaagatgaagatgtctgtccaacttgtcttgaagattatgattctgagaatcctaggatagtaatgcagtgctcacaccatttccaccttggctgtatttatgagtggatggaaagaagtgaggcatgccctgtctgtggaaagaagatggagtttgacgagacaacataatcctctggctggactctacaccatggcccatggattaacaaaccttctcatatgacattctgaaaatacagatggtctagcccagcaagttctctgtaaatacgccctgtaaatattggactggtagtgtgggtccctcttggccatacgagtgctctccaaatgctggaacggtgcacataaacattcttttccgatttgttacaaatagtcggcaggggaaggttgccccccctctgcctgtctgcgcctctgcctctgccttgtcgaggcttagaggtgcattggttgtccggtgatagattcatcggaagcctgtaaattaaagacctaggctcatataataatcatatggagtcccgtggttctggaagttcttgcaatgacaactatttggcttcagagactgaaatgctgtcatagtagtggtgtttatcatgccaacatttgcttctgtggtgtcgctaattgtgactcatggacacatatgaagagttatttattacacttaatgcca

SEQ ID NO: 42500 - DNA, 2293 bp, Zea Mays
attatagtaatagagaagggattatagaagtgcgggtgattataaagaaatatgagatttttttaaaaaatattgacacaagtcaacggttgaaactgattgtttaatatagtagagaaaaaaaaaccatttatcaaatcatctcgtgacgccacgtcaccggaagagcgcagcctggccactccacggcacgccagcatgacgaaagaagctcgacagcacgcggtggcggtgatcacacaacaagcgtcgatggacgtcccacctaatcctttctcgcactcgcaccgtctgtggagaagcgagaggaggaaggagacaaggaaaggaagggaggggaatctccgtagagcactaggcagcgacggagtcagcgcagcttcgtctccttccttccttcccctttcgctggccgctggccgtcggcaccatcacctacggccacgggcgcagcgcggcgccgctccataccgggtccgcgggcctctcgccaaggaaacccgataagcctccgctgctctgctcggctgctcttgccttctctcccgtccacggtccacttagctagaaacacacaacaaacaaggagaaatcgcaaggaggagcagcgcctgccgccgcgccgtatccagcgaggcagcccccccgccccgatctgccggcccgacacgctgggatcttcctttccttagccgaccggtcaacgccgcagatattctccttccctgcggctctggaggtttccgtaaacccgtcgcccccctccttctattccttgcaggtgaatccaccgtcgcccctttcctcgttcctccttcccttcgtctccccccaggatctcgccttcgctcggcgcttcccgattcgcggccggcggggcggactccggctgtgtgggtggacgcaaggtatcgacgatcagacggagcagttgcttcaatctcgacttcgacctccatctgcattgaacccatttgggattttggagaggggggtgcttgcttgtattgcacagcatctgcatcagttcacattctttgggcatttgctatcttgtcaggcttgctgactatacagttctggttcaaggaacgcctttctgaggtctcttggattatgggagctttctgttcatgtctgcaacctgattattcggaccaccatggaaaccaaacttcttcagcgtttaggaactgcatgtgcctcagatgctttacccagcagctgatcaatgcgtatactgttttgttccgagctggagcagtgcattctgtttcccccgctattgaagccactcctgttgattcaactgaaagctccttcgatacatatcgttcgcccccaagacctctgccctatgatgatccacgattttcccctcctgctcgtgactggttaaggagtgagaacccaagccattccccagaggaatcggaaccacttagagcaaatgaggatgatgaagaaatggaaacaccaagtataatacagaaggcaagtaaaacaaactacaacacaaaaatgaaaatctgcagctctacttatggtgataaggtgccaccaagggaacatggaaattacttcagctatttttccccatctgctgaagatgaagatgtctgtccaacttgtcttgaagattatgattctgagaatcctaggatagtaatgcagtgctcacaccatttccaccttggctgtatttatgagtggatggaaagaagtgaggcatgccctgtctgtggaaagaagatggagtttgacgagacaacataatcctctggctggactctacaccatggcccatggattaacaaaccttctcatatgacattctgaaaatacagatggtctagcccagcaagttctctgtaaatacgccctgtaaatattggactggtagtgtgggtccctcttggccatacgagtgctctccaaatgctggaacggtgcacataaacattcttttccgatttgttacaaatagtcggcaggggaaggttgccccccctctgcctgtctgcgcctctgcctctgccttgtcgaggcttagaggtgcattggttgtccggtgatagattcatcggaagcctgtaaattaaagacctaggctcatataataatcatatggagtcccgtggttctggaagttcttgcaatgacaactatttggcttcagagactgaaatgctgtcatagtagtggtgtttatcatgccaacatttgcttctgtggtgtcgctaattgtgactcatggacacatatgaagagttatttattacacttaatgcca

SEQ ID NO: 42501 - DNA, 1859 bp, Zea Mays
attatagtaatagagaagggattatagaagtgcgggtgattataaagaaatatgagatttttttaaaaaatattgacacaagtcaacggttgaaactgattgtttaatatagtagagaaaaaaaaaccatttatcaaatcatctcgtgacgccacgtcaccggaagagcgcagcctggccactccacggcacgccagcatgacgaaagaagctcgacagcacgcggtggcggtgatcacacaacaagcgtcgatggacgtcccacctaatcctttctcgcactcgcaccgtctgtggagaagcgagaggaggaaggagacaaggaaaggaagggaggggaatctccgtagagcactaggcagcgacggagtcagcgcagcttcgtctccttccttccttcccctttcgctggccgctggccgtcggcaccatcacctacggccacgggcgcagcgcggcgccgctccataccgggtatcgacgatcagacggagcagttgcttcaatctcgacttcgacctccatctgcattgaacccatttgggattttggagaggggggtgcttgcttgtattgcacagcatctgcatcagttcacattctttgggcatttgctatcttgtcaggcttgctgactatacagttctggttcaaggaacgcctttctgaggtctcttggattatgggagctttctgttcatgtctgcaacctgattattcggaccaccatggaaaccaaacttcttcagcgtttaggaactgcatgtgcctcagatgctttacccagcagctgatcaatgcgtatactgttttgttccgagctggagcagtgcattctgtttcccccgctattgaagccactcctgttgattcaactgaaagctccttcgatacatatcgttcgcccccaagacctctgccctatgatgatccacgattttcccctcctgctcgtgactggttaaggagtgagaacccaagccattccccagaggaatcggaaccacttagagcaaatgaggatgatgaagaaatggaaacaccaagtataatacagaaggcaagtaaaacaaactacaacacaaaaatgaaaatctgcagctctacttatggtgataaggtgccaccaagggaacatggaaattacttcagctatttttccccatctgctgaagatgaagatgtctgtccaacttgtcttgaagattatgattctgagaatcctaggatagtaatgcagtgctcacaccatttccaccttggctgtatttatgagtggatggaaagaagtgaggcatgccctgtctgtggaaagaagatggagtttgacgagacaacataatcctctggctggactctacaccatggcccatggattaacaaaccttctcatatgacattctgaaaatacagatggtctagcccagcaagttctctgtaaatacgccctgtaaatattggactggtagtgtgggtccctcttggccatacgagtgctctccaaatgctggaacggtgcacataaacattcttttccgatttgttacaaatagtcggcaggggaaggttgccccccctctgcctgtctgcgcctctgcctctgccttgtcgaggcttagaggtgcattggttgtccggtgatagattcatcggaagcctgtaaattaaagacctaggctcatataataatcatatggagtcccgtggttctggaagttcttgcaatgacaactatttggcttcagagactgaaatgctgtcatagtagtggtgtttatcatgccaacatttgcttctgtggtgtcgctaattgtgactcatggacacatatgaagagttatttattacacttaatgcca

SEQ ID NO: 42502 - DNA, 2166 bp, Zea Mays
attatagtaatagagaagggattatagaagtgcgggtgattataaagaaatatgagatttttttaaaaaatattgacacaagtcaacggttgaaactgattgtttaatatagtagagaaaaaaaaaccatttatcaaatcatctcgtgacgccacgtcaccggaagagcgcagcctggccactccacggcacgccagcatgacgaaagaagctcgacagcacgcggtggcggtgatcacacaacaagcgtcgatggacgtcccacctaatcctttctcgcactcgcaccgtctgtggagaagcgagaggaggaaggagacaaggaaaggaagggaggggaatctccgtagagcactaggcagcgacggagtcagcgcagcttcgtctccttccttccttcccctttcgctggccgctggccgtcggcaccatcacctacggccacgggcgcagcgcggcgccgctccataccgggtccgcgggcctctcgccaaggaaacccgataagcctccgctgctctgctcggctgctcttgccttctctcccgtccacggtccacttagctagaaacacacaacaaacaaggagaaatcgcaaggaggagcagcgcctgccgccgcgccgtatccagcgaggcagcccccccgccccgatctgccggcccgacacgctgggatcttcctttccttagccgaccggtcaacgccgcagatattctccttccctgcggctctggaggtttccgtaaacccgtcgcccccctccttctattccttgcaggtatcgacgatcagacggagcagttgcttcaatctcgacttcgacctccatctgcattgaacccatttgggattttggagaggggggtgcttgcttgtattgcacagcatctgcatcagttcacattctttgggcatttgctatcttgtcaggcttgctgactatacagttctggttcaaggaacgcctttctgaggtctcttggattatgggagctttctgttcatgtctgcaacctgattattcggaccaccatggaaaccaaacttcttcagcgtttaggaactgcatgtgcctcagatgctttacccagcagctgatcaatgcgtatactgttttgttccgagctggagcagtgcattctgtttcccccgctattgaagccactcctgttgattcaactgaaagctccttcgatacatatcgttcgcccccaagacctctgccctatgatgatccacgattttcccctcctgctcgtgactggttaaggagtgagaacccaagccattccccagaggaatcggaaccacttagagcaaatgaggatgatgaagaaatggaaacaccaagtataatacagaaggcaagtaaaacaaactacaacacaaaaatgaaaatctgcagctctacttatggtgataaggtgccaccaagggaacatggaaattacttcagctatttttccccatctgctgaagatgaagatgtctgtccaacttgtcttgaagattatgattctgagaatcctaggatagtaatgcagtgctcacaccatttccaccttggctgtatttatgagtggatggaaagaagtgaggcatgccctgtctgtggaaagaagatggagtttgacgagacaacataatcctctggctggactctacaccatggcccatggattaacaaaccttctcatatgacattctgaaaatacagatggtctagcccagcaagttctctgtaaatacgccctgtaaatattggactggtagtgtgggtccctcttggccatacgagtgctctccaaatgctggaacggtgcacataaacattcttttccgatttgttacaaatagtcggcaggggaaggttgccccccctctgcctgtctgcgcctctgcctctgccttgtcgaggcttagaggtgcattggttgtccggtgatagattcatcggaagcctgtaaattaaagacctaggctcatataataatcatatggagtcccgtggttctggaagttcttgcaatgacaactatttggcttcagagactgaaatgctgtcatagtagtggtgtttatcatgccaacatttgcttctgtggtgtcgctaattgtgactcatggacacatatgaagagttatttattacacttaatgcca

SEQ ID NO: 42503 - DNA, 2014 bp, Zea Mays
attatagtaatagagaagggattatagaagtgcgggtgattataaagaaatatgagatttttttaaaaaatattgacacaagtcaacggttgaaactgattgtttaatatagtagagaaaaaaaaaccatttatcaaatcatctcgtgacgccacgtcaccggaagagcgcagcctggccactccacggcacgccagcatgacgaaagaagctcgacagcacgcggtggcggtgatcacacaacaagcgtcgatggacgtcccacctaatcctttctcgcactcgcaccgtctgtggagaagcgagaggaggaaggagacaaggaaaggaagggaggggaatctccgtagagcactaggcagcgacggagtcagcgcagcttcgtctccttccttccttcccctttcgctggccgctggccgtcggcaccatcacctacggccacgggcgcagcgcggcgccgctccataccgggtccgcgggcctctcgccaaggaaacccgataagcctccgctgctctgctcggctgctcttgccttctctcccgtccacggtccacttagctagaaacacacaacaaacaaggagaaatcgcaaggaggagcagcgcctgccgccgcgccgtatccagcgaggcagcccccccgccccgatctgccggcccgacacgctgggatcttcctttccttagccgaccggtcaacgccgcagatattctccttccctgcggctctggaggtttccgtaaacccgtcgcccccctccttctattccttgcaggcttgctgactatacagttctggttcaaggaacgcctttctgaggtctcttggattatgggagctttctgttcatgtctgcaacctgattattcggaccaccatggaaaccaaacttcttcagcgtttaggaactgcatgtgcctcagatgctttacccagcagctgatcaatgcgtatactgttttgttccgagctggagcagtgcattctgtttcccccgctattgaagccactcctgttgattcaactgaaagctccttcgatacatatcgttcgcccccaagacctctgccctatgatgatccacgattttcccctcctgctcgtgactggttaaggagtgagaacccaagccattccccagaggaatcggaaccacttagagcaaatgaggatgatgaagaaatggaaacaccaagtataatacagaaggcaagtaaaacaaactacaacacaaaaatgaaaatctgcagctctacttatggtgataaggtgccaccaagggaacatggaaattacttcagctatttttccccatctgctgaagatgaagatgtctgtccaacttgtcttgaagattatgattctgagaatcctaggatagtaatgcagtgctcacaccatttccaccttggctgtatttatgagtggatggaaagaagtgaggcatgccctgtctgtggaaagaagatggagtttgacgagacaacataatcctctggctggactctacaccatggcccatggattaacaaaccttctcatatgacattctgaaaatacagatggtctagcccagcaagttctctgtaaatacgccctgtaaatattggactggtagtgtgggtccctcttggccatacgagtgctctccaaatgctggaacggtgcacataaacattcttttccgatttgttacaaatagtcggcaggggaaggttgccccccctctgcctgtctgcgcctctgcctctgccttgtcgaggcttagaggtgcattggttgtccggtgatagattcatcggaagcctgtaaattaaagacctaggctcatataataatcatatggagtcccgtggttctggaagttcttgcaatgacaactatttggcttcagagactgaaatgctgtcatagtagtggtgtttatcatgccaacatttgcttctgtggtgtcgctaattgtgactcatggacacatatgaagagttatttattacacttaatgcca

SEQ ID NO: 42504 - DNA, 1280 bp, Zea Mays
tcccctcttgtattcgcactgcatgcctctcactctccctctccctagcggtctccacatgtgagaaacgcctctctagtaattaagcagcatggcagagaagatgtcgacgctaatcatcgtggttgaccttgattgccgcaagtgctaccacaagatccgcaagattctctgccaactgcaagaccatgagaggatccgcaccatctccttcgacgacaagagcaagacggtcaccatggtgggcccgttcgacccgcagcggctcgcgtgcaagctccgctgcaagggcggcaaggtggtgcgggacgtctacatcgtcgacgccaacggcggcggcggcggcggcggcaagcctcctcctccacagaacgtgccggacgacgggccacccgcgccggcgccggcgccagtgaggagcggcgggaagagcaagaacaagaacaagaacaagcagcagcagcagcagcagccgccgccgaccgagcggcctccgtcgcctccgccgccgccgccgccggagacagcgccgggacctccgccgcccgaggagatgaggccccccatggacctgccgccgtcgccgcagcaccagcaccacccgccgccgccaatgccaatgccgatgcctgggaacgagagaccgccgccgccgccgatgccgatgctgatgccggcggagtgcgtgatcccgacggtggagatcccgtcgtggccggcggcgccgcccgtggggccgtgcgggtgcccgtgctgcgcgccgtgctaccagggctactacgaaggctgcaggtgctactgctgcggcaggctgtacggcacgaccgtccgcccgttgccagcgccgtgcggggcctacaggggctgccggacgttcagcgacgacgacccgtcggcggcgtgtagcgtcatgtgaagaatggtggtggtgttgctttggatttgacaggaacatgcatggtgaactatactcttggaacgaataaataaatgtgttcattaggcagggggttgcgttttgctgtccattgttcgtgtctctccatgactgctctgcacggatcggagcatatgttcttgctgtcaacgtgtgattggccatagctagttactatatgagtgttcagtgctgttcaagacaaatgggatcggattcttcagctaataaagtctgtaatttatatatgattgttgagggctctgtgtagctagcatggagtttgaaacgaacaagaacagaggaaccgtgtgctctcgtcctgtgaggctcagcgcgcgcg

SEQ ID NO: 42505 - DNA, 1013 bp, Zea Mays
ggccggccctatagaatcctgctcctgctcctgcctgcgcccgtccccttttcatgttgctttccctttcctcctcctcctcttcttcctcctcacctcacctcctatttagccgtccgaattgcttgtcagcatcttcccagcttcttcttcttcttccaaccgcgctacgctctcttgtccccggtgctcgcttggattcttctctcttcataggaaggaaggattggctaccgagatattcctactaggtgcagagcctgctggaccagaaccggatgctcatcagcgagatcaaccagaaccacgagtcccgcgcgcccgacaacctcacccgcaacgtcggcctcatccgcgagctcaacaacaacatccgccgcgtcgtcggcctctacgccgacctctccgcctccttcgcgcgcaccatggaccacgcgtcctccgagggcgactcctccggcaccggcaataacggccgcgccggcgccggcgccggccacaagcgcgtccgccccgcctagagctagcttttagtttttttcttcttcttcttctgctgggtctagcttggcgtggcaatcctaggtgttgccattgccactaggaggcgtatttagtcttttctcttgcggttcttcttgttcgccttcttcctttgtgctcgctagctgcgacgaacgccggtgattagtgtatggtaatttagtgtcaaacagagagctgccatgtggatgttgctcctatgaccacgattaagacgatgaagaaacaccagagaagcggcacacggtaggcagccttgctgctgcgcttagctagcaagcatcttgaatggaaactattttgcagcgtactaggacacactcatgtcatggtggagcgaatgcgttggaggcgaggctggctgctcactctattatgtcactgcagatgggtcaggtcaggtagtaggcagttcatgttcatgttcagttcggcagggcaggacagatcttgagagggcaatgtttacc

SEQ ID NO: 42506 - DNA, 1352 bp, Zea Mays
ccgctttgcccttgtttaattccaaaggtttcattttctgcagggataacatttgtggggggtggtgagccggccggccctatagaatcctgctcctgctcctgcctgcgcccgtccccttttcatgttgctttccctttcctcctcctcctcttcttcctcctcacctcacctcctatttagccgtccgaattgcttgtcagcatcttcccagcttcttcttcttcttccaaccgcgctacgctctcttgtccccggtgctcgcttggattcttctctcttcataggaaggaaggattggctaccgagatattcctactaggtgagagtccagggctgtagtgcatcctgcgcgcttggtttattctgcagccagtaccagtaccagtaccccagctgagccggtgaggagaggagatagagagagcgagcgggagcgggagcgggagcgggagcagaggaggagggccatggaaggcgacagcttctccggcggcgccatggccaacggcggcggcggcggcggcggcggcagcgggcaggtggtggacgggaagctgatccacacgttccacaggagcttcgtgcaggtgcagagcctgctggaccagaaccggatgctcatcagcgagatcaaccagaaccacgagtcccgcgcgcccgacaacctcacccgcaacgtcggcctcatccgcgagctcaacaacaacatccgccgcgtcgtcggcctctacgccgacctctccgcctccttcgcgcgcaccatggaccacgcgtcctccgagggcgactcctccggcaccggcaataacggccgcgccggcgccggcgccggccacaagcgcgtccgccccgcctagagctagcttttagtttttttcttcttcttcttctgctgggtctagcttggcgtggcaatcctaggtgttgccattgccactaggaggcgtatttagtcttttctcttgcggttcttcttgttcgccttcttcctttgtgctcgctagctgcgacgaacgccggtgattagtgtatggtaatttagtgtcaaacagagagctgccatgtggatgttgctcctatgaccacgattaagacgatgaagaaacaccagagaagcggcacacggtaggcagccttgctgctgcgcttagctagcaagcatcttgaatggaaactattttgcagcgtactaggacacactcatgtcatggtggagcgaatgcgttggaggcgaggctggctgctcactctattatgtcactgcagatgggtcaggtcaggtagtaggcagttcatgttcatgttcagttcggcagggcaggacagatcttgagagggcaatgtttacc

SEQ ID NO: 42507 - DNA, 338 bp, Zea Mays
cagggataacatttgtggggggtggtgagccggccggccctatagaatcctgctcctgctcctgcctgcgcccgtccccttttcatgttgctttccctttcctcctcctcctcttcttcctcctcacctcacctcctatttagccgtccgaattgcttgtcagcatcttcccagcttcttcttcttcttccaaccgcgctacgctctcttgtccccggtgctcgcttggattcttctctcttcataggaaggaaggattggctaccgagatattcctactagctcgccctcaagttcaaatctttctgcacccagctaaaccaatggcttgtttgtct

SEQ ID NO: 42508 - DNA, 271 bp, Zea Mays
atgtcctgggttttcatcttcgcttcaccaaccattacagcaacgactgatgtcgagtggggagacgatgttcgacgcgtgctcagctcagctcatgggttccatcagtcgtcagtctcgcgtgcctcctcccgactgcagcaggaagaagacggcgaggccgacgacgagccccgacacggccagcgccagcgtcggcgccggagtacccacgcccaagttctgcacgaagcccttgccggtgggcggggaagggcgccatgagaccgga

SEQ ID NO: 42509 - DNA, 290 bp, Zea Mays
gtaacattcaagaggttgggctaggacatcattgggatgttgaagtaatatcgcattgtctatgtattgaccaagcatgagtttataattacgatttgatgttttcaattatttatatgatggacatagttcagaaatatatcgagataaatctcaatcaatatattgattacttctaggaaacacatgccggtatgagggcaccattatcgagtacatctcatatgtaatctaaaagatggcacctccaacgatgggttgctgcctcgacaagacatggttcatcaaag

SEQ ID NO: 42510 - DNA, 2437 bp, Zea Mays
tttataattgtttgcaaaagggctatagtacttgatgagatgaagtcaacagtgttttcaacagctgttgtttctattgggtatgcattgcttggatgggattttgcagcattatcagaagctaatcatcatatggaaaaagaatttgaattgttgaatggaccttctattgaaggtataacattagcagcctcaacatttggggctattgtgataacaatattctctggcgcgctattagattggctcggaagacgtgtcatactggtttactcgtctctggtattattttcgggtggcgtcttgatgctgtggtctcctaacatctacattgtacttctagctaggttaattgttggatcaggaagtgggttggttttcacctgtgtccctatttatatatccgaaacatctccttcaaatatgaggggcttacttggaactatgccacagtttatgttcttcataggaactatcttttcatattgcctgatattctggttaacattaatgtcttcacctagctggagaatcatgattggtgcaatctttgctccttccatcgtgtactttgctttgttggtttactacttgccagagtcacctaggtggcttgcaagtgatggaaagattagtgaggccagagtttctctgcagtggcttagaggaaagaaacatgatgtttcagctgctattgtggaaggtgtggacatcatatcggactccactgttggcgctgctcgtgctcagagtttctctggaaccagtgctagccacacttggccccgtagtactttttattggcagctttcagacccactagttgatcttctcggaagcgttcatgagaatatgtcagaaggaggaagtagacggaatagtttcttcccagtcttcaacagtttttcttttccagagcatgaacatatgaatgaacacagggatggtaacagtgatcaacagactagggagacttattatgctggagaagctaataatggagatggtttaagggcttctctgctttctcaggcagcaagtgttgaagtaaatgatacaaatacctcttttacttctgaagggagctcttcatatttaagaaggcatggaacatcagtgcttgcacaagagtttatggcgtctatacatgattatgacattgaagaagaagaagaagaaatccatgggtttgcattgcctcaccagtctgcacctcgtgatatggaaagcaccgggagacatccattcagacatcaaatagtccggttatctgaaacagctgatatgaagtttaaatggcgggtgcttcttcaaccaggaatcaggcatgccttatgttatggcatgttaattcaagcccttcagcaatctacaggaatcagtggtcttctccgctgcgctcctgaaatatttgagcagtctggagtggctagtttgttttcagacattggactttctcctcattcaacatcaattctcatgagtacccttaatgctttgctgatactcccttgtataactgccgcaatgctgctgatggatgtctgcgggagaagggttattgtgctggccactactcctgtcctgatactatcattgagtgttatgtctatgtccaccctggtgaatatgggaccgttcgaaagtgccgtcctcttccacttcgcattaaccatttgcttctggtcctatgtcattggtttgggaccgataccaaacattctctgctccgagatattcccaaccaaggcccgtgcgacatgtgcaagtttctgttcgctttccttctggtttgggggcctgctttcagcgtactgcttcccggtgatgttgagcaccatcgggcttggcggagcgtgtgggatctatgcacttgtgtgctgcgctccgctttttctcgtctactatcgaataccagagacgaagatgcttaacctggagctcattgcggagctgttcaagctttcaaggcaggagcatgtacagtagattgtccaggaaccgaggtagcccaggctgagtgccgatggatggtgatgtgtgtacatatgacaaatgtaactttggatgctgaatttgtttttgctagttaggaggattggtgatagtgtacgaagtggtttactcttttgctgtccacaggttgctggcagtgtttgtagtgttttgtcttagggggaattcctgtactccactgtaattgtaatgtaccctataacttatttgtcatcgcaaatatcctaatgcaatttcttatccttccataccattgctagtggtatagaagggaccaggacatgcagttttcttatatttttttatgccgtcgccggtggcatggaaaggtaagaaattgcatccatccgagtgtcattacgagagattaggacatttgcgattggaaataaagtattagacaaaatttggcatatagaca

SEQ ID NO: 42511 - DNA, 2484 bp, Zea Mays
atggagtcattcagagttggagtaatctataacacagttttataattgtttgcaaaagggctatagtacttgatgagatgaagtcaacagtgttttcaacagctgttgtttctattgggtatgcattgcttggatgggattttgcagcattatcagaagctaatcatcatatggaaaaagaatttgaattgttgaatggaccttctattgaaggtataacattagcagcctcaacatttggggctattgtgataacaatattctctggcgcgctattagattggctcggaagacgtgtcatactggtttactcgtctctggtattattttcgggtggcgtcttgatgctgtggtctcctaacatctacattgtacttctagctaggttaattgttggatcaggaagtgggttggttttcacctgtgtccctatttatatatccgaaacatctccttcaaatatgaggggcttacttggaactatgccacagtttatgttcttcataggaactatcttttcatattgcctgatattctggttaacattaatgtcttcacctagctggagaatcatgattggtgcaatctttgctccttccatcgtgtactttgctttgttggtttactacttgccagagtcacctaggtggcttgcaagtgatggaaagattagtgaggccagagtttctctgcagtggcttagaggaaagaaacatgatgtttcaggagagatagctgctattgtggaaggtgtggacatcatatcggactccactgttggcgctgctcgtgctcagagtttctctggaaccagtgctagccacacttggccccgtagtactttttattggcagctttcagacccactagttgatcttctcggaagcgttcatgagaatatgtcagaaggaggaagtagacggaatagtttcttcccagtcttcaacagtttttcttttccagagcatgaacatatgaatgaacacagggatggtaacagtgatcaacagactagggagacttattatgctggagaagctaataatggagatggtttaagggcttctctgctttctcaggcagcaagtgttgaagtaaatgatacaaatacctcttttacttctgaagggagctcttcatatttaagaaggcatggaacatcagtgcttgcacaagagtttatggcgtctatacatgattatgacattgaagaagaagaagaagaaatccatgggtttgcattgcctcaccagtctgcacctcgtgatatggaaagcaccgggagacatccattcagacatcaaatagtccggttatctgaaacagctgatatgaagtttaaatggcgggtgcttcttcaaccaggaatcaggcatgccttatgttatggcatgttaattcaagcccttcagcaatctacaggaatcagtggtcttctccgctgcgctcctgaaatatttgagcagtctggagtggctagtttgttttcagacattggactttctcctcattcaacatcaattctcatgagtacccttaatgctttgctgatactcccttgtataactgccgcaatgctgctgatggatgtctgcgggagaagggttattgtgctggccactactcctgtcctgatactatcattgagtgttatgtctatgtccaccctggtgaatatgggaccgttcgaaagtgccgtcctcttccacttcgcattaaccatttgcttctggtcctatgtcattggtttgggaccgataccaaacattctctgctccgagatattcccaaccaaggcccgtgcgacatgtgcaagtttctgttcgctttccttctggtttgggggcctgctttcagcgtactgcttcccggtgatgttgagcaccatcgggcttggcggagcgtgtgggatctatgcacttgtgtgctgcgctccgctttttctcgtctactatcgaataccagagacgaagatgcttaacctggagctcattgcggagctgttcaagctttcaaggcaggagcatgtacagtagattgtccaggaaccgaggtagcccaggctgagtgccgatggatggtgatgtgtgtacatatgacaaatgtaactttggatgctgaatttgtttttgctagttaggaggattggtgatagtgtacgaagtggtttactcttttgctgtccacaggttgctggcagtgtttgtagtgttttgtcttagggggaattcctgtactccactgtaattgtaatgtaccctataacttatttgtcatcgcaaatatcctaatgcaatttcttatccttccataccattgctagtggtatagaagggaccaggacatgcagttttcttatatttttttatgccgtcgccggtggcatggaaaggtaagaaattgcatccatccgagtgtcattacgagagattaggacatttgcgattggaaataaagtattagacaaaatttggcatatagaca

SEQ ID NO: 42512 - DNA, 2630 bp, Zea Mays
atcatcgtctccagtctccctagtccctgctgccgctgccgcttgtcgctgacgccgtcgcgtatcctccgcatctaagctgccggcggcgaccaaacccgccccgcctctcctccgtccgcccccgcaccagctggttccctcccgtgaactcgcacgctcacaggtttcatattttctaggttttataattgtttgcaaaagggctatagtacttgatgagatgaagtcaacagtgttttcaacagctgttgtttctattgggtatgcattgcttggatgggattttgcagcattatcagaagctaatcatcatatggaaaaagaatttgaattgttgaatggaccttctattgaaggtataacattagcagcctcaacatttggggctattgtgataacaatattctctggcgcgctattagattggctcggaagacgtgtcatactggtttactcgtctctggtattattttcgggtggcgtcttgatgctgtggtctcctaacatctacattgtacttctagctaggttaattgttggatcaggaagtgggttggttttcacctgtgtccctatttatatatccgaaacatctccttcaaatatgaggggcttacttggaactatgccacagtttatgttcttcataggaactatcttttcatattgcctgatattctggttaacattaatgtcttcacctagctggagaatcatgattggtgcaatctttgctccttccatcgtgtactttgctttgttggtttactacttgccagagtcacctaggtggcttgcaagtgatggaaagattagtgaggccagagtttctctgcagtggcttagaggaaagaaacatgatgtttcaggagagatagctgctattgtggaaggtgtggacatcatatcggactccactgttggcgctgctcgtgctcagagtttctctggaaccagtgctagccacacttggccccgtagtactttttattggcagctttcagacccactagttgatcttctcggaagcgttcatgagaatatgtcagaaggaggaagtagacggaatagtttcttcccagtcttcaacagtttttcttttccagagcatgaacatatgaatgaacacagggatggtaacagtgatcaacagactagggagacttattatgctggagaagctaataatggagatggtttaagggcttctctgctttctcaggcagcaagtgttgaagtaaatgatacaaatacctcttttacttctgaagggagctcttcatatttaagaaggcatggaacatcagtgcttgcacaagagtttatggcgtctatacatgattatgacattgaagaagaagaagaagaaatccatgggtttgcattgcctcaccagtctgcacctcgtgatatggaaagcaccgggagacatccattcagacatcaaatagtccggttatctgaaacagctgatatgaagtttaaatggcgggtgcttcttcaaccaggaatcaggcatgccttatgttatggcatgttaattcaagcccttcagcaatctacaggaatcagtggtcttctccgctgcgctcctgaaatatttgagcagtctggagtggctagtttgttttcagacattggactttctcctcattcaacatcaattctcatgagtacccttaatgctttgctgatactcccttgtataactgccgcaatgctgctgatggatgtctgcgggagaagggttattgtgctggccactactcctgtcctgatactatcattgagtgttatgtctatgtccaccctggtgaatatgggaccgttcgaaagtgccgtcctcttccacttcgcattaaccatttgcttctggtcctatgtcattggtttgggaccgataccaaacattctctgctccgagatattcccaaccaaggcccgtgcgacatgtgcaagtttctgttcgctttccttctggtttgggggcctgctttcagcgtactgcttcccggtgatgttgagcaccatcgggcttggcggagcgtgtgggatctatgcacttgtgtgctgcgctccgctttttctcgtctactatcgaataccagagacgaagatgcttaacctggagctcattgcggagctgttcaagctttcaaggcaggagcatgtacagtagattgtccaggaaccgaggtagcccaggctgagtgccgatggatggtgatgtgtgtacatatgacaaatgtaactttggatgctgaatttgtttttgctagttaggaggattggtgatagtgtacgaagtggtttactcttttgctgtccacaggttgctggcagtgtttgtagtgttttgtcttagggggaattcctgtactccactgtaattgtaatgtaccctataacttatttgtcatcgcaaatatcctaatgcaatttcttatccttccataccattgctagtggtatagaagggaccaggacatgcagttttcttatatttttttatgccgtcgccggtggcatggaaaggtaagaaattgcatccatccgagtgtcattacgagagattaggacatttgcgattggaaataaagtattagacaaaatttggcatatagaca

SEQ ID NO: 42513 - DNA, 3069 bp, Zea Mays
atcatcgtctccagtctccctagtccctgctgccgctgccgcttgtcgctgacgccgtcgcgtatcctccgcatctaagctgccggcggcgaccaaacccgccccgcctctcctccgtccgcccccgcaccagctggttccctcccgtgaactcgcacgctcacaggttttataattgtttgcaaaagggctatagtacttgatgagatgaagtcaacagtgttttcaacagctgttgtttctattgggtatgcattgcttggatgggattttgcagcattatcagaagctaatcatcatatggaaaaagaatttgaattgttgaatggaccttctattgaagctggagaatcatgattggtgcaatctttgctccttccatcgtgtactttgctttgttggtttactacttgccagagtcacctaggtggcttgcaagtgatggaaagattagtgaggccagagtttctctgcagtggcttagaggaaagaaacatgatgtttcaggtgagattgttgccacttgacaatgcttccaaatttattcacaagctactatttcatctgaagatggttcagtcttaattagtagggaactgagtaaatagatgtcgttattgcggggacttgagaaatgtaaagttgtaaccaatgtttgacagcatgaccatacaaactaaatctgtagtttagaaatattactgttgtcagttgaattgtgggaccatgaacctgatttttgtggcatttaatgggtgatggatggtgctgttctatccaccgatttctttgtcttgtgtccacgcagtcagaactatgataattgaagagatacgatcttttaatttcagcttgtcactggaggtgctaattgaacaacctcttacattacatacaaaaggcctcctaacatagaagatactaacagaactatgtaagtaacatagtggcctagtaatacatgacttcatatcaaagaactgattgggaactaattcagtcctcttattcatgtcctagaacctttatggtgtaacattgtaaacataagggtcacttaacattacatacttaacatagagtttgtacaattggatgagggttttgttttacagttaaaggctgtgaagcaatgctgataaagtactgacaacaatatgtcaatataattgggggttgatggtgctttaattacacatgatgcattaacagactgtcttgttttggtaaatcgagccaatcacttgttcatttctattttgtcaagaattaagaagcataaatgcatcatgacatcacatagacctgcaggagagatagctgctattgtggaaggtgtggacatcatatcggactccactgttggcgctgctcgtgctcagagtttctctggaaccagtgctagccacacttggccccgtagtactttttattggcagctttcagacccactagttgatcttctcggaagcgttcatgagaatatgtcagaaggaggaagtagacggaatagtttcttcccagtcttcaacagtttttcttttccagagcatgaacatatgaatgaacacagggatggtaacagtgatcaacagactagggagacttattatgctggagaagctaataatggagatggtttaagggcttctctgctttctcaggcagcaagtgttgaagtaaatgatacaaatacctcttttacttctgaagggagctcttcatatttaagaaggcatggaacatcagtgcttgcacaagagtttatggcgtctatacatgattatgacattgaagaagaagaagaagaaatccatgggtttgcattgcctcaccagtctgcacctcgtgatatggaaagcaccgggagacatccattcagacatcaaatagtccggttatctgaaacagctgatatgaagtttaaatggcgggtgcttcttcaaccaggaatcaggcatgccttatgttatggcatgttaattcaagcccttcagcaatctacaggaatcagtggtcttctccgctgcgctcctgaaatatttgagcagtctggagtggctagtttgttttcagacattggactttctcctcattcaacatcaattctcatgagtacccttaatgctttgctgatactcccttgtataactgccgcaatgctgctgatggatgtctgcgggagaagggttattgtgctggccactactcctgtcctgatactatcattgagtgttatgtctatgtccaccctggtgaatatgggaccgttcgaaagtgccgtcctcttccacttcgcattaaccatttgcttctggtcctatgtcattggtttgggaccgataccaaacattctctgctccgagatattcccaaccaaggcccgtgcgacatgtgcaagtttctgttcgctttccttctggtttgggggcctgctttcagcgtactgcttcccggtgatgttgagcaccatcgggcttggcggagcgtgtgggatctatgcacttgtgtgctgcgctccgctttttctcgtctactatcgaataccagagacgaagatgcttaacctggagctcattgcggagctgttcaagctttcaaggcaggagcatgtacagtagattgtccaggaaccgaggtagcccaggctgagtgccgatggatggtgatgtgtgtacatatgacaaatgtaactttggatgctgaatttgtttttgctagttaggaggattggtgatagtgtacgaagtggtttactcttttgctgtccacaggttgctggcagtgtttgtagtgttttgtcttagggggaattcctgtactccactgtaattgtaatgtaccctataacttatttgtcatcgcaaatatcctaatgcaatttcttatccttccataccattgctagtggtatagaagggaccaggacatgcagttttcttatatttttttatgccgtcgccggtggcatggaaaggtaagaaattgcatccatccgagtgtcattacgagagattaggacatttgcgattggaaataaagtattagacaaaatttggcatatagaca

SEQ ID NO: 42514 - DNA, 2277 bp, Zea Mays
aatcatcatcgtctccagtctccctagtccctgctgccgctgccgcttgtcgctgacgccgtcgcgtatcctccgcatctaagctgccggcggcgaccaaacccgccccgcctctcctccgtccgcccccgcaccagctggttccctcccgtgaactcgcacgctcacaggttttataattgtttgcaaaagggctatagtacttgatgagatgaagtcaacagtgttttcaacagctgttgtttctattgggtatgcattgcttggatgggattttgcagcattatcagaagctaatcatcatatggaaaaagaatttgaattgttgaatggaccttctattgaagctggagaatcatgattggtgcaatctttgctccttccatcgtgtactttgctttgttggtttactacttgccagagtcacctaggtggcttgcaagtgatggaaagattagtgaggccagagtttctctgcagtggcttagaggaaagaaacatgatgtttcagacctgcaggagagatagctgctattgtggaaggtgtggacatcatatcggactccactgttggcgctgctcgtgctcagagtttctctggaaccagtgctagccacacttggccccgtagtactttttattggcagctttcagacccactagttgatcttctcggaagcgttcatgagaatatgtcagaaggaggaagtagacggaatagtttcttcccagtcttcaacagtttttcttttccagagcatgaacatatgaatgaacacagggatggtaacagtgatcaacagactagggagacttattatgctggagaagctaataatggagatggtttaagggcttctctgctttctcaggcagcaagtgttgaagtaaatgatacaaatacctcttttacttctgaagggagctcttcatatttaagaaggcatggaacatcagtgcttgcacaagagtttatggcgtctatacatgattatgacattgaagaagaagaagaagaaatccatgggtttgcattgcctcaccagtctgcacctcgtgatatggaaagcaccgggagacatccattcagacatcaaatagtccggttatctgaaacagctgatatgaagtttaaatggcgggtgcttcttcaaccaggaatcaggcatgccttatgttatggcatgttaattcaagcccttcagcaatctacaggaatcagtggtcttctccgctgcgctcctgaaatatttgagcagtctggagtggctagtttgttttcagacattggactttctcctcattcaacatcaattctcatgagtacccttaatgctttgctgatactcccttgtataactgccgcaatgctgctgatggatgtctgcgggagaagggttattgtgctggccactactcctgtcctgatactatcattgagtgttatgtctatgtccaccctggtgaatatgggaccgttcgaaagtgccgtcctcttccacttcgcattaaccatttgcttctggtcctatgtcattggtttgggaccgataccaaacattctctgctccgagatattcccaaccaaggcccgtgcgacatgtgcaagtttctgttcgctttccttctggtttgggggcctgctttcagcgtactgcttcccggtgatgttgagcaccatcgggcttggcggagcgtgtgggatctatgcacttgtgtgctgcgctccgctttttctcgtctactatcgaataccagagacgaagatgcttaacctggagctcattgcggagctgttcaagctttcaaggcaggagcatgtacagtagattgtccaggaaccgaggtagcccaggctgagtgccgatggatggtgatgtgtgtacatatgacaaatgtaactttggatgctgaatttgtttttgctagttaggaggattggtgatagtgtacgaagtggtttactcttttgctgtccacaggttgctggcagtgtttgtagtgttttgtcttagggggaattcctgtactccactgtaattgtaatgtaccctataacttatttgtcatcgcaaatatcctaatgcaatttcttatccttccataccattgctagtggtatagaagggaccaggacatgcagttttcttatatttttttatgccgtcgccggtggcatggaaaggtaagaaattgcatccatccgagtgtcattacgagagattaggacatttgcgattggaaataaagtattagacaaaatttggcatatagaca

SEQ ID NO: 42515 - DNA, 2628 bp, Zea Mays
ctaatcatcatcgtctccagtctccctagtccctgctgccgctgccgcttgtcgctgacgccgtcgcgtatcctccgcatctaagctgccggcggcgaccaaacccgccccgcctctcctccgtccgcccccgcaccagctggttccctcccgtgaactcgcacgctcacaggttttataattgtttgcaaaagggctatagtacttgatgagatgaagtcaacagtgttttcaacagctgttgtttctattgggtatgcattgcttggatgggattttgcagcattatcagaagctaatcatcatatggaaaaagaatttgaattgttgaatggaccttctattgaaggtataacattagcagcctcaacatttggggctattgtgataacaatattctctggcgcgctattagattggctcggaagacgtgtcatactggtttactcgtctctggtattattttcgggtggcgtcttgatgctgtggtctcctaacatctacattgtacttctagctaggttaattgttggatcaggaagtgggttggttttcacctgtgtccctatttatatatccgaaacatctccttcaaatatgaggggcttacttggaactatgccacagtttatgttcttcataggaactatcttttcatattgcctgatattctggttaacattaatgtcttcacctagctggagaatcatgattggtgcaatctttgctccttccatcgtgtactttgctttgttggtttactacttgccagagtcacctaggtggcttgcaagtgatggaaagattagtgaggccagagtttctctgcagtggcttagaggaaagaaacatgatgtttcagacctgcaggagagatagctgctattgtggaaggtgtggacatcatatcggactccactgttggcgctgctcgtgctcagagtttctctggaaccagtgctagccacacttggccccgtagtactttttattggcagctttcagacccactagttgatcttctcggaagcgttcatgagaatatgtcagaaggaggaagtagacggaatagtttcttcccagtcttcaacagtttttcttttccagagcatgaacatatgaatgaacacagggatggtaacagtgatcaacagactagggagacttattatgctggagaagctaataatggagatggtttaagggcttctctgctttctcaggcagcaagtgttgaagtaaatgatacaaatacctcttttacttctgaagggagctcttcatatttaagaaggcatggaacatcagtgcttgcacaagagtttatggcgtctatacatgattatgacattgaagaagaagaagaagaaatccatgggtttgcattgcctcaccagtctgcacctcgtgatatggaaagcaccgggagacatccattcagacatcaaatagtccggttatctgaaacagctgatatgaagtttaaatggcgggtgcttcttcaaccaggaatcaggcatgccttatgttatggcatgttaattcaagcccttcagcaatctacaggaatcagtggtcttctccgctgcgctcctgaaatatttgagcagtctggagtggctagtttgttttcagacattggactttctcctcattcaacatcaattctcatgagtacccttaatgctttgctgatactcccttgtataactgccgcaatgctgctgatggatgtctgcgggagaagggttattgtgctggccactactcctgtcctgatactatcattgagtgttatgtctatgtccaccctggtgaatatgggaccgttcgaaagtgccgtcctcttccacttcgcattaaccatttgcttctggtcctatgtcattggtttgggaccgataccaaacattctctgctccgagatattcccaaccaaggcccgtgcgacatgtgcaagtttctgttcgctttccttctggtttgggggcctgctttcagcgtactgcttcccggtgatgttgagcaccatcgggcttggcggagcgtgtgggatctatgcacttgtgtgctgcgctccgctttttctcgtctactatcgaataccagagacgaagatgcttaacctggagctcattgcggagctgttcaagctttcaaggcaggagcatgtacagtagattgtccaggaaccgaggtagcccaggctgagtgccgatggatggtgatgtgtgtacatatgacaaatgtaactttggatgctgaatttgtttttgctagttaggaggattggtgatagtgtacgaagtggtttactcttttgctgtccacaggttgctggcagtgtttgtagtgttttgtcttagggggaattcctgtactccactgtaattgtaatgtaccctataacttatttgtcatcgcaaatatcctaatgcaatttcttatccttccataccattgctagtggtatagaagggaccaggacatgcagttttcttatatttttttatgccgtcgccggtggcatggaaaggtaagaaattgcatccatccgagtgtcattacgagagattaggacatttgcgattggaaataaagtattagacaaaatttggcatatagaca

SEQ ID NO: 42516 - DNA, 3439 bp, Zea Mays
tgctaatctgtgcaactaatcatcatcgtctccagtctccctagtccctgctgccgctgccgcttgtcgctgacgccgtcgcgtatcctccgcatctaagctgccggcggcgaccaaacccgccccgcctctcctccgtccgcccccgcaccagctggttccctcccgtgaactcgcacgctcacaggttttataattgtttgcaaaagggctatagtacttgatgagatgaagtcaacagtgttttcaacagctgttgtttctattgggtatgcattgcttggatgggattttgcagcattatcagaagctaatcatcatatggaaaaagaatttgaattgttgaatggaccttctattgaaggtataacattagcagcctcaacatttggggctattgtgataacaatattctctggcgcgctattagattggctcggaagacgtgtcatactggtttactcgtctctggtattattttcgggtggcgtcttgatgctgtggtctcctaacatctacattgtacttctagctaggttaattgttggatcaggaagtgggttggttttcacctgtgtccctatttatatatccgaaacatctccttcaaatatgaggggcttacttggaactatgccacagtttatgttcttcataggaactatcttttcatattgcctgatattctggttaacattaatgtcttcacctagctggagaatcatgattggtgcaatctttgctccttccatcgtgtactttgctttgttggtttactacttgccagagtcacctaggtggcttgcaagtgatggaaagattagtgaggccagagtttctctgcagtggcttagaggaaagaaacatgatgtttcaggtgagattgttgccacttgacaatgcttccaaatttattcacaagctactatttcatctgaagatggttcagtcttaattagtagggaactgagtaaatagatgtcgttattgcggggacttgagaaatgtaaagttgtaaccaatgtttgacagcatgaccatacaaactaaatctgtagtttagaaatattactgttgtcagttgaattgtgggaccatgaacctgatttttgtggcatttaatgggtgatggatggtgctgttctatccaccgatttctttgtcttgtgtccacgcagtcagaactatgataattgaagagatacgatcttttaatttcagcttgtcactggaggtgctaattgaacaacctcttacattacatacaaaaggcctcctaacatagaagatactaacagaactatgtaagtaacatagtggcctagtaatacatgacttcatatcaaagaactgattgggaactaattcagtcctcttattcatgtcctagaacctttatggtgtaacattgtaaacataagggtcacttaacattacatacttaacatagagtttgtacaattggatgagggttttgttttacagttaaaggctgtgaagcaatgctgataaagtactgacaacaatatgtcaatataattgggggttgatggtgctttaattacacatgatgcattaacagactgtcttgttttggtaaatcgagccaatcacttgttcatttctattttgtcaagaattaagaagcataaatgcatcatgacatcacatagacctgcaggagagatagctgctattgtggaaggtgtggacatcatatcggactccactgttggcgctgctcgtgctcagagtttctctggaaccagtgctagccacacttggccccgtagtactttttattggcagctttcagacccactagttgatcttctcggaagcgttcatgagaatatgtcagaaggaggaagtagacggaatagtttcttcccagtcttcaacagtttttcttttccagagcatgaacatatgaatgaacacagggatggtaacagtgatcaacagactagggagacttattatgctggagaagctaataatggagatggtttaagggcttctctgctttctcaggcagcaagtgttgaagtaaatgatacaaatacctcttttacttctgaagggagctcttcatatttaagaaggcatggaacatcagtgcttgcacaagagtttatggcgtctatacatgattatgacattgaagaagaagaagaagaaatccatgggtttgcattgcctcaccagtctgcacctcgtgatatggaaagcaccgggagacatccattcagacatcaaatagtccggttatctgaaacagctgatatgaagtttaaatggcgggtgcttcttcaaccaggaatcaggcatgccttatgttatggcatgttaattcaagcccttcagcaatctacaggaatcagtggtcttctccgctgcgctcctgaaatatttgagcagtctggagtggctagtttgttttcagacattggactttctcctcattcaacatcaattctcatgagtacccttaatgctttgctgatactcccttgtataactgccgcaatgctgctgatggatgtctgcgggagaagggttattgtgctggccactactcctgtcctgatactatcattgagtgttatgtctatgtccaccctggtgaatatgggaccgttcgaaagtgccgtcctcttccacttcgcattaaccatttgcttctggtcctatgtcattggtttgggaccgataccaaacattctctgctccgagatattcccaaccaaggcccgtgcgacatgtgcaagtttctgttcgctttccttctggtttgggggcctgctttcagcgtactgcttcccggtgatgttgagcaccatcgggcttggcggagcgtgtgggatctatgcacttgtgtgctgcgctccgctttttctcgtctactatcgaataccagagacgaagatgcttaacctggagctcattgcggagctgttcaagctttcaaggcaggagcatgtacagtagattgtccaggaaccgaggtagcccaggctgagtgccgatggatggtgatgtgtgtacatatgacaaatgtaactttggatgctgaatttgtttttgctagttaggaggattggtgatagtgtacgaagtggtttactcttttgctgtccacaggttgctggcagtgtttgtagtgttttgtcttagggggaattcctgtactccactgtaattgtaatgtaccctataacttatttgtcatcgcaaatatcctaatgcaatttcttatccttccataccattgctagtggtatagaagggaccaggacatgcagttttcttatatttttttatgccgtcgccggtggcatggaaaggtaagaaattgcatccatccgagtgtcattacgagagattaggacatttgcgattggaaataaagtattagacaaaatttggcatatagaca

SEQ ID NO: 42517 - DNA, 2326 bp, Zea Mays
gttttctcttctcccctcgctctctccgtgtctccatctctgctaatctgtgcaactaatcatcatcgtctccagtctccctagtccctgctgccgctgccgcttgtcgctgacgccgtcgcgtatcctccgcatctaagctgccggcggcgaccaaacccgccccgcctctcctccgtccgcccccgcaccagctggttccctcccgtgaactcgcacgctcacaggttttataattgtttgcaaaagggctatagtacttgatgagatgaagtcaacagtgttttcaacagctgttgtttctattgggtatgcattgcttggatgggattttgcagcattatcagaagctaatcatcatatggaaaaagaatttgaattgttgaatggaccttctattgaagctggagaatcatgattggtgcaatctttgctccttccatcgtgtactttgctttgttggtttactacttgccagagtcacctaggtggcttgcaagtgatggaaagattagtgaggccagagtttctctgcagtggcttagaggaaagaaacatgatgtttcaggagagatagctgctattgtggaaggtgtggacatcatatcggactccactgttggcgctgctcgtgctcagagtttctctggaaccagtgctagccacacttggccccgtagtactttttattggcagctttcagacccactagttgatcttctcggaagcgttcatgagaatatgtcagaaggaggaagtagacggaatagtttcttcccagtcttcaacagtttttcttttccagagcatgaacatatgaatgaacacagggatggtaacagtgatcaacagactagggagacttattatgctggagaagctaataatggagatggtttaagggcttctctgctttctcaggcagcaagtgttgaagtaaatgatacaaatacctcttttacttctgaagggagctcttcatatttaagaaggcatggaacatcagtgcttgcacaagagtttatggcgtctatacatgattatgacattgaagaagaagaagaagaaatccatgggtttgcattgcctcaccagtctgcacctcgtgatatggaaagcaccgggagacatccattcagacatcaaatagtccggttatctgaaacagctgatatgaagtttaaatggcgggtgcttcttcaaccaggaatcaggcatgccttatgttatggcatgttaattcaagcccttcagcaatctacaggaatcagtggtcttctccgctgcgctcctgaaatatttgagcagtctggagtggctagtttgttttcagacattggactttctcctcattcaacatcaattctcatgagtacccttaatgctttgctgatactcccttgtataactgccgcaatgctgctgatggatgtctgcgggagaagggttattgtgctggccactactcctgtcctgatactatcattgagtgttatgtctatgtccaccctggtgaatatgggaccgttcgaaagtgccgtcctcttccacttcgcattaaccatttgcttctggtcctatgtcattggtttgggaccgataccaaacattctctgctccgagatattcccaaccaaggcccgtgcgacatgtgcaagtttctgttcgctttccttctggtttgggggcctgctttcagcgtactgcttcccggtgatgttgagcaccatcgggcttggcggagcgtgtgggatctatgcacttgtgtgctgcgctccgctttttctcgtctactatcgaataccagagacgaagatgcttaacctggagctcattgcggagctgttcaagctttcaaggcaggagcatgtacagtagattgtccaggaaccgaggtagcccaggctgagtgccgatggatggtgatgtgtgtacatatgacaaatgtaactttggatgctgaatttgtttttgctagttaggaggattggtgatagtgtacgaagtggtttactcttttgctgtccacaggttgctggcagtgtttgtagtgttttgtcttagggggaattcctgtactccactgtaattgtaatgtaccctataacttatttgtcatcgcaaatatcctaatgcaatttcttatccttccataccattgctagtggtatagaagggaccaggacatgcagttttcttatatttttttatgccgtcgccggtggcatggaaaggtaagaaattgcatccatccgagtgtcattacgagagattaggacatttgcgattggaaataaagtattagacaaaatttggcatatagaca

SEQ ID NO: 42518 - DNA, 2765 bp, Zea Mays
caccgatccaacgcatgtaggtgaactcagcgccgttgatccaccaacggacggcagggccgcagtccagcaaatctaccccctaccccagttttctcttctcccctcgctctctccgtgtctccatctctgctaatctgtgcaactaatcatcatcgtctccagtctccctagtccctgctgccgctgccgcttgtcgctgacgccgtcgcgtatcctccgcatctaagctgccggcggcgaccaaacccgccccgcctctcctccgtccgcccccgcaccagctggttccctcccgtgaactcgcacgctcacaggttttataattgtttgcaaaagggctatagtacttgatgagatgaagtcaacagtgttttcaacagctgttgtttctattgggtatgcattgcttggatgggattttgcagcattatcagaagctaatcatcatatggaaaaagaatttgaattgttgaatggaccttctattgaaggtataacattagcagcctcaacatttggggctattgtgataacaatattctctggcgcgctattagattggctcggaagacgtgtcatactggtttactcgtctctggtattattttcgggtggcgtcttgatgctgtggtctcctaacatctacattgtacttctagctaggttaattgttggatcaggaagtgggttggttttcacctgtgtccctatttatatatccgaaacatctccttcaaatatgaggggcttacttggaactatgccacagtttatgttcttcataggaactatcttttcatattgcctgatattctggttaacattaatgtcttcacctagctggagaatcatgattggtgcaatctttgctccttccatcgtgtactttgctttgttggtttactacttgccagagtcacctaggtggcttgcaagtgatggaaagattagtgaggccagagtttctctgcagtggcttagaggaaagaaacatgatgtttcaggagagatagctgctattgtggaaggtgtggacatcatatcggactccactgttggcgctgctcgtgctcagagtttctctggaaccagtgctagccacacttggccccgtagtactttttattggcagctttcagacccactagttgatcttctcggaagcgttcatgagaatatgtcagaaggaggaagtagacggaatagtttcttcccagtcttcaacagtttttcttttccagagcatgaacatatgaatgaacacagggatggtaacagtgatcaacagactagggagacttattatgctggagaagctaataatggagatggtttaagggcttctctgctttctcaggcagcaagtgttgaagtaaatgatacaaatacctcttttacttctgaagggagctcttcatatttaagaaggcatggaacatcagtgcttgcacaagagtttatggcgtctatacatgattatgacattgaagaagaagaagaagaaatccatgggtttgcattgcctcaccagtctgcacctcgtgatatggaaagcaccgggagacatccattcagacatcaaatagtccggttatctgaaacagctgatatgaagtttaaatggcgggtgcttcttcaaccaggaatcaggcatgccttatgttatggcatgttaattcaagcccttcagcaatctacaggaatcagtggtcttctccgctgcgctcctgaaatatttgagcagtctggagtggctagtttgttttcagacattggactttctcctcattcaacatcaattctcatgagtacccttaatgctttgctgatactcccttgtataactgccgcaatgctgctgatggatgtctgcgggagaagggttattgtgctggccactactcctgtcctgatactatcattgagtgttatgtctatgtccaccctggtgaatatgggaccgttcgaaagtgccgtcctcttccacttcgcattaaccatttgcttctggtcctatgtcattggtttgggaccgataccaaacattctctgctccgagatattcccaaccaaggcccgtgcgacatgtgcaagtttctgttcgctttccttctggtttgggggcctgctttcagcgtactgcttcccggtgatgttgagcaccatcgggcttggcggagcgtgtgggatctatgcacttgtgtgctgcgctccgctttttctcgtctactatcgaataccagagacgaagatgcttaacctggagctcattgcggagctgttcaagctttcaaggcaggagcatgtacagtagattgtccaggaaccgaggtagcccaggctgagtgccgatggatggtgatgtgtgtacatatgacaaatgtaactttggatgctgaatttgtttttgctagttaggaggattggtgatagtgtacgaagtggtttactcttttgctgtccacaggttgctggcagtgtttgtagtgttttgtcttagggggaattcctgtactccactgtaattgtaatgtaccctataacttatttgtcatcgcaaatatcctaatgcaatttcttatccttccataccattgctagtggtatagaagggaccaggacatgcagttttcttatatttttttatgccgtcgccggtggcatggaaaggtaagaaattgcatccatccgagtgtcattacgagagattaggacatttgcgattggaaataaagtattagacaaaatttggcatatagaca

SEQ ID NO: 42519 - DNA, 1351 bp, Zea Mays
aatggttgccatgcataaaaaaggaagaagaagaaaattaaaactcctagctcttttccttattatcgccccggcgcatgcatatatatgtaagtacagacagtacatctaagcagcacagctgaaagcctgaaaccgattattcgttccgcctgcagatcggaagcggaagctacaaccagtgccatggcttcttccaaggtggtcgtcatggctgcaactgatgccctactactgatcatgttctccttccttattttgccgtcaccctcagacggcaagggcatgtgcccgctgttccgcagcatcgtcccggagtgccgcgacgcgccactgctctgcatcgcccgctgccaggacaagggctacgtcggcggcttctgcaccacccagcagatctgcatgtgcgcccagtgcaagtcgtcgctgcttctgctgcagcagcagcaccatcggttccagctagcggcggcagcagcaccggagcccagcgccaccgccgccgccgccgcgtcgacgtagaggccggatggatgactttattacagtgttatatatagtatatggcataataacctcaagatcgatgtatgttttgacatggacatgctgaacaataatcgtcgtgtgttttgacatggacatggataaacaaacagacacgcccttctgcaaaacgaggactgacaaatcagttcaaatgtttcgaataagcatgtgaagttgtagtgtagttgtaaaaacacgggtttcagaacttgtcacaccaaaactgtaaaaacacgggacatcaatcaagacacacaacgctctttgcttcgctgtagaaatgcgctgcggtaggtcgtcgaaagctctcgagctcaaggaagggcccccctgcagttggctattatagaatctctgggggcgagcaaacaatatgggtccatgtgctctcctcggctcctcctcagcgttaagactgcttcgttgcgtcatcaattgcgccaaaactctctggcggccaaacccggcaaaagatcttccctgtaatcagcccataaggcacagctccaaattgcctcgaatcgttagaagcaaagatattgtcaccctgcacccagacatgatcttgcggtaccacgacggttctggaggagtcgcttttgccggggtcgacaaggtaggtgacggagtccccctgcatcccgacgacgcgcttgacgaccgatttgcgcgggtcctcaggggagatcatcagcacgatgtcccccggcgcgacccggccgagcctcacgctgaccctgtccaccgccaccgcgtcgcccgccaggttcagggacggcagcatgctggcgccccgcactaa

SEQ ID NO: 42520 - DNA, 1133 bp, Zea Mays
  misc_feature (1132)..(1133): n is a, c, g, or t
atggccttcgccggcaacgccgacgactcggcggaggactattccgcggaggccaccgtggtgcgcttcgacccgccgctccctctcctccgggcgccagtcccctccccagcatctagcggcgagggccccgtcctcgccttccgcgacgccgcgagctggcgagccgcctgggaggccgccgaggccagcctcgtctcccagtgcgagctggccgaggtgcctcgcggtagtcatgcaaggcacttctcaagcatgccggttatgtagtagtcggtaaacgcagataagtcgagcgctttagcttattcaggtgtacgtgttcttgtcctttcatgccccatttctatttgctttcttccaatctagtttttttttgcttcatcctagctgtttcaagtatcatgcttttacacattgagcgaagccacagttgacttcgtctcacgttgattagttgttgcctgattaactggacgctagcgctctcctgcttttatgggaaaacagcaacaacattaattagagtacattgtagatggttctgctcgcaaaaagataatacgtgcttttaatcagacgagttatgttttttcttttgttcttcatgtagcttctcaagcatgtgcaacttatgttctcttcttctagggaaaacctatttgtacttgatgtttctatctcaaatagtatcgatcatcgattttatcagccatcgctgagacagagccccttcccctcttttttttaaataaatcttgttctgtcctgcctaatgtgctgaagggatttgatttgccattgcagctggccgagttggctggcttaagctctgccagccaataagtatagcagctgcatacattgaagagagcaaaccagctcatgactacttacctttagtgtcgtggttgacactgctccacagtacacatgtcaaaaaacccacttgttataccaatagctacatccaatactttttagtagtgtctaggctgaagaacagagtgtggttaaacacgtggggaagaagcacaggtcacacttagaacatattgtatagggttttagtgatcccttctgtatgatagtagacaaccagatcctggctactggagttgttgaatggttnn

SEQ ID NO: 42521 - DNA, 2604 bp, Zea Mays
  misc_feature (2603)..(2604): n is a, c, g, or t
cgcgagggcagcacgagcactgcacaagggctaaacaccattaagcgcgctcgatgccaaatttacaattcgagagagatttcaatgccacactttcaattgccacgacggcggtgccaaaagtttgaagcccgccgtagccgtgtcatgtttgcaaaattctcaattcatcatggtatacaaagctagggttagggagagagctgccgtgtagccgtcgccgccgccgccgctccgacgagaaccgccctacgcgcaaagcctgcgcagcctgagcttcaagcgcgccgcggtcgcgttcccgcgccgcgcaccggcggccagctgcacctcgtcctcggcccggcgcccgctgctcgggtccgcgggcggcttgggcgcggcagcaacagcgacgtctcggctgctgaacacccagggcgagcggcgcccacgctccgccacccgctcccgctcctgctctgacgacacgggccacggctccgcccgcgcacgccgtcttcgtcttcgagctcgccggccgcgacggtcatactccgtcctgcaaagaccccaacccgaaaatgcggccgcgtcagcacacggcgcgccgctgccggctgcggcggaatgaatccagagggtttcaaggacagagaccaaatatgaagggcccggcccggtaatgaatcctcgttcccaggcccaatccagcggactcaaaaggcaaaccctagtcaccatcccccacacctgacacctcccgccgcccgtcggcgattctcaatggccttcgccggcaacgccgacgactcggcggaggactattccgcggaggccaccgtggtgcgcttcgacccgccgctccctctcctccgggcgccagtcccctccccagcatctagcggcgagggccccgtcctcgccttccgcgacgccgcgagctggcgagccgcctgggaggccgccgaggccagcctcgtctcccagtgcgagctggccgaggtgcctcgcggtagtcatgcaaggcagtaagtttagcagctgcaaatatcaaggagggcaaaccagctcctggctactggagctcagtggttagggttgacaatgcccccataatcgccggactatgtttgtttcacttatgtttttttttactttgtgacgatgtgttctttgtggaaacccgaatggttagggttgacaatgcccacataaccactggactttcaatgtggcatttatatttgtttcctttttgaaaatgctgtttccagtttcaccccagttgggggcaaagagtacaaatcacctcctggcatctgaattccagtggtcagggtggaccgtgctatatagtcgcgatgccttctgtgtggaatggcggttatgtagtagtcggtaaacgtagataagccgagtcctttagcttattcaagtgtactcgttcttgtccttccatgccccatttttatttgctttcttccaatgtttttttgtttgcttcatcctagctgtttcaagtatcatgcttttacacgttgaacgaagccacagttgacttcgtctcacgttgattagttgttgcctgattaactggacgctagcgctctcctgcttttatgggaaaacagcaacaacattaactagagtacattgtagatggttctgctcgcaaaaagataatacgtgcttttaatcagatgagttatgttttttctcttgtttttcatgtagcttctcaagcatgccggttatgtagtagtcggtaaacgcagataagtcgagcgctttagcttattcaggtgtacgtgttcttgtcctttcatgccccatttctatttgctttcttccaatctagtttttttttgcttcatcctagctgtttcaagtatcatgcttttacacattgagcgaagccacagttgacttcgtctcacgttgattagttgttgcctgattaactggacgctagcgctctcctgcttttatgggaaaacagcaacaacattaattagagtacattgtagatggttctgctcgcaaaaagataatacgtgcttttaatcagacgagttatgttttttcttttgttcttcatgtagcttctcaagcatgtgcaacttatgttctcttcttctagggaaaacctatttgtacttgatgtttctatctcaaatagtatcgatcatcgattttatcagccatcgctgagacagagccccttcccctcttttttttaaataaatcttgttctgtcctgcctaatgtgctgaagggatttgatttgccattgcagctggccgagttggctggcttaagctctgccagccaataagtatagcagctgcatacattgaagagagcaaaccagctcatgactacttacctttagtgtcgtggttgacactgctccacagtacacatgtcaaaaaacccacttgttataccaatagctacatccaatactttttagtagtgtctaggctgaagaacagagtgtggttaaacacgtggggaagaagcacaggtcacacttagaacatattgtatagggttttagtgatcccttctgtatgatagtagacaaccagatcctggctactggagttgttgaatggttnn

SEQ ID NO: 42522 - DNA, 3606 bp, Zea Mays
tttcaaatgagaaaaaaaaaactatcaggaagaatataagtacatgcacacgcaagttcctctagtcactgtgagcacaccacacttgtcgtatgaaaaaaaaatgctcctatagcttgtagaacgacgatgcagaagcaaagcaagagtcacacagaaggcaaggttagaagggaagacggaggcggcaatccatctgaaaccaagcgaaatacttggttcggatcttggatctttctcagtggcagcaaacgaaggcgctgcactgcacccatgtcgctccccaccagacttgtgctgctgcttccgttgctgctgcttcatgggatcctaccagcaccaacttcggcgtcagcagcaccgttgagaagtgagacggaccgggaagccttgctggagctgaaggccgtcctaggccagcgatcaagcaggctgtcgtcctggaacagtagcgctagcctgtgcctgtggccaggtgtgacatgcagccacaggcacggaggcagggtctcagcactccatctcagctctgccggccttgccggcaccatacctgcgtcggtgggcaacttgacgttcctgacgagcatcgacctcagccaaaacaagctggaaggcgaaatccccgcggcagttggccgcctgcaccggctgcgataccttgacatgtcaaacaactcgctgcagagcgagatcccggctggcctgaggaactgcagcagccttgtgagcatcaggcttggtgggaaccagctgacgggaggagtccctggttggcttggaggcctgccaaagctccaaggcgtgctgctggggccgaacaatctcacggggctgatcccccggtcgctcgccaatctcacttcttccctgagggaaatcaaccttgagaccaaccacctggctcgagggcaccatccccgagggcttcggtagaatccatggactcgagtcgttcacagtggcaggaaaccgtatctcaggcgccatccccgcggacctctcctcaacgtgtcttcgctgatcacgctcgcggtgtccgacaacacgatgcacggtacgctgccgtctgacatgggggctggcctacccatgatcagatatctcctcctgagcaggaacctcttcgctggaggagttccgccttcacttggcaatgcaaccatgctccatgtgatagatctcagcgtgaacagcctcaccggcaccataccgccaggggtaggaaggctttgtccagataccttagctttcgacgacaacatgcttgaggcaagcagcgcccaggactgggagttcatcacatccttcacgaactgcacccgcggcctgcgtctcctcagcctccagtacaacttgcttggcggtgagctcccgagttccgtcgccaatctttcgtcccagctccagttgctgtacctctcagcgaatgagatttctggtaagataccactcgacattggcaatctagctggcctacaagcactgaagctagactacaaccagttctctgggtctcttcctactagcatcggaaggctatcaaccctgaaactcttgcagttctcgaacaacaacctatcaggaagcctgccttcttcgatcggcaacctaacacaactgcaaatattgctcgcatataagaacgcctttgtagggccccttccatccagccttggcaacttgcaacagctaaatggtgttggcttgtctaataacaagtttactggccctttgcctaaagagattttcaacctgtcgtccttgacagatgatctttatttgtcctacaattacttcgttggttctctcccaccagaagttggaagtcttacaaaccttgtacatctgtacatctccgggaacaatttatctggccccttgcctgattcactaggcaactgcttaagcatgatggagcttcgattggacggtaactccttcagtggtgccattcccacatccttcagttcaatgcgtggcttggtactgctaaatttaacagacaacatgctctcaggaaaaattcctcaagaactgtcccgcataagtggtttagaagaactgtatcttgcccacaacaacctttcaggaccaatccctcatacctttggaaatatgacctcattgaaccatctagacctgtctttcaaccaactcagtggccaaatcccagtacagggtgtgtttactaatgtgacgggcttctcttttgctggtaatgatgaactctgcggaggtgtccaggagttgcatttgcctgcttgcgcaaacaaacctttgtggcacagtcggagaaatcaccatatcattcttaaagtagtgattccagttgcaggtgcactgctgttattcatgaccttagcagttcttgttcgaaccttgcaaaagaaatcaaaagcacaatcagaagctgcaccggtgacagtagagggtgctctccaattgatggacgacgtgtatccaagagtttcctatgcagatttagtacgtggaacagatggattttctctaagcaaccggattggtacagggaggtatggatcggtgtacaaggggagcttggtgatcaataacgcaacaactatcgttgctgtgaaggtttttgatctccaacagtcaggctctttgagaagtttcatgtcagagtgtgaggcacttcgtaaggtccggcatcgtaacttggttagtgtcatcacttgttgctctggttatgactccaaccaaaacaacttcaaagccattgtgctagagtacatgactaatgggagccttgacaagtggatacatccagatcaaggtggacagtctacagatccagttggtctgacattaatgcagagattgaacattgctattgacacttgtgacgcgatggactacctgcataatagttgccagccaccgatagttcactgcgacttgaagccaagcaacatccttctcaatgaagactttggtgctcttgttggggactttggaattgcaaagattcttagagactcgacaggcgacccctcgaacatgaactccagaagctccactggcaccgggataaggggaacaatcggatatgttgctccagaatatggggaaggtcaccaagtttccccatgcggagatgtttacagttttggaattctactcctggagttgtttactggaaaggctcctaccaatgacatgtttgcagatggcctgagcttgcagggctacgtccaggctgcattcccagatcatctggtggacattgtagatcctgctattgtagcagcagaagaaaactatgcacatgatgtgcacagcggaaccagcaacggtccacggggacaaaacaacagtgtcatggtatctgttactgggctggcactgttgtgtactaagcaggcaccagcagaaaggatatccatgagaaacgcagccaccgagctgcggaagataagggcccacttcatccgccagtaaattcagaatagcctaatcaaaatagcttgatactgttgcatactacatcttgagaataagaatgttgactgttcctgcatgtgcttactgtttagactattcaatgaaagtgattacagtctaaaagcatgtaaaaagaac

SEQ ID NO: 42523 - DNA, 1675 bp, Zea Mays
attacctgcgtagttagggtttagcagccacaccaaagtttcaatctcctgttttgaattatttttgttcacttggaatattctgaggctagagccacatcttgaagtgcagcatccagcgcattcgcagcactctgaggtggcatcagaagcggcttcagctgcaggaaatgatgaattgaaggttcaggatctgacaatgatgtatggagccaagacggacagggacaaggacaataagtggagatcgttaaaggaacaaaggaatgatccttccgcttatgaggacattgatcttggaatatcagagaccaatgtcaacgccaatgataggcaggaacctgtacttgttcggaacattccaccttatgatcctaccgcagatacatcagaaaatgcatatcttttggacgagattattccaaagagtatgcgggagcatcttttggaaattgtccgtcattttgaatcaggagaaatctcctcaaaaggctatgggagttttgtctcaaaacgtgtgcacaagttaaaggagcttcagggtgaagataaaaagaggtttgcttggatactttcctacatccaacatctcctatctctattggcgcggaatggctccatgtccaatcgcaaatggaaaggcagaaatgaaaaccagataagccatggaccagcaaccccgcaggctgtatatcgcaggctgctgttcatgtttacagaaccggggtccagtgtcatgccaacagagaaaaaagagcttctgaccaactacatattggtcctaacactttttgccgatgacttcagatccaaccccagcgacatatgtgaggaccttaaaatgacccgccaaaatcttaaaccatactatgaccagttgggatgcaaatctgtgacagaaggtgcttttaagtctactttcatgacgctcccagcccctctcaagttcccaaaggaagttacgagaaagcggcgacggcagtagggcttttatccaaaggagacaaggagagaaaccaatggctatttatctcagaaatggcttgcattacttgaatggatggctggattggaaatactccctatcgaaggcaagaagtaaaggcatcgatgctaggggcccgattttaatagtgtactggaaatgaaaagttgtcctgtgtttcatctcgttttgtttttagttgctcatcgacattttcttgttaaggaaacatgtcatctatgtattgataaatgtttgtctatctgtatgagtgaatgtattgaaatgcttccgcttgggttaattcttagggttaattgtgtggagcagcttatcagattggtgaaaactctgcagaattgccatactgaattaaaagctgctcagtgtttttggttacatcagctcataaaacataggtaaaatccactagggcaacatgcttatatgaaattattcatataattgactacagcaatgtaagaacgcagtatcaatattggacggtttacatcatcaccaatctaaactttgttctacatcatctaaaccacacagtaaactggtaggggctagtagctgtcattcaaagactctttttttctttcgttgctagtatacaaggcattatttttcgccctgcccaggctgctcgacttaggatttctcggccacgtcgccacctgcctc

SEQ ID NO: 42524 - DNA, 2068 bp, Zea Mays
tgcgtgcaaaaacttgcagttctcttctcttaagatggacagccccgtttgttcactttccaaaacccttgagccgtcaccaatggcggacctcgaaaccctagccacgcccgcccctgcctctgcctccaccaagaagaagaagaaacactccaagaagcacaaggccgccagtgacgcccccaccaatgtcaccgtcgacgcatcccttatgggcggttcctcctacgtcgcggccgcccccgtggtcggctacttcccctccgggtacgacccactcactaccgctgccggggcggagtctgcccccggcacccagctcttccggcacgagaagcatcccacctgggtggacctcgtggtccggagccccggcggcggacacgacttcgttggccggagctatgccggtgaggccgccgtgccgcaggtctgcgactacgcgcttggcgtccttgacaaggcctccggcactctcaggatcgtgcccatcgctggcaaaaagcatccagcgcattcgcagcactctgaggtggcatcagaagcggcttcagctgcaggaaatgatgaattgaaggttcaggatctgacaatgatgtatggagccaagacggacagggacaaggacaataagtggagatcgttaaaggaacaaaggaatgatccttccgcttatgaggacattgatcttggaatatcagagaccaatgtcaacgccaatgataggcaggaacctgtacttgttcggaacattccaccttatgatcctaccgcagatacatcagaaaatgcatatcttttggacgagattattccaaagagtatgcgggagcatcttttggaaattgtccgtcattttgaatcaggagaaatctcctcaaaaggctatgggagttttgtctcaaaacgtgtgcacaagttaaaggagcttcagggtgaagataaaaagaggtttgcttggatactttcctacatccaacatctcctatctctattggcgcggaatggctccatgtccaatcgcaaatggaaaggcagaaatgaaaaccagataagccatggaccagcaaccccgcaggctgtatatcgcaggctgctgttcatgtttacagaaccggggtccagtgtcatgccaacagagaaaaaagagcttctgaccaactacatattggtcctaacactttttgccgatgacttcagatccaaccccagcgacatatgtgaggaccttaaaatgacccgccaaaatcttaaaccatactatgaccagttgggatgcaaatctgtgacagaaggtgcttttaagtctactttcatgacgctcccagcccctctcaagttcccaaaggaagttacgagaaagcggcgacggcagtagggcttttatccaaaggagacaaggagagaaaccaatggctatttatctcagaaatggcttgcattacttgaatggatggctggattggaaatactccctatcgaaggcaagaagtaaaggcatcgatgctaggggcccgattttaatagtgtactggaaatgaaaagttgtcctgtgtttcatctcgttttgtttttagttgctcatcgacattttcttgttaaggaaacatgtcatctatgtattgataaatgtttgtctatctgtatgagtgaatgtattgaaatgcttccgcttgggttaattcttagggttaattgtgtggagcagcttatcagattggtgaaaactctgcagaattgccatactgaattaaaagctgctcagtgtttttggttacatcagctcataaaacataggtaaaatccactagggcaacatgcttatatgaaattattcatataattgactacagcaatgtaagaacgcagtatcaatattggacggtttacatcatcaccaatctaaactttgttctacatcatctaaaccacacagtaaactggtaggggctagtagctgtcattcaaagactctttttttctttcgttgctagtatacaaggcattatttttcgccctgcccaggctgctcgacttaggatttctcggccacgtcgccacctgcctc

SEQ ID NO: 42525 - DNA, 5159 bp, Zea Mays
ccttcctcggcatccttcggtcccggaatatgcccccggcgtctccctcctcgcgttcctctcgtcggtgagctcctgccgcctggctcgcacagccgatttgcctcagtccagatcgtgcctccttcttcctagatcgggtccgaattcggctaccctcgccaccgccctacgccaggtgccgaggcctccgccgatctcttcgccggcgaagagcggccaccagcttgtggatggaggaggaggcgctgggtcgtggtggtggtgaaaagctttgatttcgtagccgtggtggacgccgctgctaatgcccttgccgtgcctcgttggtggcgtgcaagatgtatgccgtggggaaggtgggcagcctcatctcccgcagcgtgtacaccgtctccggcccgttccacccgttcggcggcgcggtcgacatagtcgttgtgcagcagcaggacggcagcttcaagagctcgccgtggtacgtgcggttcggcaagttccagggggttctcaagtcgagggagaaggttgtcgacatctccgtcaatggcgtcgacgcagggttccacatgtacctggacagcaacggcgaggcttacttcctcaggaacgcggacccgaatggtgaggaaggggagttcattgtctcccccgcctcgtcgggagatgagcgagaggtgccgatccaggaagctcagctgaggaagtcgaagagcacttcgtgtgatagctcgacgatggaagccgacgtcggtgagggcaagattcttgcgaggacaacctcgaggcggataaccatacttgaaaggatgtttggccggaaatcgattaagaacaatgcccatgctgtggatagggtgagttcattggagcgtgcagaggtcgctgcagaactcctagataccaagtggtcaacaaatctcccacgtagttcaaaacctaatggttcaaatgatgagccttccaagagcaacaatgatcagatggaaacctcaaaacctgtattttcggaacatagtttggatcatgggaaagagatggactctaactgtgacaatgctcactgcaattcatgcagccctcgtggaggaagaaacagttcagcagatgaaaccgatccgtgtttacaagccactattgtgaagaaagaggtggttgagatacacgcgcgtgagagcagcgacttcactgataatatcacttcaatcacacatcaacaagggtcagaatcttcgtcaaatgatctgggaacagataaacttatgcagcagtctgtcgatactcaagatgagttgctgcatgatgttgaagatgtaactgaaagggagacacatgcagaggaggttatttccaatgacatttttgaaatccatgttgttgagacagacattacaagtggtaagagcgaggtggattctgagattgttactgtggatccagaaccagatcgagctaaccagaattttacagatacaaattaccaaaattatggcaccacagatatttcatctgaaagacatgaggtttcattgatcccttctgcacaggatgcagttcaagagaaaatagttatcctcagcagttctgaggctgtggagggctcactagatgcagttccagagaaagtagtcattctcagcagttctgagactgtggatagctcatatgctgtgtcctgtattttggatgacacagttcatgatgcttctgatatctcacaggctgacggtgtacaacatgaggagcactctagtatctctgatgggagtacagaaaagctaatttctgaggaaagttcattagtatgctatggtgttcccagcaacaaaaaagacttggttaatatagctgttcaagaaagtaaagcctttatcttaaaaaatcctgcctcccaaatcttggaagagagtggtccaggtttggatgtatctacagacagtgtttccctttcacatgcagactcagctcctgatttagcttgtcagcatgtttctcctaatgttgaagatacaacaagttatgagcctggcattggtcctgaagatgtaacaaaaaactcagttgtggaaaatggagcatgcagcggggaacttgttgtttctgttattcagacctcagcgggagatggactgacaaaatgcattgctcatccagctgttttttctaataaaatagaagtagaaggctcaccaacttctgctggattttccagtttgatcagtgttgaagtgcaaaacacaaaactagaagatgacacaaacaaatctagttctgtgattggagatgaagctggttttgtgcctgaggctacagctgagcttgatgaagaagcagaaccagttatatcattatctgaatatacagaagaaattcagtttcaatttagtgatgctgaaaattttgcagatagaaaggccacggatgacatggtggctaacaaaacaacaggtgaagtagaacatgatgaatctgattgtgacacagagaaacaggaagaaggtgatgtaggtcttgtaaatgacttggagaactgttctgcgtcattaaagcctgtgagtagccctgtttctattcctgcaattgacttccagtcaggaaatagtaacagagaggctaaatctctaccaaatctccgttctcatatacatgatcttgaaaggtcttatagttttcagctaagccgctcactgcaatcaactgctgaaaataatggaattgatctagtcaagagcatgaattatgcttttcttgagcagaaatcagaagctattggtgatttttcagaagaaaataacagccctcctgaggttaccaacactgtagcacttgatggcaaccatgctgatgatctgaaagttgatgcgttcattccttttgcagaattatcactatgcagacacctgttatctgaaggcatgggggaggatgctgcttgcagtgcatttgattctgagaaggtaaccttagaggagttccgtaacatgaagcaatcactgatgcgaaacaacaaactagttgttaggattgctggccgctactttccctgggatgctgctgcacctatagtactcggtatgatttctttcagtgaggaacaagtttttgaacccaaaggaatgataaatgtggagcgagttgagcaaagtgcagctccaggtggcagctggagcatctggccatttagtttcagacgaacaaggactattactgctatccagccagtttgtgaaagtattgttgagacttctgtatccactcctaaagaattgacacattttaaagaactagatagagaaaggaataaatccagggtaaagaggattgagaggaaggtgcgatcactcactccaacatctgacgagcttgcatctcttgatctcagagagggcaggaacgtggtaacatttacgttctcaactgcaattgttgggaaacagcaggttgattgccacatatatttatggagatggaatacacgcattgtaatatctgatgtggatggaactatcaccaagtctgatgttcttgggcagttcatgccactagttggagttgattggtcccaaaacggagttgctcatttattttctgcaataaaggaaaatggataccagcttctatttctgagtgcacgcgctatttcacaagcccacatcacaagacagtttcttttcaacctaaagcaggacggcaaagcacttcctgatggccctgttgttatatctccagatggtctcttcccgtcactttacagagaaggtgagcacatcctgatatgtttttgctattttctattcagttaattgtcagtcagcaaaaagagtagaagacacaaaataacttatctccactgaaaaatgttgcattcattacctctaatattgacttgggttcacatgagtaaactgggtgttgctagccttctaataaactctgtttggtaagcataacagcaccactctttttggttttggaccccctcaaccattgttggataagaggcccatttctttttagcaggtctatgataagtgcacataatacgattatgttgacataaaaagcattccctccttttcaaaatataaggcatgttagagtttaaaaaaccaaaaaaaaagtctaaactttggccatcaatttgtcaaagcatatgtacatttagcgtacataagatgcattgacatatttgtacatttgcttgtcttttattaagatgttgctttgtagtagttgctagtacaagaaattaatggtcaaattatgtattgaaagacttccataaatcctaatacgccttataagaagaaacagagggagtatctctggtaacgactttatgttagctacatgtttgagtgatgctaatgtttcatgacattggtttgtagtcatcagaagagctccgcatgaattcaagatttcgtgtctagaggccatcaaagatttatttccacacgactcaaatccgttttatgctggatttggaaatagagacacagacgagcttagctacctcaagggtgaagtcgcagtgaaccgacgggtcgatacaaagtcgtacacatccttgcatgctcttgtccacgggatgttccctccaatattgtcgtcatctgagcaggaggactacaatgcttggaattactggaagatgccattgcctgatgttgatttgtgaggtacaagtcgagtctgcacaacagcactgcactaattttatgatgtgccgtagtgatcatgagaaggccattacttggttggctacatgtggatgctcctgctcctgatataagttcctgcaagatggaattttgtatatataggatcataatagatgtagtagctatttcttgtgtctcctgttgttgttgttgttgtcgtcgtaggactggaaatcatacctccgtgtgtcctgtaactgaaggtacaaaatttactggatggagggatctgatagtatgttgcagccccccctttttcgtttcatccttgatgtaattgtggtaccgatgtattttgtacaagaacaaatcaataataatgcaatcgaaagcgagctgttcatacgcagacacaacatgttgcattgaccctaggtgcattcggtaactgaaaatcggagctgtgtatactgtggacatgtcatctttggtatg

SEQ ID NO: 42526 - DNA, 1915 bp, Zea Mays
ccttcctcggcatccttcggtcccggaatatgcccccggcgtctccctcctcgcgttcctctcgtcggtgagctcctgccgcctggctcgcacagccgatttgcctcagtccagatcgtgcctccttcttcctagatcgggtccgaattcggctaccctcgccaccgccctacgccaggtgccgaggcctccgccgatctcttcgccggcgaagagcggccaccagaattatcactatgcagacacctgttatctgaaggcatgggggaggatgctgcttgcagtgcatttgattctgagaaggtaaccttagaggagttccgtaacatgaagcaatcactgatgcgaaacaacaaactagttgttaggattgctggccgctactttccctgggatgctgctgcacctatagtactcggtatgatttctttcagtgaggaacaagtttttgaacccaaaggaatgataaatgtggagcgagttgagcaaagtgcagctccaggtggcagctggagcatctggccatttagtttcagacgaacaaggactattactgctatccagccagtttgtgaaagtattgttgagacttctgtatccactcctaaagaattgacacattttaaagaactagatagagaaaggaataaatccagggtaaagaggattgagaggaaggtgcgatcactcactccaacatctgacgagcttgcatctcttgatctcagagagggcaggaacgtggtaacatttacgttctcaactgcaattgttgggaaacagcaggttgattgccacatatatttatggagatggaatacacgcattgtaatatctgatgtggatggaactatcaccaagtctgatgttcttgggcagttcatgccactagttggagttgattggtcccaaaacggagttgctcatttattttctgcaataaaggaaaatggataccagcttctatttctgagtgcacgcgctatttcacaagcccacatcacaagacagtttcttttcaacctaaagcaggacggcaaagcacttcctgatggccctgttgttatatctccagatggtctcttcccgtcactttacagagaagtcatcagaagagctccgcatgaattcaagatttcgtgtctagaggccatcaaagatttatttccacacgactcaaatccgttttatgctggatttggaaatagagacacagacgagcttagctacctcaaggttggtattcctatgggcaagatcttcataataaaccccaagggtgaagtcgcagtgaaccgacgggtcgatacaaagtcgtacacatccttgcatgctcttgtccacgggatgttccctccaatattgtcgtcatctgagcaggaggactacaatgcttggaattactggaagatgccattgcctgatgttgatttgtgaggtacaagtcgagtctgcacaacagcactgcactaattttatgatgtgccgtagtgatcatgagaaggccattacttggttggctacatgtggatgctcctgctcctgatataagttcctgcaagatggaattttgtatatataggatcataatagatgtagtagctatttcttgtgtctcctgttgttgttgttgttgtcgtcgtaggactggaaatcatacctccgtgtgtcctgtaactgaaggtacaaaatttactggatggagggatctgatagtatgttgcagccccccctttttcgtttcatccttgatgtaattgtggtaccgatgtattttgtacaagaacaaatcaataataatgcaatcgaaagcgagctgttcatacgcagacacaacatgttgcattgaccctaggtgcattcggtaactgaaaatcggagctgtgtatactgtggacatgtcatctttggtatg

SEQ ID NO: 42527 - DNA, 3630 bp, Zea Mays
ccttcctcggcatccttcggtcccggaatatgcccccggcgtctccctcctcgcgttcctctcgtcggtgagctcctgccgcctggctcgcacagccgatttgcctcagtccagatcgtgcctccttcttcctagatcgggtccgaattcggctaccctcgccaccgccctacgccaggtgccgaggcctccgccgatctcttcgccggcgaagagcggccaccagccctcgtggaggaagaaacagttcagcagatgaaaccgatccgtgtttacaagccactattgtgaagaaagaggtggttgagatacacgcgcgtgagagcagcgacttcactgataatatcacttcaatcacacatcaacaagggtcagaatcttcgtcaaatgatctgggaacagataaacttatgcagcagtctgtcgatactcaagatgagttgctgcatgatgttgaagatgtaactgaaagggagacacatgcagaggaggttatttccaatgacatttttgaaatccatgttgttgagacagacattacaagtggtaagagcgaggtggattctgagattgttactgtggatccagaaccagatcgagctaaccagaattttacagatacaaattaccaaaattatggcaccacagatatttcatctgaaagacatgaggtttcattgatcccttctgcacaggatgcagttcaagagaaaatagttatcctcagcagttctgaggctgtggagggctcactagatgcagttccagagaaagtagtcattctcagcagttctgagactgtggatagctcatatgctgtgtcctgtattttggatgacacagttcatgatgcttctgatatctcacaggctgacggtgtacaacatgaggagcactctagtatctctgatgggagtacagaaaagctaatttctgaggaaagttcattagtatgctatggtgttcccagcaacaaaaaagacttggttaatatagctgttcaagaaagtaaagcctttatcttaaaaaatcctgcctcccaaatcttggaagagagtggtccaggtttggatgtatctacagacagtgtttccctttcacatgcagactcagctcctgatttagcttgtcagcatgtttctcctaatgttgaagatacaacaagttatgagcctggcattggtcctgaagatgtaacaaaaaactcagttgtggaaaatggagcatgcagcggggaacttgttgtttctgttattcagacctcagcgggagatggactgacaaaatgcattgctcatccagctgttttttctaataaaatagaagtagaaggctcaccaacttctgctggattttccagtttgatcagtgttgaagtgcaaaacacaaaactagaagatgacacaaacaaatctagttctgtgattggagatgaagctggttttgtgcctgaggctacagctgagcttgatgaagaagcagaaccagttatatcattatctgaatatacagaagaaattcagtttcaatttagtgatgctgaaaattttgcagatagaaaggccacggatgacatggtggctaacaaaacaacaggtgaagtagaacatgatgaatctgattgtgacacagagaaacaggaagaaggtgatgtaggtcttgtaaatgacttggagaactgttctgcgtcattaaagcctgtgagtagccctgtttctattcctgcaattgacttccagtcaggaaatagtaacagagaggctaaatctctaccaaatctccgttctcatatacatgatcttgaaaggtcttatagttttcagctaagccgctcactgcaatcaactgctgaaaataatggaattgatctagtcaagagcatgaattatgcttttcttgagcagaaatcagaagctattggtgatttttcagaagaaaataacagccctcctgaggttaccaacactgtagcacttgatggcaaccatgctgatgatctgaaagttgatgcgttcattccttttgcagaattatcactatgcagacacctgttatctgaaggcatgggggaggatgctgcttgcagtgcatttgattctgagaaggtaaccttagaggagttccgtaacatgaagcaatcactgatgcgaaacaacaaactagttgttaggattgctggccgctactttccctgggatgctgctgcacctatagtactcggtatgatttctttcagtgaggaacaagtttttgaacccaaaggaatgataaatgtggagcgagttgagcaaagtgcagctccaggtggcagctggagcatctggccatttagtttcagacgaacaaggactattactgctatccagccagtttgtgaaagtattgttgagacttctgtatccactcctaaagaattgacacattttaaagaactagatagagaaaggaataaatccagggtaaagaggattgagaggaaggtgcgatcactcactccaacatctgacgagcttgcatctcttgatctcagagagggcaggaacgtggtaacatttacgttctcaactgcaattgttgggaaacagcaggttgattgccacatatatttatggagatggaatacacgcattgtaatatctgatgtggatggaactatcaccaagtctgatgttcttgggcagttcatgccactagttggagttgattggtcccaaaacggagttgctcatttattttctgcaataaaggacggcaaagcacttcctgatggccctgttgttatatctccagatggtctcttcccgtcactttacagagaagtcatcagaagagctccgcatgaattcaagatttcgtgtctagaggccatcaaagatttatttccacacgactcaaatccgttttatgctggatttggaaatagagacacagacgagcttagctacctcaaggttggtattcctatgggcaagatcttcataataaaccccaagggtgaagtcgcagtgaaccgacgggtcgatacaaagtcgtacacatccttgcatgctcttgtccacgggatgttccctccaatattgtcgtcatctgagcaggaggactacaatgcttggaattactggaagatgccattgcctgatgttgatttgtgaggtacaagtcgagtctgcacaacagcactgcactaattttatgatgtgccgtagtgatcatgagaaggccattacttggttggctacatgtggatgctcctgctcctgatataagttcctgcaagatggaattttgtatatataggatcataatagatgtagtagctatttcttgtgtctcctgttgttgttgttgttgtcgtcgtaggactggaaatcatacctccgtgtgtcctgtaactgaaggtacaaaatttactggatggagggatctgatagtatgttgcagccccccctttttcgtttcatccttgatgtaattgtggtaccgatgtattttgtacaagaacaaatcaataataatgcaatcgaaagcgagctgttcatacgcagacacaacatgttgcattgaccctaggtgcattcggtaactgaaaatcggagctgtgtatactgtggacatgtcatctttggtatg

SEQ ID NO: 42528 - DNA, 3870 bp, Zea Mays
ccttcctcggcatccttcggtcccggaatatgcccccggcgtctccctcctcgcgttcctctcgtcggtgagctcctgccgcctggctcgcacagccgatttgcctcagtccagatcgtgcctccttcttcctagatcgggtccgaattcggctaccctcgccaccgccctacgccaggtgccgaggcctccgccgatctcttcgccggcgaagagcggccaccagcttgtggatggaggaggaggcgctgggtcgtggtggtggtgaaaagctttgatttcgtagccgtggtggacgccgctgctaatgcccttgccgtgcctcgttggtggcgtgcaagatgtatgccgtggggaaggtgggcagcctcatctcccgcagcgtgtacaccgtctccggcccgttccacccgttcggcggcgcggtcgacatagtcgttgtgcagcagcaggacggcagcttcaagagctcgccgtggtacgtgcggttcggcaagttccagggggttctcaagtcgagggagaaggttgtcgacatctccgtcaatggcgtcgacgcagggttccacatgtacctggacagcaacggcgaggcttacttcctcaggaacgcggacccgaatggtgaggaaggggagttcattgtctcccccgcctcgtcgggagatgagcgagaggtgccgatccaggaagctcagctgaggaagtcgaagagcacttcgtgtgatagctcgacgatggaagccgacgtcggtgagggcaagattcttgcgaggacaacctcgaggcggataaccatacttgaaaggatgtttggccggaaatcgattaagaacaatgcccatgctgtggatagggtgagttcattggagcgtgcagaggtcgctgcagaactcctagataccaagtggtcaacaaatctcccacgtagttcaaaacctaatggttcaaatgatgagccttccaagagcaacaatgatcagatggaaacctcaaaacctgtattttcggaacatagtttggatcatgggaaagagatggactctaactgtgacaatgctcactgcaattcatgcagccctcgtggaggaagaaacagttcagcagatgaaaccgatccgtgtttacaagccactattgtgaagaaagaggtggttgagatacacgcgcgtgagagcagcgacttcactgataatatcacttcaatcacacatcaacaagggtcagaatcttcgtcaaatgatctgggaacagataaacttatgcagcagtctgtcgatactcaagatgagttgctgcatgatgttgaagatgtaactgaaagggagacacatgcagaggaggttatttccaatgacatttttgaaatccatgttgttgagacagacattacaagtggtaagagcgaggtggattctgagattgttactgtggatccagaaccagatcgagctaaccagaattttacagatacaaattaccaaaattatggcaccacagatatttcatctgaaagacatgaggtttcattgatcccttctgcacaggatgcagttcaagagaaaatagttatcctcagcagttctgaggctgtggagggctcactagatgcagttccagagaaagtagtcattctcagcagttctgagactgtggatagctcatatgctgtgtcctgtattttggatgacacagttcatgatgcttctgatatctcacaggctgacggtgtacaacatgaggagcactctagtatctctgatgggagtacagaaaagctaatttctgaggaaagttcattagtatgctatggtgttcccagcaacaaaaaagacttggttaatatagctgttcaagaaagtaaagcctttatcttaaaaaatcctgcctcccaaatcttggaagagagtggtccaggtttggatgtatctacagacagtgtttccctttcacatgcagactcagctcctgatttagcttgtcagcatgtttctcctaatgttgaagatacaacaagttatgagcctggcattggtcctgaagatgtaacaaaaaactcagttgtggaaaatggagcatgcagcggggaacttgttgtttctgttattcagacctcagcgggagatggactgacaaaatgcattgctcatccagctgttttttctaataaaatagaagtagaaggctcaccaacttctgctggattttccagtttgatcagtgttgaagtgcaaaacacaaaactagaagatgacacaaacaaatctagttctgtgattggagatgaagctggttttgtgcctgaggctacagctgagcttgatgaagaagcagaaccagttatatcattatctgaatatacagaagaaattcagtttcaatttagtgatgctgaaaattttgcagatagaaaggccacggatgacatggtggctaacaaaacaacaggtgaagtagaacatgatgaatctgattgtgacacagagaaacaggaagaaggtgatgtaggtcttgtaaatgacttggagaactgttctgcgtcattaaagcctgtgagtagccctgtttctattcctgcaattgacttccagtcaggaaatagtaacagagaggctaaatctctaccaaatctccgttctcatatacatgatcttgaaaggtcttatagttttcagctaagccgctcactgcaatcaactgctgaaaataatggaattgatctagtcaagagcatgaattatgcttttcttgagcagaaatcagaagctattggtgatttttcagaagaaaataacagccctcctgaggttaccaacactgtagcacttgatggcaaccatgctgatgatctgaaagttgatgcgttcattccttttgcagaattatcactatgcagacacctgttatctgaaggcatgggggaggatgctgcttgcagtgcatttgattctgagaaggtaaccttagaggagttccgtaacatgaagcaatcactgatgcgaaacaacaaactagttgttaggattgctggccgctactttccctgggatgctgctgcacctatagtactcgatggtctcttcccgtcactttacagagaagtcatcagaagagctccgcatgaattcaagatttcgtgtctagaggccatcaaagatttatttccacacgactcaaatccgttttatgctggatttggaaatagagacacagacgagcttagctacctcaagggtgaagtcgcagtgaaccgacgggtcgatacaaagtcgtacacatccttgcatgctcttgtccacgggatgttccctccaatattgtcgtcatctgagcaggaggactacaatgcttggaattactggaagatgccattgcctgatgttgatttgtgaggtacaagtcgagtctgcacaacagcactgcactaattttatgatgtgccgtagtgatcatgagaaggccattacttggttggctacatgtggatgctcctgctcctgatataagttcctgcaagatggaattttgtatatataggatcataatagatgtagtagctatttcttgtgtctcctgttgttgttgttgttgtcgtcgtaggactggaaatcatacctccgtgtgtcctgtaactgaaggtacaaaatttactggatggagggatctgatagtatgttgcagccccccctttttcgtttcatccttgatgtaattgtggtaccgatgtattttgtacaagaacaaatcaataataatgcaatcgaaagcgagctgttcatacgcagacacaacatgttgcattgaccctaggtgcattcggtaactgaaaatcggagctgtgtatactgtggacatgtcatctttggtatg

SEQ ID NO: 42529 - DNA, 5014 bp, Zea Mays
ccttcctcggcatccttcggtcccggaatatgcccccggcgtctccctcctcgcgttcctctcgtcggtgagctcctgccgcctggctcgcacagccgatttgcctcagtccagatcgtgcctccttcttcctagatcgggtccgaattcggctaccctcgccaccgccctacgccaggtgccgaggcctccgccgatctcttcgccggcgaagagcggccaccagcttgtggatggaggaggaggcgctgggtcgtggtggtggtgaaaagctttgatttcgtagccgtggtggacgccgctgctaatgcccttgccgtgcctcgttggtggcgtgcaagatgtatgccgtggggaaggtgggcagcctcatctcccgcagcgtgtacaccgtctccggcccgttccacccgttcggcggcgcggtcgacatagtcgttgtgcagcagcaggacggcagcttcaagagctcgccgtggtacgtgcggttcggcaagttccagggggttctcaagtcgagggagaaggttgtcgacatctccgtcaatggcgtcgacgcagggttccacatgtacctggacagcaacggcgaggcttacttcctcaggaacgcggacccgaatggtgaggaaggggagttcattgtctcccccgcctcgtcgggagatgagcgagaggtgccgatccaggaagctcagctgaggaagtcgaagagcacttcgtgtgatagctcgacgatggaagccgacgtcggtgagggcaagattcttgcgaggacaacctcgaggcggataaccatacttgaaaggatgtttggccggaaatcgattaagaacaatgcccatgctgtggatagggtgagttcattggagcgtgcagaggtcgctgcagaactcctagataccaagtggtcaacaaatctcccacgtagttcaaaacctaatggttcaaatgatgagccttccaagagcaacaatgatcagatggaaacctcaaaacctgtattttcggaacatagtttggatcatgggaaagagatggactctaactgtgacaatgctcactgcaattcatgcagccctcgtggaggaagaaacagttcagcagatgaaaccgatccgtgtttacaagccactattgtgaagaaagaggtggttgagatacacgcgcgtgagagcagcgacttcactgataatatcacttcaatcacacatcaacaagggtcagaatcttcgtcaaatgatctgggaacagataaacttatgcagcagtctgtcgatactcaagatgagttgctgcatgatgttgaagatgtaactgaaagggagacacatgcagaggaggttatttccaatgacatttttgaaatccatgttgttgagacagacattacaagtggtaagagcgaggtggattctgagattgttactgtggatccagaaccagatcgagctaaccagaattttacagatacaaattaccaaaattatggcaccacagatatttcatctgaaagacatgaggtttcattgatcccttctgcacaggatgcagttcaagagaaaatagttatcctcagcagttctgaggctgtggagggctcactagatgcagttccagagaaagtagtcattctcagcagttctgagactgtggatagctcatatgctgtgtcctgtattttggatgacacagttcatgatgcttctgatatctcacaggctgacggtgtacaacatgaggagcactctagtatctctgatgggagtacagaaaagctaatttctgaggaaagttcattagtatgctatggtgttcccagcaacaaaaaagacttggttaatatagctgttcaagaaagtaaagcctttatcttaaaaaatcctgcctcccaaatcttggaagagagtggtccaggtttggatgtatctacagacagtgtttccctttcacatgcagactcagctcctgatttagcttgtcagcatgtttctcctaatgttgaagatacaacaagttatgagcctggcattggtcctgaagatgtaacaaaaaactcagttgtggaaaatggagcatgcagcggggaacttgttgtttctgttattcagacctcagcgggagatggactgacaaaatgcattgctcatccagctgttttttctaataaaatagaagtagaaggctcaccaacttctgctggattttccagtttgatcagtgttgaagtgcaaaacacaaaactagaagatgacacaaacaaatctagttctgtgattggagatgaagctggttttgtgcctgaggctacagctgagcttgatgaagaagcagaaccagttatatcattatctgaatatacagaagaaattcagtttcaatttagtgatgctgaaaattttgcagatagaaaggccacggatgacatggtggctaacaaaacaacaggtgaagtagaacatgatgaatctgattgtgacacagagaaacaggaagaaggtgatgtaggtcttgtaaatgacttggagaactgttctgcgtcattaaagcctgtgagtagccctgtttctattcctgcaattgacttccagtcaggaaatagtaacagagaggctaaatctctaccaaatctccgttctcatatacatgatcttgaaaggtcttatagttttcagctaagccgctcactgcaatcaactgctgaaaataatggaattgatctagtcaagagcatgaattatgcttttcttgagcagaaatcagaagctattggtgatttttcagaagaaaataacagccctcctgaggttaccaacactgtagcacttgatggcaaccatgctgatgatctgaaagttgatgcgttcattccttttgcagaattatcactatgcagacacctgttatctgaaggcatgggggaggatgctgcttgcagtgcatttgattctgagaaggtaaccttagaggagttccgtaacatgaagcaatcactgatgcgaaacaacaaactagttgttaggattgctggccgctactttccctgggatgctgctgcacctatagtactcggtatgatttctttcagtgaggaacaagtttttgaacccaaaggaatgataaatgtggagcgagttgagcaaagtgcagctccaggtggcagctggagcatctggccatttagtttcagacgaacaaggactattactgctatccagccagtttgtgaaagtattgttgagacttctgtatccactcctaaagaattgacacattttaaagaactagatagagaaaggaataaatccagggtaaagaggattgagaggaaggtgcgatcactcactccaacatctgacgagcttgcatctcttgatctcagagagggcaggaacgtggtaacatttacgttctcaactgcaattgttgggaaacagcaggttgattgccacatatatttatggagatggaatacacgcattgtaatatctgatgtggatggaactatcaccaagaaaatggataccagcttctatttctgagtgcacgcgctatttcacaagcccacatcacaagacagtttcttttcaacctaaagcaggacggcaaagcacttcctgatggccctgttgttatatctccagatggtctcttcccgtcactttacagagaaggtgagcacatcctgatatgtttttgctattttctattcagttaattgtcagtcagcaaaaagagtagaagacacaaaataacttatctccactgaaaaatgttgcattcattacctctaatattgacttgggttcacatgagtaaactgggtgttgctagccttctaataaactctgtttggtaagcataacagcaccactctttttggttttggaccccctcaaccattgttggataagaggcccatttctttttagcaggtctatgataagtgcacataatacgattatgttgacataaaaagcattccctccttttcaaaatataaggcatgttagagtttaaaaaaccaaaaaaaaagtctaaactttggccatcaatttgtcaaagcatatgtacatttagcgtacataagatgcattgacatatttgtacatttgcttgtcttttattaagatgttgctttgtagtagttgctagtacaagaaattaatggtcaaattatgtattgaaagacttccataaatcctaatacgccttataagaagaaacagagggagtatctctggtaacgactttatgttagctacatgtttgagtgatgctaatgtttcatgacattggtttgtagtcatcagaagagctccgcatgaattcaagatttcgtgtctagaggccatcaaagatttatttccacacgactcaaatccgttttatgctggatttggaaatagagacacagacgagcttagctacctcaaggttggtattcctatgggcaagatcttcataataaaccccaaggaggactacaatgcttggaattactggaagatgccattgcctgatgttgatttgtgaggtacaagtcgagtctgcacaacagcactgcactaattttatgatgtgccgtagtgatcatgagaaggccattacttggttggctacatgtggatgctcctgctcctgatataagttcctgcaagatggaattttgtatatataggatcataatagatgtagtagctatttcttgtgtctcctgttgttgttgttgttgtcgtcgtaggactggaaatcatacctccgtgtgtcctgtaactgaaggtacaaaatttactggatggagggatctgatagtatgttgcagccccccctttttcgtttcatccttgatgtaattgtggtaccgatgtattttgtacaagaacaaatcaataataatgcaatcgaaagcgagctgttcatacgcagacacaacatgttgcattgaccctaggtgcattcggtaactgaaaatcggagctgtgtatactgtggacatgtcatctttggtatg

SEQ ID NO: 42530 - DNA, 1788 bp, Zea Mays
ccttcctcggcatccttcggtcccggaatatgcccccggcgtctccctcctcgcgttcctctcgtcggtgagctcctgccgcctggctcgcacagccgatttgcctcagtccagatcgtgcctccttcttcctagatcgggtccgaattcggctaccctcgccaccgccctacgccaggtgccgaggcctccgccgatctcttcgccggcgaagagcggccaccagaattatcactatgcagacacctgttatctgaaggcatgggggaggatgctgcttgcagtgcatttgattctgagaaggtaaccttagaggagttccgtaacatgaagcaatcactgatgcgaaacaacaaactagttgttaggattgctggccgctactttccctgggatgctgctgcacctatagtactcggtatgatttctttcagtgaggaacaagtttttgaacccaaaggaatgataaatgtggagcgagttgagcaaagtgcagctccaggtggcagctggagcatctggccatttagtttcagacgaacaaggactattactgctatccagccagtttgtgaaagtattgttgagacttctgtatccactcctaaagaattgacacattttaaagaactagatagagaaaggaataaatccagggtaaagaggattgagaggaaggtgcgatcactcactccaacatctgacgagcttgcatctcttgatctcagagagggcaggaacgtggtaacatttacgttctcaactgcaattgttgggaaacagcaggttgattgccacatatatttatggagatggaatacacgcattgtaatatctgatgtggatggaactatcaccaagaaaatggataccagcttctatttctgagtgcacgcgctatttcacaagcccacatcacaagacagtttcttttcaacctaaagcaggacggcaaagcacttcctgatggccctgttgttatatctccagatggtctcttcccgtcactttacagagaagtcatcagaagagctccgcatgaattcaagatttcgtgtctagaggccatcaaagatttatttccacacgactcaaatccgttttatgctggatttggaaatagagacacagacgagcttagctacctcaagggtgaagtcgcagtgaaccgacgggtcgatacaaagtcgtacacatccttgcatgctcttgtccacgggatgttccctccaatattgtcgtcatctgagcaggaggactacaatgcttggaattactggaagatgccattgcctgatgttgatttgtgaggtacaagtcgagtctgcacaacagcactgcactaattttatgatgtgccgtagtgatcatgagaaggccattacttggttggctacatgtggatgctcctgctcctgatataagttcctgcaagatggaattttgtatatataggatcataatagatgtagtagctatttcttgtgtctcctgttgttgttgttgttgtcgtcgtaggactggaaatcatacctccgtgtgtcctgtaactgaaggtacaaaatttactggatggagggatctgatagtatgttgcagccccccctttttcgtttcatccttgatgtaattgtggtaccgatgtattttgtacaagaacaaatcaataataatgcaatcgaaagcgagctgttcatacgcagacacaacatgttgcattgaccctaggtgcattcggtaactgaaaatcggagctgtgtatactgtggacatgtcatctttggtatg

SEQ ID NO: 42531 - DNA, 4527 bp, Zea Mays
ccttcctcggcatccttcggtcccggaatatgcccccggcgtctccctcctcgcgttcctctcgtcggtgagctcctgccgcctggctcgcacagccgatttgcctcagtccagatcgtgcctccttcttcctagatcgggtccgaattcggctaccctcgccaccgccctacgccaggtgccgaggcctccgccgatctcttcgccggcgaagagcggccaccagcttgtggatggaggaggaggcgctgggtcgtggtggtggtgaaaagctttgatttcgtagccgtggtggacgccgctgctaatgcccttgccgtgcctcgttggtggcgtgcaagatgtatgccgtggggaaggtgggcagcctcatctcccgcagcgtgtacaccgtctccggcccgttccacccgttcggcggcgcggtcgacatagtcgttgtgcagcagcaggacggcagcttcaagagctcgccgtggtacgtgcggttcggcaagttccagggggttctcaagtcgagggagaaggttgtcgacatctccgtcaatggcgtcgacgcagggttccacatgtacctggacagcaacggcgaggcttacttcctcaggaacgcggacccgaatggtgaggaaggggagttcattgtctcccccgcctcgtcgggagatgagcgagaggtgccgatccaggaagctcagctgaggaagtcgaagagcacttcgtgtgatagctcgacgatggaagccgacgtcggtgagggcaagattcttgcgaggacaacctcgaggcggataaccatacttgaaaggatgtttggccggaaatcgattaagaacaatgcccatgctgtggatagggtgagttcattggagcgtgcagaggtcgctgcagaactcctagataccaagtggtcaacaaatctcccacgtagttcaaaacctaatggttcaaatgatgagccttccaagagcaacaatgatcagatggaaacctcaaaacctgtattttcggaacatagtttggatcatgggaaagagatggactctaactgtgacaatgctcactgcaattcatgcagccctcgtggaggaagaaacagttcagcagatgaaaccgatccgtgtttacaagccactattgtgaagaaagaggtggttgagatacacgcgcgtgagagcagcgacttcactgataatatcacttcaatcacacatcaacaagggtcagaatcttcgtcaaatgatctgggaacagataaacttatgcagcagtctgtcgatactcaagatgagttgctgcatgatgttgaagatgtaactgaaagggagacacatgcagaggaggttatttccaatgacatttttgaaatccatgttgttgagacagacattacaagtggtaagagcgaggtggattctgagattgttactgtggatccagaaccagatcgagctaaccagaattttacagatacaaattaccaaaattatggcaccacagatatttcatctgaaagacatgaggtttcattgatcccttctgcacaggatgcagttcaagagaaaatagttatcctcagcagttctgaggctgtggagggctcactagatgcagttccagagaaagtagtcattctcagcagttctgagactgtggatagctcatatgctgtgtcctgtattttggatgacacagttcatgatgcttctgatatctcacaggctgacggtgtacaacatgaggagcactctagtatctctgatgggagtacagaaaagctaatttctgaggaaagttcattagtatgctatggtgttcccagcaacaaaaaagacttggttaatatagctgttcaagaaagtaaagcctttatcttaaaaaatcctgcctcccaaatcttggaagagagtggtccaggtttggatgtatctacagacagtgtttccctttcacatgcagactcagctcctgatttagcttgtcagcatgtttctcctaatgttgaagatacaacaagttatgagcctggcattggtcctgaagatgtaacaaaaaactcagttgtggaaaatggagcatgcagcggggaacttgttgtttctgttattcagacctcagcgggagatggactgacaaaatgcattgctcatccagctgttttttctaataaaatagaagtagaaggctcaccaacttctgctggattttccagtttgatcagtgttgaagtgcaaaacacaaaactagaagatgacacaaacaaatctagttctgtgattggagatgaagctggttttgtgcctgaggctacagctgagcttgatgaagaagcagaaccagttatatcattatctgaatatacagaagaaattcagtttcaatttagtgatgctgaaaattttgcagatagaaaggccacggatgacatggtggctaacaaaacaacaggtgaagtagaacatgatgaatctgattgtgacacagagaaacaggaagaaggtgatgtaggtcttgtaaatgacttggagaactgttctgcgtcattaaagcctgtgagtagccctgtttctattcctgcaattgacttccagtcaggaaatagtaacagagaggctaaatctctaccaaatctccgttctcatatacatgatcttgaaaggtcttatagttttcagctaagccgctcactgcaatcaactgctgaaaataatggaattgatctagtcaagagcatgaattatgcttttcttgagcagaaatcagaagctattggtgatttttcagaagaaaataacagccctcctgaggttaccaacactgtagcacttgatggcaaccatgctgatgatctgaaagttgatgcgttcattccttttgcagaattatcactatgcagacacctgttatctgaaggcatgggggaggatgctgcttgcagtgcatttgattctgagaaggtaaccttagaggagttccgtaacatgaagcaatcactgatgcgaaacaacaaactagttgttaggattgctggccgctactttccctgggatgctgctgcacctatagtactcggtatgatttctttcagtgaggaacaagtttttgaacccaaaggaatgataaatgtggagcgagttgagcaaagtgcagctccaggtggcagctggagcatctggccatttagtttcagacgaacaaggactattactgctatccagccagtttgtgaaagtattgttgagacttctgtatccactcctaaagaattgacacattttaaagaactagatagagaaaggaataaatccagggtaaagaggattgagaggaaggtgcgatcactcactccaacatctgacgagcttgcatctcttgatctcagagagggcaggaacgtggtaacatttacgttctcaactgcaattgttgggaaacagcaggttgattgccacatatatttatggagatggaatacacgcattgtaatatctgatgtggatggaactatcaccaagtctgatgttcttgggcagttcatgccactagttggagttgattggtcccaaaacggagttgctcatttattttctgcaataaaggaaaatggataccagcttctatttctgagtgcacgcgctatttcacaagcccacatcacaagacagtttcttttcaacctaaagcaggacggcaaagcacttcctgatggccctgttgttatatctccagatggtctcttcccgtcactttacagagaagtcatcagaagagctccgcatgaattcaagatttcgtgtctagaggccatcaaagatttatttccacacgactcaaatccgttttatgctggatttggaaatagagacacagacgagcttagctacctcaagggtgaagtcgcagtgaaccgacgggtcgatacaaagtcgtacacatccttgcatgctcttgtccacgggatgttccctccaatattgtcgtcatctgagcaggaggactacaatgcttggaattactggaagatgccattgcctgatgttgatttgtgaggtacaagtcgagtctgcacaacagcactgcactaattttatgatgtgccgtagtgatcatgagaaggccattacttggttggctacatgtggatgctcctgctcctgatataagttcctgcaagatggaattttgtatatataggatcataatagatgtagtagctatttcttgtgtctcctgttgttgttgttgttgtcgtcgtaggactggaaatcatacctccgtgtgtcctgtaactgaaggtacaaaatttactggatggagggatctgatagtatgttgcagccccccctttttcgtttcatccttgatgtaattgtggtaccgatgtattttgtacaagaacaaatcaataataatgcaatcgaaagcgagctgttcatacgcagacacaacatgttgcattgaccctaggtgcattcggtaactgaaaatcggagctgtgtatactgtggacatgtcatctttggtatg

SEQ ID NO: 42532 - DNA, 1807 bp, Zea Mays
ccttcctcggcatccttcggtcccggaatatgcccccggcgtctccctcctcgcgttcctctcgtcggtgagctcctgccgcctggctcgcacagccgatttgcctcagtccagatcgtgcctccttcttcctagatcgggtccgaattcggctaccctcgccaccgccctacgccaggtgccgaggcctccgccgatctcttcgccggcgaagagcggccaccagaattatcactatgcagacacctgttatctgaaggcatgggggaggatgctgcttgcagtgcatttgattctgagaaggtaaccttagaggagttccgtaacatgaagcaatcactgatgcgaaacaacaaactagttgttaggattgctggccgctactttccctgggatgctgctgcacctatagtactcggtatgatttctttcagtgaggaacaagtttttgaacccaaaggaatgataaatgtggagcgagttgagcaaagtgcagctccaggtggcagctggagcatctggccatttagtttcagacgaacaaggactattactgctatccagccagtttgtgaaagtattgttgagacttctgtatccactcctaaagaattgacacattttaaagaactagatagagaaaggaataaatccagggtaaagaggattgagaggaaggtgcgatcactcactccaacatctgacgagcttgcatctcttgatctcagagagggcaggaacgtggtaacatttacgttctcaactgcaattgttgggaaacagcaggttgattgccacatatatttatggagatggaatacacgcattgtaatatctgatgtggatggaactatcaccaagtctgatgttcttgggcagttcatgccactagttggagttgattggtcccaaaacggagttgctcatttattttctgcaataaaggaaaatggataccagcttctatttctgagtgcacgcgctatttcacaagcccacatcacaagacagtttcttttcaacctaaagcaggacggcaaagcacttcctgatggccctgttgttatatctccagatggtctcttcccgtcactttacagagaagtcatcagaagagctccgcatgaattcaagatttcgtgtctagaggccatcaaagatttatttccacacgactcaaatccgttttatgctggatttggaaatagagacacagacgagcttagctacctcaagggtgaagtcgcagtgaaccgacgggtcgatacaaagtcgtacacatccttgcatgctcttgtccacgggatgttccctccaatattgtcgtcatctgagcaggaggactacaatgcttggaattactggaagatgccattgcctgatgttgatttgtgaggccattacttggttggctacatgtggatgctcctgctcctgatataagttcctgcaagatggaattttgtatatataggatcataatagatgtagtagctatttcttgtgtctcctgttgttgttgttgttgtcgtcgtaggactggaaatcatacctccgtgtgtcctgtaactgaaggtacaaaatttactggatggagggatctgatagtatgttgcagccccccctttttcgtttcatccttgatgtaattgtggtaccgatgtattttgtacaagaacaaatcaataataatgcaatcgaaagcgagctgttcatacgcagacacaacatgttgcattgaccctaggtgcattcggtaactgaaaatcggagctgtgtatactgtggacatgtcatctttggtatg

SEQ ID NO: 42533 - DNA, 5213 bp, Zea Mays
ccttcctcggcatccttcggtcccggaatatgcccccggcgtctccctcctcgcgttcctctcgtcggtgagctcctgccgcctggctcgcacagccgatttgcctcagtccagatcgtgcctccttcttcctagatcgggtccgaattcggctaccctcgccaccgccctacgccaggtgccgaggcctccgccgatctcttcgccggcgaagagcggccaccagcttgtggatggaggaggaggcgctgggtcgtggtggtggtgaaaagctttgatttcgtagccgtggtggacgccgctgctaatgcccttgccgtgcctcgttggtggcgtgcaagatgtatgccgtggggaaggtgggcagcctcatctcccgcagcgtgtacaccgtctccggcccgttccacccgttcggcggcgcggtcgacatagtcgttgtgcagcagcaggacggcagcttcaagagctcgccgtggtacgtgcggttcggcaagttccagggggttctcaagtcgagggagaaggttgtcgacatctccgtcaatggcgtcgacgcagggttccacatgtacctggacagcaacggcgaggcttacttcctcaggaacgcggacccgaatggtgaggaaggggagttcattgtctcccccgcctcgtcgggagatgagcgagaggtgccgatccaggaagctcagctgaggaagtcgaagagcacttcgtgtgatagctcgacgatggaagccgacgtcggtgagggcaagattcttgcgaggacaacctcgaggcggataaccatacttgaaaggatgtttggccggaaatcgattaagaacaatgcccatgctgtggatagggtgagttcattggagcgtgcagaggtcgctgcagaactcctagataccaagtggtcaacaaatctcccacgtagttcaaaacctaatggttcaaatgatgagccttccaagagcaacaatgatcagatggaaacctcaaaacctgtattttcggaacatagtttggatcatgggaaagagatggactctaactgtgacaatgctcactgcaattcatgcagccctcgtggaggaagaaacagttcagcagatgaaaccgatccgtgtttacaagccactattgtgaagaaagaggtggttgagatacacgcgcgtgagagcagcgacttcactgataatatcacttcaatcacacatcaacaagggtcagaatcttcgtcaaatgatctgggaacagataaacttatgcagcagtctgtcgatactcaagatgagttgctgcatgatgttgaagatgtaactgaaagggagacacatgcagaggaggttatttccaatgacatttttgaaatccatgttgttgagacagacattacaagtggtaagagcgaggtggattctgagattgttactgtggatccagaaccagatcgagctaaccagaattttacagatacaaattaccaaaattatggcaccacagatatttcatctgaaagacatgaggtttcattgatcccttctgcacaggatgcagttcaagagaaaatagttatcctcagcagttctgaggctgtggagggctcactagatgcagttccagagaaagtagtcattctcagcagttctgagactgtggatagctcatatgctgtgtcctgtattttggatgacacagttcatgatgcttctgatatctcacaggctgacggtgtacaacatgaggagcactctagtatctctgatgggagtacagaaaagctaatttctgaggaaagttcattagtatgctatggtgttcccagcaacaaaaaagacttggttaatatagctgttcaagaaagtaaagcctttatcttaaaaaatcctgcctcccaaatcttggaagagagtggtccaggtttggatgtatctacagacagtgtttccctttcacatgcagactcagctcctgatttagcttgtcagcatgtttctcctaatgttgaagatacaacaagttatgagcctggcattggtcctgaagatgtaacaaaaaactcagttgtggaaaatggagcatgcagcggggaacttgttgtttctgttattcagacctcagcgggagatggactgacaaaatgcattgctcatccagctgttttttctaataaaatagaagtagaaggctcaccaacttctgctggattttccagtttgatcagtgttgaagtgcaaaacacaaaactagaagatgacacaaacaaatctagttctgtgattggagatgaagctggttttgtgcctgaggctacagctgagcttgatgaagaagcagaaccagttatatcattatctgaatatacagaagaaattcagtttcaatttagtgatgctgaaaattttgcagatagaaaggccacggatgacatggtggctaacaaaacaacaggtgaagtagaacatgatgaatctgattgtgacacagagaaacaggaagaaggtgatgtaggtcttgtaaatgacttggagaactgttctgcgtcattaaagcctgtgagtagccctgtttctattcctgcaattgacttccagtcaggaaatagtaacagagaggctaaatctctaccaaatctccgttctcatatacatgatcttgaaaggtcttatagttttcagctaagccgctcactgcaatcaactgctgaaaataatggaattgatctagtcaagagcatgaattatgcttttcttgagcagaaatcagaagctattggtgatttttcagaagaaaataacagccctcctgaggttaccaacactgtagcacttgatggcaaccatgctgatgatctgaaagttgatgcgttcattccttttgcagaattatcactatgcagacacctgttatctgaaggcatgggggaggatgctgcttgcagtgcatttgattctgagaaggtaaccttagaggagttccgtaacatgaagcaatcactgatgcgaaacaacaaactagttgttaggattgctggccgctactttccctgggatgctgctgcacctatagtactcggtatgatttctttcagtgaggaacaagtttttgaacccaaaggaatgataaatgtggagcgagttgagcaaagtgcagctccaggtggcagctggagcatctggccatttagtttcagacgaacaaggactattactgctatccagccagtttgtgaaagtattgttgagacttctgtatccactcctaaagaattgacacattttaaagaactagatagagaaaggaataaatccagggtaaagaggattgagaggaaggtgcgatcactcactccaacatctgacgagcttgcatctcttgatctcagagagggcaggaacgtggtaacatttacgttctcaactgcaattgttgggaaacagcaggttgattgccacatatatttatggagatggaatacacgcattgtaatatctgatgtggatggaactatcaccaagtctgatgttcttgggcagttcatgccactagttggagttgattggtcccaaaacggagttgctcatttattttctgcaataaaggaaaatggataccagcttctatttctgagtgcacgcgctatttcacaagcccacatcacaagacagtttcttttcaacctaaagcaggacggcaaagcacttcctgatggccctgttgttatatctccagatggtctcttcccgtcactttacagagaaggtgagcacatcctgatatgtttttgctattttctattcagttaattgtcagtcagcaaaaagagtagaagacacaaaataacttatctccactgaaaaatgttgcattcattacctctaatattgacttgggttcacatgagtaaactgggtgttgctagccttctaataaactctgtttggtaagcataacagcaccactctttttggttttggaccccctcaaccattgttggataagaggcccatttctttttagcaggtctatgataagtgcacataatacgattatgttgacataaaaagcattccctccttttcaaaatataaggcatgttagagtttaaaaaaccaaaaaaaaagtctaaactttggccatcaatttgtcaaagcatatgtacatttagcgtacataagatgcattgacatatttgtacatttgcttgtcttttattaagatgttgctttgtagtagttgctagtacaagaaattaatggtcaaattatgtattgaaagacttccataaatcctaatacgccttataagaagaaacagagggagtatctctggtaacgactttatgttagctacatgtttgagtgatgctaatgtttcatgacattggtttgtagtcatcagaagagctccgcatgaattcaagatttcgtgtctagaggccatcaaagatttatttccacacgactcaaatccgttttatgctggatttggaaatagagacacagacgagcttagctacctcaaggttggtattcctatgggcaagatcttcataataaaccccaagggtgaagtcgcagtgaaccgacgggtcgatacaaagtcgtacacatccttgcatgctcttgtccacgggatgttccctccaatattgtcgtcatctgagcaggccagcattcccgaggactacaatgcttggaattactggaagatgccattgcctgatgttgatttgtgaggtacaagtcgagtctgcacaacagcactgcactaattttatgatgtgccgtagtgatcatgagaaggccattacttggttggctacatgtggatgctcctgctcctgatataagttcctgcaagatggaattttgtatatataggatcataatagatgtagtagctatttcttgtgtctcctgttgttgttgttgttgtcgtcgtaggactggaaatcatacctccgtgtgtcctgtaactgaaggtacaaaatttactggatggagggatctgatagtatgttgcagccccccctttttcgtttcatccttgatgtaattgtggtaccgatgtattttgtacaagaacaaatcaataataatgcaatcgaaagcgagctgttcatacgcagacacaacatgttgcattgaccctaggtgcattcggtaactgaaaatcggagctgtgtatactgtggacatgtcatctttggtatg

SEQ ID NO: 42534 - DNA, 4592 bp, Zea Mays
ccttcctcggcatccttcggtcccggaatatgcccccggcgtctccctcctcgcgttcctctcgtcggtgagctcctgccgcctggctcgcacagccgatttgcctcagtccagatcgtgcctccttcttcctagatcgggtccgaattcggctaccctcgccaccgccctacgccaggtgccgaggcctccgccgatctcttcgccggcgaagagcggccaccagcttgtggatggaggaggaggcgctgggtcgtggtggtggtgaaaagctttgatttcgtagccgtggtggacgccgctgctaatgcccttgccgtgcctcgttggtggcgtgcaagatgtatgccgtggggaaggtgggcagcctcatctcccgcagcgtgtacaccgtctccggcccgttccacccgttcggcggcgcggtcgacatagtcgttgtgcagcagcaggacggcagcttcaagagctcgccgtggtacgtgcggttcggcaagttccagggggttctcaagtcgagggagaaggttgtcgacatctccgtcaatggcgtcgacgcagggttccacatgtacctggacagcaacggcgaggcttacttcctcaggaacgcggacccgaatggtgaggaaggggagttcattgtctcccccgcctcgtcgggagatgagcgagaggtgccgatccaggaagctcagctgaggaagtcgaagagcacttcgtgtgatagctcgacgatggaagccgacgtcggtgagggcaagattcttgcgaggacaacctcgaggcggataaccatacttgaaaggatgtttggccggaaatcgattaagaacaatgcccatgctgtggatagggtgagttcattggagcgtgcagaggtcgctgcagaactcctagataccaagtggtcaacaaatctcccacgtagttcaaaacctaatggttcaaatgatgagccttccaagagcaacaatgatcagatggaaacctcaaaacctgtattttcggaacatagtttggatcatgggaaagagatggactctaactgtgacaatgctcactgcaattcatgcagccctcgtggaggaagaaacagttcagcagatgaaaccgatccgtgtttacaagccactattgtgaagaaagaggtggttgagatacacgcgcgtgagagcagcgacttcactgataatatcacttcaatcacacatcaacaagggtcagaatcttcgtcaaatgatctgggaacagataaacttatgcagcagtctgtcgatactcaagatgagttgctgcatgatgttgaagatgtaactgaaagggagacacatgcagaggaggttatttccaatgacatttttgaaatccatgttgttgagacagacattacaagtggtaagagcgaggtggattctgagattgttactgtggatccagaaccagatcgagctaaccagaattttacagatacaaattaccaaaattatggcaccacagatatttcatctgaaagacatgaggtttcattgatcccttctgcacaggatgcagttcaagagaaaatagttatcctcagcagttctgaggctgtggagggctcactagatgcagttccagagaaagtagtcattctcagcagttctgagactgtggatagctcatatgctgtgtcctgtattttggatgacacagttcatgatgcttctgatatctcacaggctgacggtgtacaacatgaggagcactctagtatctctgatgggagtacagaaaagctaatttctgaggaaagttcattagtatgctatggtgttcccagcaacaaaaaagacttggttaatatagctgttcaagaaagtaaagcctttatcttaaaaaatcctgcctcccaaatcttggaagagagtggtccaggtttggatgtatctacagacagtgtttccctttcacatgcagactcagctcctgatttagcttgtcagcatgtttctcctaatgttgaagatacaacaagttatgagcctggcattggtcctgaagatgtaacaaaaaactcagttgtggaaaatggagcatgcagcggggaacttgttgtttctgttattcagacctcagcgggagatggactgacaaaatgcattgctcatccagctgttttttctaataaaatagaagtagaaggctcaccaacttctgctggattttccagtttgatcagtgttgaagtgcaaaacacaaaactagaagatgacacaaacaaatctagttctgtgattggagatgaagctggttttgtgcctgaggctacagctgagcttgatgaagaagcagaaccagttatatcattatctgaatatacagaagaaattcagtttcaatttagtgatgctgaaaattttgcagatagaaaggccacggatgacatggtggctaacaaaacaacaggtgaagtagaacatgatgaatctgattgtgacacagagaaacaggaagaaggtgatgtaggtcttgtaaatgacttggagaactgttctgcgtcattaaagcctgtgagtagccctgtttctattcctgcaattgacttccagtcaggaaatagtaacagagaggctaaatctctaccaaatctccgttctcatatacatgatcttgaaaggtcttatagttttcagctaagccgctcactgcaatcaactgctgaaaataatggaattgatctagtcaagagcatgaattatgcttttcttgagcagaaatcagaagctattggtgatttttcagaagaaaataacagccctcctgaggttaccaacactgtagcacttgatggcaaccatgctgatgatctgaaagttgatgcgttcattccttttgcagaattatcactatgcagacacctgttatctgaaggcatgggggaggatgctgcttgcagtgcatttgattctgagaaggtaaccttagaggagttccgtaacatgaagcaatcactgatgcgaaacaacaaactagttgttaggattgctggccgctactttccctgggatgctgctgcacctatagtactcggtatgatttctttcagtgaggaacaagtttttgaacccaaaggaatgataaatgtggagcgagttgagcaaagtgcagctccaggtggcagctggagcatctggccatttagtttcagacgaacaaggactattactgctatccagccagtttgtgaaagtattgttgagacttctgtatccactcctaaagaattgacacattttaaagaactagatagagaaaggaataaatccagggtaaagaggattgagaggaaggtgcgatcactcactccaacatctgacgagcttgcatctcttgatctcagagagggcaggaacgtggtaacatttacgttctcaactgcaattgttgggaaacagcaggttgattgccacatatatttatggagatggaatacacgcattgtaatatctgatgtggatggaactatcaccaagtctgatgttcttgggcagttcatgccactagttggagttgattggtcccaaaacggagttgctcatttattttctgcaataaaggaaaatggataccagcttctatttctgagtgcacgcgctatttcacaagcccacatcacaagacagtttcttttcaacctaaagcaggacggcaaagcacttcctgatggccctgttgttatatctccagatggtctcttcccgtcactttacagagaagtcatcagaagagctccgcatgaattcaagatttcgtgtctagaggccatcaaagatttatttccacacgactcaaatccgttttatgctggatttggaaatagagacacagacgagcttagctacctcaaggttggtattcctatgggcaagatcttcataataaaccccaagggtgaagtcgcagtgaaccgacgggtcgatacaaagtcgtacacatccttgcatgctcttgtccacgggatgttccctccaatattgtcgtcatctgagcaggccagcattcccgtatagtatttgaggactacaatgcttggaattactggaagatgccattgcctgatgttgatttgtgaggtacaagtcgagtctgcacaacagcactgcactaattttatgatgtgccgtagtgatcatgagaaggccattacttggttggctacatgtggatgctcctgctcctgatataagttcctgcaagatggaattttgtatatataggatcataatagatgtagtagctatttcttgtgtctcctgttgttgttgttgttgtcgtcgtaggactggaaatcatacctccgtgtgtcctgtaactgaaggtacaaaatttactggatggagggatctgatagtatgttgcagccccccctttttcgtttcatccttgatgtaattgtggtaccgatgtattttgtacaagaacaaatcaataataatgcaatcgaaagcgagctgttcatacgcagacacaacatgttgcattgaccctaggtgcattcggtaactgaaaatcggagctgtgtatactgtggacatgtcatctttggtatg

SEQ ID NO: 42535 - DNA, 4401 bp, Zea Mays
ccttcctcggcatccttcggtcccggaatatgcccccggcgtctccctcctcgcgttcctctcgtcggtgagctcctgccgcctggctcgcacagccgatttgcctcagtccagatcgtgcctccttcttcctagatcgggtccgaattcggctaccctcgccaccgccctacgccaggtgccgaggcctccgccgatctcttcgccggcgaagagcggccaccagcttgtggatggaggaggaggcgctgggtcgtggtggtggtgaaaagctttgatttcgtagccgtggtggacgccgctgctaatgcccttgccgtgcctcgttggtggcgtgcaagatgtatgccgtggggaaggtgggcagcctcatctcccgcagcgtgtacaccgtctccggcccgttccacccgttcggcggcgcggtcgacatagtcgttgtgcagcagcaggacggcagcttcaagagctcgccgtggtacgtgcggttcggcaagttccagggggttctcaagtcgagggagaaggttgtcgacatctccgtcaatggcgtcgacgcagggttccacatgtacctggacagcaacggcgaggcttacttcctcaggaacgcggacccgaatggtgaggaaggggagttcattgtctcccccgcctcgtcgggagatgagcgagaggtgccgatccaggaagctcagctgaggaagtcgaagagcacttcgtgtgatagctcgacgatggaagccgacgtcggtgagggcaagattcttgcgaggacaacctcgaggcggataaccatacttgaaaggatgtttggccggaaatcgattaagaacaatgcccatgctgtggatagggtgagttcattggagcgtgcagaggtcgctgcagaactcctagataccaagtggtcaacaaatctcccacgtagttcaaaacctaatggttcaaatgatgagccttccaagagcaacaatgatcagatggaaacctcaaaacctgtattttcggaacatagtttggatcatgggaaagagatggactctaactgtgacaatgctcactgcaattcatgcagccctcgtggaggaagaaacagttcagcagatgaaaccgatccgtgtttacaagccactattgtgaagaaagaggtggttgagatacacgcgcgtgagagcagcgacttcactgataatatcacttcaatcacacatcaacaagggtcagaatcttcgtcaaatgatctgggaacagataaacttatgcagcagtctgtcgatactcaagatgagttgctgcatgatgttgaagatgtaactgaaagggagacacatgcagaggaggttatttccaatgacatttttgaaatccatgttgttgagacagacattacaagtggtaagagcgaggtggattctgagattgttactgtggatccagaaccagatcgagctaaccagaattttacagatacaaattaccaaaattatggcaccacagatatttcatctgaaagacatgaggtttcattgatcccttctgcacaggatgcagttcaagagaaaatagttatcctcagcagttctgaggctgtggagggctcactagatgcagttccagagaaagtagtcattctcagcagttctgagactgtggatagctcatatgctgtgtcctgtattttggatgacacagttcatgatgcttctgatatctcacaggctgacggtgtacaacatgaggagcactctagtatctctgatgggagtacagaaaagctaatttctgaggaaagttcattagtatgctatggtgttcccagcaacaaaaaagacttggttaatatagctgttcaagaaagtaaagcctttatcttaaaaaatcctgcctcccaaatcttggaagagagtggtccaggtttggatgtatctacagacagtgtttccctttcacatgcagactcagctcctgatttagcttgtcagcatgtttctcctaatgttgaagatacaacaagttatgagcctggcattggtcctgaagatgtaacaaaaaactcagttgtggaaaatggagcatgcagcggggaacttgttgtttctgttattcagacctcagcgggagatggactgacaaaatgcattgctcatccagctgttttttctaataaaatagaagtagaaggctcaccaacttctgctggattttccagtttgatcagtgttgaagtgcaaaacacaaaactagaagatgacacaaacaaatctagttctgtgattggagatgaagctggttttgtgcctgaggctacagctgagcttgatgaagaagcagaaccagttatatcattatctgaatatacagaagaaattcagtttcaatttagtgatgctgaaaattttgcagatagaaaggccacggatgacatggtggctaacaaaacaacaggtgaagtagaacatgatgaatctgattgtgacacagagaaacaggaagaaggtgatgtaggtcttgtaaatgacttggagaactgttctgcgtcattaaagcctgtgagtagccctgtttctattcctgcaattgacttccagtcaggaaatagtaacagagaggctaaatctctaccaaatctccgttctcatatacatgatcttgaaaggtcttatagttttcagctaagccgctcactgcaatcaactgctgaaaataatggaattgatctagtcaagagcatgaattatgcttttcttgagcagaaatcagaagctattggtgatttttcagaagaaaataacagccctcctgaggttaccaacactgtagcacttgatggcaaccatgctgatgatctgaaagttgatgcgttcattccttttgcagaattatcactatgcagacacctgttatctgaaggcatgggggaggatgctgcttgcagtgcatttgattctgagaaggtaaccttagaggagttccgtaacatgaagcaatcactgatgcgaaacaacaaactagttgttaggattgctggccgctactttccctgggatgctgctgcacctatagtactcggtatgatttctttcagtgaggaacaagtttttgaacccaaaggaatgataaatgtggagcgagttgagcaaagtgcagctccaggtggcagctggagcatctggccatttagtttcagacgaacaaggactattactgctatccagccagtttgtgaaagtattgttgagacttctgtatccactcctaaagaattgacacattttaaagaactagatagagaaaggaataaatccagggtaaagaggattgagaggaaggtgcgatcactcactccaacatctgacgagcttgcatctcttgatctcagagagggcaggaacgtggtaacatttacgttctcaactgcaattgttgggaaacagcaggttgattgccacatatatttatggagatggaatacacgcattgtaatatctgatgtggatggaactatcaccaagtctgatgttcttgggcagttcatgccactagttggagttgattggtcccaaaacggagttgctcatttattttctgcaataaaggaaaatggataccagcttctatttctgagtgcacgcgctatttcacaagcccacatcacaagacagtttcttttcaacctaaagcaggacggcaaagcacttcctgatggccctgttgttatatctccagatggtctcttcccgtcactttacagagaagtcatcagaagagctccgcatgaattcaagatttcgtgtctagaggccatcaaagatttatttccacacgactcaaatccgttttatgctggatttggaaatagagacacagacgagcttagctacctcaaggttggtattcctatgggcaagatcttcataataaaccccaaggaggactacaatgcttggaattactggaagatgccattgcctgatgttgatttgtgaggccattacttggttggctacatgtggatgctcctgctcctgatataagttcctgcaagatggaattttgtatatataggatcataatagatgtagtagctatttcttgtgtctcctgttgttgttgttgttgtcgtcgtaggactggaaatcatacctccgtgtgtcctgtaactgaaggtacaaaatttactggatggagggatctgatagtatgttgcagccccccctttttcgtttcatccttgatgtaattgtggtaccgatgtattttgtacaagaacaaatcaataataatgcaatcgaaagcgagctgttcatacgcagacacaacatgttgcattgaccctaggtgcattcggtaactgaaaatcggagctgtgtatactgtggacatgtcatctttggtatg

SEQ ID NO: 42536 - DNA, 4589 bp, Zea Mays
gaataatcccttcctcggcatccttcggtcccggaatatgcccccggcgtctccctcctcgcgttcctctcgtcggtgagctcctgccgcctggctcgcacagccgatttgcctcagtccagatcgtgcctccttcttcctagatcgggtccgaattcggctaccctcgccaccgccctacgccaggtgccgaggcctccgccgatctcttcgccggcgaagagcggccaccagcttgtggatggaggaggaggcgctgggtcgtggtggtggtgaaaagctttgatttcgtagccgtggtggacgccgctgctaatgcccttgccgtgcctcgttggtggcgtgcaagatgtatgccgtggggaaggtgggcagcctcatctcccgcagcgtgtacaccgtctccggcccgttccacccgttcggcggcgcggtcgacatagtcgttgtgcagcagcaggacggcagcttcaagagctcgccgtggtacgtgcggttcggcaagttccagggggttctcaagtcgagggagaaggttgtcgacatctccgtcaatggcgtcgacgcagggttccacatgtacctggacagcaacggcgaggcttacttcctcaggaacgcggacccgaatggtgaggaaggggagttcattgtctcccccgcctcgtcgggagatgagcgagaggtgccgatccaggaagctcagctgaggaagtcgaagagcacttcgtgtgatagctcgacgatggaagccgacgtcggtgagggcaagattcttgcgaggacaacctcgaggcggataaccatacttgaaaggatgtttggccggaaatcgattaagaacaatgcccatgctgtggatagggtgagttcattggagcgtgcagaggtcgctgcagaactcctagataccaagtggtcaacaaatctcccacgtagttcaaaacctaatggttcaaatgatgagccttccaagagcaacaatgatcagatggaaacctcaaaacctgtattttcggaacatagtttggatcatgggaaagagatggactctaactgtgacaatgctcactgcaattcatgcagccctcgtggaggaagaaacagttcagcagatgaaaccgatccgtgtttacaagccactattgtgaagaaagaggtggttgagatacacgcgcgtgagagcagcgacttcactgataatatcacttcaatcacacatcaacaagggtcagaatcttcgtcaaatgatctgggaacagataaacttatgcagcagtctgtcgatactcaagatgagttgctgcatgatgttgaagatgtaactgaaagggagacacatgcagaggaggttatttccaatgacatttttgaaatccatgttgttgagacagacattacaagtggtaagagcgaggtggattctgagattgttactgtggatccagaaccagatcgagctaaccagaattttacagatacaaattaccaaaattatggcaccacagatatttcatctgaaagacatgaggtttcattgatcccttctgcacaggatgcagttcaagagaaaatagttatcctcagcagttctgaggctgtggagggctcactagatgcagttccagagaaagtagtcattctcagcagttctgagactgtggatagctcatatgctgtgtcctgtattttggatgacacagttcatgatgcttctgatatctcacaggctgacggtgtacaacatgaggagcactctagtatctctgatgggagtacagaaaagctaatttctgaggaaagttcattagtatgctatggtgttcccagcaacaaaaaagacttggttaatatagctgttcaagaaagtaaagcctttatcttaaaaaatcctgcctcccaaatcttggaagagagtggtccaggtttggatgtatctacagacagtgtttccctttcacatgcagactcagctcctgatttagcttgtcagcatgtttctcctaatgttgaagatacaacaagttatgagcctggcattggtcctgaagatgtaacaaaaaactcagttgtggaaaatggagcatgcagcggggaacttgttgtttctgttattcagacctcagcgggagatggactgacaaaatgcattgctcatccagctgttttttctaataaaatagaagtagaaggctcaccaacttctgctggattttccagtttgatcagtgttgaagtgcaaaacacaaaactagaagatgacacaaacaaatctagttctgtgattggagatgaagctggttttgtgcctgaggctacagctgagcttgatgaagaagcagaaccagttatatcattatctgaatatacagaagaaattcagtttcaatttagtgatgctgaaaattttgcagatagaaaggccacggatgacatggtggctaacaaaacaacaggtgaagtagaacatgatgaatctgattgtgacacagagaaacaggaagaaggtgatgtaggtcttgtaaatgacttggagaactgttctgcgtcattaaagcctgtgagtagccctgtttctattcctgcaattgacttccagtcaggaaatagtaacagagaggctaaatctctaccaaatctccgttctcatatacatgatcttgaaaggtcttatagttttcagctaagccgctcactgcaatcaactgctgaaaataatggaattgatctagtcaagagcatgaattatgcttttcttgagcagaaatcagaagctattggtgatttttcagaagaaaataacagccctcctgaggttaccaacactgtagcacttgatggcaaccatgctgatgatctgaaagttgatgcgttcattccttttgcagaattatcactatgcagacacctgttatctgaaggcatgggggaggatgctgcttgcagtgcatttgattctgagaaggtaaccttagaggagttccgtaacatgaagcaatcactgatgcgaaacaacaaactagttgttaggattgctggccgctactttccctgggatgctgctgcacctatagtactcggtatgatttctttcagtgaggaacaagtttttgaacccaaaggaatgataaatgtggagcgagttgagcaaagtgcagctccaggtggcagctggagcatctggccatttagtttcagacgaacaaggactattactgctatccagccagtttgtgaaagtattgttgagacttctgtatccactcctaaagaattgacacattttaaagaactagatagagaaaggaataaatccagggtaaagaggattgagaggaaggtgcgatcactcactccaacatctgacgagcttgcatctcttgatctcagagagggcaggaacgtggtaacatttacgttctcaactgcaattgttgggaaacagcaggttgattgccacatatatttatggagatggaatacacgcattgtaatatctgatgtggatggaactatcaccaagtctgatgttcttgggcagttcatgccactagttggagttgattggtcccaaaacggagttgctcatttattttctgcaataaaggaaaatggataccagcttctatttctgagtgcacgcgctatttcacaagcccacatcacaagacagtttcttttcaacctaaagcaggacggcaaagcacttcctgatggccctgttgttatatctccagatggtctcttcccgtcactttacagagaagtcatcagaagagctccgcatgaattcaagatttcgtgtctagaggccatcaaagatttatttccacacgactcaaatccgttttatgctggatttggaaatagagacacagacgagcttagctacctcaaggttggtattcctatgggcaagatcttcataataaaccccaagggtgaagtcgcagtgaaccgacgggtcgatacaaagtcgtacacatccttgcatgctcttgtccacgggatgttccctccaatattgtcgtcatctgagcaggccagcattcccgaggactacaatgcttggaattactggaagatgccattgcctgatgttgatttgtgaggtacaagtcgagtctgcacaacagcactgcactaattttatgatgtgccgtagtgatcatgagaaggccattacttggttggctacatgtggatgctcctgctcctgatataagttcctgcaagatggaattttgtatatataggatcataatagatgtagtagctatttcttgtgtctcctgttgttgttgttgttgtcgtcgtaggactggaaatcatacctccgtgtgtcctgtaactgaaggtacaaaatttactggatggagggatctgatagtatgttgcagccccccctttttcgtttcatccttgatgtaattgtggtaccgatgtattttgtacaagaacaaatcaataataatgcaatcgaaagcgagctgttcatacgcagacacaacatgttgcattgaccctaggtgcattcggtaactgaaaatcggagctgtgtatactgtggacatgtcatctttggtatg

SEQ ID NO: 42537 - DNA, 4609 bp, Zea Mays
gaataatcccttcctcggcatccttcggtcccggaatatgcccccggcgtctccctcctcgcgttcctctcgtcggtgagctcctgccgcctggctcgcacagccgatttgcctcagtccagatcgtgcctccttcttcctagatcgggtccgaattcggctaccctcgccaccgccctacgccaggtgccgaggcctccgccgatctcttcgccggcgaagagcggccaccagaattctggtggttcctgtagcttgtggatggaggaggaggcgctgggtcgtggtggtggtgaaaagctttgatttcgtagccgtggtggacgccgctgctaatgcccttgccgtgcctcgttggtggcgtgcaagatgtatgccgtggggaaggtgggcagcctcatctcccgcagcgtgtacaccgtctccggcccgttccacccgttcggcggcgcggtcgacatagtcgttgtgcagcagcaggacggcagcttcaagagctcgccgtggtacgtgcggttcggcaagttccagggggttctcaagtcgagggagaaggttgtcgacatctccgtcaatggcgtcgacgcagggttccacatgtacctggacagcaacggcgaggcttacttcctcaggaacgcggacccgaatggtgaggaaggggagttcattgtctcccccgcctcgtcgggagatgagcgagaggtgccgatccaggaagctcagctgaggaagtcgaagagcacttcgtgtgatagctcgacgatggaagccgacgtcggtgagggcaagattcttgcgaggacaacctcgaggcggataaccatacttgaaaggatgtttggccggaaatcgattaagaacaatgcccatgctgtggatagggtgagttcattggagcgtgcagaggtcgctgcagaactcctagataccaagtggtcaacaaatctcccacgtagttcaaaacctaatggttcaaatgatgagccttccaagagcaacaatgatcagatggaaacctcaaaacctgtattttcggaacatagtttggatcatgggaaagagatggactctaactgtgacaatgctcactgcaattcatgcagccctcgtggaggaagaaacagttcagcagatgaaaccgatccgtgtttacaagccactattgtgaagaaagaggtggttgagatacacgcgcgtgagagcagcgacttcactgataatatcacttcaatcacacatcaacaagggtcagaatcttcgtcaaatgatctgggaacagataaacttatgcagcagtctgtcgatactcaagatgagttgctgcatgatgttgaagatgtaactgaaagggagacacatgcagaggaggttatttccaatgacatttttgaaatccatgttgttgagacagacattacaagtggtaagagcgaggtggattctgagattgttactgtggatccagaaccagatcgagctaaccagaattttacagatacaaattaccaaaattatggcaccacagatatttcatctgaaagacatgaggtttcattgatcccttctgcacaggatgcagttcaagagaaaatagttatcctcagcagttctgaggctgtggagggctcactagatgcagttccagagaaagtagtcattctcagcagttctgagactgtggatagctcatatgctgtgtcctgtattttggatgacacagttcatgatgcttctgatatctcacaggctgacggtgtacaacatgaggagcactctagtatctctgatgggagtacagaaaagctaatttctgaggaaagttcattagtatgctatggtgttcccagcaacaaaaaagacttggttaatatagctgttcaagaaagtaaagcctttatcttaaaaaatcctgcctcccaaatcttggaagagagtggtccaggtttggatgtatctacagacagtgtttccctttcacatgcagactcagctcctgatttagcttgtcagcatgtttctcctaatgttgaagatacaacaagttatgagcctggcattggtcctgaagatgtaacaaaaaactcagttgtggaaaatggagcatgcagcggggaacttgttgtttctgttattcagacctcagcgggagatggactgacaaaatgcattgctcatccagctgttttttctaataaaatagaagtagaaggctcaccaacttctgctggattttccagtttgatcagtgttgaagtgcaaaacacaaaactagaagatgacacaaacaaatctagttctgtgattggagatgaagctggttttgtgcctgaggctacagctgagcttgatgaagaagcagaaccagttatatcattatctgaatatacagaagaaattcagtttcaatttagtgatgctgaaaattttgcagatagaaaggccacggatgacatggtggctaacaaaacaacaggtgaagtagaacatgatgaatctgattgtgacacagagaaacaggaagaaggtgatgtaggtcttgtaaatgacttggagaactgttctgcgtcattaaagcctgtgagtagccctgtttctattcctgcaattgacttccagtcaggaaatagtaacagagaggctaaatctctaccaaatctccgttctcatatacatgatcttgaaaggtcttatagttttcagctaagccgctcactgcaatcaactgctgaaaataatggaattgatctagtcaagagcatgaattatgcttttcttgagcagaaatcagaagctattggtgatttttcagaagaaaataacagccctcctgaggttaccaacactgtagcacttgatggcaaccatgctgatgatctgaaagttgatgcgttcattccttttgcagaattatcactatgcagacacctgttatctgaaggcatgggggaggatgctgcttgcagtgcatttgattctgagaaggtaaccttagaggagttccgtaacatgaagcaatcactgatgcgaaacaacaaactagttgttaggattgctggccgctactttccctgggatgctgctgcacctatagtactcggtatgatttctttcagtgaggaacaagtttttgaacccaaaggaatgataaatgtggagcgagttgagcaaagtgcagctccaggtggcagctggagcatctggccatttagtttcagacgaacaaggactattactgctatccagccagtttgtgaaagtattgttgagacttctgtatccactcctaaagaattgacacattttaaagaactagatagagaaaggaataaatccagggtaaagaggattgagaggaaggtgcgatcactcactccaacatctgacgagcttgcatctcttgatctcagagagggcaggaacgtggtaacatttacgttctcaactgcaattgttgggaaacagcaggttgattgccacatatatttatggagatggaatacacgcattgtaatatctgatgtggatggaactatcaccaagtctgatgttcttgggcagttcatgccactagttggagttgattggtcccaaaacggagttgctcatttattttctgcaataaaggaaaatggataccagcttctatttctgagtgcacgcgctatttcacaagcccacatcacaagacagtttcttttcaacctaaagcaggacggcaaagcacttcctgatggccctgttgttatatctccagatggtctcttcccgtcactttacagagaagtcatcagaagagctccgcatgaattcaagatttcgtgtctagaggccatcaaagatttatttccacacgactcaaatccgttttatgctggatttggaaatagagacacagacgagcttagctacctcaaggttggtattcctatgggcaagatcttcataataaaccccaagggtgaagtcgcagtgaaccgacgggtcgatacaaagtcgtacacatccttgcatgctcttgtccacgggatgttccctccaatattgtcgtcatctgagcaggccagcattcccgaggactacaatgcttggaattactggaagatgccattgcctgatgttgatttgtgaggtacaagtcgagtctgcacaacagcactgcactaattttatgatgtgccgtagtgatcatgagaaggccattacttggttggctacatgtggatgctcctgctcctgatataagttcctgcaagatggaattttgtatatataggatcataatagatgtagtagctatttcttgtgtctcctgttgttgttgttgttgtcgtcgtaggactggaaatcatacctccgtgtgtcctgtaactgaaggtacaaaatttactggatggagggatctgatagtatgttgcagccccccctttttcgtttcatccttgatgtaattgtggtaccgatgtattttgtacaagaacaaatcaataataatgcaatcgaaagcgagctgttcatacgcagacacaacatgttgcattgaccctaggtgcattcggtaactgaaaatcggagctgtgtatactgtggacatgtcatctttggtatg

SEQ ID NO: 42538 - DNA, 4556 bp, Zea Mays
ggaataatcccttcctcggcatccttcggtcccggaatatgcccccggcgtctccctcctcgcgttcctctcgtcggtgagctcctgccgcctggctcgcacagccgatttgcctcagtccagatcgtgcctccttcttcctagatcgggtccgaattcggctaccctcgccaccgccctacgccaggtgccgaggcctccgccgatctcttcgccggcgaagagcggccaccagaattctggtggttcctgtagcttgtggatggaggaggaggcgctgggtcgtggtggtggtgaaaagctttgatttcgtagccgtggtggacgccgctgctaatgcccttgccgtgcctcgttggtggcgtgcaagatgtatgccgtggggaaggtgggcagcctcatctcccgcagcgtgtacaccgtctccggcccgttccacccgttcggcggcgcggtcgacatagtcgttgtgcagcagcaggacggcagcttcaagagctcgccgtggtacgtgcggttcggcaagttccagggggttctcaagtcgagggagaaggttgtcgacatctccgtcaatggcgtcgacgcagggttccacatgtacctggacagcaacggcgaggcttacttcctcaggaacgcggacccgaatggtgaggaaggggagttcattgtctcccccgcctcgtcgggagatgagcgagaggtgccgatccaggaagctcagctgaggaagtcgaagagcacttcgtgtgatagctcgacgatggaagccgacgtcggtgagggcaagattcttgcgaggacaacctcgaggcggataaccatacttgaaaggatgtttggccggaaatcgattaagaacaatgcccatgctgtggatagggtgagttcattggagcgtgcagaggtcgctgcagaactcctagataccaagtggtcaacaaatctcccacgtagttcaaaacctaatggttcaaatgatgagccttccaagagcaacaatgatcagatggaaacctcaaaacctgtattttcggaacatagtttggatcatgggaaagagatggactctaactgtgacaatgctcactgcaattcatgcagccctcgtggaggaagaaacagttcagcagatgaaaccgatccgtgtttacaagccactattgtgaagaaagaggtggttgagatacacgcgcgtgagagcagcgacttcactgataatatcacttcaatcacacatcaacaagggtcagaatcttcgtcaaatgatctgggaacagataaacttatgcagcagtctgtcgatactcaagatgagttgctgcatgatgttgaagatgtaactgaaagggagacacatgcagaggaggttatttccaatgacatttttgaaatccatgttgttgagacagacattacaagtggtaagagcgaggtggattctgagattgttactgtggatccagaaccagatcgagctaaccagaattttacagatacaaattaccaaaattatggcaccacagatatttcatctgaaagacatgaggtttcattgatcccttctgcacaggatgcagttcaagagaaaatagttatcctcagcagttctgaggctgtggagggctcactagatgcagttccagagaaagtagtcattctcagcagttctgagactgtggatagctcatatgctgtgtcctgtattttggatgacacagttcatgatgcttctgatatctcacaggctgacggtgtacaacatgaggagcactctagtatctctgatgggagtacagaaaagctaatttctgaggaaagttcattagtatgctatggtgttcccagcaacaaaaaagacttggttaatatagctgttcaagaaagtaaagcctttatcttaaaaaatcctgcctcccaaatcttggaagagagtggtccaggtttggatgtatctacagacagtgtttccctttcacatgcagactcagctcctgatttagcttgtcagcatgtttctcctaatgttgaagatacaacaagttatgagcctggcattggtcctgaagatgtaacaaaaaactcagttgtggaaaatggagcatgcagcggggaacttgttgtttctgttattcagacctcagcgggagatggactgacaaaatgcattgctcatccagctgttttttctaataaaatagaagtagaaggctcaccaacttctgctggattttccagtttgatcagtgttgaagtgcaaaacacaaaactagaagatgacacaaacaaatctagttctgtgattggagatgaagctggttttgtgcctgaggctacagctgagcttgatgaagaagcagaaccagttatatcattatctgaatatacagaagaaattcagtttcaatttagtgatgctgaaaattttgcagatagaaaggccacggatgacatggtggctaacaaaacaacaggtgaagtagaacatgatgaatctgattgtgacacagagaaacaggaagaaggtgatgtaggtcttgtaaatgacttggagaactgttctgcgtcattaaagcctgtgagtagccctgtttctattcctgcaattgacttccagtcaggaaatagtaacagagaggctaaatctctaccaaatctccgttctcatatacatgatcttgaaaggtcttatagttttcagctaagccgctcactgcaatcaactgctgaaaataatggaattgatctagtcaagagcatgaattatgcttttcttgagcagaaatcagaagctattggtgatttttcagaagaaaataacagccctcctgaggttaccaacactgtagcacttgatggcaaccatgctgatgatctgaaagttgatgcgttcattccttttgcagaattatcactatgcagacacctgttatctgaaggcatgggggaggatgctgcttgcagtgcatttgattctgagaaggtaaccttagaggagttccgtaacatgaagcaatcactgatgcgaaacaacaaactagttgttaggattgctggccgctactttccctgggatgctgctgcacctatagtactcggtatgatttctttcagtgaggaacaagtttttgaacccaaaggaatgataaatgtggagcgagttgagcaaagtgcagctccaggtggcagctggagcatctggccatttagtttcagacgaacaaggactattactgctatccagccagtttgtgaaagtattgttgagacttctgtatccactcctaaagaattgacacattttaaagaactagatagagaaaggaataaatccagggtaaagaggattgagaggaaggtgcgatcactcactccaacatctgacgagcttgcatctcttgatctcagagagggcaggaacgtggtaacatttacgttctcaactgcaattgttgggaaacagcaggttgattgccacatatatttatggagatggaatacacgcattgtaatatctgatgtggatggaactatcaccaagtctgatgttcttgggcagttcatgccactagttggagttgattggtcccaaaacggagttgctcatttattttctgcaataaaggaaaatggataccagcttctatttctgagtgcacgcgctatttcacaagcccacatcacaagacagtttcttttcaacctaaagcaggacggcaaagcacttcctgatggccctgttgttatatctccagatggtctcttcccgtcactttacagagaagtcatcagaagagctccgcatgaattcaagatttcgtgtctagaggccatcaaagatttatttccacacgactcaaatccgttttatgctggatttggaaatagagacacagacgagcttagctacctcaagggtgaagtcgcagtgaaccgacgggtcgatacaaagtcgtacacatccttgcatgctcttgtccacgggatgttccctccaatattgtcgtcatctgagcaggaggactacaatgcttggaattactggaagatgccattgcctgatgttgatttgtgaggtacaagtcgagtctgcacaacagcactgcactaattttatgatgtgccgtagtgatcatgagaaggccattacttggttggctacatgtggatgctcctgctcctgatataagttcctgcaagatggaattttgtatatataggatcataatagatgtagtagctatttcttgtgtctcctgttgttgttgttgttgtcgtcgtaggactggaaatcatacctccgtgtgtcctgtaactgaaggtacaaaatttactggatggagggatctgatagtatgttgcagccccccctttttcgtttcatccttgatgtaattgtggtaccgatgtattttgtacaagaacaaatcaataataatgcaatcgaaagcgagctgttcatacgcagacacaacatgttgcattgaccctaggtgcattcggtaactgaaaatcggagctgtgtatactgtggacatgtcatctttggtatg

SEQ ID NO: 42539 - DNA, 4471 bp, Zea Mays
ggaataatcccttcctcggcatccttcggtcccggaatatgcccccggcgtctccctcctcgcgttcctctcgtcggtgagctcctgccgcctggctcgcacagccgatttgcctcagtccagatcgtgcctccttcttcctagatcgggtccgaattcggctaccctcgccaccgccctacgccaggtgccgaggcctccgccgatctcttcgccggcgaagagcggccaccagaattctggtggttcctgtagcttgtggatggaggaggaggcgctgggtcgtggtggtggtgaaaagctttgatttcgtagccgtggtggacgccgctgctaatgcccttgccgtgcctcgttggtggcgtgcaagatgtatgccgtggggaaggtgggcagcctcatctcccgcagcgtgtacaccgtctccggcccgttccacccgttcggcggcgcggtcgacatagtcgttgtgcagcagcaggacggcagcttcaagagctcgccgtggtacgtgcggttcggcaagttccagggggttctcaagtcgagggagaaggttgtcgacatctccgtcaatggcgtcgacgcagggttccacatgtacctggacagcaacggcgaggcttacttcctcaggaacgcggacccgaatggtgaggaaggggagttcattgtctcccccgcctcgtcgggagatgagcgagaggtgccgatccaggaagctcagctgaggaagtcgaagagcacttcgtgtgatagctcgacgatggaagccgacgtcggtgagggcaagattcttgcgaggacaacctcgaggcggataaccatacttgaaaggatgtttggccggaaatcgattaagaacaatgcccatgctgtggatagggtgagttcattggagcgtgcagaggtcgctgcagaactcctagataccaagtggtcaacaaatctcccacgtagttcaaaacctaatggttcaaatgatgagccttccaagagcaacaatgatcagatggaaacctcaaaacctgtattttcggaacatagtttggatcatgggaaagagatggactctaactgtgacaatgctcactgcaattcatgcagccctcgtggaggaagaaacagttcagcagatgaaaccgatccgtgtttacaagccactattgtgaagaaagaggtggttgagatacacgcgcgtgagagcagcgacttcactgataatatcacttcaatcacacatcaacaagggtcagaatcttcgtcaaatgatctgggaacagataaacttatgcagcagtctgtcgatactcaagatgagttgctgcatgatgttgaagatgtaactgaaagggagacacatgcagaggaggttatttccaatgacatttttgaaatccatgttgttgagacagacattacaagtggtaagagcgaggtggattctgagattgttactgtggatccagaaccagatcgagctaaccagaattttacagatacaaattaccaaaattatggcaccacagatatttcatctgaaagacatgaggtttcattgatcccttctgcacaggatgcagttcaagagaaaatagttatcctcagcagttctgaggctgtggagggctcactagatgcagttccagagaaagtagtcattctcagcagttctgagactgtggatagctcatatgctgtgtcctgtattttggatgacacagttcatgatgcttctgatatctcacaggctgacggtgtacaacatgaggagcactctagtatctctgatgggagtacagaaaagctaatttctgaggaaagttcattagtatgctatggtgttcccagcaacaaaaaagacttggttaatatagctgttcaagaaagtaaagcctttatcttaaaaaatcctgcctcccaaatcttggaagagagtggtccaggtttggatgtatctacagacagtgtttccctttcacatgcagactcagctcctgatttagcttgtcagcatgtttctcctaatgttgaagatacaacaagttatgagcctggcattggtcctgaagatgtaacaaaaaactcagttgtggaaaatggagcatgcagcggggaacttgttgtttctgttattcagacctcagcgggagatggactgacaaaatgcattgctcatccagctgttttttctaataaaatagaagtagaaggctcaccaacttctgctggattttccagtttgatcagtgttgaagtgcaaaacacaaaactagaagatgacacaaacaaatctagttctgtgattggagatgaagctggttttgtgcctgaggctacagctgagcttgatgaagaagcagaaccagttatatcattatctgaatatacagaagaaattcagtttcaatttagtgatgctgaaaattttgcagatagaaaggccacggatgacatggtggctaacaaaacaacaggtgaagtagaacatgatgaatctgattgtgacacagagaaacaggaagaaggtgatgtaggtcttgtaaatgacttggagaactgttctgcgtcattaaagcctgtgagtagccctgtttctattcctgcaattgacttccagtcaggaaatagtaacagagaggctaaatctctaccaaatctccgttctcatatacatgatcttgaaaggtcttatagttttcagctaagccgctcactgcaatcaactgctgaaaataatggaattgatctagtcaagagcatgaattatgcttttcttgagcagaaatcagaagctattggtgatttttcagaagaaaataacagccctcctgaggttaccaacactgtagcacttgatggcaaccatgctgatgatctgaaagttgatgcgttcattccttttgcagaattatcactatgcagacacctgttatctgaaggcatgggggaggatgctgcttgcagtgcatttgattctgagaaggtaaccttagaggagttccgtaacatgaagcaatcactgatgcgaaacaacaaactagttgttaggattgctggccgctactttccctgggatgctgctgcacctatagtactcggtatgatttctttcagtgaggaacaagtttttgaacccaaaggaatgataaatgtggagcgagttgagcaaagtgcagctccaggtggcagctggagcatctggccatttagtttcagacgaacaaggactattactgctatccagccagtttgtgaaagtattgttgagacttctgtatccactcctaaagaattgacacattttaaagaactagatagagaaaggaataaatccagggtaaagaggattgagaggaaggtgcgatcactcactccaacatctgacgagcttgcatctcttgatctcagagagggcaggaacgtggtaacatttacgttctcaactgcaattgttgggaaacagcaggttgattgccacatatatttatggagatggaatacacgcattgtaatatctgatgtggatggaactatcaccaagaaaatggataccagcttctatttctgagtgcacgcgctatttcacaagcccacatcacaagacagtttcttttcaacctaaagcaggacggcaaagcacttcctgatggccctgttgttatatctccagatggtctcttcccgtcactttacagagaagtcatcagaagagctccgcatgaattcaagatttcgtgtctagaggccatcaaagatttatttccacacgactcaaatccgttttatgctggatttggaaatagagacacagacgagcttagctacctcaagggtgaagtcgcagtgaaccgacgggtcgatacaaagtcgtacacatccttgcatgctcttgtccacgggatgttccctccaatattgtcgtcatctgagcaggaggactacaatgcttggaattactggaagatgccattgcctgatgttgatttgtgaggtacaagtcgagtctgcacaacagcactgcactaattttatgatgtgccgtagtgatcatgagaaggccattacttggttggctacatgtggatgctcctgctcctgatataagttcctgcaagatggaattttgtatatataggatcataatagatgtagtagctatttcttgtgtctcctgttgttgttgttgttgtcgtcgtaggactggaaatcatacctccgtgtgtcctgtaactgaaggtacaaaatttactggatggagggatctgatagtatgttgcagccccccctttttcgtttcatccttgatgtaattgtggtaccgatgtattttgtacaagaacaaatcaataataatgcaatcgaaagcgagctgttcatacgcagacacaacatgttgcattgaccctaggtgcattcggtaactgaaaatcggagctgtgtatactgtggacatgtcatctttggtatg

SEQ ID NO: 42540 - DNA, 4524 bp, Zea Mays
ggaataatcccttcctcggcatccttcggtcccggaatatgcccccggcgtctccctcctcgcgttcctctcgtcggtgagctcctgccgcctggctcgcacagccgatttgcctcagtccagatcgtgcctccttcttcctagatcgggtccgaattcggctaccctcgccaccgccctacgccaggtgccgaggcctccgccgatctcttcgccggcgaagagcggccaccagcttgtggatggaggaggaggcgctgggtcgtggtggtggtgaaaagctttgatttcgtagccgtggtggacgccgctgctaatgcccttgccgtgcctcgttggtggcgtgcaagatgtatgccgtggggaaggtgggcagcctcatctcccgcagcgtgtacaccgtctccggcccgttccacccgttcggcggcgcggtcgacatagtcgttgtgcagcagcaggacggcagcttcaagagctcgccgtggtacgtgcggttcggcaagttccagggggttctcaagtcgagggagaaggttgtcgacatctccgtcaatggcgtcgacgcagggttccacatgtacctggacagcaacggcgaggcttacttcctcaggaacgcggacccgaatggtgaggaaggggagttcattgtctcccccgcctcgtcgggagatgagcgagaggtgccgatccaggaagctcagctgaggaagtcgaagagcacttcgtgtgatagctcgacgatggaagccgacgtcggtgagggcaagattcttgcgaggacaacctcgaggcggataaccatacttgaaaggatgtttggccggaaatcgattaagaacaatgcccatgctgtggatagggtgagttcattggagcgtgcagaggtcgctgcagaactcctagataccaagtggtcaacaaatctcccacgtagttcaaaacctaatggttcaaatgatgagccttccaagagcaacaatgatcagatggaaacctcaaaacctgtattttcggaacatagtttggatcatgggaaagagatggactctaactgtgacaatgctcactgcaattcatgcagccctcgtggaggaagaaacagttcagcagatgaaaccgatccgtgtttacaagccactattgtgaagaaagaggtggttgagatacacgcgcgtgagagcagcgacttcactgataatatcacttcaatcacacatcaacaagggtcagaatcttcgtcaaatgatctgggaacagataaacttatgcagcagtctgtcgatactcaagatgagttgctgcatgatgttgaagatgtaactgaaagggagacacatgcagaggaggttatttccaatgacatttttgaaatccatgttgttgagacagacattacaagtggtaagagcgaggtggattctgagattgttactgtggatccagaaccagatcgagctaaccagaattttacagatacaaattaccaaaattatggcaccacagatatttcatctgaaagacatgaggtttcattgatcccttctgcacaggatgcagttcaagagaaaatagttatcctcagcagttctgaggctgtggagggctcactagatgcagttccagagaaagtagtcattctcagcagttctgagactgtggatagctcatatgctgtgtcctgtattttggatgacacagttcatgatgcttctgatatctcacaggctgacggtgtacaacatgaggagcactctagtatctctgatgggagtacagaaaagctaatttctgaggaaagttcattagtatgctatggtgttcccagcaacaaaaaagacttggttaatatagctgttcaagaaagtaaagcctttatcttaaaaaatcctgcctcccaaatcttggaagagagtggtccaggtttggatgtatctacagacagtgtttccctttcacatgcagactcagctcctgatttagcttgtcagcatgtttctcctaatgttgaagatacaacaagttatgagcctggcattggtcctgaagatgtaacaaaaaactcagttgtggaaaatggagcatgcagcggggaacttgttgtttctgttattcagacctcagcgggagatggactgacaaaatgcattgctcatccagctgttttttctaataaaatagaagtagaaggctcaccaacttctgctggattttccagtttgatcagtgttgaagtgcaaaacacaaaactagaagatgacacaaacaaatctagttctgtgattggagatgaagctggttttgtgcctgaggctacagctgagcttgatgaagaagcagaaccagttatatcattatctgaatatacagaagaaattcagtttcaatttagtgatgctgaaaattttgcagatagaaaggccacggatgacatggtggctaacaaaacaacaggtgaagtagaacatgatgaatctgattgtgacacagagaaacaggaagaaggtgatgtaggtcttgtaaatgacttggagaactgttctgcgtcattaaagcctgtgagtagccctgtttctattcctgcaattgacttccagtcaggaaatagtaacagagaggctaaatctctaccaaatctccgttctcatatacatgatcttgaaaggtcttatagttttcagctaagccgctcactgcaatcaactgctgaaaataatggaattgatctagtcaagagcatgaattatgcttttcttgagcagaaatcagaagctattggtgatttttcagaagaaaataacagccctcctgaggttaccaacactgtagcacttgatggcaaccatgctgatgatctgaaagttgatgcgttcattccttttgcagaattatcactatgcagacacctgttatctgaaggcatgggggaggatgctgcttgcagtgcatttgattctgagaaggtaaccttagaggagttccgtaacatgaagcaatcactgatgcgaaacaacaaactagttgttaggattgctggccgctactttccctgggatgctgctgcacctatagtactcggtatgatttctttcagtgaggaacaagtttttgaacccaaaggaatgataaatgtggagcgagttgagcaaagtgcagctccaggtggcagctggagcatctggccatttagtttcagacgaacaaggactattactgctatccagccagtttgtgaaagtattgttgagacttctgtatccactcctaaagaattgacacattttaaagaactagatagagaaaggaataaatccagggtaaagaggattgagaggaaggtgcgatcactcactccaacatctgacgagcttgcatctcttgatctcagagagggcaggaacgtggtaacatttacgttctcaactgcaattgttgggaaacagcaggttgattgccacatatatttatggagatggaatacacgcattgtaatatctgatgtggatggaactatcaccaagtctgatgttcttgggcagttcatgccactagttggagttgattggtcccaaaacggagttgctcatttattttctgcaataaaggaaaatggataccagcttctatttctgagtgcacgcgctatttcacaagcccacatcacaagacagtttcttttcaacctaaagcaggacggcaaagcacttcctgatggccctgttgttatatctccagatggtctcttcccgtcactttacagagaagtcatcagaagagctccgcatgaattcaagatttcgtgtctagaggccatcaaagatttatttccacacgactcaaatccgttttatgctggatttggaaatagagacacagacgagcttagctacctcaaggttggtattcctatgggcaagatcttcataataaaccccaagggtgaagtcgcagtgaaccgacgggtcgatacaaagtcgtacacatccttgcatgctcttgtccacgggatgttccctccaatattgtcgtcatctgagcaggccagcattcccgaggactacaatgcttggaattactggaagatgccattgcctgatgttgatttgtgaggccattacttggttggctacatgtggatgctcctgctcctgatataagttcctgcaagatggaattttgtatatataggatcataatagatgtagtagctatttcttgtgtctcctgttgttgttgttgttgtcgtcgtaggactggaaatcatacctccgtgtgtcctgtaactgaaggtacaaaatttactggatggagggatctgatagtatgttgcagccccccctttttcgtttcatccttgatgtaattgtggtaccgatgtattttgtacaagaacaaatcaataataatgcaatcgaaagcgagctgttcatacgcagacacaacatgttgcattgaccctaggtgcattcggtaactgaaaatcggagctgtgtatactgtggacatgtcatctttggtatg

SEQ ID NO: 42541 - DNA, 4655 bp, Zea Mays
ctttttccaaaaaggataaaaatggctattcgagggaagtaaaataagtgagccggtggaataatcccttcctcggcatccttcggtcccggaatatgcccccggcgtctccctcctcgcgttcctctcgtcggtgagctcctgccgcctggctcgcacagccgatttgcctcagtccagatcgtgcctccttcttcctagatcgggtccgaattcggctaccctcgccaccgccctacgccaggtgccgaggcctccgccgatctcttcgccggcgaagagcggccaccagaattctggtggttcctgtagcttgtggatggaggaggaggcgctgggtcgtggtggtggtgaaaagctttgatttcgtagccgtggtggacgccgctgctaatgcccttgccgtgcctcgttggtggcgtgcaagatgtatgccgtggggaaggtgggcagcctcatctcccgcagcgtgtacaccgtctccggcccgttccacccgttcggcggcgcggtcgacatagtcgttgtgcagcagcaggacggcagcttcaagagctcgccgtggtacgtgcggttcggcaagttccagggggttctcaagtcgagggagaaggttgtcgacatctccgtcaatggcgtcgacgcagggttccacatgtacctggacagcaacggcgaggcttacttcctcaggaacgcggacccgaatggtgaggaaggggagttcattgtctcccccgcctcgtcgggagatgagcgagaggtgccgatccaggaagctcagctgaggaagtcgaagagcacttcgtgtgatagctcgacgatggaagccgacgtcggtgagggcaagattcttgcgaggacaacctcgaggcggataaccatacttgaaaggatgtttggccggaaatcgattaagaacaatgcccatgctgtggatagggtgagttcattggagcgtgcagaggtcgctgcagaactcctagataccaagtggtcaacaaatctcccacgtagttcaaaacctaatggttcaaatgatgagccttccaagagcaacaatgatcagatggaaacctcaaaacctgtattttcggaacatagtttggatcatgggaaagagatggactctaactgtgacaatgctcactgcaattcatgcagccctcgtggaggaagaaacagttcagcagatgaaaccgatccgtgtttacaagccactattgtgaagaaagaggtggttgagatacacgcgcgtgagagcagcgacttcactgataatatcacttcaatcacacatcaacaagggtcagaatcttcgtcaaatgatctgggaacagataaacttatgcagcagtctgtcgatactcaagatgagttgctgcatgatgttgaagatgtaactgaaagggagacacatgcagaggaggttatttccaatgacatttttgaaatccatgttgttgagacagacattacaagtggtaagagcgaggtggattctgagattgttactgtggatccagaaccagatcgagctaaccagaattttacagatacaaattaccaaaattatggcaccacagatatttcatctgaaagacatgaggtttcattgatcccttctgcacaggatgcagttcaagagaaaatagttatcctcagcagttctgaggctgtggagggctcactagatgcagttccagagaaagtagtcattctcagcagttctgagactgtggatagctcatatgctgtgtcctgtattttggatgacacagttcatgatgcttctgatatctcacaggctgacggtgtacaacatgaggagcactctagtatctctgatgggagtacagaaaagctaatttctgaggaaagttcattagtatgctatggtgttcccagcaacaaaaaagacttggttaatatagctgttcaagaaagtaaagcctttatcttaaaaaatcctgcctcccaaatcttggaagagagtggtccaggtttggatgtatctacagacagtgtttccctttcacatgcagactcagctcctgatttagcttgtcagcatgtttctcctaatgttgaagatacaacaagttatgagcctggcattggtcctgaagatgtaacaaaaaactcagttgtggaaaatggagcatgcagcggggaacttgttgtttctgttattcagacctcagcgggagatggactgacaaaatgcattgctcatccagctgttttttctaataaaatagaagtagaaggctcaccaacttctgctggattttccagtttgatcagtgttgaagtgcaaaacacaaaactagaagatgacacaaacaaatctagttctgtgattggagatgaagctggttttgtgcctgaggctacagctgagcttgatgaagaagcagaaccagttatatcattatctgaatatacagaagaaattcagtttcaatttagtgatgctgaaaattttgcagatagaaaggccacggatgacatggtggctaacaaaacaacaggtgaagtagaacatgatgaatctgattgtgacacagagaaacaggaagaaggtgatgtaggtcttgtaaatgacttggagaactgttctgcgtcattaaagcctgtgagtagccctgtttctattcctgcaattgacttccagtcaggaaatagtaacagagaggctaaatctctaccaaatctccgttctcatatacatgatcttgaaaggtcttatagttttcagctaagccgctcactgcaatcaactgctgaaaataatggaattgatctagtcaagagcatgaattatgcttttcttgagcagaaatcagaagctattggtgatttttcagaagaaaataacagccctcctgaggttaccaacactgtagcacttgatggcaaccatgctgatgatctgaaagttgatgcgttcattccttttgcagaattatcactatgcagacacctgttatctgaaggcatgggggaggatgctgcttgcagtgcatttgattctgagaaggtaaccttagaggagttccgtaacatgaagcaatcactgatgcgaaacaacaaactagttgttaggattgctggccgctactttccctgggatgctgctgcacctatagtactcggtatgatttctttcagtgaggaacaagtttttgaacccaaaggaatgataaatgtggagcgagttgagcaaagtgcagctccaggtggcagctggagcatctggccatttagtttcagacgaacaaggactattactgctatccagccagtttgtgaaagtattgttgagacttctgtatccactcctaaagaattgacacattttaaagaactagatagagaaaggaataaatccagggtaaagaggattgagaggaaggtgcgatcactcactccaacatctgacgagcttgcatctcttgatctcagagagggcaggaacgtggtaacatttacgttctcaactgcaattgttgggaaacagcaggttgattgccacatatatttatggagatggaatacacgcattgtaatatctgatgtggatggaactatcaccaagtctgatgttcttgggcagttcatgccactagttggagttgattggtcccaaaacggagttgctcatttattttctgcaataaaggaaaatggataccagcttctatttctgagtgcacgcgctatttcacaagcccacatcacaagacagtttcttttcaacctaaagcaggacggcaaagcacttcctgatggccctgttgttatatctccagatggtctcttcccgtcactttacagagaagtcatcagaagagctccgcatgaattcaagatttcgtgtctagaggccatcaaagatttatttccacacgactcaaatccgttttatgctggatttggaaatagagacacagacgagcttagctacctcaaggttggtattcctatgggcaagatcttcataataaaccccaagggtgaagtcgcagtgaaccgacgggtcgatacaaagtcgtacacatccttgcatgctcttgtccacgggatgttccctccaatattgtcgtcatctgagcaggaggactacaatgcttggaattactggaagatgccattgcctgatgttgatttgtgaggtacaagtcgagtctgcacaacagcactgcactaattttatgatgtgccgtagtgatcatgagaaggccattacttggttggctacatgtggatgctcctgctcctgatataagttcctgcaagatggaattttgtatatataggatcataatagatgtagtagctatttcttgtgtctcctgttgttgttgttgttgtcgtcgtaggactggaaatcatacctccgtgtgtcctgtaactgaaggtacaaaatttactggatggagggatctgatagtatgttgcagccccccctttttcgtttcatccttgatgtaattgtggtaccgatgtattttgtacaagaacaaatcaataataatgcaatcgaaagcgagctgttcatacgcagacacaacatgttgcattgaccctaggtgcattcggtaactgaaaatcggagctgtgtatactgtggacatgtcatctttggtatg

SEQ ID NO: 42542 - DNA, 4449 bp, Zea Mays
atgttcttttcctcctttttattttcttttctttttccaaaaaggataaaaatggctattcgagggaagtaaaataagtgagccggtggaataatcccttcctcggcatccttcggtcccggaatatgcccccggcgtctccctcctcgcgttcctctcgtcggtgagctcctgccgcctggctcgcacagccgatttgcctcagtccagatcgtgcctccttcttcctagatcgggtccgaattcggctaccctcgccaccgccctacgccaggtgccgaggcctccgccgatctcttcgccggcgaagagcggccaccagcttgtggatggaggaggaggcgctgggtcgtggtggtggtgaaaagctttgatttcgtagccgtggtggacgccgctgctaatgcccttgccgtgcctcgttggtggcgtgcaagatgtatgccgtggggaaggtgggcagcctcatctcccgcagcgtgtacaccgtctccggcccgttccacccgttcggcggcgcggtcgacatagtcgttgtgcagcagcaggacggcagcttcaagagctcgccgtggtacgtgcggttcggcaagttccagggggttctcaagtcgagggagaaggttgtcgacatctccgtcaatggcgtcgacgcagggttccacatgtacctggacagcaacggcgaggcttacttcctcaggaacgcggacccgaatggtgaggaaggggagttcattgtctcccccgcctcgtcgggagatgagcgagaggtgccgatccaggaagctcagctgaggaagtcgaagagcacttcgtgtgatagctcgacgatggaagccgacgtcggtgagggcaagattcttgcgaggacaacctcgaggcggataaccatacttgaaaggatgtttggccggaaatcgattaagaacaatgcccatgctgtggatagggtgagttcattggagcgtgcagaggtcgctgcagaactcctagataccaagtggtcaacaaatctcccacgtagttcaaaacctaatggttcaaatgatgagccttccaagagcaacaatgatcagatggaaacctcaaaacctgtattttcggaacatagtttggatcatgggaaagagatggactctaactgtgacaatgctcactgcaattcatgcagccctcgtggaggaagaaacagttcagcagatgaaaccgatccgtgtttacaagccactattgtgaagaaagaggtggttgagatacacgcgcgtgagagcagcgacttcactgataatatcacttcaatcacacatcaacaagggtcagaatcttcgtcaaatgatctgggaacagataaacttatgcagcagtctgtcgatactcaagatgagttgctgcatgatgttgaagatgtaactgaaagggagacacatgcagaggaggttatttccaatgacatttttgaaatccatgttgttgagacagacattacaagtggtaagagcgaggtggattctgagattgttactgtggatccagaaccagatcgagctaaccagaattttacagatacaaattaccaaaattatggcaccacagatatttcatctgaaagacatgaggtttcattgatcccttctgcacaggatgcagttcaagagaaaatagttatcctcagcagttctgaggctgtggagggctcactagatgcagttccagagaaagtagtcattctcagcagttctgagactgtggatagctcatatgctgtgtcctgtattttggatgacacagttcatgatgcttctgatatctcacaggctgacggtgtacaacatgaggagcactctagtatctctgatgggagtacagaaaagctaatttctgaggaaagttcattagtatgctatggtgttcccagcaacaaaaaagacttggttaatatagctgttcaagaaagtaaagcctttatcttaaaaaatcctgcctcccaaatcttggaagagagtggtccaggtttggatgtatctacagacagtgtttccctttcacatgcagactcagctcctgatttagcttgtcagcatgtttctcctaatgttgaagatacaacaagttatgagcctggcattggtcctgaagatgtaacaaaaaactcagttgtggaaaatggagcatgcagcggggaacttgttgtttctgttattcagacctcagcgggagatggactgacaaaatgcattgctcatccagctgttttttctaataaaatagaagtagaaggctcaccaacttctgctggattttccagtttgatcagtgttgaagtgcaaaacacaaaactagaagatgacacaaacaaatctagttctgtgattggagatgaagctggttttgtgcctgaggctacagctgagcttgatgaagaagcagaaccagttatatcattatctgaatatacagaagaaattcagtttcaatttagtgatgctgaaaattttgcagatagaaaggccacggatgacatggtggctaacaaaacaacaggtgaagtagaacatgatgaatctgattgtgacacagagaaacaggaagaaggtgatgtaggtcttgtaaatgacttggagaactgttctgcgtcattaaagcctgtgagtagccctgtttctattcctgcaattgacttccagtcaggaaatagtaacagagaggctaaatctctaccaaatctccgttctcatatacatgatcttgaaaggtcttatagttttcagctaagccgctcactgcaatcaactgctgaaaataatggaattgatctagtcaagagcatgaattatgcttttcttgagcagaaatcagaagctattggtgatttttcagaagaaaataacagccctcctgaggttaccaacactgtagcacttgatggcaaccatgctgatgatctgaaagttgatgcgttcattccttttgcagaattatcactatgcagacacctgttatctgaaggcatgggggaggatgctgcttgcagtgcatttgattctgagaagtgaggaacaagtttttgaacccaaaggaatgataaatgtggagcgagttgagcaaagtgcagctccaggtggcagctggagcatctggccatttagtttcagacgaacaaggactattactgctatccagccagtttgtgaaagtattgttgagacttctgtatccactcctaaagaattgacacattttaaagaactagatagagaaaggaataaatccagggtaaagaggattgagaggaaggtgcgatcactcactccaacatctgacgagcttgcatctcttgatctcagagagggcaggaacgtggtaacatttacgttctcaactgcaattgttgggaaacagcaggttgattgccacatatatttatggagatggaatacacgcattgtaatatctgatgtggatggaactatcaccaagaaaatggataccagcttctatttctgagtgcacgcgctatttcacaagcccacatcacaagacagtttcttttcaacctaaagcaggacggcaaagcacttcctgatggccctgttgttatatctccagatggtctcttcccgtcactttacagagaagtcatcagaagagctccgcatgaattcaagatttcgtgtctagaggccatcaaagatttatttccacacgactcaaatccgttttatgctggatttggaaatagagacacagacgagcttagctacctcaaggttggtattcctatgggcaagatcttcataataaaccccaagggtgaagtcgcagtgaaccgacgggtcgatacaaagtcgtacacatccttgcatgctcttgtccacgggatgttccctccaatattgtcgtcatctgagcaggaggactacaatgcttggaattactggaagatgccattgcctgatgttgatttgtgaggtacaagtcgagtctgcacaacagcactgcactaattttatgatgtgccgtagtgatcatgagaaggccattacttggttggctacatgtggatgctcctgctcctgatataagttcctgcaagatggaattttgtatatataggatcataatagatgtagtagctatttcttgtgtctcctgttgttgttgttgttgtcgtcgtaggactggaaatcatacctccgtgtgtcctgtaactgaaggtacaaaatttactggatggagggatctgatagtatgttgcagccccccctttttcgtttcatccttgatgtaattgtggtaccgatgtattttgtacaagaacaaatcaataataatgcaatcgaaagcgagctgttcatacgcagacacaacatgttgcattgaccctaggtgcattcggtaactgaaaatcggagctgtgtatactgtggacatgtcatctttggtatg

SEQ ID NO: 42543 - DNA, 5363 bp, Zea Mays
cgcacaataagcatgtttatctgcaactccatatgtataccaagataaagtttcgtgtgacctctaatgttcttttcctcctttttattttcttttctttttccaaaaaggataaaaatggctattcgagggaagtaaaataagtgagccggtggaataatcccttcctcggcatccttcggtcccggaatatgcccccggcgtctccctcctcgcgttcctctcgtcggtgagctcctgccgcctggctcgcacagccgatttgcctcagtccagatcgtgcctccttcttcctagatcgggtccgaattcggctaccctcgccaccgccctacgccaggtgccgaggcctccgccgatctcttcgccggcgaagagcggccaccagcttgtggatggaggaggaggcgctgggtcgtggtggtggtgaaaagctttgatttcgtagccgtggtggacgccgctgctaatgcccttgccgtgcctcgttggtggcgtgcaagatgtatgccgtggggaaggtgggcagcctcatctcccgcagcgtgtacaccgtctccggcccgttccacccgttcggcggcgcggtcgacatagtcgttgtgcagcagcaggacggcagcttcaagagctcgccgtggtacgtgcggttcggcaagttccagggggttctcaagtcgagggagaaggttgtcgacatctccgtcaatggcgtcgacgcagggttccacatgtacctggacagcaacggcgaggcttacttcctcaggaacgcggacccgaatggtgaggaaggggagttcattgtctcccccgcctcgtcgggagatgagcgagaggtgccgatccaggaagctcagctgaggaagtcgaagagcacttcgtgtgatagctcgacgatggaagccgacgtcggtgagggcaagattcttgcgaggacaacctcgaggcggataaccatacttgaaaggatgtttggccggaaatcgattaagaacaatgcccatgctgtggatagggtgagttcattggagcgtgcagaggtcgctgcagaactcctagataccaagtggtcaacaaatctcccacgtagttcaaaacctaatggttcaaatgatgagccttccaagagcaacaatgatcagatggaaacctcaaaacctgtattttcggaacatagtttggatcatgggaaagagatggactctaactgtgacaatgctcactgcaattcatgcagccctcgtggaggaagaaacagttcagcagatgaaaccgatccgtgtttacaagccactattgtgaagaaagaggtggttgagatacacgcgcgtgagagcagcgacttcactgataatatcacttcaatcacacatcaacaagggtcagaatcttcgtcaaatgatctgggaacagataaacttatgcagcagtctgtcgatactcaagatgagttgctgcatgatgttgaagatgtaactgaaagggagacacatgcagaggaggttatttccaatgacatttttgaaatccatgttgttgagacagacattacaagtggtaagagcgaggtggattctgagattgttactgtggatccagaaccagatcgagctaaccagaattttacagatacaaattaccaaaattatggcaccacagatatttcatctgaaagacatgaggtttcattgatcccttctgcacaggatgcagttcaagagaaaatagttatcctcagcagttctgaggctgtggagggctcactagatgcagttccagagaaagtagtcattctcagcagttctgagactgtggatagctcatatgctgtgtcctgtattttggatgacacagttcatgatgcttctgatatctcacaggctgacggtgtacaacatgaggagcactctagtatctctgatgggagtacagaaaagctaatttctgaggaaagttcattagtatgctatggtgttcccagcaacaaaaaagacttggttaatatagctgttcaagaaagtaaagcctttatcttaaaaaatcctgcctcccaaatcttggaagagagtggtccaggtttggatgtatctacagacagtgtttccctttcacatgcagactcagctcctgatttagcttgtcagcatgtttctcctaatgttgaagatacaacaagttatgagcctggcattggtcctgaagatgtaacaaaaaactcagttgtggaaaatggagcatgcagcggggaacttgttgtttctgttattcagacctcagcgggagatggactgacaaaatgcattgctcatccagctgttttttctaataaaatagaagtagaaggctcaccaacttctgctggattttccagtttgatcagtgttgaagtgcaaaacacaaaactagaagatgacacaaacaaatctagttctgtgattggagatgaagctggttttgtgcctgaggctacagctgagcttgatgaagaagcagaaccagttatatcattatctgaatatacagaagaaattcagtttcaatttagtgatgctgaaaattttgcagatagaaaggccacggatgacatggtggctaacaaaacaacaggtgaagtagaacatgatgaatctgattgtgacacagagaaacaggaagaaggtgatgtaggtcttgtaaatgacttggagaactgttctgcgtcattaaagcctgtgagtagccctgtttctattcctgcaattgacttccagtcaggaaatagtaacagagaggctaaatctctaccaaatctccgttctcatatacatgatcttgaaaggtcttatagttttcagctaagccgctcactgcaatcaactgctgaaaataatggaattgatctagtcaagagcatgaattatgcttttcttgagcagaaatcagaagctattggtgatttttcagaagaaaataacagccctcctgaggttaccaacactgtagcacttgatggcaaccatgctgatgatctgaaagttgatgcgttcattccttttgcagaattatcactatgcagacacctgttatctgaaggcatgggggaggatgctgcttgcagtgcatttgattctgagaaggtaaccttagaggagttccgtaacatgaagcaatcactgatgcgaaacaacaaactagttgttaggattgctggccgctactttccctgggatgctgctgcacctatagtactcggtatgatttctttcagtgaggaacaagtttttgaacccaaaggaatgataaatgtggagcgagttgagcaaagtgcagctccaggtggcagctggagcatctggccatttagtttcagacgaacaaggactattactgctatccagccagtttgtgaaagtattgttgagacttctgtatccactcctaaagaattgacacattttaaagaactagatagagaaaggaataaatccagggtaaagaggattgagaggaaggtgcgatcactcactccaacatctgacgagcttgcatctcttgatctcagagagggcaggaacgtggtaacatttacgttctcaactgcaattgttgggaaacagcaggttgattgccacatatatttatggagatggaatacacgcattgtaatatctgatgtggatggaactatcaccaagtctgatgttcttgggcagttcatgccactagttggagttgattggtcccaaaacggagttgctcatttattttctgcaataaaggaaaatggataccagcttctatttctgagtgcacgcgctatttcacaagcccacatcacaagacagtttcttttcaacctaaagcaggacggcaaagcacttcctgatggccctgttgttatatctccagatggtctcttcccgtcactttacagagaaggtgagcacatcctgatatgtttttgctattttctattcagttaattgtcagtcagcaaaaagagtagaagacacaaaataacttatctccactgaaaaatgttgcattcattacctctaatattgacttgggttcacatgagtaaactgggtgttgctagccttctaataaactctgtttggtaagcataacagcaccactctttttggttttggaccccctcaaccattgttggataagaggcccatttctttttagcaggtctatgataagtgcacataatacgattatgttgacataaaaagcattccctccttttcaaaatataaggcatgttagagtttaaaaaaccaaaaaaaaagtctaaactttggccatcaatttgtcaaagcatatgtacatttagcgtacataagatgcattgacatatttgtacatttgcttgtcttttattaagatgttgctttgtagtagttgctagtacaagaaattaatggtcaaattatgtattgaaagacttccataaatcctaatacgccttataagaagaaacagagggagtatctctggtaacgactttatgttagctacatgtttgagtgatgctaatgtttcatgacattggtttgtagtcatcagaagagctccgcatgaattcaagatttcgtgtctagaggccatcaaagatttatttccacacgactcaaatccgttttatgctggatttggaaatagagacacagacgagcttagctacctcaaggttggtattcctatgggcaagatcttcataataaaccccaagggtgaagtcgcagtgaaccgacgggtcgatacaaagtcgtacacatccttgcatgctcttgtccacgggatgttccctccaatattgtcgtcatctgagcaggaggactacaatgcttggaattactggaagatgccattgcctgatgttgatttgtgaggtacaagtcgagtctgcacaacagcactgcactaattttatgatgtgccgtagtgatcatgagaaggccattacttggttggctacatgtggatgctcctgctcctgatataagttcctgcaagatggaattttgtatatataggatcataatagatgtagtagctatttcttgtgtctcctgttgttgttgttgttgtcgtcgtaggactggaaatcatacctccgtgtgtcctgtaactgaaggtacaaaatttactggatggagggatctgatagtatgttgcagccccccctttttcgtttcatccttgatgtaattgtggtaccgatgtattttgtacaagaacaaatcaataataatgcaatcgaaagcgagctgttcatacgcagacacaacatgttgcattgaccctaggtgcattcggtaactgaaaatcggagctgtgtatactgtggacatgtcatctttggtatg

SEQ ID NO: 42544 - DNA, 4200 bp, Zea Mays
ccttcctcggcatccttcggtcccggaatatgcccccggcgtctccctcctcgcgttcctctcgtcggtgagctcctgccgcctggctcgcacagccgatttgcctcagtccagatcgtgcctccttcttcctagatcgggtccgaattcggctaccctcgccaccgccctacgccaggtgccgaggcctccgccgatctcttcgccggcgaagagcggccaccagcttgtggatggaggaggaggcgctgggtcgtggtggtggtgaaaagctttgatttcgtagccgtggtggacgccgctgctaatgcccttgccgtgcctcgttggtggcgtgcaagatgtatgccgtggggaaggtgggcagcctcatctcccgcagcgtgtacaccgtctccggcccgttccacccgttcggcggcgcggtcgacatagtcgttgtgcagcagcaggacggcagcttcaagagctcgccgtggtacgtgcggttcggcaagttccagggggttctcaagtcgagggagaaggttgtcgacatctccgtcaatggcgtcgacgcagggttccacatgtacctggacagcaacggcgaggcttacttcctcaggaacgcggacccgaatggtgaggaaggggagttcattgtctcccccgcctcgtcgggagatgagcgagaggtgccgatccaggaagctcagctgaggaagtcgaagagcacttcgtgtgatagctcgacgatggaagccgacgtcggtgagggcaagattcttgcgaggacaacctcgaggcggataaccatacttgaaaggatgtttggccggaaatcgattaagaacaatgcccatgctgtggatagggtgagttcattggagcgtgcagaggtcgctgcagaactcctagataccaagtggtcaacaaatctcccacgtagttcaaaacctaatggttcaaatgatgagccttccaagagcaacaatgatcagatggaaacctcaaaacctgtattttcggaacatagtttggatcatgggaaagagatggactctaactgtgacaatgctcactgcaattcatgcagccctcgtggaggaagaaacagttcagcagatgaaaccgatccgtgtttacaagccactattgtgaagaaagaggtggttgagatacacgcgcgtgagagcagcgacttcactgataatatcacttcaatcacacatcaacaagggtcagaatcttcgtcaaatgatctgggaacagataaacttatgcagcagtctgtcgatactcaagatgagttgctgcatgatgttgaagatgtaactgaaagggagacacatgcagaggaggttatttccaatgacatttttgaaatccatgttgttgagacagacattacaagtggtaagagcgaggtggattctgagattgttactgtggatccagaaccagatcgagctaaccagaattttacagatacaaattaccaaaattatggcaccacagatatttcatctgaaagacatgaggtttcattgatcccttctgcacaggatgcagttcaagagaaaatagttatcctcagcagttctgaggctgtggagggctcactagatgcagttccagagaaagtagtcattctcagcagttctgagactgtggatagctcatatgctgtgtcctgtattttggatgacacagttcatgatgcttctgatatctcacaggctgacggtgtacaacatgaggagcactctagtatctctgatgggagtacagaaaagctaatttctgaggaaagttcattagtatgctatggtgttcccagcaacaaaaaagacttggttaatatagctgttcaagaaagtaaagcctttatcttaaaaaatcctgcctcccaaatcttggaagagagtggtccaggtttggatgtatctacagacagtgtttccctttcacatgcagactcagctcctgatttagcttgtcagcatgtttctcctaatgttgaagatacaacaagttatgagcctggcattggtcctgaagatgtaacaaaaaactcagttgtggaaaatggagcatgcagcggggaacttgttgtttctgttattcagacctcagcgggagatggactgacaaaatgcattgctcatccagctgttttttctaataaaatagaagtagaaggctcaccaacttctgctggattttccagtttgatcagtgttgaagtgcaaaacacaaaactagaagatgacacaaacaaatctagttctgtgattggagatgaagctggttttgtgcctgaggctacagctgagcttgatgaagaagcagaaccagttatatcattatctgaatatacagaagaaattcagtttcaatttagtgatgctgaaaattttgcagatagaaaggccacggatgacatggtggctaacaaaacaacaggtgaagtagaacatgatgaatctgattgtgacacagagaaacaggaagaaggtgatgtaggtcttgtaaatgacttggagaactgttctgcgtcattaaagcctgtgagtagccctgtttctattcctgcaattgacttccagtcaggaaatagtaacagagaggctaaatctctaccaaatctccgttctcatatacatgatcttgaaaggtcttatagttttcagctaagccgctcactgcaatcaactgctgaaaataatggaattgatctagtcaagagcatgaattatgcttttcttgagcagaaatcagaagctattggtgatttttcagaagaaaataacagccctcctgaggttaccaacactgtagcacttgatggcaaccatgctgatgatctgaaagttgatgcgttcattccttttgcagaattatcactatgcagacacctgttatctgaaggcatgggggaggatgctgcttgcagtgcatttgattctgagaaggtaaccttagaggagttccgtaacatgaagcaatcactgatgcgaaacaacaaactagttgttaggattgctggccgctactttccctgggatgctgctgcacctatagtactcggtatgatttctttcagtgaggaacaagtttttgaacccaaaggaatgataaatgtggagcgagttgagcaaagtgcagctccaggtggcagctggagcatctggccatttagtttcagacgaacaaggactattactgctatccagccagtttgtgaaagtattgttgagacttctgtatccactcctaaagaattgacacattttaaagaactagatagagaaaggaataaatccagggtaaagaggattgagaggaaggtgcgatcactcactccaacatctgacgagcttgcatctcttgatctcagagagggcaggaacgtggtaacatttacgttctcaactgcaattgttgggaaacagcaggttgattgccacatatatttatggagatggaatacacgcattgtaatatctgatgtggatggaactatcaccaagtctgatgttcttgggcagttcatgccactagttggagttgattggtcccaaaacggagttgctcatttattttctgcaataaaggaaaatggataccagcttctatttctgagtgcacgcgctatttcacaagcccacatcacaagacagtttcttttcaacctaaagcaggacggcaaagcacttcctgatggccctgttgttatatctccagatggtctcttcccgtcactttacagagaagtcatcagaagagctccgcatgaattcaagatttcgtgtctagaggccatcaaagatttatttccacacgactcaaatccgttttatgctggatttggaaatagagacacagacgagcttagctacctcaaggttggtattcctatgggcaagatcttcataataaaccccaagggtgaagtcgcagtgaaccgacgggtcgatacaaagtcgtacacatccttgcatgctcttgtccacgggatgttccctccaatattgtcgtcatctgagcaggccagcattcccgaggactacaatgcttggaattactggaagatgccattgcctgatgttgatttgtgaggtacaagtcgagtctgcacaacagcactgcactaattttatgatgtgccgtagtgatcatgagaagatgtttggtgcatcggccacctatttctgc

SEQ ID NO: 42545 - DNA, 4316 bp, Zea Mays
ccttcctcggcatccttcggtcccggaatatgcccccggcgtctccctcctcgcgttcctctcgtcggtgagctcctgccgcctggctcgcacagccgatttgcctcagtccagatcgtgcctccttcttcctagatcgggtccgaattcggctaccctcgccaccgccctacgccaggtgccgaggcctccgccgatctcttcgccggcgaagagcggccaccagaattctggtggttcctgtagcttgtggatggaggaggaggcgctgggtcgtggtggtggtgaaaagctttgatttcgtagccgtggtggacgccgctgctaatgcccttgccgtgcctcgttggtggcgtgcaagatgtatgccgtggggaaggtgggcagcctcatctcccgcagcgtgtacaccgtctccggcccgttccacccgttcggcggcgcggtcgacatagtcgttgtgcagcagcaggacggcagcttcaagagctcgccgtggtacgtgcggttcggcaagttccagggggttctcaagtcgagggagaaggttgtcgacatctccgtcaatggcgtcgacgcagggttccacatgtacctggacagcaacggcgaggcttacttcctcaggaacgcggacccgaatggtgaggaaggggagttcattgtctcccccgcctcgtcgggagatgagcgagaggtgccgatccaggaagctcagctgaggaagtcgaagagcacttcgtgtgatagctcgacgatggaagccgacgtcggtgagggcaagattcttgcgaggacaacctcgaggcggataaccatacttgaaaggatgtttggccggaaatcgattaagaacaatgcccatgctgtggatagggtgagttcattggagcgtgcagaggtcgctgcagaactcctagataccaagtggtcaacaaatctcccacgtagttcaaaacctaatggttcaaatgatgagccttccaagagcaacaatgatcagatggaaacctcaaaacctgtattttcggaacatagtttggatcatgggaaagagatggactctaactgtgacaatgctcactgcaattcatgcagccctcgtggaggaagaaacagttcagcagatgaaaccgatccgtgtttacaagccactattgtgaagaaagaggtggttgagatacacgcgcgtgagagcagcgacttcactgataatatcacttcaatcacacatcaacaagggtcagaatcttcgtcaaatgatctgggaacagataaacttatgcagcagtctgtcgatactcaagatgagttgctgcatgatgttgaagatgtaactgaaagggagacacatgcagaggaggttatttccaatgacatttttgaaatccatgttgttgagacagacattacaagtggtaagagcgaggtggattctgagattgttactgtggatccagaaccagatcgagctaaccagaattttacagatacaaattaccaaaattatggcaccacagatatttcatctgaaagacatgaggtttcattgatcccttctgcacaggatgcagttcaagagaaaatagttatcctcagcagttctgaggctgtggagggctcactagatgcagttccagagaaagtagtcattctcagcagttctgagactgtggatagctcatatgctgtgtcctgtattttggatgacacagttcatgatgcttctgatatctcacaggctgacggtgtacaacatgaggagcactctagtatctctgatgggagtacagaaaagctaatttctgaggaaagttcattagtatgctatggtgttcccagcaacaaaaaagacttggttaatatagctgttcaagaaagtaaagcctttatcttaaaaaatcctgcctcccaaatcttggaagagagtggtccaggtttggatgtatctacagacagtgtttccctttcacatgcagactcagctcctgatttagcttgtcagcatgtttctcctaatgttgaagatacaacaagttatgagcctggcattggtcctgaagatgtaacaaaaaactcagttgtggaaaatggagcatgcagcggggaacttgttgtttctgttattcagacctcagcgggagatggactgacaaaatgcattgctcatccagctgttttttctaataaaatagaagtagaaggctcaccaacttctgctggattttccagtttgatcagtgttgaagtgcaaaacacaaaactagaagatgacacaaacaaatctagttctgtgattggagatgaagctggttttgtgcctgaggctacagctgagcttgatgaagaagcagaaccagttatatcattatctgaatatacagaagaaattcagtttcaatttagtgatgctgaaaattttgcagatagaaaggccacggatgacatggtggctaacaaaacaacaggtgaagtagaacatgatgaatctgattgtgacacagagaaacaggaagaaggtgatgtaggtcttgtaaatgacttggagaactgttctgcgtcattaaagcctgtgagtagccctgtttctattcctgcaattgacttccagtcaggaaatagtaacagagaggctaaatctctaccaaatctccgttctcatatacatgatcttgaaaggtcttatagttttcagctaagccgctcactgcaatcaactgctgaaaataatggaattgatctagtcaagagcatgaattatgcttttcttgagcagaaatcagaagctattggtgatttttcagaagaaaataacagccctcctgaggttaccaacactgtagcacttgatggcaaccatgctgatgatctgaaagttgatgcgttcattccttttgcagaattatcactatgcagacacctgttatctgaaggcatgggggaggatgctgcttgcagtgcatttgattctgagaaggtaaccttagaggagttccgtaacatgaagcaatcactgatgcgaaacaacaaactagttgttaggattgctggccgctactttccctgggatgctgctgcacctatagtactcggtatgatttctttcagtgaggaacaagtttttgaacccaaaggaatgataaatgtggagcgagttgagcaaagtgcagctccaggtggcagctggagcatctggccatttagtttcagacgaacaaggactattactgctatccagccagtttgtgaaagtattgttgagacttctgtatccactcctaaagaattgacacattttaaagaactagatagagaaaggaataaatccagggtaaagaggattgagaggaaggtgcgatcactcactccaacatctgacgagcttgcatctcttgatctcagagagggcaggaacgtggtaacatttacgttctcaactgcaattgttgggaaacagcaggttgattgccacatatatttatggagatggaatacacgcattgtaatatctgatgtggatggaactatcaccaagtctgatgttcttgggcagttcatgccactagttggagttgattggtcccaaaacggagttgctcatttattttctgcaataaaggaaaatggataccagcttctatttctgagtgcacgcgctatttcacaagcccacatcacaagacagtttcttttcaacctaaagcaggacggcaaagcacttcctgatggccctgttgttatatctccagatggtctcttcccgtcactttacagagaagtcatcagaagagctccgcatgaattcaagatttcgtgtctagaggccatcaaagatttatttccacacgactcaaatccgttttatgctggatttggaaatagagacacagacgagcttagctacctcaaggttggtattcctatgggcaagatcttcataataaaccccaagggtgaagtcgcagtgaaccgacgggtcgatacaaagtcgtacacatccttgcatgctcttgtccacgggatgttccctccaatattgtcgtcatctgagcaggccagcattcccgtatagtatttgtcagcagttcaagtgtgctttacacgttttattgcaattgcctttattttttggtcctgatggcaagttcttggtcgaattcaggaggactacaatgcttggaattactggaagatgccattgcctgatgttgatttgtgaggtacaagtcgagtctgcacaacagcactgcactaattttatgatgtgccgtagtgatcatgagaagatgtttggtgcatcggccacctatttctgc

SEQ ID NO: 42546 - DNA, 1602 bp, Zea Mays
agcgctgactcgtcgattagcattattagcagtttagcactagcgcctacggccctctcacctcgcctgctcgctacacgtccccagaaaagataccccagcacgcacacaccacgcgcccgcggccccgcgccggcgcaccaacacacccggccatcttctcccccttccctcccaattcaaggcggcccggaagctcctgcagccttccggaagggcttcgaggccgaggcgggcacgggatgtgggggcggcactactggggcggcggccggcgcccaagctgggcgcccggagggaacggagccggcaccggcggcgtggtggtgatgttcgcgtggctgtccagccaggagcggcacgtgcgggcgtacgtggagctgtacgcggcgcacgggtgggcgtgcctcgtctgccactccgacttcctcaccctgtttttccctgagaaggctgccatgctcgccgacagggtgattggggagcttgtcaaggtgctgaagattacacctgtacctgttgtgtttgcgtcgttttcgggagggccaaaagggtgcacatacaaggttcttcagctgatcgagagaagatgtgaagggcaactaagcatggatgagtaccagctcgtacgagattgtctatgcggacaaatgtatgattcaagccctgtggattttgtcagtgacttgggcactcgcttcctcctcgatccaagtgtcctgaagatgtctgaacctcctcgtgtcttgtcatggatgactaagggcattgcctcaggtcttgatgttcttttcataaacaaatttgaagaacaacgtaaagattattgggaaacactatactcatcggtgcattttggtccaatactaatactctgctcagaggatgatcaacttgctacatattcagttgttcaaaattttggccagcatctgctagagcttggtggtgatgtgagcctaattaaatggcatagttctccgcatgtcggccactacaagcatcatcctgaggaatacagagctgctgtgacggagctcctaaagaaagcctcgacgctctacgcgagcagacgacaactcaacggacacgccgtgggcacaagcgagcacaccgacgcgcccgcgcctgcatccacctccaagtccaacccacacagagatgccgcgagctctgtcggtcgtagcagccaaggtccgccgcagccggagctgttgagcatgccgggcgtggagagctcgggcctgcgttgtggggtgctggggcaggcgctgtacggtgtctgtgttccgaaggacgtagaagaaggctgggacctcgcgccgccttccgcgtcgtcggatgggatggggaggcgcgtccgtgctgctgccgcgccgcctcgccgtggtagcttccgtccgatgagatgtgtacggcgctcgagattgtgatattgtgcgtgcgttttagtttaaaaattaaggaaaaattgaagggacggtggtgcggctgtcgtgagcggtgattgcacgaggagcactcccgattctgacggcgctcatcagtttcgttttcagagcattttactgattgccatgaataaaaaatatccttgaccag

SEQ ID NO: 42547 - DNA, 1219 bp, Zea Mays
atcgtcgacttcgagtcgtttcattgcctccactccacacagtacacacgacacgatgtctccagaactctcttgggtgatagcttccacagggcgacgacctccatgaaaaacggcgagtcttcattcccatcgtcgtctccgcgctcttggaccatacgaatctccggtcgaacctggtgtcgtccgcccgccctctctcccgctgctccccatcgctctttcgttgtgactcgctccctccctggctccccgcatcgctccccatcccatcttgtcctggacacctgggaagcctcctgttctttttagtttcattcttggccacagacttcacgtgcccacaaccccaaggaggagaaaccaggctatgaccaatagctatcagttccttcagtgttttacgcccctctctgtgagcggaacaaggtcaccatggagcgtgtggtggggttcggcaaggaggtcgtgctgaagcagcggcggcggatgcgctggagacttcgcttgggctcctccagcgtcgtgtacgcctgacttcgctaccccctcgtcgcccgccgagacgccgtgcccagagacttccttttttatgatgaccttgcaacagtatattcagatatatgattttaccataagcgctccatctgagatcagtatgtgtaattctattgtggatggagattgaggcgaatgatacaggacttgaaaagtcaatgctttgagcactttaatcacgaatgttcaatctaaagttcaatgtttcagcacagttcttatcctggaacttctctttaaaacccttcctatgttgttaacatgtagccacatttaactgaaagtcaatgtgcccatcagcctatgttagtgtttgggccaccactctctagtataataagcatatcacagatgaacatcaatgtcaccaatcagaattgaagtgcttcattaaactcaaattgtgagcaactcattgtaacatataactgttgtcttttttacaatgttcactactgtcttgtgcatgtatcgtgtctgtaatgctcctagaaccttcgtagcaacagccgccgaacctcgtggcacaaaaacaatttttttttgaaaaacaggtattatgctggtaaaggcttatttggctgtagacacgttcaactaatatttttttccacatatttttcaatgatccattttgttgttttcaaactttctttatcac

SEQ ID NO: 42548 - DNA, 1321 bp, Zea Mays
ttatgtattaagagccctgggctcccaacaactagagaaagccctggtcggtgtctctcggtccaaccatatacatctgagactttcccaccgaaccgttgtggcccatttaaaagcccattaaccaaaccctacgatcgcacacagccgccgccgttttttcgccatccacctccgtctttctcgcactgcgcaaacgcatctgggcgatctgcgcccgcacgacgatgttccgcgccgccgcaggctcctactccgatgagttcatctgcctccaccgacccctcctcccgcctccactatggcagcacgtccctcaaagccgacgatatgacggcgagctcacctgggcgctcgcgaaccgcttctagggcatcggttccttctttgctccggcggcgcttggaggcagaggtgttctgtgtcagccagatctgggcgagatggccctacacatgatttagcgacggtcgtggacgacacgccccgtgtgcctcgcttgctttgctgtaacaggggcaatgggttctcgcccaatcggcttcgcgtgatgctgctgggggtggacaagcgtcgcaagggcaggacggtgccgccgtggaggaagaggacagcggtggcggcgactacgacactgtgctgaaggcccacgctagatccggtggcggcgactacggcgccgtgctgaaggcccgcgctagatccggtgccagcgacgggttgctgcatgactgtcttctcatgtatgaggtggtggaggcgccatgtgtgaagaaatacaagaatgtttatgtggtgagcaccatctcagagttctcatcctcgctggagacagcgggtgggcactggcgggtggactgtcttctccgtgctaaaggaatgccatcctatttcgccgtgctggaccagggtgctcgaagtgtttcttcagatatggacctcggtggttttctccacattaggaaagctggaagagcctttttgaactcagatttttttgctaacagtggtgttatggtgaaacaaagttttgtttgtatgtaccaacagctaaaatgtaaacacgacattatcatagttgagtacaggaataattatctcttatatcttattgcaaaatctgaaacagttctcctgtagatggttagcttgcattttacgctacaattacctcagatcacttgtatcttacaccaatttacaaaatttgttgatgcgttttatgacaacctcatgcgctgagagatacaaaaattttatgctattttgtatacatatttatgccaatgtcaataggattttatgacctatatttcagttc

SEQ ID NO: 42549 - DNA, 1197 bp, Zea Mays
gcttaatagccaagtggataatgggaactctgttagagatatgattgcattgaatatgtggaatgattatagtcaacatcgttcatgatatatcaagaatgtttagaagaggatctcctaggatgaacctgatccaagctgcagctatgcaaagagtatcccctagatctactactaacaagcgcaagaagagaacatcaccaaaagttggtcgtcttagagcaaactggaatagtggactagaaaagggtttagttcaaattcttcaagaccacaacaatgactgttataagggccaaaatgggtggtcatcggaagcatggaatagaattgtcaagttattccatgagaaattcccttatgtcacatttacaaaatgtcaaatccaagataaagagaaagagttaaagagagactacaaggctcttaaagaggcaagacaacaaagtggggtatcatgggatgagcggttgtgtagaatagaggcaaaagaacccatttggaataacctcaccactagtaacgagagacttaagaagtttcggactaaatctttcccactatttgaggctttaggagagctacatgatgatgaaagaaaacaagatgaggtggagaaaagggtgacaactaatgcaaatgaggatgatttccctactacaacatgcattgctattgtggatggaatggaagagctttctgatgatgagaaggttgatgcttatgatgtgtttaaggacgcccaaaatagggccattttcatgactaccaaagatgctacacgcataaaatggttgaggaagaagattgctagaacatgatatgtgttgtttgaaacttgagggctcaaagaaaatgcaacgaagaatttggaagaccttgaaattattactagcaattgtttgaaagcaatctagtaggcgaactttcagttggaacatgtcatagcacttgtgaaatcttcattttttataagcacctatgaatgtgatccttcttgtcattaaatcaagactacaaagatggatgtttatttaatttgacataagcacctctgaatgtaatacttcttgttattaaatcaggactagaacgatgaatgttttttctaagcacttttgaatgctatgttaatttgcacattcgatgtgtcatggtctttagtatttgtgctaatttttcagtgctattttaaat

SEQ ID NO: 42550 - DNA, 1679 bp, Zea Mays
atgaacgaacaagagaagagaatagacgacacggagaggggggaggagccgcgagcaagaatgtttagaagaggatctcctaggatgaacctgatccaagctgcagctatgcaaagagtatcccctagatctactactaacaagcgcaagaagagaacatcaccaaaagttggtcgtcttagagcaaactggaatagtggactagaaaagggtttagttcaaattcttcaagaccacaacaatgactgttataagggccaaaatgggtggtcatcggaagcatggaatagaattgtcaagttattccatgagaaattcccttatgtcacatttacaaaatgtcaaatccaagataaagagaaagagttaaagagagactacaaggctcttaaagaggcaagacaacaaagtggggtatcatgggatgagcggttgtgtagaatagaggcaaaagaacccatttggaataacctcaccactagtaacgagagacttaagaagtttcggactaaatctttcccactatttgaggctttaggagagctacatgatggtatgttatctatgtttttctttatcttagtattgagcctcttatttttatcctagtattgaagtcttaaagacttacaacgcttcttggtttagggaatattgctgagggaaccatgaattttacttctattgagccttctcgacctccagtcacacaaccttgtcaaggtgctgctacacatccttctcaagctgcttttacgctcacacagccttttcaacccgctttcacacaaccttctcaacccgctttcacacaaccttctcaagctgctttcacacagccttctcaagccgctttcgcataaccttctcaagctgctttcgcacatccttctcaagctacaatcacacaagccatttctaatgaagatgatgaccttagagtattagatctaatagcccctacatcaatgagcaaaagggcaaaaaatgttggtgctggtagttcaaggacaagaattgacaagcgtggacaagatgggaaggtggttgaaatgatggaaaggtttctagagatgaaagaaaacaagatgaggtggagaaaagggtgacaactaatgcaaatgaggatgatttccctactacaacatgcattgctattgtggatggaatggaagagctttctgatgatgagaaggttgatgcttatgatgtgtttaaggacgcccaaaatagggccattttcatgactaccaaagatgctacacgcataaaatggttgaggaagaagattgctagaacatgatatgtgttgtttgaaacttgagggctcaaagaaaatgcaacgaagaatttggaagaccttgaaattattactagcaattgtttgaaagcaatctagtaggcgaactttcagttggaacatgtcatagcacttgtgaaatcttcattttttataagcacctatgaatgtgatccttcttgtcattaaatcaagactacaaagatggatgtttatttaatttgacataagcacctctgaatgtaatacttcttgttattaaatcaggactagaacgatgaatgttttttctaagcacttttgaatgctatgttaatttgcacattcgatgtgtcatggtctttagtatttgtgctaatttttcagtgctattttaaat

SEQ ID NO: 42551 - DNA, 1789 bp, Zea Mays
gaaaaatccccaccgaggcgtggaagacagcctgtcgttctcgcgtggcggcgtcactaaccctagatcaagacgagtgcatccacggctctccacgccgccgccgatctcgtcgagaggcatccacgactctccacgccgccgccgatctcgttcgtccagcgtcaagaatgtttagaagaggatctcctaggatgaacctgatccaagctgcagctatgcaaagagtatcccctagatctactactaacaagcgcaagaagagaacatcaccaaaagttggtcgtcttagagcaaactggaatagtggactagaaaagggtttagttcaaattcttcaagaccacaacaatgactgttataagggccaaaatgggtggtcatcggaagcatggaatagaattgtcaagttattccatgagaaattcccttatgtcacatttacaaaatgtcaaatccaagataaagagaaagagttaaagagagactacaaggctcttaaagaggcaagacaacaaagtggggtatcatgggatgagcggttgtgtagaatagaggcaaaagaacccatttggaataacctcaccactagtaacgagagacttaagaagtttcggactaaatctttcccactatttgaggctttaggagagctacatgatggtatgttatctatgtttttctttatcttagtattgagcctcttatttttatcctagtattgaagtcttaaagacttacaacgcttcttggtttagggaatattgctgagggaaccatgaattttacttctattgagccttctcgacctccagtcacacaaccttgtcaaggtgctgctacacatccttctcaagctgcttttacgctcacacagccttttcaacccgctttcacacaaccttctcaacccgctttcacacaaccttctcaagctgctttcacacagccttctcaagccgctttcgcataaccttctcaagctgctttcgcacatccttctcaagctacaatcacacaagccatttctaatgaagatgatgaccttagagtattagatctaatagcccctacatcaatgagcaaaagggcaaaaaatgttggtgctggtagttcaaggacaagaattgacaagcgtggacaagatgggaaggtggttgaaatgatggaaaggtttctagagatgaaagaaaacaagatgaggtggagaaaagggtgacaactaatgcaaatgaggatgatttccctactacaacatgcattgctattgtggatggaatggaagagctttctgatgatgagaaggttgatgcttatgatgtgtttaaggacgcccaaaatagggccattttcatgactaccaaagatgctacacgcataaaatggttgaggaagaagattgctagaacatgatatgtgttgtttgaaacttgagggctcaaagaaaatgcaacgaagaatttggaagaccttgaaattattactagcaattgtttgaaagcaatctagtaggcgaactttcagttggaacatgtcatagcacttgtgaaatcttcattttttataagcacctatgaatgtgatccttcttgtcattaaatcaagactacaaagatggatgtttatttaatttgacataagcacctctgaatgtaatacttcttgttattaaatcaggactagaacgatgaatgttttttctaagcacttttgaatgctatgttaatttgcacattcgatgtgtcatggtctttagtatttgtgctaatttttcagtgctattttaaat

SEQ ID NO: 42552 - DNA, 1288 bp, Zea Mays
cgccaatacgccggggatagaaaaatccccaccgaggcgtggaagacagcctgtcgttctcgcgtggcggcgtcactaaccctagatcaagacgagtgcatccacggctctccacgccgccgccgatctcgtcgagaggcatccacgactctccacgccgccgccgatctcgttcgtccagcgtcaagaatgtttagaagaggatctcctaggatgaacctgatccaagctgcagctatgcaaagagtatcccctagatctactactaacaagcgcaagaagagaacatcaccaaaagttggtcgtcttagagcaaactggaatagtggactagaaaagggtttagttcaaattcttcaagaccacaacaatgactgttataagggccaaaatgggtggtcatcggaagcatggaatagaattgtcaagttattccatgagaaattcccttatgtcacatttacaaaatgtcaaatccaagataaagagaaagagttaaagagagactacaaggctcttaaagaggcaagacaacaaagtggggtatcatgggatgagcggttgtgtagaatagaggcaaaagaacccatttggaataacctcaccactagtaacgagagacttaagaagtttcggactaaatctttcccactatttgaggctttaggagagctacatgatgatgaaagaaaacaagatgaggtggagaaaagggtgacaactaatgcaaatgaggatgatttccctactacaacatgcattgctattgtggatggaatggaagagctttctgatgatgagaaggttgatgcttatgatgtgtttaaggacgcccaaaatagggccattttcatgactaccaaagatgctacacgcataaaatggttgaggaagaagattgctagaacatgatatgtgttgtttgaaacttgagggctcaaagaaaatgcaacgaagaatttggaagaccttgaaattattactagcaattgtttgaaagcaatctagtaggcgaactttcagttggaacatgtcatagcacttgtgaaatcttcattttttataagcacctatgaatgtgatccttcttgtcattaaatcaagactacaaagatggatgtttatttaatttgacataagcacctctgaatgtaatacttcttgttattaaatcaggactagaacgatgaatgttttttctaagcacttttgaatgctatgttaatttgcacattcgatgtgtcatggtctttagtatttgtgctaatttttcagtgctattttaaat

SEQ ID NO: 42553 - DNA, 1920 bp, Zea Mays
atgctacactagaaccaaaagtccatacggcccggggcccgggcgtccccaaaaacctcacccctctcttatccgccccaacggccgcccgccggccaccacctcaccggcgagatgctgacctgcggccgctttatctcctcctccgctgctaccagcaccgcatcctttttcccgtttcggactctcactcgctccctcgttcgccgccccgctccccacctcctctcctctgcctccgccgccgccgccaccgccgtggaactcgacaccaatggagacggtagtgcgggaggtggtgccggtgtggtgaggccgcagtggaaggccgcgattgatttcaaatggatccgagacaaccgggatgccgtcgccgacaacatccggacccggaactctaccgccaatctggacctcgtcttcgagctctacgatcagtacctcacactgcagaagatggcaggaggttgaaaggctccgagctgaaagaaatgcggttgccaacaagatgaaagggaaactagacccatctgttcgccaagcccttgttgaagaaggtaagaacctgaaagagggacttatagcactcgaggaggatcttgttcagctgacagataagcttcaacttgaagctcaaagtattcctaacactacccatccagatgttcctgttgggggtgaggaaagctctgtcctcaggaaagaggtaggcagtcagaggagcttcaattttgcaatcaaagatcatcttcagctggggaaggaacttgatttgtttgactttgatgcagcagccgaggtcagtggttcgaagttctactacttaaagaatgaagctgttttgttggagatggccctagtaaactgggctatttcagaggtctccaagaagggtttcacaccactcataactccagagatcgtaagatcatctgttgttgagaaatgtggctttcagccaagggccaaaaacactcaggtatactcaattgaggacagtgatcagtgtctcataggcacagcggaaattcctgttggaggcatccacatggactcaatacttgccgaatccgctttgcctttaaaatatgtagcatattcacactgttttcgcacagaagcaggtgcagcaggtgctgccactaggggcctctatcgggtacatcaatttagcaaggttgagatgttcatattctgtcggccagaggagagtggaaaatggcatgaagaacttattacaattgaagaggatctttatgcatcacttggacttcatttcaacctaccggaaatttgatatcgaggcgtggatgcccggcctagagcgttatggtgagatctccagtgcatcaaattgtaccgactaccaaagtaggcgactaggcatccgttaccgcccatcaccctcggagcctccatcaacgagcaccaagaaagggaagggagctgcctcaggccctacgcagttcgtccacacgctcaacgctacagcagtggcggtgcctcgtctgatagtttgcattctagagaattttcagcagggcgatgggtcgattgtggttccagagccactaagaccctatatgggtggactagagttgctctccccaaaattcaagtgaccctctacggtcacccgctgttgtgcttgtgtggacttagaactgtctggctgaagtacaagttaaaggaaggtcatttctcactacaaatatacactactgagtttcgtgattggggcttctgtttcataagcagtcgactactctgatctaatctgcatagcattatactggtcggttactctgatctgcatagcactacaaagcttatgtgcatgcattaggccctctatggttcccaagaatcgagtgacatttaaaagtaatctaatgctccttacattctaatgccatgttt

SEQ ID NO: 42554 - DNA, 1958 bp, Zea Mays
atgctacactagaaccaaaagtccatacggcccggggcccgggcgtccccaaaaacctcacccctctcttatccgccccaacggccgcccgccggccaccacctcaccggcgagatgctgacctgcggccgctttatctcctcctccgctgctaccagcaccgcatcctttttcccgtttcggactctcactcgctccctcgttcgccgccccgctccccacctcctctcctctgcctccgccgccgccgccaccgccgtggaactcgacaccaatggagacggtagtgcgggaggtggtgccggtgtggtgaggccgcagtggaaggccgcgattgatttcaaatggatccgagacaaccgggatgccgtcgccgacaacatccggacccggaactctaccgccaatctggacctcgtcttcgagctctacgatcagtacctcacactgcagaagatggcaggaggttgaaaggctccgagctgaaagaaatgcggttgccaacaagatgaaagggaaactagacccatctgttcgccaagcccttgttgaagaaggtaagaacctgaaagagggacttatagcactcgaggaggatcttgttcagctgacagataagcttcaacttgaagctcaaagtattcctaacactacccatccagatgttcctgttgggggtgaggaaagctctgtcctcaggaaagaggtaggcagtcagaggagcttcaattttgcaatcaaagatcatcttcagctggggaaggaacttgatttgtttgactttgatgcagcagccgaggtcagtggttcgaagttctactacttaaagaatgaagctgttttgttggagatggccctagtaaactgggctatttcagaggtctccaagaagggtttcacaccactcataactccagagatcgtaagatcatctgttgttgagaaatgtggctttcagccaagggccaaaaacactcaggtatactcaattgaggacagtgatcagtgtctcataggcacagcggaaattcctgttggaggcatccacatggactcaatacttgccgaatccgctttgcctttaaaatatgtagcatattcacactgttttcgcacagaagcaggtgcagcaggtgctgccactaggggcctctatcgggtacatcaatttagcaaggttgagatgttcatattctgtcggccagaggagagtggaaaatggcatgaagaacttattacaattgaagaggatctttatgcatcacttggacttcatttcaaaactctggacatggcaactggggatctgggtgcaccagcctaccggaaatttgatatcgaggcgtggatgcccggcctagagcgttatggtgagatctccagtgcatcaaattgtaccgactaccaaagtaggcgactaggcatccgttaccgcccatcaccctcggagcctccatcaacgagcaccaagaaagggaagggagctgcctcaggccctacgcagttcgtccacacgctcaacgctacagcagtggcggtgcctcgtctgatagtttgcattctagagaattttcagcagggcgatgggtcgattgtggttccagagccactaagaccctatatgggtggactagagttgctctccccaaaattcaagtgaccctctacggtcacccgctgttgtgcttgtgtggacttagaactgtctggctgaagtacaagttaaaggaaggtcatttctcactacaaatatacactactgagtttcgtgattggggcttctgtttcataagcagtcgactactctgatctaatctgcatagcattatactggtcggttactctgatctgcatagcactacaaagcttatgtgcatgcattaggccctctatggttcccaagaatcgagtgacatttaaaagtaatctaatgctccttacattctaatgccatgttt

SEQ ID NO: 42555 - DNA, 1946 bp, Zea Mays
atgctacactagaaccaaaagtccatacggcccggggcccgggcgtccccaaaaacctcacccctctcttatccgccccaacggccgcccgccggccaccacctcaccggcgagatgctgacctgcggccgctttatctcctcctccgctgctaccagcaccgcatcctttttcccgtttcggactctcactcgctccctcgttcgccgccccgctccccacctcctctcctctgcctccgccgccgccgccaccgccgtggaactcgacaccaatggagacggtagtgcgggaggtggtgccggtgtggtgaggccgcagtggaaggccgcgattgatttcaaatggatccgagacaaccgggatgccgtcgccgacaacatccggacccggaactctaccgccaatctggacctcgtcttcgagctctacgatcagtacctcacactgcagaaggaggttgaaaggctccgagctgaaagaaatgcggttgccaacaagatgaaagggaaactagacccatctgttcgccaagcccttgttgaagaaggtaagaacctgaaagagggacttatagcactcgaggaggatcttgttcagctgacagataagcttcaacttgaagctcaaagtattcctaacactacccatccagatgttcctgttgggggtgaggaaagctctgtcctcaggaaagaggtaggcagtcagaggagcttcaattttgcaatcaaagatcatcttcagctggggaaggaacttgatttgtttgactttgatgcagcagccgaggtcagtggttcgaagttctactacttaaagaatgaagctgttttgttggagatggccctagtaaactgggctatttcagaggtctccaagaagggtttcacaccactcataactccagagatcgtaagatcatctgttgttgagaaatgtggctttcagccaagggccaaaaacactcaggtatactcaattgaggacagtgatcagtgtctcataggcacagcggaaattcctgttggaggcatccacatggactcaatacttgccgaatccgctttgcctttaaaatatgtagcatattcacactgttttcgcacagaagcaggtgcagcaggtgctgccactaggggcctctatcgggtacatcaatttagcaaggttgagatgttcatattctgtcggccagaggagagtggaaaatggcatgaagaacttattacaattgaagaggatctttatgcatcacttggacttcatttcaaaactctggacatggcaactggggatctgggtgcaccagcctaccggaaatttgatatcgaggcgtggatgcccggcctagagcgttatgatctccagtgcatcaaattgtaccgactaccaaagtaggcgactaggcatccgttaccgcccatcaccctcggagcctccatcaacgagcaccaagaaagggaagggagctgcctcaggccctacgcagttcgtccacacgctcaacgctacagcagtggcggtgcctcgtctgatagtttgcattctagagaattttcagcagggcgatgggtcgattgtggttccagagccactaagaccctatatgggtggactagagttgctctccccaaaattcaagtgaccctctacggtcacccgctgttgtgcttgtgtggacttagaactgtctggctgaagtacaagttaaaggaaggtcatttctcactacaaatatacactactgagtttcgtgattggggcttctgtttcataagcagtcgactactctgatctaatctgcatagcattatactggtcggttactctgatctgcatagcactacaaagcttatgtgcatgcattaggccctctatggttcccaagaatcgagtgacatttaaaagtaatctaatgctccttacattctaatgccatgttt

SEQ ID NO: 42556 - DNA, 1955 bp, Zea Mays
atgctacactagaaccaaaagtccatacggcccggggcccgggcgtccccaaaaacctcacccctctcttatccgccccaacggccgcccgccggccaccacctcaccggcgagatgctgacctgcggccgctttatctcctcctccgctgctaccagcaccgcatcctttttcccgtttcggactctcactcgctccctcgttcgccgccccgctccccacctcctctcctctgcctccgccgccgccgccaccgccgtggaactcgacaccaatgacggtagtgcgggaggtggtgccggtgtggtgaggccgcagtggaaggccgcgattgatttcaaatggatccgagacaaccgggatgccgtcgccgacaacatccggacccggaactctaccgccaatctggacctcgtcttcgagctctacgatcagtacctcacactgcagaagatggcaggaggttgaaaggctccgagctgaaagaaatgcggttgccaacaagatgaaagggaaactagacccatctgttcgccaagcccttgttgaagaaggtaagaacctgaaagagggacttatagcactcgaggaggatcttgttcagctgacagataagcttcaacttgaagctcaaagtattcctaacactacccatccagatgttcctgttgggggtgaggaaagctctgtcctcaggaaagaggtaggcagtcagaggagcttcaattttgcaatcaaagatcatcttcagctggggaaggaacttgatttgtttgactttgatgcagcagccgaggtcagtggttcgaagttctactacttaaagaatgaagctgttttgttggagatggccctagtaaactgggctatttcagaggtctccaagaagggtttcacaccactcataactccagagatcgtaagatcatctgttgttgagaaatgtggctttcagccaagggccaaaaacactcaggtatactcaattgaggacagtgatcagtgtctcataggcacagcggaaattcctgttggaggcatccacatggactcaatacttgccgaatccgctttgcctttaaaatatgtagcatattcacactgttttcgcacagaagcaggtgcagcaggtgctgccactaggggcctctatcgggtacatcaatttagcaaggttgagatgttcatattctgtcggccagaggagagtggaaaatggcatgaagaacttattacaattgaagaggatctttatgcatcacttggacttcatttcaaaactctggacatggcaactggggatctgggtgcaccagcctaccggaaatttgatatcgaggcgtggatgcccggcctagagcgttatggtgagatctccagtgcatcaaattgtaccgactaccaaagtaggcgactaggcatccgttaccgcccatcaccctcggagcctccatcaacgagcaccaagaaagggaagggagctgcctcaggccctacgcagttcgtccacacgctcaacgctacagcagtggcggtgcctcgtctgatagtttgcattctagagaattttcagcagggcgatgggtcgattgtggttccagagccactaagaccctatatgggtggactagagttgctctccccaaaattcaagtgaccctctacggtcacccgctgttgtgcttgtgtggacttagaactgtctggctgaagtacaagttaaaggaaggtcatttctcactacaaatatacactactgagtttcgtgattggggcttctgtttcataagcagtcgactactctgatctaatctgcatagcattatactggtcggttactctgatctgcatagcactacaaagcttatgtgcatgcattaggccctctatggttcccaagaatcgagtgacatttaaaagtaatctaatgctccttacattctaatgccatgttt

SEQ ID NO: 42557 - DNA, 1346 bp, Zea Mays
aacatattgacctgagcactaacagatatggtggaattcatgaagaatcttgctaggatggacgtggatatgagtgctgaagaaaggcatttgttctcagttggtttcaagaacactattggagcaaagagagcatcatggagaatcatttgttcacatgagcaaaaggtcgcagctgatcgtcagactggtgtgatgatagatgcctataagaagaaagtagaagaggaactaaggaaggtttgcaatgaagtattgtcagtcattgctattcactgccttcccttggccagtacgggtgaaaatatcgtattcttttataagatactgttgcaggaaaggtgactactaccgttacttggctgaatttagcactggaactgaaaagaaagctgcctctgatcagtcacttatggcctatcagcatgccatggttgtcgcctccagtgagctctcacctgctcaccaaatccggcttggccttgccctcaatttgtcggtcttcttttatgagataatgaactctcatgagagagcttgccaagtggcaaaacaagcatttgatgaggctcttactgagataaattctggtgagggagtttacaaggatagcacacttatgatgcagcttctgaaggacaacttagcattgtggacatcagaactaactgggggtgaagcatccaagggtaacggcgatgtcgacatggagggttgatacattctccatgttttaaggaaacacagaacgcacgcaaaaatatccaggctgtgatgctagcgaacctgggtcctcaagttttttctgcatcggaactaagaagagccttgtgtatttttctgaagtttctgtccgtctcggggttttttttttgaggtctgtttgttcctctcttttggccatcgtttggtcctggagtcagtcactcactaccaagtgtttcagaggtctgaactggtgagcatccagatctgttgttgcttttttttccttctgtgcttcagaggcatctttgtacaccgatggaaaactgtttctcttatcaacgcatagactgtcagtgctgttactgatcatgttcggtgactgaagcgtctctgtagtgttgagatcgagcataaacttctccacgaaattatgtacctgcaaagtgtcggtatgatcttacacgccgatgcagcagttgcttccacgccgccggaaaaaatattggccgtccagcaccgtcgtaaaaataacttggccgtacgtgtattggctgctgcttctttcactttaccgtgagtccgtgagtccgtgacccgcagcttcagcttctgagtaaaagataaaaaaaaaggtgacg

SEQ ID NO: 42558 - DNA, 1232 bp, Zea Mays
caaaaataaggaagatctaaattaatcattcagaagcaaaaactgaggagctaacataaacatctgagatgggttcctcatttattataatatcgaaatatctcgatgatgtctggtcactaatctaagagcaggctatgctggaggtgccacagtccagtttagtccatcttccctgccatagcgatttctgtttggttgctccttggccatctggactaaatttaaggagcaatggcccaagaaacagtgtgaacagctgcaagttgttccaagagttaacggttgctggattctgtcaatttcttcacgtaggcgccaattgcttcgatgtaattgtctccgtgggcgaagaagccaacgatcctgctgtcgctctgcaccggaacctggaacgcggctcccagctgcgttccgaaaggcccgtgtgttttgcccgtgctggtcacgagcgtcagagaggacacgacactgggtattgttctgtcccacgcgcatggatggaatgtcccagtaacttccactatgaactcttcaggggcaagatgaatctttcgaccagttcctccgcagccgccccacggaccggtggtgtgctgctgcccgtcgccatcgctgtacagatactccagcgagtttacgatcgtcccgctgaagatcgtcactctgtgcaggcgatgcggcctctctgcgatgtcatggagagcatttccaaccccgccccaaggcccaatcctggcgacgacggcctcatcaccacatcttgtttcccaactgcttttggttcgggtttcggcgccgtgtagacaccgatcgcgttgaggtaccgtccggagcgcccaaagaaaccgacgatgcagccattgccctgcactgggatgtggaaggatgtgcctcgccctcttccaaacggcccgtagctacgagcgttggtgacgaacgtcagagacgttatgacgtttgcatggccgttgaatgtgccgattgacccagacacacctgtaaggaactctgaaccagctagctgaaactgtaaggaaatcaaagagaagttatacttcattgtccctcgggacaattttgaataccacgttctcggtggatagtttgtttttttaaatgttcatcacactcacagagctgttgtctcctccatgaccaccccaagggcctgcggtgcggtactggctgtcagggccagcgtacgagaactcgatcgagtcgatgataag

SEQ ID NO: 42559 - DNA, 1280 bp, Zea Mays
ctgatacgtgatgcatgattcgtatccattcagaagagacagaaaagaatcctcatttattgcaaaaataaggaagatctaaattaatcattcagaagcaaaaactgaggagctaacataaacatctgagatgggttcctcatttattataatatcgaaatatctcgatgatgtctggtcactaatctaagagcaggctatgctggaggtgccacagtccagtttagtccatcttccctgccatagcgatttctgtttggttgctccttggccatctggactaaatttaaggagcaatggcccaagaaacagtgtgaacagctgcaagttgttccaagagttaacggttgctggattctgtcaatttcttcacgtaggcgccaattgcttcgatgtaattgtctccgtgggcgaagaagccaacgatcctgctgtcgctctgcaccggaacctggaacgcggctcccagctgcgttccgaaaggcccgtgtgttttgcccgtgctggtcacgagcgtcagagaggacacgacactgggtattgttctgtcccacgcgcatggatggaatgtcccagtaacttccactatgaactcttcaggggcaagatgaatctttcgaccagttcctccgcagccgccccacggaccggtggtgtgctgctgcccgtcgccatcgctgtacagatactccagcgagtttacgatcgtcccgctgaagatcgtcactctgtgcaggcgatgcggcctctctgcgatgtcatggagagcatttccaaccccgccccaaggcccaatcctggcgacgacggcctcatcaccacctgcttttggttcgggtttcggcgccgtgtagacaccgatcgcgttgaggtaccgtccggagcgcccaaagaaaccgacgatgcagccattgccctgcactgggatgtggaaggatgtgcctcgccctcttccaaacggcccgtagctacgagcgttggtgacgaacgtcagagacgttatgacgtttgcatggccgttgaatgtgccgattgacccagacacacctgtaaggaactctgaaccagctagctgaaactgtaaggaaatcaaagagaagttatacttcattgtccctcgggacaattttgaataccacgttctcggtggatagtttgtttttttaaatgttcatcacactcacagagctgttgtctcctccatgaccaccccaagggcctgcggtgcggtactggctgtcagggccagcgtacgagaactcgatcgagtcgatgataag

SEQ ID NO: 42560 - DNA, 2648 bp, Zea Mays
cagagatgctcccccggcatggccatgtctgccgcctcctcctccttccgaggctccggcctatgtccaccagcgccaccacggccttcccacctaccgactccgctcccttcttctccgccgcccccggctccttcctcgacccgaccgcgctcgcccccgacgacgccatcgcgttgctcccgtcagtcgcggactccgagggctccgcggcggcgctggcgctcttccgccgcctgtcgtcccgcccggacatgcgccgcctcatgcggctctacgccacggccgccaccgccttcgtcgcgcgcgggaacctgcccatggcgcacgaggccgcgcgcgcgatggtcgccgccttcgcggaggccgggcgcctgcgggaggccgcggacatgctgctagagctgcggagccacgggctcccgctcgtcgtcgagacggccaactgggtgctccgcgtcgggctgcggcacccgggctgcttcgcccacgcgcgcgaggcgttcgacggaatggcacgcgccgccggcggcgtgcgccccgaccaccgcagcttccgggcgctcgtcctcgggtgctgccgggaggggcggttcgaggaggccgacgccctgctggcggcgatgtgggcgcaggggttctgcctggacagcgccacgtgcacggtggtcgtgcgcgcgttctgccggcagggacggttcaggaacgtgactgacctgttcaggaggatgtcggagatgggcacgccgccgaacatggtgaattacagtgcgtggatcgatggtctgtgcgaaagaggctatgtcaagcaggcgttccatgtgctggaggagatggtggggaaggggttgaagccgaatgtgtacacacatacgtcgctgattgatgggctatgcaagattgggtggatggagcgggcgttccgtctgttcttgaagcttgttaagagtagctcctacaagccgaacgtgcacacctacactgtgatgattggagggtactgcaaagagggcaagcttgctcgagccgagatgctgttggggcggatggttgagcagggacttgccccgaatacaaacacatacactacgctgatccatgggcactgcaaaggaggcagcttcgatcgagcctttgagctgatgaataagatgaagctggaaggtttcctgcccaatatttacacatataatgccattattgggggcttttgcaagaagggaaagattcaagaggcttacaaggtgctccgaatggccactagtcaggggctgcatcttgataaggatactgtagacttggcaaattgacctcggctctcaaggtctttgagaggatggttcaacatggatgcctacctgactctataacttatggggcactaataagtagcttatgcaaggaatcaagactagaggaagcaagggcattatttgagaccatgcttgataaacatttggtgccatgtgatgtaactcgtgtcactttagcttacgaatattgcaggagggacaagataaccattgctgtatcattcttggatagactggacaaacggcaacaggctcatacagcagatgcactagttagaaagctcagtactgttggcaatttggatgctgctagtcttttccttaaaaatgttctggacaagcattatgctgttgaccatgcaacttatacaagctttatcaattcatgctatgaaagcaatagatatgctctagcttctgaaatatctgaaaagatctcaaagcggatttctggctttaagaaaaaggatactgcagttattgcttgatttgcaagagcaatcaaaatttctcccattcttgcagcttaggaacctgacagttgtgttcgatgttcctttttagcacaacgtctatgcctatcaattggctgtaaatggtatgcctatcaatttctctctctctgaatccgcattcaggacatacaactgcagtcagatttagatgaccaaatgtccaaatcacatggaaatggaccagtgatgggtaatacaccactaaatcagcctaccttactggaggttcaaaaccgacatcatttggtgagcacacgcggtgaacaagtgtaaactctttgcctggatccccagtcaaaataaaatactaacaacatacaattacaacctcaccatcagagggtggcttcaccaggacgattgtatcttatgcaatggcctgcttgaaaatgggcacttgtcttcgctgcccctttgcacaggaggtttggagcaaggtggcgccctgggaaaactttggaagtctgcagactgcccttcagactagcatgagtccttagtcgactggtgggaattgatctcgcccatgatcctgaaagggaaaagatgggcattcaatggaatagccatttatatcatgttgaacttgtggaaggaacatgatcttagattttttgacaacaaatactccatagctattcaggtgtccgggcgagctaaggaggacctagagcagtatagaagggcctttgccaatgcacacacttagctctctattgggtttgggcaacttatgttttgtggcttttgtgctgctgctctgaccttgcgacagtttctggccttactgccaccttgtatatataacctttttccactt

SEQ ID NO: 42561 - DNA, 2883 bp, Zea Mays
cctggtttgggttctccggtgcgccgcatttgattgactcggggatcccttggttcttgctcgctctggagaggttcccacgccgatttcggggccgctttggtctggatctgaggagcaaaggccattacttatcgtaagcaagatttctaattggcggaagcttttatgtgtagctgactgttgaatttactggtctcaagtatagagtaggcaggcaatctgcagtttagtggaacccaatgggttcttctccttccaaagccactggagaggatgccctggttctgtgcaaggatcggatgcgccacatcagacaagctattgactcgagagatgcactgtcagcagcgcacttatcttacacacaatctctccgtagtgtgggtactgcactgcggcagtatgctgagtctgagatctcaccggaatcatcgctctccatttcagaagtggataagtcaccatcacattcctctatggcatctccttcgccttcgcgtgcagtagagagtgttgcctctctggggcatcgagcaagtccatctattactccaccctcaacacgaatccattgcatgaaagcagcagcaaccactcctttgacctttgtgatagatcaatctactgctgaatttgtggggcgcgaatccccagtatcagcttttgtcccacccccaccaccattgcctccagaattatgtaccacgtgggacttctttgatcccattgatgctgctggtacctcttcctccaacaatgagaatgaggtaaccctgaacttcagtagattgagggatctaagagagtcaagggtagctgaagtagttccattgaaagaagttgaagaggaaatcatgtccagaaggcatacagaaatttctgatgataatacaccacctgagcaggaaagagagccaaagcaaggtgggaccggaaaaccaagtcagttggtggatacttcaaccaaagctacatctgagcaggttgctgcaaagttggaggaaagtgaaatggaaaaagaattatgtgcagaggcagaggacccttcagagttcatcactcatcgagccaaagattttgtgtcgagcatgaaggacattgaaacccggtttatgcgtgcagctgaagcaggaaatgaggtttccagaatgcttgaaaccaagaagatccgacttgacatatgtgctaaaataccaggttctccagtcaagctaccttctgcccgatttgtgtcagcacttcgagtgtgctgcaatcgtgatgttattctcaaccaggaaactgcgcagcatgtttcaaaggttgtcacatggaagcgttctgtctcatctctttcatcatcatctaagagtgcacttatgacatcgataatgaaagatgatgtggatgacagtaatagtgattttgttgaggaattcgccatggtatccggaagccattcttctacgttggacaggctacacgcatgggagagaaaactatatgatgaaatcaaggcaagtgaaaatgttaggaaggcctatgatgagaaatgtaacctactccgacgccaatttgcacgaggcctaaatgcgcaggtgattgataagactagagctgttgtgaaggatctccattccagggtatctgttgtgattcaagctgttgatgcaatctccaaaagaattgagaagataagggatgaagaactgcagccacagcttgtcgagctaattcaagggctaatcagaatgtggaaactgatgctggaatgtcaccacaaacagttcatcacgatcacattagcataccacgtgaaagactcgacctcggcgcgtcaaggtgagcaccaccatcaccgccaggcggcgatgcatctgtggaatgagatggacagcttctcctccagcttcagaaactgggtcaccgctcacaaatcgtacgtcgaggccctcaacgcgtggctccagaagtgcgtcctgcagccgccccaggaccggcgcaggcgcaaacgcaaggtctccttccctcctcggcaggctgtctcccctcccatattcatcctctgcggggactggctcgccaggacagaacctctccctgctgacgagctatgcagatccctcaaagacgtgatgcagctcctccgcggctcgttcgagcaccgcgacgagcagaacaggcccagaagcggcgagtcgcaggagtgcgggatgctggagaacagtagcgagcaggaggcggcggctaagagtgggagttgtgcagcatcagctgaagggctgcagtcgagactgacggcggttcttgaccgcctgacaaagttctcggaggcatcactgaagtgctacgaggagctcaagcagaactacgagatggcctgtgctgattataggagagttggaccaaatgctcagcttgcttaggattgatgttggctgtggtgtgtgactttttgctatctctgttctggatgacaaattctctagtgttttggtatatattttgtgaacaatcaggtgatagcacaatctttggccgaatattactgatgatttagtgctatcagttatgtaagcttcatcacttgccctgccctgatgcttcgaaaggcctatgagaaccgttttcacaacgatataacaggcaaaatataccatgattcctgtgcgctagtaatctgctactcattttgcagctacgggaattcggcgaccattaatctcctactcacctttcagcaatggggtatgtactggcactattttttacaatggagaataagcagcttcatacgaaatttgtcgaaccaagtgaaaagaaagtctgtatagccatttttagcttactgataaaaatcttaattgaaaacaattcagacaaaaaaataatctgacaatt

SEQ ID NO: 42562 - DNA, 2845 bp, Zea Mays
gtcgtttttggttacctgctgggctgggattctcgagttctaggctactgcactgtggaaccgggcggggatctgaggagcaaaggccattacttatcgtaagcaagatttctaattggcggaagcttttatgtgtagctgactgttgaatttactggtctcaagtatagagtaggcaggcaatctgcagtttagtggaacccaatgggttcttctccttccaaagccactggagaggatgccctggttctgtgcaaggatcggatgcgccacatcagacaagctattgactcgagagatgcactgtcagcagcgcacttatcttacacacaatctctccgtagtgtgggtactgcactgcggcagtatgctgagtctgagatctcaccggaatcatcgctctccatttcagaagtggataagtcaccatcacattcctctatggcatctccttcgccttcgcgtgcagtagagagtgttgcctctctggggcatcgagcaagtccatctattactccaccctcaacacgaatccattgcatgaaagcagcagcaaccactcctttgacctttgtgatagatcaatctactgctgaatttgtggggcgcgaatccccagtatcagcttttgtcccacccccaccaccattgcctccagaattatgtaccacgtgggacttctttgatcccattgatgctgctggtacctcttcctccaacaatgagaatgaggtaaccctgaacttcagtagattgagggatctaagagagtcaagggtagctgaagtagttccattgaaagaagttgaagaggaaatcatgtccagaaggcatacagaaatttctgatgataatacaccacctgagcaggaaagagagccaaagcaaggtgggaccggaaaaccaagtcagttggtggatacttcaaccaaagctacatctgagcaggttgctgcaaagttggaggaaagtgaaatggaaaaagaattatgtgcagaggcagaggacccttcagagttcatcactcatcgagccaaagattttgtgtcgagcatgaaggacattgaaacccggtttatgcgtgcagctgaagcaggaaatgaggtttccagaatgcttgaaaccaagaagatccgacttgacatatgtgctaaaataccaggttctccagtcaagctaccttctgcccgatttgtgtcagcacttcgagtgtgctgcaatcgtgatgttattctcaaccaggaaactgcgcagcatgtttcaaaggttgtcacatggaagcgttctgtctcatctctttcatcatcatctaagagtgcacttatgacatcgataatgaaagatgatgtggatgacagtaatagtgattttgttgaggaattcgccatggtatccggaagccattcttctacgttggacaggctacacgcatgggagagaaaactatatgatgaaatcaaggcaagtgaaaatgttaggaaggcctatgatgagaaatgtaacctactccgacgccaatttgcacgaggcctaaatgcgcaggtgattgataagactagagctgttgtgaaggatctccattccagggtatctgttgtgattcaagctgttgatgcaatctccaaaagaattgagaagataagggatgaagaactgcagccacagcttgtcgagctaattcaagggctaatcagaatgtggaaactgatgctggaatgtcaccacaaacagttcatcacgatcacattagcataccacgtgaaagactcgacctcggcgcgtcaaggtgagcaccaccatcaccgccaggcggcgatgcatctgtggaatgagatggacagcttctcctccagcttcagaaactgggtcaccgctcacaaatcgtacgtcgaggccctcaacgcgtggctccagaagtgcgtcctgcagccgccccaggaccggcgcaggcgcaaacgcaaggtctccttccctcctcggcaggctgtctcccctcccatattcatcctctgcggggactggctcgccaggacagaacctctccctgctgacgagctatgcagatccctcaaagacgtgatgcagctcctccgcggctcgttcgagcaccgcgacgagcagaacaggcccagaagcggcgagtcgcaggagtgcgggatgctggagaacagtagcgagcaggaggcggcggctaagagtgggagttgtgcagcatcagctgaagggctgcagtcgagactgacggcggttcttgaccgcctgacaaagttctcggaggcatcactgaagtgctacgaggagctcaagcagaactacgagatggcctgtgctgattataggagagttggaccaaatgctcagcttgcttaggattgatgttggctgtggtgtgtgactttttgctatctctgttctggatgacaaattctctagtgttttggtatatattttgtgaacaatcaggtgatagcacaatctttggccgaatattactgatgatttagtgctatcagttatgtaagcttcatcacttgccctgccctgatgcttcgaaaggcctatgagaaccgttttcacaacgatataacaggcaaaatataccatgattcctgtgcgctagtaatctgctactcattttgcagctacgggaattcggcgaccattaatctcctactcacctttcagcaatggggtatgtactggcactattttttacaatggagaataagcagcttcatacgaaatttgtcgaaccaagtgaaaagaaagtctgtatagccatttttagcttactgataaaaatcttaattgaaaacaattcagacaaaaaaataatctgacaatt

SEQ ID NO: 42563 - DNA, 3001 bp, Zea Mays
ggccctccttgctgtgctctcagcccctcacacacacacactgacacacggtcacaccaccagacccagacgcgcggtcacctctccggctctcccctcgttaagaaccaacaaaaacctgtgcctgcctgcctgccactctgcgcatgtgaccgagcaacccactgccgcccgggatcgagccgccgcattgccgcgtcccttctggagccgccgccgcccacgggggtaccggatctgaggagcaaaggccattacttatcgtaagcaagatttctaattggcggaagcttttatgtgtagctgactgttgaatttactggtctcaagtatagagtaggcaggcaatctgcagtttagtggaacccaatgggttcttctccttccaaagccactggagaggatgccctggttctgtgcaaggatcggatgcgccacatcagacaagctattgactcgagagatgcactgtcagcagcgcacttatcttacacacaatctctccgtagtgtgggtactgcactgcggcagtatgctgagtctgagatctcaccggaatcatcgctctccatttcagaagtggataagtcaccatcacattcctctatggcatctccttcgccttcgcgtgcagtagagagtgttgcctctctggggcatcgagcaagtccatctattactccaccctcaacacgaatccattgcatgaaagcagcagcaaccactcctttgacctttgtgatagatcaatctactgctgaatttgtggggcgcgaatccccagtatcagcttttgtcccacccccaccaccattgcctccagaattatgtaccacgtgggacttctttgatcccattgatgctgctggtacctcttcctccaacaatgagaatgaggtaaccctgaacttcagtagattgagggatctaagagagtcaagggtagctgaagtagttccattgaaagaagttgaagaggaaatcatgtccagaaggcatacagaaatttctgatgataatacaccacctgagcaggaaagagagccaaagcaaggtgggaccggaaaaccaagtcagttggtggatacttcaaccaaagctacatctgagcaggttgctgcaaagttggaggaaagtgaaatggaaaaagaattatgtgcagaggcagaggacccttcagagttcatcactcatcgagccaaagattttgtgtcgagcatgaaggacattgaaacccggtttatgcgtgcagctgaagcaggaaatgaggtttccagaatgcttgaaaccaagaagatccgacttgacatatgtgctaaaataccagtcaagctaccttctgcccgatttgtgtcagcacttcgagtgtgctgcaatcgtgatgttattctcaaccaggaaactgcgcagcatgtttcaaaggttgtcacatggaagcgttctgtctcatctctttcatcatcatctaagagtgcacttatgacatcgataatgaaagatgatgtggatgacagtaatagtgattttgttgaggaattcgccatggtatccggaagccattcttctacgttggacaggctacacgcatgggagagaaaactatatgatgaaatcaaggcaagtgaaaatgttaggaaggcctatgatgagaaatgtaacctactccgacgccaatttgcacgaggcctaaatgcgcaggtgattgataagactagagctgttgtgaaggatctccattccagggtatctgttgtgattcaagctgttgatgcaatctccaaaagaattgagaagataagggatgaagaactgcagccacagcttgtcgagctaattcaagggctaatcagaatgtggaaactgatgctggaatgtcaccacaaacagttcatcacgatcacattagcataccacgtgaaagactcgacctcggcgcgtcaaggtgagcaccaccatcaccgccaggcggcgatgcatctgtggaatgagatggacagcttctcctccagcttcagaaactgggtcaccgctcacaaatcgtacgtcgaggccctcaacgcgtggctccagaagtgcgtcctgcagccgccccaggaccggcgcaggcgcaaacgcaaggtctccttccctcctcggcaggctgtctcccctcccatattcatcctctgcggggactggctcgccaggacagaacctctccctgctgacgagctatgcagatccctcaaagacgtgatgcagctcctccgcggctcgttcgagcaccgcgacgagcagaacaggcccagaagcggcgagtcgcaggagtgcgggatgctggagaacagtagcgagcaggaggcggcggctaagagtgggagttgtgcagcatcagctgaagggctgcagtcgagactgacggcggttcttgaccgcctgacaaagttctcggaggcatcactgaagtgctacgaggagctcaagcagaactacgagatggcctgtgctgattataggagagttggaccaaatgctcagcttgcttaggattgatgttggctgtggtgtgtgactttttgctatctctgttctggatgacaaattctctagtgttttggtatatattttgtgaacaatcaggtgatagcacaatctttggccgaatattactgatgatttagtgctatcagttatgtaagcttcatcacttgccctgccctgatgcttcgaaaggcctatgagaaccgttttcacaacgatataacaggcaaaatataccatgattcctgtgcgctagtaatctgctactcattttgcagctacgggaattcggcgaccattaatctcctactcacctttcagcaatggggtatgtactggcactattttttacaatggagaataagcagcttcatacgaaatttgtcgaaccaagtgaaaagaaagtctgtatagccatttttagcttactgataaaaatcttaattgaaaacaattcagacaaaaaaataatctgacaatt

SEQ ID NO: 42564 - DNA, 2895 bp, Zea Mays
ctccactccactccacccccacaggccctccttgctgtgctctcagcccctcacacacacacactgacacacggtcacaccaccagacccagacgcgcggtcacctctccggctctcccctcgttaagaaccaacaaaaacctgtgcctgcctgcctgccactctgcgcatgtgaccgagcaacccactgccgcccgggatcgagccgccgcattgccgcgtcccttctggagccgccgccgcccacgggggtaccggatctgaggagcaaaggccattacttatcgtaagcaagatttctaattggcggaagcttttatgtgtagctgactgttgaatttactggtctcaagtatagagtaggcaggcaatctgcagtttagtggaacccaatgggttcttctccttccaaagccactggagaggatgccctggttctgtgcaaggatcggatgcgccacatcagacaagctattgactcgagagatgcactgtcagcagcgcacttatcttacacacaatctctccgtagtgtgggtactgcactgcggcagtatgctgagtctgagatctcaccggaatcatcgctctccatttcagaagtggataagtcaccatcacattcctctatggcatctccttcgccttcgcgtgcagtagagagtgttgcctctctggggcatcgagcaagtccatctattactccaccctcaacacgaatccattgcatgaaagcagcagcaaccactcctttgacctttgtgatagatcaatctactgctgaatttgtggggcgcgaatccccagtatcagcttttgtcccacccccaccaccattgcctccagaattatgtaccacgtgggacttctttgatcccattgatgctgctggtacctcttcctccaacaatgagaatgaggaaagagagccaaagcaaggtgggaccggaaaaccaagtcagttggtggatacttcaaccaaagctacatctgagcaggttgctgcaaagttggaggaaagtgaaatggaaaaagaattatgtgcagaggcagaggacccttcagagttcatcactcatcgagccaaagattttgtgtcgagcatgaaggacattgaaacccggtttatgcgtgcagctgaagcaggaaatgaggtttccagaatgcttgaaaccaagaagatccgacttgacatatgtgctaaaataccaggttctccagtcaagctaccttctgcccgatttgtgtcagcacttcgagtgtgctgcaatcgtgatgttattctcaaccaggaaactgcgcagcatgtttcaaaggttgtcacatggaagcgttctgtctcatctctttcatcatcatctaagagtgcacttatgacatcgataatgaaagatgatgtggatgacagtaatagtgattttgttgaggaattcgccatggtatccggaagccattcttctacgttggacaggctacacgcatgggagagaaaactatatgatgaaatcaaggcaagtgaaaatgttaggaaggcctatgatgagaaatgtaacctactccgacgccaatttgcacgaggcctaaatgcgcaggtgattgataagactagagctgttgtgaaggatctccattccagggtatctgttgtgattcaagctgttgatgcaatctccaaaagaattgagaagataagggatgaagaactgcagccacagcttgtcgagctaattcaagggctaatcagaatgtggaaactgatgctggaatgtcaccacaaacagttcatcacgatcacattagcataccacgtgaaagactcgacctcggcgcgtcaaggtgagcaccaccatcaccgccaggcggcgatgcatctgtggaatgagatggacagcttctcctccagcttcagaaactgggtcaccgctcacaaatcgtacgtcgaggccctcaacgcgtggctccagaagtgcgtcctgcagccgccccaggaccggcgcaggcgcaaacgcaaggtctccttccctcctcggcaggctgtctcccctcccatattcatcctctgcggggactggctcgccaggacagaacctctccctgctgacgagctatgcagatccctcaaagacgtgatgcagctcctccgcggctcgttcgagcaccgcgacgagcagaacaggcccagaagcggcgagtcgcaggagtgcgggatgctggagaacagtagcgagcaggaggcggcggctaagagtgggagttgtgcagcatcagctgaagggctgcagtcgagactgacggcggttcttgaccgcctgacaaagttctcggaggcatcactgaagtgctacgaggagctcaagcagaactacgagatggcctgtgctgattataggagagttggaccaaatgctcagcttgcttaggattgatgttggctgtggtgtgtgactttttgctatctctgttctggatgacaaattctctagtgttttggtatatattttgtgaacaatcaggtgatagcacaatctttggccgaatattactgatgatttagtgctatcagttatgtaagcttcatcacttgccctgccctgatgcttcgaaaggcctatgagaaccgttttcacaacgatataacaggcaaaatataccatgattcctgtgcgctagtaatctgctactcattttgcagctacgggaattcggcgaccattaatctcctactcacctttcagcaatggggtatgtactggcactattttttacaatggagaataagcagcttcatacgaaatttgtcgaaccaagtgaaaagaaagtctgtatagccatttttagcttactgataaaaatcttaattgaaaacaattcagacaaaaaaataatctgacaatt

SEQ ID NO: 42565 - DNA, 1667 bp, Zea Mays
ccttgctgtgctctcagcccctcacacacacacactgacacacggtcacaccaccagacccagacgcgcggtcacctctccggctctcccctcgttaagaaccaacaaaaacctgtgcctgcctgcctgccactctgcgcatgtgaccgagcaacccactgccgcccgggatcgagccgccgcattgccgcgtcccttctggagccgccgccgcccacgggggtaccggatctgaggagcaaaggccattacttatcgtaagcaagatttctaattggcggaagcttttatgtgtagctgactgttgaatttactggtctcaagtatagagtaggcaggcaatctgcagtttagtggaacccaatgggttcttctccttccaaagccactggagaggatgccctggttctgtgcaaggatcggatgcgccacatcagacaagctattgactcgagagatgcactgtcagcagcgcacttatcttacacacaatctctccgtagtgtgggtactgcactgcggcagtatgctgagtctgagatctcaccggaatcatcgctctccatttcagaagtggataagtcaccatcacattcctctatggcatctccttcgccttcgcgtgcagtagagagtgttgcctctctggggcatcgagcaagtccatctattactccaccctcaacacgaatccattgcatgaaagcagcagcaaccactcctttgacctttgtgatagatcaatctactgctgaatttgtggggcgcgaatccccagtatcagcttttgtcccacccccaccaccattgcctccagaattatgtaccacgtgggacttctttgatcccattgatgctgctggtacctcttcctccaacaatgagaatgaggtaaccctgaacttcagtagattgagggatctaagagagtcaagggtagctgaagtagttccattgaaagaagttgaagaggaaatcatgtccagaaggcatacagaaatttctgatgataatacaccacctgagcaggaaagagagccaaagcaaggtgggaccggaaaaccaagtcagttggtggatacttcaaccaaagctacatctgagcaggttgctgcaaagttggaggaaagtgaaatggaaaaagaattatgtgcagaggcagaggacccttcagagttcatcactcatcgagccaaagattttgtgtcgagcatgaaggacattgaaacccggtttatgcgtgcagctgaagcaggaaatgaggtttccagaatgcttgaaaccaagaagatccgacttgacatatgtgctaaaataccaggttctccagtcaagctaccttctgcccgatttgtgtcagcacttcgagtgtgctgcaatcgtgatgttattctcaaccaggcatgtttcaaaggttgtcacatggaagcgttctgtctcatctctttcatcatcatctaagagtgcacttatgacatcgataatgaaagatgatgtggatgacagtaatagtgattttgttgaggaattcgccatggtatccggaagccattcttctacgttggacaggctacacgcatgggagagaaaactatatgatgaaatcaaggggcggatctgcacccggggctgcccgggatgcagccccagtcgcggcaacaacctct

SEQ ID NO: 42566 - DNA, 2070 bp, Zea Mays
atgctaacaaactgagaactgtagtttactgtttgggttagaaaggctacacctttttttccttctaagtcaacgcttgaaatgtgaaaccttttgtgcaatacaaattaaatagtgtgcttttccaggtgtatgcaagtataattctgaaagaattcagtagtttgtgttcattttggtgctttcttatctggagcttgtttttaaaaattggattgttgatttctttccaagactagtaaactaaccgtgttagatgcttcataaacaggagggatttgcattttctcattgtactacctgcaaggctccatattacttgagggttcattcgcacactgacaggaaatggcgaacactgaagtttcgtttctttgttactagagatatattattcatctttgctctagtccagattatcatctctgcattggcatatttggtacattttattgatgggtgccaacaatattggttgaggacagcctgggcttttgataatgaagttagtttttattatatctgtggtgcattaatgttttttgctttgttgggactatcgggatgcttcataacctgttatgaccgaagagtacggaacgacctggctcagccttgtcgagaattatgtctttgttgctgtcagccagggatgtgtgcggattgccacctacctggcacgctgtgcatgtggactgactgcactacctgcttcgaaggctgtgctaccacagccggcgagtgcggtggttgcttgggaggggctggggaagccgggctaccgcttctcctcatcatgggggtcattgtgctggggcttttcacggtcatcggcatattctacagtgtcctggtcgcgaccatggttggccagcggatctggcagcgccactaccacattcttgccaaacggttgctaaccaaggaaatggtggctaaagacaaggctcaatcagcacctgcaagccatgatgaagttgatcttgatgagctgttggatgacccagaacttgagaagttgcacgcggagagaattgctgcccttaagaaagaagttgagaagcgtgaagtgctaaaaaggcaaggtcatggtgaatacagggagataactgaaggggacttcctcggggaggttactggcagtgaaaaagtcatatgccatttttaccaccgtgaattttaccgttgcaagatcatggataagcatttgaaggcccttgccccagtctatgtgggaacaaaattcgtcaagcttgatgctgaaaatgctccattctttgtggccaaactggcaatcaagacactgccatgtgtaatattgttcaagtaagcgcacaagtttttttgttgctcctgcccatttgataatgtttattgctgtttggcaccctgcaatcttcctgcctcacattactacctgcttcaccatactactatgacccctgtcatttttcaggaagggtattgctgttgaccgattagttgggtttcaagatctcagaagtaaagacgattttccgacaagagcgttggaaaatattctcaagacgaaagggataattgatgagaagaagaaagatgacgacgatgacgatgaagaaagcgaggctaagaataggagggttaggtcttcaactgctcaagactctgactcagactgaacctgagatgaggatcgaggactcaccgtttttgcactttggattttgtttgtttgtttgttctgtgttgtgctgtactgtactgtaattgatttgtgtaaccatgtatcggtaccagacaccacaacaagaacatgtacaagagattctttagcatccattgtgtgtaaaagctagggtttgtggctgccttttatttcgtttttcctcagccatcataggatggtacggctgatgtataatagattactatttgctatgtgggcgtcagatttgttttggcgtgcgctagagtgaaaaaggtcgcatgaaagcgaatctaaacccatgcgtgcttttgttttgtttttctgaaagggaatccatgcgtacttgagattctcattattagtacgtattagggtttgag

SEQ ID NO: 42567 - DNA, 2926 bp, Zea Mays
ccagcccagcccagccgcgccgacgggccccgcgcgtcattctctcacagctagctcgtcccagcgtcggcgtcgcggaagaacgctatacctcgcttcgccgctagtccaccaccacctaacaccaactcctctccaacctcctcgtcccgtccccgtcgattcgattcggtcgaagcgggcgggcggaggaggaggaggaggctagggattccggatgggcgcggcgccgaggaggctctagaggcgccagccgagttggtggtccggggggagagggagcggcgggagggcgggcggcgatggaggagaaggcgtcgtcgccgctgatcccgccgccgtcggagatcgacctggaggcgggcggcggcggagagcagctccagtgccggatctgcctcgagaccgacgggagggacttcatcgctccctgcaagtgcaaggggacgtccaagtacgtgcaccgcgactgcctcgaccactggagggcggtaaaggagggatttgcattttctcattgtactacctgcaaggctccatattacttgagggttcattcgcacactgacaggaaatggcgaacactgaagtttcgtttctttgttactagagatatattattcatctttgctctagtccagattatcatctctgcattggcatatttggtacattttattgatgggtgccaacaatattggttgaggacagcctgggcttttgataatgaagttagtttttattatatctgtggtgcattaatgttttttgctttgttgggactatcgggatgcttcataacctgttatgaccgaagagtacggaacgacctggctcagccttgtcgagaattatgtctttgttgctgtcagccagggtcatggttttcatgcctgcaccgtttgatcgcaccgacatgtgctgtattccaggatgtgtgcggattgccacctacctggcacgctgtgcatgtggactgactgcactacctgcttcgaaggctgtgctaccacagccggcgagtgcggtggttgcttgggaggggctggggaagccgggctaccgcttctcctcatcatgggggtcattgtgctggggcttttcacggtcatcggcatattctacagtgtcctggtcgcgaccatggttggccagcggatctggcagcgccactaccacattcttgccaaacggttgctaaccaaggagtatgttgtagaggacgtcgatggcgagcgcacagactggtgtccgccgccactgcccgcggagcacatcagccagctgaagtctctggggcttctgtaatatggaggctggtgaccctaagctaagaccggcgtggcgttacccagctccagctgtacaggagggaggctatactgtcaggcattctgcgttgaaatgtgtcaatattgatactttttctctttttttttcccttcttttttgtacattgtaatggcaaagctttctccctgacaaaacccaaaacttatatcaagtgaaaccgcctacatttttactggacaattcctttttaggccttgttcggctattcccattatacatgaattgtatgatattggaaacaatttagaagaattttgacttgcttgagatttaaacccacccaatctcactcaatctacatgaattgagagctaaccgaacgtgatcaacggcaactgggattcacagtacgaacctcgacctcgggttctgtaactgggacctttagcaaattccggcgagccggtgcggtgcggcggaggaggccgagggagacgccggcgcgagaaggagcatcaggaggaggcagcggagatggatccggactcggtgaagtcgacgctctctaacctggccttcggcaacgtcatcgccgccgccgcccgcgacctccaaaaggaaatggtggctaaagacaaggctcaatcagcacctgcaagccatgatgaagttgatcttgatgagctgttggatgacccagaacttgagaagttgcacgcggagagaattgctgcccttaagaaagaagttgagaagcgtgaagtgctaaaaaggcaaggtcatggtgaatacagggagataactgaaggggacttcctcggggaggttactggcagtgaaaaagtcatatgccatttttaccaccgtgaattttaccgttgcaagatcatggataagcatttgaaggcccttgccccagtctatgtgggaacaaaattcgtcaagcttgatgctgaaaatgctccattctttgtggccaaactggcaatcaagacactgccatgtgtaatattgttcaagaagggtattgctgttgaccgattagttgggtttcaagatctcagaagtaaagacgattttccgacaagagcgttggaaaatattctcaagacgaaagggataattgatgagaagaagaaagatgacgacgatgacgatgaagaaagcgaggctaagaataggagggttaggtcttcaactgctcaagactctgactcagactgaacctgagatgaggatcgaggactcaccgtttttgcactttggattttgtttgtttgtttgttctgtgttgtgctgtactgtactgtaattgatttgtgtaaccatgtatcggtaccagacaccacaacaagaacatgtacaagagattctttagcatccattgtgtgtaaaagctagggtttgtggctgccttttatttcgtttttcctcagccatcataggatggtacggctgatgtataatagattactatttgctatgtgggcgtcagatttgttttggcgtgcgctagagtgaaaaaggtcgcatgaaagcgaatctaaacccatgcgtgcttttgttttgtttttctgaaagggaatccatgcgtacttgagattctcattattagtacgtattagggtttgag

SEQ ID NO: 42568 - DNA, 2871 bp, Zea Mays
ccagcccagcccagccgcgccgacgggccccgcgcgtcattctctcacagctagctcgtcccagcgtcggcgtcgcggaagaacgctatacctcgcttcgccgctagtccaccaccacctaacaccaactcctctccaacctcctcgtcccgtccccgtcgattcgattcggtcgaagcgggcgggcggaggaggaggaggaggctagggattccggatgggcgcggcgccgaggaggctctagaggcgccagccgagttggtggtccggggggagagggagcggcgggagggcgggcggcgatggaggagaaggcgtcgtcgccgctgatcccgccgccgtcggagatcgacctggaggcgggcggcggcggagagcagctccagtgccggatctgcctcgagaccgacgggagggacttcatcgctccctgcaagtgcaaggggacgtccaagtacgtgcaccgcgactgcctcgaccactggagggcggtaaaggagggatttgcattttctcattgtactacctgcaaggctccatattacttgagggttcattcgcacactgacaggaaatggcgaacactgaagtttcgtttctttgttactagagatatattattcatctttgctctagtccagattatcatctctgcattggcatatttggtacattttattgatgggtgccaacaatattggttgaggacagcctgggcttttgataatgaagttagtttttattatatctgtggtgcattaatgttttttgctttgttgggactatcgggatgcttcataacctgttatgaccgaagagtacggaacgacctggctcagccttgtcgagaattatgtctttgttgctgtcagccagggatgtgtgcggattgccacctacctggcacgctgtgcatgtggactgactgcactacctgcttcgaaggctgtgctaccacagccggcgagtgcggtggttgcttgggaggggctggggaagccgggctaccgcttctcctcatcatgggggtcattgtgctggggcttttcacggtcatcggcatattctacagtgtcctggtcgcgaccatggttggccagcggatctggcagcgccactaccacattcttgccaaacggttgctaaccaaggagtatgttgtagaggacgtcgatggcgagcgcacagactggtgtccgccgccactgcccgcggagcacatcagccagctgaagtctctggggcttctgtaatatggaggctggtgaccctaagctaagaccggcgtggcgttacccagctccagctgtacaggagggaggctatactgtcaggcattctgcgttgaaatgtgtcaatattgatactttttctctttttttttcccttcttttttgtacattgtaatggcaaagctttctccctgacaaaacccaaaacttatatcaagtgaaaccgcctacatttttactggacaattcctttttaggccttgttcggctattcccattatacatgaattgtatgatattggaaacaatttagaagaattttgacttgcttgagatttaaacccacccaatctcactcaatctacatgaattgagagctaaccgaacgtgatcaacggcaactgggattcacagtacgaacctcgacctcgggttctgtaactgggacctttagcaaattccggcgagccggtgcggtgcggcggaggaggccgagggagacgccggcgcgagaaggagcatcaggaggaggcagcggagatggatccggactcggtgaagtcgacgctctctaacctggccttcggcaacgtcatcgccgccgccgcccgcgacctccaaaaggaaatggtggctaaagacaaggctcaatcagcacctgcaagccatgatgaagttgatcttgatgagctgttggatgacccagaacttgagaagttgcacgcggagagaattgctgcccttaagaaagaagttgagaagcgtgaagtgctaaaaaggcaaggtcatggtgaatacagggagataactgaaggggacttcctcggggaggttactggcagtgaaaaagtcatatgccatttttaccaccgtgaattttaccgttgcaagatcatggataagcatttgaaggcccttgccccagtctatgtgggaacaaaattcgtcaagcttgatgctgaaaatgctccattctttgtggccaaactggcaatcaagacactgccatgtgtaatattgttcaagaagggtattgctgttgaccgattagttgggtttcaagatctcagaagtaaagacgattttccgacaagagcgttggaaaatattctcaagacgaaagggataattgatgagaagaagaaagatgacgacgatgacgatgaagaaagcgaggctaagaataggagggttaggtcttcaactgctcaagactctgactcagactgaacctgagatgaggatcgaggactcaccgtttttgcactttggattttgtttgtttgtttgttctgtgttgtgctgtactgtactgtaattgatttgtgtaaccatgtatcggtaccagacaccacaacaagaacatgtacaagagattctttagcatccattgtgtgtaaaagctagggtttgtggctgccttttatttcgtttttcctcagccatcataggatggtacggctgatgtataatagattactatttgctatgtgggcgtcagatttgttttggcgtgcgctagagtgaaaaaggtcgcatgaaagcgaatctaaacccatgcgtgcttttgttttgtttttctgaaagggaatccatgcgtacttgagattctcattattagtacgtattagggtttgag

SEQ ID NO: 42569 - DNA, 2313 bp, Zea Mays
ccagcccagcccagccgcgccgacgggccccgcgcgtcattctctcacagctagctcgtcccagcgtcggcgtcgcggaagaacgctatacctcgcttcgccgctagtccaccaccacctaacaccaactcctctccaacctcctcgtcccgtccccgtcgattcgattcggtcgaagcgggcgggcggaggaggaggaggaggctagggattccggatgggcgcggcgccgaggaggctctagaggcgccagccgagttggtggtccggggggagagggagcggcgggagggcgggcggcgatggaggagaaggcgtcgtcgccgctgatcccgccgccgtcggagatcgacctggaggcgggcggcggcggagagcagctccagtgccggatctgcctcgagaccgacgggagggacttcatcgctccctgcaagtgcaaggggacgtccaagtacgtgcaccgcgactgcctcgaccactggagggcggtaaaggagggatttgcattttctcattgtactacctgcaaggctccatattacttgagggttcattcgcacactgacaggaaatggcgaacactgaagtttcgtttctttgttactagagatatattattcatctttgctctagtccagattatcatctctgcattggcatatttggtacattttattgatgggtgccaacaatattggttgaggacagcctgggcttttgataatgaagttagtttttattatatctgtggtgcattaatgttttttgctttgttgggactatcgggatgcttcataacctgttatgaccgaagagtacggaacgacctggctcagccttgtcgagaattatgtctttgttgctgtcagccagggtcatggttttcatgcctgcaccgtttgatcgcaccgacatgtgctgtattccaggatgtgtgcggattgccacctacctggcacgctgtgcatgtggactgactgcactacctgcttcgaaggctgtgctaccacagccggcgagtgcggtggttgcttgggaggggctggggaagccgggctaccgcttctcctcatcatgggggtcattgtgctggggcttttcacggtcatcggcatattctacagtgtcctggtcgcgaccatggttggccagcggatctggcagcgccactaccacattcttgccaaacggttgctaaccaaggagtatgttgtagaggacgtcgatggcgagcgcacagactggtgtccgccgccactgcccgcggagcacatcagccagctgaagtctctggggcttctgtaatatggaggctggctcaatcagcacctgcaagccatgatgaagttgatcttgatgagctgttggatgacccagaacttgagaagttgcacgcggagagaattgctgcccttaagaaagaagttgagaagcgtgaagtgctaaaaaggcaaggtcatggtgaatacagggagataactgaaggggacttcctcggggaggttactggcagtgaaaaagtcatatgccatttttaccaccgtgaattttaccgttgcaagatcatggataagcatttgaaggcccttgccccagtctatgtgggaacaaaattcgtcaagcttgatgctgaaaatgctccattctttgtggccaaactggcaatcaagacactgccatgtgtaatattgttcaagaagggtattgctgttgaccgattagttgggtttcaagatctcagaagtaaagacgattttccgacaagagcgttggaaaatattctcaagacgaaagggataattgatgagaagaagaaagatgacgacgatgacgatgaagaaagcgaggctaagaataggagggttaggtcttcaactgctcaagactctgactcagactgaacctgagatgaggatcgaggactcaccgtttttgcactttggattttgtttgtttgtttgttctgtgttgtgctgtactgtactgtaattgatttgtgtaaccatgtatcggtaccagacaccacaacaagaacatgtacaagagattctttagcatccattgtgtgtaaaagctagggtttgtggctgccttttatttcgtttttcctcagccatcataggatggtacggctgatgtataatagattactatttgctatgtgggcgtcagatttgttttggcgtgcgctagagtgaaaaaggtcgcatgaaagcgaatctaaacccatgcgtgcttttgttttgtttttctgaaagggaatccatgcgtacttgagattctcattattagtacgtattagggtttgag

SEQ ID NO: 42570 - DNA, 3284 bp, Zea Mays
gaacttcctaaactcatctcgcccgctgcctggtcagggtcaaccattcggctacaccggcgcgcccgccacccaaccgaacccaccttccaccacacccactggcagcccagcccagcccagccgcgccgacgggccccgcgcgtcattctctcacagctagctcgtcccagcgtcggcgtcgcggaagaacgctatacctcgcttcgccgctagtccaccaccacctaacaccaactcctctccaacctcctcgtcccgtccccgtcgattcgattcggtcgaagcgggcgggcggaggaggaggaggaggctagggattccggatgggcgcggcgccgaggaggctctagaggcgccagccgagttggtggtccggggggagagggagcggcgggagggcgggcggcgatggaggagaaggcgtcgtcgccgctgatcccgccgccgtcggagatcgacctggaggcgggcggcggcggagagcagctccagtgccggatctgcctcgagaccgacgggagggacttcatcgctccctgcaagtgcaaggggacgtccaagtacgtgcaccgcgactgcctcgaccactggagggcggtaaaggagggatttgcattttctcattgtactacctgcaaggctccatattacttgagggttcattcgcacactgacaggaaatggcgaacactgaagtttcgtttctttgttactagagatatattattcatctttgctctagtccagattatcatctctgcattggcatatttggtacattttattgatgggtgccaacaatattggttgaggacagcctgggcttttgataatgaagttagtttttattatatctgtggtgcattaatgttttttgctttgttgggactatcgggatgcttcataacctgttatgaccgaagagtacggaacgacctggctcagccttgtcgagaattatgtctttgttgctgtcagccagggatgtgtgcggattgccacctacctggcacgctgtgcatgtggactgactgcactacctgcttcgaaggctgtgctaccacagccggcgagtgcggtggttgcttgggaggggctggggaagccgggctaccgcttctcctcatcatgggggtcattgtgctggggcttttcacggtcatcggcatattctacagtgtcctggtcgcgaccatggttggccagcggatctggcagcgccactaccacattcttgccaaacggttgctaaccaaggagtatgttgtagaggacgtcgatggcgagcgcacagactggtgtccgccgccactgcccgcggagcacatcagccagctgaagtctctggggcttctgtaatatggaggctggtgaccctaagctaagaccggcgtggcgttacccagctccagctgtacaggagggaggctatactgtcaggcattctgcgttgaaatgtgtcaatattgatactttttctctttttttttcccttcttttttgtacattgtaatggcaaagctttctccctgacaaaacccaaaacttatatcaagtgaaaccgcctacatttttactggacaattcctttttaggccttgttcggctattcccattatacatgaattgtatgatattggaaacaatttagaagaattttgacttgcttgagatttaaacccacccaatctcactcaatctacatgaattgagagctaaccgaacgtgatcaacggcaactgggattcacagtacgaacctcgacctcgggttctgtaactgggacctttgtaagccagtgttctacatttttacttgattctacatgcagaattgtatcaaattgtttcgctgtttgattactgaacggattcttccccaaaaaagtttataaaaataaaaaggcgttttaaaacttacaagcccaactgcccaagttctttcaagtttcagctcaacttcgggtgcgggcctgttgggctcaatactttgggaacatcggtctggtggcccatgttctactatgaagagcttcccagccaccgaggcctagctagctcacttcgctcccctctttcttccccacgaaaccagagcaaattccggcgagccggtgcggtgcggcggaggaggccgagggagacgccggcgcgagaaggagcatcaggaggaggcagcggagatggatccggactcggtgaagtcgacgctctctaacctggccttcggcaacgtcatcgccgccgccgcccgcgacctccaaaaggaaatggtggctaaagacaaggctcaatcagcacctgcaagccatgatgaagttgatcttgatgagctgttggatgacccagaacttgagaagttgcacgcggagagaattgctgcccttaagaaagaagttgagaagcgtgaagtgctaaaaaggcaaggtcatggtgaatacagggagataactgaaggggacttcctcggggaggttactggcagtgaaaaagtcatatgccatttttaccaccgtgaattttaccgttgcaagatcatggataagcatttgaaggcccttgccccagtctatgtgggaacaaaattcgtcaagcttgatgctgaaaatgctccattctttgtggccaaactggcaatcaagacactgccatgtgtaatattgttcaagaagggtattgctgttgaccgattagttgggtttcaagatctcagaagtaaagacgattttccgacaagagcgttggaaaatattctcaagacgaaagggataattgatgagaagaagaaagatgacgacgatgacgatgaagaaagcgaggctaagaataggagggttaggtcttcaactgctcaagactctgactcagactgaacctgagatgaggatcgaggactcaccgtttttgcactttggattttgtttgtttgtttgttctgtgttgtgctgtactgtactgtaattgatttgtgtaaccatgtatcggtaccagacaccacaacaagaacatgtacaagagattctttagcatccattgtgtgtaaaagctagggtttgtggctgccttttatttcgtttttcctcagccatcataggatggtacggctgatgtataatagattactatttgctatgtgggcgtcagatttgttttggcgtgcgctagagtgaaaaaggtcgcatgaaagcgaatctaaacccatgcgtgcttttgttttgtttttctgaaagggaatccatgcgtacttgagattctcattattagtacgtattagggtttgag

SEQ ID NO: 42571 - DNA, 1174 bp, Zea Mays
ctcaactttaacgagccaaacacaaatgcttcctttctggccttcaatgaaattgatctttatttgctggcttgtcttgccatacttcaatggcgcagcctatgtgtaccagaattatgtgagacctgccttcataaagaaccagatggtcaacatttggtatgtccctcagaaaaaaggccttcttgggaaatctgatgacttcctcacagcacttgataagttcattgaagaaaatgggactgacgcgctgaagaaattggcgaacaaggctggcaagccatttaaacagtctgggaaatcatctaaggatcagaaagagacaaaatcatcaaaggattccaaagaaccgaagccatcaaaagatgcaaagcaaccaaagccatcaaaagatacaaaggagccaaagccaccaaaggtttcaaagtcacccaaggactccaaagaacagaagaaggcaacgctgaaagatccgaagaaagcaccaaaggattctaaaggactgaagaaagcgcttaaggatccgaaagaacaggaatcattggaagacccaaaggaacatacagcaaagaaggccggcaagcgtgtgacgttcgccgaggtggagcctgagaaggagctcaaggcctcgaacagtgactggcacccatcctctgatttccacgcggcgtaccctgagcagaacccatgggctagcggcttcatgatctttgaggatgaaaacagctactggaaccgaggacccctagactgctgagatcaaatgtatcgaggtggacactttttggtccgctagcagtgcaaggtcccaccagttcatcttcagccgaggagatgggtctcactcgcattatggcgacttgcgcctggtgtctgactctcggtcctgtaacatatttgtccgacgaatacctgtaggttgtagtgtagaattatcaattatgcagtgtggatggtgaaccggtgatattgtgtttcaggcggtgaaccttgttagttaggagaattgagatagtagcagtgtggtgctaaaccttatctggtttctggttgtgttgcttgctgtgctccctggtgcgtttccagtatctgcacaagtgccacaaaagtctgaccgtgatgaaaagatccgtaaaatcgtgcgaacttgccgttaccaatgccattttggaac

SEQ ID NO: 42572 - DNA, 1376 bp, Zea Mays
aaaaaatgggtgtacggttctgggaccaggatgtattaaaatttaaaccttaacatggatcgatgtgtgctgtaccgaggcctttggtggcattggcttatcctttgtatgcttccattaaggcaatagagaccaaatctcctgtggatgatcaacaatggctcacatattgggtcctgtactcactaataacattgtttgaactcacatttgcatcaattattcagtggcttcctttctggccttcaatgaaattgatctttatttgctggcttgtcttgccatacttcaatggcgcagcctatgtgtaccagaattatgtgagacctgccttcataaagaaccagatggtcaacatttggtatgtccctcagaaaaaaggccttcttgggaaatctgatgacttcctcacagcacttgataagttcattgaagaaaatgggactgacgcgctgaagaaattggcgaacaaggctggcaagccatttaaacagtctgggaaatcatctaaggatcagaaagagacaaaatcatcaaaggattccaaagaaccgaagccatcaaaagatgcaaagcaaccaaagccatcaaaagatacaaaggagccaaagccaccaaaggtttcaaagtcacccaaggactccaaagaacagaagaaggcaacgctgaaagatccgaagaaagcaccaaaggattctaaaggactgaagaaagcgcttaaggatccgaaagaacaggaatcattggaagacccaaaggaacatacagcaaagaaggccggcaagcgtgtgacgttcgccgaggtggagcctgagaaggagctcaaggcctcgaacagtgactggcacccatcctctgatttccacgcggcgtaccctgagcagaacccatgggctagcggcttcatgatctttgaggatgaaaacagctactggaaccgaggacccctagactgctgagatcaaatgtatcgaggtggacactttttggtccgctagcagtgcaaggtcccaccagttcatcttcagccgaggagatgggtctcactcgcattatggcgacttgcgcctggtgtctgactctcggtcctgtaacatatttgtccgacgaatacctgtaggttgtagtgtagaattatcaattatgcagtgtggatggtgaaccggtgatattgtgtttcaggcggtgaaccttgttagttaggagaattgagatagtagcagtgtggtgctaaaccttatctggtttctggttgtgttgcttgctgtgctccctggtgcgtttccagtatctgcacaagtgccacaaaagtctgaccgtgatgaaaagatccgtaaaatcgtgcgaacttgccgttaccaatgccattttggaac

SEQ ID NO: 42573 - DNA, 1374 bp, Zea Mays
aatggcgtaggttatagtcggcgtcatgtttcgatttcgagaactcttgcgcggcgcctgacaagaaatccttctcggcctttggtggcattggcttatcctttgtatgcttccattaaggcaatagagaccaaatctcctgtggatgatcaacaatggctcacatattgggtcctgtactcactaataacattgtttgaactcacatttgcatcaattattcagtggcttcctttctggccttcaatgaaattgatctttatttgctggcttgtcttgccatacttcaatggcgcagcctatgtgtaccagaattatgtgagacctgccttcataaagaaccagatggtcaacatttggtatgtccctcagaaaaaaggccttcttgggaaatctgatgacttcctcacagcacttgataagttcattgaagaaaatgggactgacgcgctgaagaaattggcgaacaaggctggcaagccatttaaacagtctgggaaatcatctaaggatcagaaagagacaaaatcatcaaaggattccaaagaaccgaagccatcaaaagatgcaaagcaaccaaagccatcaaaagatacaaaggagccaaagccaccaaaggtttcaaagtcacccaaggactccaaagaacagaagaaggcaacgctgaaagatccgaagaaagcaccaaaggattctaaaggactgaagaaagcgcttaaggatccgaaagaacaggaatcattggaagacccaaaggaacatacagcaaagaaggccggcaagcgtgtgacgttcgccgaggtggagcctgagaaggagctcaaggcctcgaacagtgactggcacccatcctctgatttccacgcggcgtaccctgagcagaacccatgggctagcggcttcatgatctttgaggatgaaaacagctactggaaccgaggacccctagactgctgagatcaaatgtatcgaggtggacactttttggtccgctagcagtgcaaggtcccaccagttcatcttcagccgaggagatgggtctcactcgcattatggcgacttgcgcctggtgtctgactctcggtcctgtaacatatttgtccgacgaatacctgtaggttgtagtgtagaattatcaattatgcagtgtggatggtgaaccggtgatattgtgtttcaggcggtgaaccttgttagttaggagaattgagatagtagcagtgtggtgctaaaccttatctggtttctggttgtgttgcttgctgtgctccctggtgcgtttccagtatctgcacaagtgccacaaaagtctgaccgtgatgaaaagatccgtaaaatcgtgcgaacttgccgttaccaatgccattttggaac

SEQ ID NO: 42574 - DNA, 1646 bp, Zea Mays
taaccttgtcctctgtatccgtgctggtgctctgcttggtctcggtctcgtcaccgccacgccggtctgccgtcgtctcgtctgctgcactccactgtccactccactctcccaccgcactttcctctctcctcccctgttttcgctcccctcgagacccccaaagcaccgaaagggggaggagcggagggagatagagaaagcggcggggttcaagaacgccgcggccatccggagccaggattctcccgatacaccccctcgttcccagttcttcagtggcgccgatttggagttccagagacggcgatgggctccggatctctgctcaaggtcttcgccaacaacttcgacgtccttgcagggcctttggtggcattggcttatcctttgcaatagagaccaaatctcctgtggatgatcaacaatggctcacatattgggtcctgtactcactaataacattgtttgaactcacatttgcatcaattattcagtggcttcctttctggccttcaatgaaattgatctttatttgctggcttgtcttgccatacttcaatggcgcagcctatgtgtaccagaattatgtgagacctgccttcataaagaaccagatggtcaacatttggtatgtccctcagaaaaaaggccttcttgggaaatctgatgacttcctcacagcacttgataagttcattgaagaaaatgggactgacgcgctgaagaaattggcgaacaaggctggcaagccatttaaacagtctgggaaatcatctaaggatcagaaagagacaaaatcatcaaaggattccaaagaaccgaagccatcaaaagatgcaaagcaaccaaagccatcaaaagatacaaaggagccaaagccaccaaaggtttcaaagtcacccaaggactccaaagaacagaagaaggcaacgctgaaagatccgaagaaagcaccaaaggattctaaaggactgaagaaagcgcttaaggatccgaaagaacaggaatcattggaagacccaaaggaacatacagcaaagaaggccggcaagcgtgtgacgttcgccgaggtggagcctgagaaggagctcaaggcctcgaacagtgactggcacccatcctctgatttccacgcggcgtaccctgagcagaacccatgggctagcggcttcatgatctttgaggatgaaaacagctactggaaccgaggacccctagactgctgagatcaaatgtatcgaggtggacactttttggtccgctagcagtgcaaggtcccaccagttcatcttcagccgaggagatgggtctcactcgcattatggcgacttgcgcctggtgtctgactctcggtcctgtaacatatttgtccgacgaatacctgtaggttgtagtgtagaattatcaattatgcagtgtggatggtgaaccggtgatattgtgtttcaggcggtgaaccttgttagttaggagaattgagatagtagcagtgtggtgctaaaccttatctggtttctggttgtgttgcttgctgtgctccctggtgcgtttccagtatctgcacaagtgccacaaaagtctgaccgtgatgaaaagatccgtaaaatcgtgcgaacttgccgttaccaatgccattttggaac

SEQ ID NO: 42575 - DNA, 1181 bp, Zea Mays
cgcagctggacgggagagttctccattggctagctcgcttatcaggaagcaagtcaaaagctgttaaggagcttgatgccgctacttccaaagaagatgggacagtagcatccactcttgatcgctccaagcgttggcttctttctcactctcaacatctcaacttcttctctatcttgatacttgcttcggttccgaacccactctttgatctcgctggaattatgtgtggccaatttggtgtacctttctgggagttcttttttgcaactttgattgggaaggccatcatcaagactcatattcagacgctgtttatcgtgtccttatgcaacaaccagctcctgtatcttatggaaaaggagctaatctggatattcggtcacattcctgggttttctgctaccctaccatctgtgattgccaaactccatgctgccaaggacaagtatctatcaccaccgacaccagtctcggcgtcctcacagatggaggagaaaagttggaatctctcttttacattggtttggaactctatagtgtggcttgtgcttctgaacttctccgttaagataatcacgtcgacggcacaggattatctcaaaaagcagcaggatatggagatggaacgcgtttctgattctccgcccccggaacaaaactaactagcggcgcaagtttatttcagctgctagctgcacagattctcctctgcatttttagcaactggttaagcgtctgcagacgattccaagttccaacgattatcaattagtattagtagctattcatctacacagtcaacgaaaacatgggcctggcaactggccgggtgatggctgtgacctcctatcatatcattgagcctgtagtgggcagttcctggaggagaattctactgttcttttttgtttttccggacatctacacggatagacagtagggattgtttgtgtgaagcacggttggcttatgccgagatttagcactggtagatgtttctatttgttttggaaatgctatagaaacatgtgagcattcaacaatgatacgctctgttaagtttgttgtgtattttggtttgcaactggtgcccgaaagagcaaacagtggctccatcaatttcctttggcaagtaaaaccccctatagaagacattgcttgtcctaaatcttgtccgc

SEQ ID NO: 42576 - DNA, 2100 bp, Zea Mays
cttcacaacggacgagaggcgtcagacaaaaaatagaatctggttgctcatctcatctcacgactcataaaaaaatagcgtcttttatcatatccgttgctcgcaaaacgcccccacacgccgccggcgaatcggcgactccccttgcgacgggaggaagcagccacgccgccgtctcggcgactccctgacgactgcctctccggtctcgaacgcgatctggcccatggtggctctggcgccgttggttcgtgagatctagggttgtcgagcgccgcggagtgggagcggatggggcgccggaagatgtccgcagcggcgccgccgtcccggagctggtccaacgttggcgggagcgtaatccccgaactacttgcaaaacacaaaatggacttggaaaatttgacgctgacaaaacatccaatcagaacattacattttttcctgttagccatgttacaatacttgaaaagattagcaacatatatcctgagaaagagtggtttgttctttctcttaattgttttggtggtagcttccggaatcttactctctatttcagatggcctgcataagaaggagttccttaattatgctaaattcgtgttgtggtggatttcattaggtgtggcttcatcaattggactaggttctgggttgcatacatttgtgctgtatctaggtcctcatattgctctgttcactattaaagctgttcaatgtggccgaattgatttgaaaacggctccatatgataccatacagctaaaggttgggccatcatggctcgacaagaaatgttctgaatttggtccgcctgtgtatccagcatcagctcattctgttaggatccccgtctttgatttactacctcagatacagctggaagcagttctttggggcattgggactgcacttggcgagcttcccccttattttatatcacgagcagctcgcttatcaggaagcaagtcaaaagctgttaaggagcttgatgccgctacttccaaagaagatgggacagtagcatccactcttgatcgctccaagcgttggcttctttctcactctcaacatctcaacttcttctctatcttgatacttgcttcggttccgaacccactctttgatctcgctggaattatgtgtggccaatttggtgtacctttctgggagttcttttttgcaactttgattgggaaggccatcatcaagactcatattcagacgctgtttatcgtgtccttatgcaacaaccagctcctgtatcttatggaaaaggagctaatctggatattcggtcacattcctgggttttctgctaccctaccatctgtgattgccaaactccatgctgccaaggacaagtatctatcaccaccgacaccagtctcggcgtcctcacagatggaggagaaaagttggaatctctcttttacattggtttggaactctatagtgtggcttgtgcttctgaacttctccgttaagataatcacgtcgacggcacaggattatctcaaaaagcagcaggatatggagatggaacgcgtttctgattctccgcccccggaacaaaactaactagcggcgcaagtttatttcagctgctagctgcacagattctcctctgcatttttagcaactggttaagcgtctgcagacgattccaagttccaacgattatcaattagtattagtagctattcatctacacagtcaacgaaaacatgggcctggcaactggccgggtgatggctgtgacctcctatcatatcattgagcctgtagtgggcagttcctggaggagaattctactgttcttttttgtttttccggacatctacacggatagacagtagggattgtttgtgtgaagcacggttggcttatgccgagatttagcactggtagatgtttctatttgttttggaaatgctatagaaacatgtgagcattcaacaatgatacgctctgttaagtttgttgtgtattttggtttgcaactggtgcccgaaagagcaaacagtggctccatcaatttcctttggcaagtaaaaccccctatagaagacattgcttgtcctaaatcttgtccgc

SEQ ID NO: 42577 - DNA, 1882 bp, Zea Mays
cttcacaacggacgagaggcgtcagacaaaaaatagaatctggttgctcatctcatctcacgactcataaaaaaatagcgtcttttatcatatccgttgctcgcaaaacgcccccacacgccgccggcgaatcggcgactccccttgcgacgggaggaagcagccacgccgccgtctcggcgactccctgacgactgcctctccggtctcgaacgcgatctggcccatggtggctctggcgccgttggttcgtgagatctagggttgtcgagcgccgcggagtgggagcggatggggcgccggaagatgtccgcagcggcgccgccgtcccggagctggtccaacgttggcgggagcgtaatccccgaactacttgcaaaacacaaaatggacttggaaaatttgacgctgacaaaacatccaatcagaacattacattttttcctgttagccatgttacaatacttgaaaagattagcaacatatatcctgagaaagagtggtttgttctttctcttaattgttttggtggtagcttccggaatcttactctctatttcagatggcctgcataagaagcatgtgcaggagttccttaattatgctaaattcgtgttgtggtggatttcattaggtgtggcttcatcaattggactagatacagctggaagcagttctttggggcattgggactgcacttggcgagcttcccccttattttatatcacgagcagctcgcttatcaggaagcaagtcaaaagctgttaaggagcttgatgccgctacttccaaagaagatgggacagtagcatccactcttgatcgctccaagcgttggcttctttctcactctcaacatctcaacttcttctctatcttgatacttgcttcggttccgaacccactctttgatctcgctggaattatgtgtggccaatttggtgtacctttctgggagttcttttttgcaactttgattgggaaggccatcatcaagactcatattcagacgctgtttatcgtgtccttatgcaacaaccagctcctgtatcttatggaaaaggagctaatctggatattcggtcacattcctgggttttctgctaccctaccatctgtgattgccaaactccatgctgccaaggacaagtatctatcaccaccgacaccagtctcggcgtcctcacagatggaggagaaaagttggaatctctcttttacattggtttggaactctatagtgtggcttgtgcttctgaacttctccgttaagataatcacgtcgacggcacaggattatctcaaaaagcagcaggatatggagatggaacgcgtttctgattctccgcccccggaacaaaactaactagcggcgcaagtttatttcagctgctagctgcacagattctcctctgcatttttagcaactggttaagcgtctgcagacgattccaagttccaacgattatcaattagtattagtagctattcatctacacagtcaacgaaaacatgggcctggcaactggccgggtgatggctgtgacctcctatcatatcattgagcctgtagtgggcagttcctggaggagaattctactgttcttttttgtttttccggacatctacacggatagacagtagggattgtttgtgtgaagcacggttggcttatgccgagatttagcactggtagatgtttctatttgttttggaaatgctatagaaacatgtgagcattcaacaatgatacgctctgttaagtttgttgtgtattttggtttgcaactggtgcccgaaagagcaaacagtggctccatcaatttcctttggcaagtaaaaccccctatagaagacattgcttgtcctaaatcttgtccgc

SEQ ID NO: 42578 - DNA, 2048 bp, Zea Mays
cttcacaacggacgagaggcgtcagacaaaaaatagaatctggttgctcatctcatctcacgactcataaaaaaatagcgtcttttatcatatccgttgctcgcaaaacgcccccacacgccgccggcgaatcggcgactccccttgcgacgggaggaagcagccacgccgccgtctcggcgactccctgacgactgcctctccggtctcgaacgcgatctggcccatggtggctctggcgccgttggttcgtgagatctagggttgtcgagcgccgcggagtgggagcggatggggcgccggaagatgtccgcagcggcgccgccgtcccggagctggtccaacgttggcgggagcgtaatccccgaacattacattttttcctgttagccatgttacaatacttgaaaagattagcaacatatatcctgagaaagagtggtttgttctttctcttaattgttttggtggtagcttccggaatcttactctctatttcagatggcctgcataagaagcatgtgcaggagttccttaattatgctaaattcgtgttgtggtggatttcattaggtgtggcttcatcaattggactaggttctgggttgcatacatttgtgctgtatctaggtcctcatattgctctgttcactattaaagctgttcaatgtggccgaattgatttgaaaacggctccatatgataccatacagctaaaggttgggccatcatggctcgacaagaaatgttctgaatttggtccgcctgtgtatccagcatcagctcattctgttaggatccccgtctttgatttactacctcagatacagctggaagcagttctttggggcattgggactgcacttggcgagcttcccccttattttatatcacgagcagctcgcttatcaggaagcaagtcaaaagctgttaaggagcttgatgccgctacttccaaagaagatgggacagtagcatccactcttgatcgctccaagcgttggcttctttctcactctcaacatctcaacttcttctctatcttgatacttgcttcggttccgaacccactctttgatctcgctggaattatgtgtggccaatttggtgtacctttctgggagttcttttttgcaactttgattgggaaggccatcatcaagactcatattcagacgctgtttatcgtgtccttatgcaacaaccagctcctgtatcttatggaaaaggagctaatctggatattcggtcacattcctgggttttctgctaccctaccatctgtgattgccaaactccatgctgccaaggacaagtatctatcaccaccgacaccagtctcggcgtcctcacagatggaggagaaaagttggaatctctcttttacattggtttggaactctatagtgtggcttgtgcttctgaacttctccgttaagataatcacgtcgacggcacaggattatctcaaaaagcagcaggatatggagatggaacgcgtttctgattctccgcccccggaacaaaactaactagcggcgcaagtttatttcagctgctagctgcacagattctcctctgcatttttagcaactggttaagcgtctgcagacgattccaagttccaacgattatcaattagtattagtagctattcatctacacagtcaacgaaaacatgggcctggcaactggccgggtgatggctgtgacctcctatcatatcattgagcctgtagtgggcagttcctggaggagaattctactgttcttttttgtttttccggacatctacacggatagacagtagggattgtttgtgtgaagcacggttggcttatgccgagatttagcactggtagatgtttctatttgttttggaaatgctatagaaacatgtgagcattcaacaatgatacgctctgttaagtttgttgtgtattttggtttgcaactggtgcccgaaagagcaaacagtggctccatcaatttcctttggcaagtaaaaccccctatagaagacattgcttgtcctaaatcttgtccgc

SEQ ID NO: 42579 - DNA, 2013 bp, Zea Mays
aacagccagcttcacaacggacgagaggcgtcagacaaaaaatagaatctggttgctcatctcatctcacgactcataaaaaaatagcgtcttttatcatatccgttgctcgcaaaacgcccccacacgccgccggcgaatcggcgactccccttgcgacgggaggaagcagccacgccgccgtctcggcgactccctgacgactgcctctccggtctcgaacgcgatctggcccatggtggctctggcgccgttggttcgtgagatctagggttgtcgagcgccgcggagtgggagcggatggggcgccggaagatgtccgcagcggcgccgccgtcccggagctggtccaacgttggcgggagcgtaatccccgaactacttgcaaaacacaaaatggacttggaaaatttgacgctgacaaaacatccaatcagaacattacattttttcctgttagccatgttacaatacttgaaaagattagcaacatatatcctgagaaagagtggtttgttctttctcttaattgttttggtggtagcttccggaatcttactctctatttcagatggcctgcataagaagcatgtgcaggagttccttaattatgctaaattcgtgttgtggtggatttcattaggtgtggcttcatcaattggactaggttctgggttgcatacatttgtgctgtatctaggtcctcatattgctctgttcactattaaagctgttcaatgtggccgaattgatttgaaaacggctccatatgataccatacagctaaagatacagctggaagcagttctttggggcattgggactgcacttggcgagcttcccccttattttatatcacgagcagctcgcttatcaggaagcaagtcaaaagctgttaaggagcttgatgccgctacttccaaagaagatgggacagtagcatccactcttgatcgctccaagcgttggcttctttctcactctcaacatctcaacttcttctctatcttgatacttgcttcggttccgaacccactctttgatctcgctggaattatgtgtggccaatttggtgtacctttctgggagttcttttttgcaactttgattgggaaggccatcatcaagactcatattcagacgctgtttatcgtgtccttatgcaacaaccagctcctgtatcttatggaaaaggagctaatctggatattcggtcacattcctgggttttctgctaccctaccatctgtgattgccaaactccatgctgccaaggacaagtatctatcaccaccgacaccagtctcggcgtcctcacagatggaggagaaaagttggaatctctcttttacattggtttggaactctatagtgtggcttgtgcttctgaacttctccgttaagataatcacgtcgacggcacaggattatctcaaaaagcagcaggatatggagatggaacgcgtttctgattctccgcccccggaacaaaactaactagcggcgcaagtttatttcagctgctagctgcacagattctcctctgcatttttagcaactggttaagcgtctgcagacgattccaagttccaacgattatcaattagtattagtagctattcatctacacagtcaacgaaaacatgggcctggcaactggccgggtgatggctgtgacctcctatcatatcattgagcctgtagtgggcagttcctggaggagaattctactgttcttttttgtttttccggacatctacacggatagacagtagggattgtttgtgtgaagcacggttggcttatgccgagatttagcactggtagatgtttctatttgttttggaaatgctatagaaacatgtgagcattcaacaatgatacgctctgttaagtttgttgtgtattttggtttgcaactggtgcccgaaagagcaaacagtggctccatcaatttcctttggcaagtaaaaccccctatagaagacattgcttgtcctaaatcttgtccgc

SEQ ID NO: 42580 - DNA, 1093 bp, Zea Mays
caggagggcaaaagagcatagtctggagctcaaggaagttttgaggactgtccctgaggttcaagaattagttgacaaagaagaatctaggaagcttttgagtgtcaaagagcaagatgggggaatcggagtgaggtcatatttgaaatcagctttcaccaagttaatgacagcgtgtgatgaagcagtttctgaagcaattacaaaccttaagagtcgcttaaaaagtgagagtaaggctagaagtttaacgaagaaggagcaacttgttctgtcattggagaagcagtacccaggagatgttggtgttctggcagcattcttccttaattttgttaagctcaatcctggtgaagcactttatgttagtgcaaacgaacctcatgcatatctctcaggggagtgcatcgaatgtatggccacttcagacaatgttgtccgtgcaggtctaactcctaaatacagagatgtgcaaactctctgctcgatgttgacttataatcaggccttccctgaaattctgcaaggaatgcctgtacagccatacgtgactcgttacaccccatcaactgatgaattcgaagttgaccgctacttgctacctcctggaaaatcagtcaccatgtctccggtgcctggtccatccatattcatcgtcttgacaggagaaggagaaatccaggcaggtttcatgactggcagtgcaaaggcgaaggaaggtgacgttttctttgtgccggctaacaccaaggtcaagctctacacttcttgccccaggtccatgcaactgtatagggctggggttaacagcagtttcctgagttgatgggcaactggtttctagggttggcatctgtaggttaggtaccagctacacaaggattttcatgtttggcacttgtccaagaagtaagttaattatgtgggttctcatcgtgtataggaaatatggagaataagttcatcccttgtttattttataaatttgtatttcatttccaaatctgacgagctgctgggatcacaaggatatgtaattcgagttcaaagttaaatgtgcatcttgtgaacattagggctggaaacgagccga

SEQ ID NO: 42581 - DNA, 2008 bp, Zea Mays
ctcgtaccgagacaggacgtgtgtacacgtactgtacatctatgtcactagttattattcggctgcaaatacggccacagcattcttcccgccgtgtgacgacaaaaaaagaaaaaaaacgaaacaaaattatagagaaatacggccatcggccagaaccagtagctaccactcctgtctatctcagtatctctacgcgcgaaaaagggcgacgacccgggcccaccacgcggcgcaaccgcttcttccgcggtgaaccaaaccaaaccaaaccaaaccaacctcctcccctgtctgcctgccctggctccagctcccgcccgtgcacgctctcgcgccgttcaccgtcgccacctcctcccctaccggccgctccgtccataaaacccaaccgctcccaacccactccacatttcctcccctggggtacaccgtgcacacaaccgccgccgcagcccctcagactccctcctcctcctcctcctccgcgcgggaacgggaaatggcgtccaccacggcctccctcgcccccgcggccgcgctggagcggctgggcctcctcgccgcgcccaccgacgccgacgacccgtccccgccgctgcccgcgccgctcccggggctcctccccctgcgctgcgccgtgcagcactacgagtggggccggcgcggcgccgactccctcgtcgcgcgcctcgccggcgacggggacggccggccctgcgccgagctctggatgggcacgcaccccgccgcgccctcctcgctggcgcccgacgtctcgctccgcgactgggtcgcgcgcaacccggccgcgctcggccgcgccgtcgccgcgcgctggggcggcgacctcccgttcctcttcaaggtgctgtcggtggccaaggcgctgtccatccaggcgcacccggaccgggagctcgccgcggcgctgcacgcgctgcgcccggccacgtaccgcgacgccaaccacaagcccgagatggccgtcgccgtcaccgagttccacgcgctctgcggcttcgccgccacgcaggagctcaaggaagttttgaggactgtccctgaggttcaagaattagttgacaaagaagaatctaggaagcttttgagtgtcaaagagcaagatgggggaatcggagtgaggtcatatttgaaatcagctttcaccaagttaatgacagcgtgtgatgaagcagtttctgaagcaattacaaaccttaagagtcgcttaaaaagtgagagtaaggctagaagtttaacgaagaaggagcaacttgttctgtcattggagaagcagtacccaggagatgttggtgttctggcagcattcttccttaattttgttaagctcaatcctggtctaactcctaaatacagagatgtgcaaactctctgctcgatgttgacttataatcaggccttccctgaaattctgcaaggaatgcctgtacagccatacgtgactcgttacaccccatcaactgatgaattcgaagttgaccgctacttgctacctcctggaaaatcagtcaccatgtctccggtgcctggtccatccatattcatcgtcttgacaggagaaggagaaatccaggcaggtttcatgactggcagtgcaaaggcgaaggaaggtgacgttttctttgtgccggctaacaccaaggtcaagctctacacttcttgccccaggtccatgcaactgtatagggctggggttaacagcagtttcctgagttgatgggcaactggtttctagggttggcatctgtaggttaggtaccagctacacaaggattttcatgtttggcacttgtccaagaagtaagttaattatgtgggttctcatcgtgtataggaaatatggagaataagttcatcccttgtttattttataaatttgtatttcatttccaaatctgacgagctgctgggatcacaaggatatgtaattcgagttcaaagttaaatgtgcatcttgtgaacattagggctggaaacgagccga

SEQ ID NO: 42582 - DNA, 2476 bp, Zea Mays
ctcgtaccgagacaggacgtgtgtacacgtactgtacatctatgtcactagttattattcggctgcaaatacggccacagcattcttcccgccgtgtgacgacaaaaaaagaaaaaaaacgaaacaaaattatagagaaatacggccatcggccagaaccagtagctaccactcctgtctatctcagtatctctacgcgcgaaaaagggcgacgacccgggcccaccacgcggcgcaaccgcttcttccgcggtgaaccaaaccaaaccaaaccaaaccaacctcctcccctgtctgcctgccctggctccagctcccgcccgtgcacgctctcgcgccgttcaccgtcgccacctcctcccctaccggccgctccgtccataaaacccaaccgctcccaacccactccacatttcctcccctggggtacaccgtgcacacaaccgccgccgcagcccctcagactccctcctcctcctcctcctccgcgcgggaacgggaaatggcgtccaccacggcctccctcgcccccgcggccgcgctggagcggctgggcctcctcgccgcgcccaccgacgccgacgacccgtccccgccgctgcccgcgccgctcccggggctcctccccctgcgctgcgccgtgcagcactacgagtggggccggcgcggcgccgactccctcgtcgcgcgcctcgccggcgacggggacggccggccctgcgccgagctctggatgggcacgcaccccgccgcgccctcctcgctggcgcccgacgtctcgctccgcgactgggtcgcgcgcaacccggccgcgctcggccgcgccgtcgccgcgcgctggggcggcgacctcccgttcctcttcaaggtgctgtcggtggccaaggcgctgtccatccaggcgcacccggaccgggagctcgccgcggcgctgcacgcgctgcgcccggccacgtaccgcgacgccaaccacaagcccgagatggccgtcgccgtcaccgagttccacgcgctctgcggcttcgccgccacgcaggagctcaaggaagttttgaggactgtccctgaggttcaagaattagttgacaaagaagaatctaggaagcttttgagtgtcaaagagcaagatgggggaatcggagtgaggtcatatttgaaatcagctttcaccaagttaatgacagcgtgtgatgaagcagtttctgaagcaattacaaaccttaagagtcgcttaaaaagtgagagtaaggctagaagtttaacgaagaaggagcaacttgttctgtcattggagaagcagtacccaggagatgttggtgttctggcagcattcttccttaattttgttaagctcaatcctggtgaagcactttatgttagtgcaaacgaacctcatgcatatctctcaggggagtgcatcgaatgtatggccacttcagacaatgttgtccgtgcaggtctaactcctaaatacagagatgtgcaaactctctgctcgatgttgacttataatcaggtcagttgttttgctccgtcaattaatttccatcgttcgtttattatcactatcagtttactatccttcattattggccatttaatgatgaaatgtgattactcaaaacacgtggggtttggttataatcagacttagttaagggtctgtttggttgggctgtggctgtggaaaaagttgctgtgggctgtgagctgtggaaaaaactgctgtaggctgtgtgctgttaaaaagctaaaaatcgtttggtggaaaccactaaaagtcgttaaaaattcttcgatatatgttttcacagtttcatccaaaagtcactaaaagcaggtacagggtaatgacataagtaataagattttgaatttctacatgcaggccttccctgaaattctgcaaggaatgcctgtacagccatacgtgactcgttacaccccatcaactgatgaattcgaagttgaccgctacttgctacctcctggaaaatcagtcaccatgtctccggtgcctggtccatccatattcatcgtcttgacaggagaaggagaaatccaggcaggtttcatgactggcagtgcaaaggcgaaggaaggtgacgttttctttgtgccggctaacaccaaggtcaagctctacacttcttgccccaggtccatgcaactgtatagggctggggttaacagcagtttcctgagttgatgggcaactggtttctagggttggcatctgtaggttaggtaccagctacacaaggattttcatgtttggcacttgtccaagaagtaagttaattatgtgggttctcatcgtgtataggaaatatggagaataagttcatcccttgtttattttataaatttgtatttcatttccaaatctgacgagctgctgggatcacaaggatatgtaattcgagttcaaagttaaatgtgcatcttgtgaacattagggctggaaacgagccga

SEQ ID NO: 42583 - DNA, 804 bp, Zea Mays
aaaaaccacatgccagggttcagttaatggcactgttgcttctaaggcatgcattgtctatgtcagacaacgaaggaaacgatgatgacgcttctaccatattctcgctttttctgcttcgagctgctgggtttctgctgccgtgctacatcatggcatggatattcagtattttgcatcgccgtcgacaaagacaggaagaggctgcactggcggctgcagaggtggccttcatcctacagtcggccaggggccgcgccctccagtttgccatcgctccagactcccccgccaccccgcagcatgagccagtgtcgcagcaacagcaatagtggctgacaaccacatccccagtagttgctcacgactactgaccatacgtatctgtttcgttttcttgggcatcatactgagtcacaaaggttaagcctgggcttctgcctcccgtggccagtttgggtgtcagtgtcacccaaagttcgttacacccgaaaccttgtgctttgtattaaaccgagtgtgatccgagaatataccaatttaatgtaaattcattcttgttcttactgcggcatcattattaaccgttgtatgcactgtaatgtacagtctttcataatactatttatttttctatatggcatatttgatagatgtgaacgatgtggtgtatggaaattgaaacctctattgtttattgtgggaactaatagtgtgtttggattgagaacatatcaaatgcacatagaagtttagtgcacatgatgcacatattaaatcatcatcacttattttagatctaac

SEQ ID NO: 42584 - DNA, 1421 bp, Zea Mays
cagcactgcccctgtatcgcatcttaaggagatcggttcctgcgtgcagaggcggcaacaagcgctgcagagggaggagggatttgggatggctggtgacgaccatgtggtggttgacgtgaacggcttagcaaaatccaaggatgacgggggttccaagaagctgtctgaggatgcaaatggttcggctccggctgctgcatctttgtcagcagctgttgacttggtccaggaggaggaggaggaggagggtgatggggaggaggagccgctaatccaggccgcggagtgccgcatatgccaggaggaagatagcgtgaagaacctcgagaaaccgtgtgcttgcagcggcagtctcaagtatgctcacagagcttgcgtgcaacgctggtgcaacgagaaaggagacactacttgtgaaatttgtcatgaggaatacaagccaggttacactgcgccacctcgtgttcagccagatgagacaaccatagacattgatggtgatttggttatggatttgcgagacccaaggattcttgctgtagcagctgcccaacatcgtcttcttgaggcagagtatgatggttacgctagtacagatgctagtggtgctgcattctgccgttcagctgcgcttattttaatggcactgttgcttctaaggcatgcattgtctatgtcagacaacgaaggaaacgatgatgacgcttctaccatattctcgctttttctgcttcgagctgctgggtttctgctgccgtgctacatcatggcatggatattcagtattttgcatcgccgtcgacaaagacaggaagaggctgcactggcggctgcagaggtggccttcatcctacagtcggccaggggccgcgccctccagtttgccatcgctccagactcccccgccaccccgcagcatgagccagtgtcgcagcaacagcaatagtggctgacaaccacatccccagtagttgctcacgactactgaccatacgtatctgtttcgttttcttgggcatcatactgagtcacaaaggttaagcctgggcttctgcctcccgtggccagtttgggtgtcagtgtcacccaaagttcgttacacccgaaaccttgtgctttgtattaaaccgagtgtgatccgagaatataccaatttaatgtaaattcattcttgttcttactgcggcatcattattaaccgttgtatgcactgtaatgtacagtctttcataatactatttatttttctatatggcatatttgatagatgtgaacgatgtggtgtatggaaattgaaacctctattgtttattgtgggaactaatagtgtgtttggattgagaacatatcaaatgcacatagaagtttagtgcacatgatgcacatattaaatcatcatcacttattttagatctaac

SEQ ID NO: 42585 - DNA, 1427 bp, Zea Mays
cttcgaaatggaggctctccatttttaggcacgggagatcggttcctgcgtgcagaggcggcaacaagcgctgcagagggaggagggatttgggatggctggtgacgaccatgtggtggttgacgtgaacggcttagcaaaatccaaggatgacgggggttccaagaagctgtctgaggatgcaaatggttcggctccggctgctgcatctttgtcagcagctgttgacttggtccaggaggaggaggaggaggagggtgatggggaggaggagccgctaatccaggccgcggagtgccgcatatgccaggaggaagatagcgtgaagaacctcgagaaaccgtgtgcttgcagcggcagtctcaagtatgctcacagagcttgcgtgcaacgctggtgcaacgagaaaggagacactacttgtgaaatttgtcatgaggaatacaagccaggttacactgcgccacctcgtgttcagccagatgagacaaccatagacattgatggtgatttggttatggatttgcgagacccaaggattcttgctgtagcagctgcccaacatcgtcttcttgaggcagagtatgatggttacgctagtacagatgctagtggtgctgcattctgccgttcagctgcgcttattttaatggcactgttgcttctaaggcatgcattgtctatgtcagacaacgaaggaaacgatgatgacgcttctaccatattctcgctttttctgcttcgagctgctgggtttctgctgccgtgctacatcatggcatggatattcagtattttgcatcgccgtcgacaaagacaggaagaggctgcactggcggctgcagaggtggccttcatcctacagtcggccaggggccgcgccctccagtttgccatcgctccagactcccccgccaccccgcagcatgagccagtgtcgcagcaacagcaatagtggctgacaaccacatccccagtagttgctcacgactactgaccatacgtatctgtttcgttttcttgggcatcatactgagtcacaaaggttaagcctgggcttctgcctcccgtggccagtttgggtgtcagtgtcacccaaagttcgttacacccgaaaccttgtgctttgtattaaaccgagtgtgatccgagaatataccaatttaatgtaaattcattcttgttcttactgcggcatcattattaaccgttgtatgcactgtaatgtacagtctttcataatactatttatttttctatatggcatatttgatagatgtgaacgatgtggtgtatggaaattgaaacctctattgtttattgtgggaactaatagtgtgtttggattgagaacatatcaaatgcacatagaagtttagtgcacatgatgcacatattaaatcatcatcacttattttagatctaac

SEQ ID NO: 42586 - DNA, 1288 bp, Zea Mays
atgaagacgcgcgccgcgtttgaccgttgcgcgcagacgctttcccgtccagtcctacaggctacaactacaagaggggaaaaagacacgaaggaaaaaaaaaccagagctggaaggagagagaaggaaccaaaaaaaaagctcggaatttgtagtctccaagccgtgcgacgaccggacgggaaggggaagagagggagggccgccgctgaagtcgccgtcggtgagtatgctcacagagcttgcgtgcaacgctggtgcaacgagaaaggagacactacttgtgaaatttgtcatgaggaatacaagccaggttacactgcgccacctcgtgttcagccagatgagacaaccatagacattgatggtgatttggttatggatttgcgagacccaaggattcttgctgtagcagctgcccaacatcgtcttcttgaggcagagtatgatggttacgctagtacagatgctagtggtgctgcattctgccgttcagctgcgcttattttaatggcactgttgcttctaaggcatgcattgtctatgtcagacaacgaaggaaacgatgatgacgcttctaccatattctcgctttttctgcttcgagctgctgggtttctgctgccgtgctacatcatggcatggatattcagtattttgcatcgccgtcgacaaagacaggaagaggctgcactggcggctgcagaggtggccttcatcctacagtcggccaggggccgcgccctccagtttgccatcgctccagactcccccgccaccccgcagcatgagccagtgtcgcagcaacagcaatagtggctgacaaccacatccccagtagttgctcacgactactgaccatacgtatctgtttcgttttcttgggcatcatactgagtcacaaaggttaagcctgggcttctgcctcccgtggccagtttgggtgtcagtgtcacccaaagttcgttacacccgaaaccttgtgctttgtattaaaccgagtgtgatccgagaatataccaatttaatgtaaattcattcttgttcttactgcggcatcattattaaccgttgtatgcactgtaatgtacagtctttcataatactatttatttttctatatggcatatttgatagatgtgaacgatgtggtgtatggaaattgaaacctctattgtttattgtgggaactaatagtgtgtttggattgagaacatatcaaatgcacatagaagtttagtgcacatgatgcacatattaaatcatcatcacttattttagatctaac

SEQ ID NO: 42587 - DNA, 926 bp, Zea Mays
cttcactgcacaatctctagtgaatacataaaaggtgttgggttaaaacaaaccagacgatcagtatgaggaatagaatggattattccatcactactacattgcctcattagcacaaggctggattagaaataagtactgataccatcccaccaaaatcacaggatttataagatggatacgatgcaaaccaaataccctaataattcatggtaaatgattactccacaatatcctagaggtaccttccatgagtaactttggttctcacctgcaccaaaatgcaaatttgagtgatgccaatccaagatcgactcaattttggctctgctaaacaagtctgtaggatacctgtatggggcacgatatcaaacagtggctctaaaattaccaaggaagacatatgactcacatcaatcaataaaacgtatcacacattatcctgtccaagtaaagctagaacttattaatttgctgatatagacccactgtgcattaagaaatgtgcttttacgttcagcactcgttacagaaaaaactaatcaattctagtaatccagctctaataactaaccaacatgatcctgtcttatgagtcatggtccagcctcaataactacaacaaatcaatcattgccagaaagctgactaattttttttgaaaaagttcaatacaatggtaatgcagcttctggcagctttgatacttggatggtatgaccaggggcggagggcccgttatggaagtatggcctgcgccatacctcggcccagcccactgaagcagtaaaccctagtttcaagcgtccaggccaatccgcggacccgccccgcatgacagtcgccagcacgcttccacagccgccatcatcgttcatccattcccattctcacagctacggcgccgtcaccggtcagcaaaccac

SEQ ID NO: 42588 - DNA, 215 bp, Zea Mays
attttgccgctatattagccaaaatgaaacataaaactgaaatctggagtggagctgtacataggcagcaaaatgctggacacacaacgagttctctcttttcattgtttatactattctttctatctatctatactgaactgtcttcgcttctctcaacacgatctatcagagcttcgacgaaaatttgagctctgagcttgcctccgaaccac

SEQ ID NO: 42589 - DNA, 1401 bp, Zea Mays
gacgaaaataccctctctgcctcttcgacgcatcgcaacggtttgttttccttcttccacgcgttgggaaggtgaggcggcggcgcgcgctagggaaaggtgtggcgacggcgtgcgatcggggaagggaacgcggcggcgcgtgcagggctacgcgacgccctctgcgcgtctccgtcaggaggaggcgtttccatcagccacctcgctccaagcacgctctgcttggctgcccctccggtttggccttgtgcaaatggacgcaagcaggtccaatttggctggtggctcgaatccatcacaatttgctaatgttgaatcttggaactttgatggatgttattacaacatcatggatgatgagatgtgcatgaggttcaagggctgccctcagacgatgtcgaagtacacagtacaagtgcaacaaagaaagtagctaggagagcgaagaacttcagtcatcaagaggatgaggttatatgttctgcttggataaatggtagccaagatgcaataattggaatgaatcaaacgagtggtggctattggaagcgttttgctgattactatgacaagtacaagcctgaaggatcacaaaggacacaaatagctatacaacacatgtggaagacaattcagaaggaagtgaacaagttttgtgcgtacttgtctaaaatagagcatcgaaatgagagtgggaaagtggcagaagataggctgaagatgccatgaaaatgtttgagggattacaaaatcatcctttccaattcacacattgctggatattattgagaaatgaaagaaagtggtgtgaaaggtctactgtaacaagaccagggagggtcgtaaatgaagatcaaccctagaacatggtcccttctggtgaacctgaggttacaatacgtcccgaagtgactcatgcaagaggaagcgagggaacaaaaacactgcacctactgattccactacttgtgttgaagtgcttgagtgtatgaccaagaaccgtgagcttgtcgaggttaaacgtgatgagcaatacagggagctacttgcacgcagggaccgtgagcttgatttgaaggaacaagagatggagttcaagatcatggctgtgaacattgacgacgtgccggaggataagcgagcttactacctgaacctgcaacaaaggattatggagaagagtcacagaaacaacaatagttccacttagaatttaatgatgtttcacaatgaactttatggtggaatctttatctatgctatttaaattctgcaagttgtaatagtcaaaactatttgaaagataactatgtacctttttttggaaatttgttcttgatatttgactgaataatatgtgtacaatgggaagttgtatgtgcatctgaatggttgttc

SEQ ID NO: 42590 - DNA, 713 bp, Zea Mays
agaagcgcaagcctagctggtgcactcacgtctctccacacaccactgctaagactgccggcgagtcctccggccggttatacacaccgcggtttttggtcgtcgtcacaaacccaaccgtcagccatggcccggatcttcctctgcatgagcttggcggcggcgtgctgctgcttctccattgcgctgcttccaccgccggcgcagggccgtcctgggctgccagccggcggccgcataaatcatctgccagagccaaccacagagccggccgcggcggcggagcaggagcagcagcagcgcggcgtgcaggtgaggaagacgaggccggcatggtcgccagcggcggcggcggaggggagcgtgaggccggagatgcgggcggtgcccggggggccagacccgctgcaccaccacggcggcagccccagcaggcggcctgcagcagggacgcacccggtgacccggccggccggccagccggcatggctaggctagctgcgcgcctgcgtccgcatgcacgctcacctcttgtgcatgggcagcatggctgccggcgttgggagactccgtgtggccgcgcgtctcgcctgcacgttactggtgtctggtgaataatggctatagagatcgagttagggtgcgcatggcgcctggttcagggcggtttggtatatgtacctgggtatgtacaaatggcctggaagtggcgg

SEQ ID NO: 42591 - DNA, 2624 bp, Zea Mays
atggagtgcggacccgcggctaatgttggcgtcggcggagtccacctcccccaagaattcggtagaaaggatgaggatccgggcaaggttttcgccacatctgttgaaaccaacgtcgaggagacaacgcggatatcgcaaccgaccgggttgaagaccaccctgaccgtgggccccacacggcagagatttccaccccagaataatcgattcgacgcgcgggactggagctcagccacggactcctgcgcgatcccgagcggtctgcgtggggggaagaagactgatccgacaggatggccccaccatgcagtgaccgaacaccagagcgcaggagggcgagccttgctcaggtatttgggcttcatgacggaggcgcattctggtttccttccagtccggatggctgctgcatcctcaggaggtgatggagaccggcgacaacgtgctgccggctggttggtactccagtcttcgctagagctctaccgtgcttgtccaggagcacgaagcaagggacgtatctgatatcataatgcagaagctgcaagcggttaaaaaacaaattgactgtcagaatattgaattttcatttcagtttttacataaatgatatatgcttggagcagtggtatgatgctccggtgcagagttgcagatgtacattcaagaaataataaggtcataatccaaactaggctggtaaacaaggactgtcattttatggcagcagaagcacaacccacagtgcttattggttgttctatgtggattagcttcaatcatcaagaactattatgatgctgaaacctgtggtcgcttcagcaccttaacgcgataatataaattctaactgcctcagctcatccgaatgggaaatttcgtaattttaaacttggcatttgccaatacctgtaaaaggaagagatatcagcctatagcttacgtgcacagttaatacacagtcgcacaagtccatgttttaaaaaactagcagccccaccagaactatcacatatccgtacacatgcaaaattgtcagagcaggttttccatcaaccctcaagtaaacctatgttgagctctctattcacattcttcttctaaaatgtaaactaacctattggccaattaaaaacgatagtactcattctactctgaatcataatttactttggctttgtattaagccaaatttcactagctttgacagtttttttttttcgaaaaatgtatcaacacctacaatttcgaataagagttatatcaaaatatatttcatgaataatttaatgaaactaatttgatgttgtagatgttagtacatttttctataaacttagtcagagtaaaatagtttgacttaggacaaagacaaagtaaacaataatttgagaacagaggaagtacttatgcatggacaccaattgacgactgtatcataatcaattaattacttgaacagttaagtaaaccgtatgcatcagcaacaactgatataatgctccattagtgaactggtgaagaaagtagatatcgcaccgaagtccctggttgtaacttaacacccttgatggccaggcatgatgcaattcaacaaatcactgcttccatcaccaaggatgaatgttcaaccatctgacatattcacatatcttcaaccagtcatactaatgtggaaccaatgcccacttgatgtcaccaccgttggcgttggtctggcaaacctttagaaatcatatctactcgtggaactaagtaataagagtgatagcatatataccgtatgaagctccttctcaccctttcattgttgtgcaaagtaattaaatactaaggtgacaatcttcacaatgtccaagaatcaaaacaaacgcctgggtattttcatgggaaaaaaatttggtgcagaccagatgcagaccagaatgtttgcagccccccacaaaaaagaatatagaccttacctgtaggtccatcagataatgttttagttgtgttattgctgctatgggtgggtctatcttcctttttgtgagggactgcaaacattcttgtttgtagatgacctgcaccaaattttttttccattttcatggcattgtccctcaagctgcgcaagtcacataactgaatgcaatgtttggtctaaatggtgtgatgaccgaacttaagttttcaaactgacactgtacgaggtaaataagacaaatgaaacatgataaccttgcgcctcgtttggatccttggaattcaatttcattctaataatcgtgatttagacataaatcaattaagctaatatgatttttatagaaagtatttgtatattattgctaaccatatgagagagatatttatgtgctacatttctatcataggggactaagttgaagagcgtgttataagttgcagagtagaaacatagactagtgatatataaaatcaatttcaactctctcatcctatgaatttgagtcttatatctaaactttggaaagtggtaaaatgtcaaattccaaacaaatagcatactttatcaagtagattccaatttctttaaaatggagggatccaaacaccccttaaaagaaaaggggaggatcatttaccatggaacctac

SEQ ID NO: 42592 - DNA, 1438 bp, Zea Mays
tcgccagttggtcgtccttgttccttggcaaaaaggaccttgattctgtcgttggcgataccatggatgtgtcctacgagaagtgtgctgatccgtcgaactcggacctgcctagcgctgttgttgatgctgagcgatacgacgatggcggctccgaacacctgggatctgctgtagtagagggagctactggaaacgaagggaattcggggaccgaaagttccgagcagactggtgatgagcgcgctggaggaggtgaaggctctcctgttgatgtcgaaaacagcgctgataaacaagagagccaggagacgacggttccgatggaagaaacagaaacgagcgacggcacctcgatcacgtcgatggaggatgccctggaaccgaaccgtcatcacgatctcccgtcggagcctgaggatgtgggcaaccacactcctgatcctgatcagtccagcggcaagaactccaaaggaaacagtagcgtgttccagagcgcaaggagggtgctggcttcaaccaataagaaaactccatctgcaactgcacggaagccactgcagttgactaacagaggtaaccaggatgacgcgaaatcgtcggctggaaaggccgccacggttccatcaggcccggttttccgctgtactgaacgggccgagaagcgcagagaagtatgtgacgctgggcaggaggaagacggcctcgacctccatggagacgtccaactcgtcgtcggagagcgagggcacgaggccgtgctgccgcgccagccgcgacggcctcgacagcagctgcagatgcggcggcaggagcaggccgcaggccgcgaacgccaagccggccgccgggcccaagaagccgccgccgcagcagcagcagccgaaacaccgcgcccacaagatcgccggcgagggcgccatcaacatcgccgtgcactagccgccgccgccgcttcttgaaacttctttccggtcgcatgcatgcaggacgatggcgatggcgtgcggattttccttctaagttatgagagtgctttgtcggcttgtggatttggtgtagataataatataagttatggtgacgacgaacgaacaggggctgctgccacgagtgaggccggtcagtcagacagaggtggtggtgtttattgcttgcttgcttgtttgtctgtttgtttgtttatttatgctaatcttatttatttaatctgctgtcgaggatggcctgcgcattgccactgtgcagcgctgcttgttttttcgtcttcttaatttatggggagtggtaagagagacttgagcgctggatgtaacgtgtacaaacgaaaacgaaggcttgctggtggtggtgatggaggattttatctgaactatgctcactcgctgcatttctattgagttcttcaagagcttgctaaacttgttttttctccgag

SEQ ID NO: 42593 - DNA, 1219 bp, Zea Mays
atgcggagtgctgctggagttggtctaagcatgggatgtcatcttggacttgggatagagataacagagtctgttagagggagaatcacggcgagagcgtgctcgtgggcacccctctccgtcaactggggtgcgcgatcgatcgatcgaaatatcgaactgcagttgccaaaaccccaatccggtcttctatttccgatcgagccgcaaaggaggcaggaagaaggccggcgcaggcgcaggcgcggatggcgatgggagcgacggttcgcgcggcggccgcggacgccgtggtgacgttcctgtgggtgctgtgcgcctccgcgctcggtgcctccacagcagccgtcacgtcgtacctgggggtgcaggagggcgccggccactacgcgctcctcgtcaccacgtccctcctctcggtgctcctcttcaccttcgatctcctctgcggtgcgctcggcggcgccagcttcaaccccaccgacttcgccgcctcctatgccgccggcgctgtgggcggcgccctggccatctcggagctgatgccggcgcagtataagcacacgctcgcgggcccctcactcaaggtggatccccacaccggtgccctagccgaaggggtgctcaccttcgtcatcaccctgaccgtgctctgggtcatcgtcaagggcccccgcaacgtcatcctcaagaccttgctgctctcaacctccatcgtctccgtcatcctcgcaggcgcagagtacacggggccgtctatgaacccagctaatgcatttggctgggcatatgttaacaattggcacaacacatgggagcagctgtatgtgtactggatatgcccctttattggggccatgcttgctggatggatatttagggtggtgttcctaccaccggcacctaagcccaagaccaagaaagcatgattactcgtttatggatgctggtttagaagaaataagaaatagaggaaggtcacataagctcatgtgttgtacttgatttcctcaacttcccacaaactgggtgttgtgctctgttacttatttctcatcaataatttatgtttacttgtaattttgggctagtcaggatgtgtttttgtccttttatttagtttttatatgttttctttatgagtacagtaaaatcattgatctcaactgagttggaaatgagctgaggttggctcggcttgctcctctagtgagcctga

SEQ ID NO: 42594 - DNA, 3058 bp, Zea Mays
acggatccaaattccaaaccgcgcgaacttctgccgctcaaaattccaaatcgtcctgactacccgcgcttcccataatcctatcccgcccgcgcggcccctctcgggattcaaacgccagccgtttgtcctctcaaacccgatcggatctgaccgccctcccaggccgtaacaggatcccgtcggtcatggccgtgataaacgggcgctcgaagcgtgttcgggtgacggcggtgccgcgccctctggagctgcggtcgttcccggccgccggagaggggccgcgcccgctggtcctgctgtcgttcccggccgccggagaggggctgccgccgcgtggtgcgtttcgcgactgtgtacggtcgttcctggctggatccgcggtgccggcggacggcgcgtggcaggtagcctttggagtcgggaacggggtggtcgtggtgatggaggtggtggaagaggacgtcgctaaaactgggatcgagcggatctactgcgatcactgtaccgtcgccggctggagtagacaccctgtttgtggaaggaggtaccatttcataattcggaatgaatacaaaacctgcaagcattgtgaccattgtggtcttatggcccagtcgtttggaacacggtgcccgacatgcaaatatgtgatctcctctgatgatccggaagattgggactataggcagttggataatccacgtcacttgctgcatggtattgtacatgacaatgggtttggtcaccttgttcggataaatggcagagagggtggctctagtcttctgacggggattcaactgatgggtttctgggattggctctgcagataccttagagtcaggtaaaaccgatttcctttatttctgaccacaatgtgacaacggggttagcagtttatgagttcacatgagccatacttatgattatgcactgcgtgcatgaatcaaaaatcaattttcttttccaattatattcaagctatgaaatggatggacactggcagaaatagaagactgtccagtgtgctctcttcttgaccatgacaaaaatattgtggaatataataggttggactttgtgcttgacataaccacgaaacaaattatgacatcaaaacttctgcattcttggctgttttcttaaaccaactgtagtatttaactgaactgaacataaaagtataagagtaatacaacccagcacattgtagtttgatagataagaacatcaggaaaatgctgtttctaagatataaataatggaggtgtgggcattagaaaacaatcttgaatacattttgagatgactactttagcagttccaatgaactatgacaacagaacagaagtagtttgcaacttgctgtacatctgaatagaactctagatgaagtatgaattgttttatgcacatctcacgaagctatttacaatacaatttgtaattcgtgaagtcaaattcacctgcaacagtctcttggaagtgcagaactgacatgcaaagcttaatttcagaaaggtctccttgatggatgtctctaagaagtatgaaacagattaccggatcttacatgccatcactactggtcattcatggtatggccaatggggattcaaactcaacaaagggagctttggaattacatcagaagaatacttaaaagctatggacaacctttccttaactccattatcacacttcttcccgcactcccgatatcctcgaaaccagctacaagataccatttcattctaccgatctctttcaaagcaacctctcaccacaattcgtgaactgttcctctatgtgctgggccttgccaccagcaagagttcaaatatgcactatggatcaatgcataaggagcactcacatacccatgtgcaagacacatggcctgacgaggaaataaaacgtgcaacagaaattgctataaaggttcttcgtgctgttgagaaaacaaggtgggtgaccatgcgaatcctaaaggcagccatgtaccattcaattggttcaccgcagctagtggactactgcctcaagacccttggtactagaacaattgatggaatgatggttgcagttcgatgcaacagcgatactaacaccctagagtacaggcttatggatgaacccatcgttctgcccaatgtatccatgccaactcaagaccatcttcgccgtgacataaagttcttgcatgatgctctcctccacccacatacaatgcatccatacaaaccggaaaactgttatgagcatggcaagaggtctgccatggtccttttggactgcaagcaattcacaaagcactatgacctggaacaggagttcttgcctcaaaacccatccatgttgcacctgtggtgtcaagtagaggtgttagaccaggttggcgatccaccttgcataccaccagagctcctaactcttccgcagacagcaactgtgtctgatctgaaggtggaggcaaccagaacattccgtggcatctatctaatgttgcattcctttgtagccgatcggcttgttgactgtggaacggcaagtgagtcaactcaactaaagctcttgtttggggcaaatggaactgttcgcgtccaaggcaggtgtgccagtggtgaacgcagggttgggatttaccggatggagagaggcgtggataaatggacagtgcgttgctcttgtggagccaaggatgatgatggtgagaggatgctgtcttgtgactcttgccatgtgtggcagcacactaggtgtgttgggattagtgatttcgatcaggtgcccaagaaatatgtatgtaactcatgtaaattacttaacaagcgtaagagcagaggtcacggaccagtttataacattggcccaagcaaaagattcaagattggcgcaggtggctttagctctaggtgggggatttttttgaggcctccagctgacatgtaaatatcaataaaatgacagtgagtttgtatgagataccggtttgtggatgttaacttgtagagtgcttggtttgagtaataagctagtccatcatcttctcact

SEQ ID NO: 42595 - DNA, 1874 bp, Zea Mays
acggatccaaattccaaaccgcgcgaacttctgccgctcaaaattccaaatcgtcctgactacccgcgcttcccataatcctatcccgcccgcgcggcccctctcgggattcaaacgccagccgtttgtcctctcaaacccgatcggatctgaccgccctcccaggccgtaacaggatcccgtcggtcatggccgtgataaacgggcgctcgaagcgtgttcgggtgacggcggtgccgcgccctctggagctgcggtcgttcccggccgccggagaggggccgcgcccgctggtcctgctgtcgttcccggccgccggagaggggctgccgccgcgtggtgcgtttcgcgactgtgtacggtcgttcctggctggatccgcggtgccggcggacggcgcgtggcaggtagcctttggagtcgggaacggggtggtcgtggtgatggaggtggtggaagaggacgtcgctaaaactgggatcgagcggatctactgcgatcactgtaccgtcgccgacttgacagcctgactcctcattaacctgctcggcctgcttctgtgtgttcgtctgaacatgtgtatacattttttcttctacagatgccaatcggctggagtagacaccctgtttgtggaaggaggtaccatttcataattcggaatgaatacaaaacctgcaagcattgtgaccattgtggtcttatggcccagtcgtttggaacacggtgcccgacatgcaaatatgtgatctcctctgatgatccggaagattgggactataggcagttggataatccacgtcacttgctgcatggtattgtacatgacaatgggtttggtcaccttgttcggataaatggcagagagggtggctctagtcttctgacggggattcaactgatgggtttctgggattggctctgcagataccttagagtcaggcttatggatgaacccatcgttctgcccaatgtatccatgccaactcaagaccatcttcgccgtgacataaagttcttgcatgatgctctcctccacccacatacaatgcatccatacaaaccggaaaactgttatgagcatggcaagaggtctgccatggtccttttggactgcaagcaattcacaaagcactatgacctggaacaggagttcttgcctcaaaacccatccatgttgcacctgtggtgtcaagtagaggtgttagaccaggttggcgatccaccttgcataccaccagagctcctaactcttccgcagacagcaactgtgtctgatctgaaggtggaggcaaccagaacattccgtggcatctatctaatgttgcattcctttgtagccgatcggcttgttgactgtggaacggcaagtgagtcaactcaactaaagctcttgtttggggcaaatggaactgttcgcgtccaaggcaggtgtgccagtggtgaacgcagggttgggatttaccggatggagagaggcgtggataaatggacagtgcgttgctcttgtggagccaaggatgatgatggtgagaggatgctgtcttgtgactcttgccatgtgtggcagcacactaggtgtgttgggattagtgatttcgatcaggtgcccaagaaatatgtatgtaactcatgtaaattacttaacaagcgtaagagcagaggtcacggaccagtttataacattggcccaagcaaaagattcaagattggcgcaggtggctttagctctaggtgggggatttttttgaggcctccagctgacatgtaaatatcaataaaatgacagtgagtttgtatgagataccggtttgtggatgttaacttgtagagtgcttggtttgagtaataagctagtccatcatcttctcact

SEQ ID NO: 42596 - DNA, 2479 bp, Zea Mays
acggatccaaattccaaaccgcgcgaacttctgccgctcaaaattccaaatcgtcctgactacccgcgcttcccataatcctatcccgcccgcgcggcccctctcgggattcaaacgccagccgtttgtcctctcaaacccgatcggatctgaccgccctcccaggccgtaacaggatcccgtcggtcatggccgtgataaacgggcgctcgaagcgtgttcgggtgacggcggtgccgcgccctctggagctgcggtcgttcccggccgccggagaggggccgcgcccgctggtcctgctgtcgttcccggccgccggagaggggctgccgccgcgtggtgcgtttcgcgactgtgtacggtcgttcctggctggatccgcggtgccggcggacggcgcgtggcaggtagcctttggagtcgggaacggggtggtcgtggtgatggaggtggtggaagaggacgtcgctaaaactgggatcgagcggatctactgcgatcactgtaccgtcgccgatgccaatcggtaagcaaattctatcaaacgagatgatgattgttatggccggagaatctcaataccatcgccttttcttttacaatttaataggctggagtagacaccctgtttgtggaaggaggtaccatttcataattcggaatgaatacaaaacctgcaagcattgtgaccattgtggtcttatggcccagtcgtttggaacacggtgcccgacatgcaaatatgtgatctcctctgatgatccggaagattgggactataggcagttggataatccacgtcacttgctgcatggtattgtacatgacaatgggtttggtcaccttgttcggataaatggcagagagggtggctctagtcttctgacggggattcaactgatgggtttctgggattggctctgcagataccttagagtcagaaaggtctccttgatggatgtctctaagaagtatgaaacagattaccggatcttacatgccatcactactggtcattcatggtatggccaatggggattcaaactcaacaaagggagctttggaattacatcagaagaatacttaaaagctatggacaacctttccttaactccattatcacacttcttcccgcactcccgatatcctcgaaaccagctacaagataccatttcattctaccgatctctttcaaagcaacctctcaccacaattcgtgaactgttcctctatgtgctgggccttgccaccagcaagagttcaaatatgcactatggatcaatgcataaggagcactcacatacccatgtgcaagacacatggcctgacgaggaaataaaacgtgcaacagaaattgctataaaggttcttcgtgctgttgagaaaacaaggtgggtgaccatgcgaatcctaaaggcagccatgtaccattcaattggttcaccgcagctagtggactactgcctcaagacccttggtactagaacaattgatggaatgatggttgcagttcgatgcaacagcgatactaacaccctagagtacaggcttatggatgaacccatcgttctgcccaatgtatccatgccaactcaagaccatcttcgccgtgacataaagttcttgcatgatgctctcctccacccacatacaatgcatccatacaaaccggaaaactgttatgagcatggcaagaggtctgccatggtccttttggactgcaagcaattcacaaagcactatgacctggaacaggagttcttgcctcaaaacccatccatgttgcacctgtggtgtcaagtagaggtgttagaccaggttggcgatccaccttgcataccaccagagctcctaactcttccgcagacagcaactgtgtctgatctgaaggtggaggcaaccagaacattccgtggcatctatctaatgttgcattcctttgtagccgatcggcttgttgactgtggaacggcaagtgagtcaactcaactaaagctcttgtttggggcaaatggaactgttcgcgtccaaggcaggtgtgccagtggtgaacgcagggttgggatttaccggatggagagaggcgtggataaatggacagtgcgttgctcttgtggagccaaggatgatgatggtgagaggatgctgtcttgtgactcttgccatgtgtggcagcacactaggtgtgttgggattagtgatttcgatcaggtgcccaagaaatatgtatgtaactcatgtaaattacttaacaagcgtaagagcagaggtcacggaccagtttataacattggcccaagcaaaagattcaagattggcgcaggtggctttagctctaggtgggggatttttttgaggcctccagctgacatgtaaatatcaataaaatgacagtgagtttgtatgagataccggtttgtggatgttaacttgtagagtgcttggtttgagtaataagctagtccatcatcttctcact

SEQ ID NO: 42597 - DNA, 2353 bp, Zea Mays
acggatccaaattccaaaccgcgcgaacttctgccgctcaaaattccaaatcgtcctgactacccgcgcttcccataatcctatcccgcccgcgcggcccctctcgggattcaaacgccagccgtttgtcctctcaaacccgatcggatctgaccgccctcccaggccgtaacaggatcccgtcggtcatggccgtgataaacgggcgctcgaagcgtgttcgggtgacggcggtgccgcgccctctggagctgcggtcgttcccggccgccggagaggggccgcgcccgctggtcctgctgtcgttcccggccgccggagaggggctgccgccgcgtggtgcgtttcgcgactgtgtacggtcgttcctggctggatccgcggtgccggcggacggcgcgtggcaggtagcctttggagtcgggaacggggtggtcgtggtgatggaggtggtggaagaggacgtcgctaaaactgggatcgagcggatctactgcgatcactgtaccgtcgccgacttgacagcctgactcctcattaacctgctcggcctgcttctgtgtgttcgtctgaacatgtgtatacattttttcttctacagatgccaatcggctggagtagacaccctgtttgtggaaggaggtaccatttcataattcggaatgaatacaaaacctgcaagcattgtgaccattgtggtcttatggcccagtcgtttggaacacggtgcccgacatgcaaatatgtgatctcctctgatgatccggaagattgggactataggcagttggataatccacgtcacttgctgcatggtattgtacatgacaatgggtttggtcaccttgttcggataaatggcagagagggtggctctagtcttctgacggggattcaactgatgggtttctgggattggctctgcagataccttagagtcagaaaggtctccttgatggatgtctctaagaagtatgaaacagattaccggatcttacatgccatcactactggtcattcatggtatggccaatggggattcaaactcaacaaagggagctttggaattacatcagaagaatacttaaaagctatggacaacctttccttaactccattatcacacttcttcccgcactcccgatatcctcgaaaccagctacaagataccatttcattctaccgatctctttcaaagcaacctctcaccacaattcgtgaactgttcctctatgtgctgggccttgccaccagcaagagttcaaatatgcactatggatcaatgcataaggagcactcacatacccatgtgcaagacacatggcctgacgaggaaataaaacgtgcaacagaaattgctataaaggttcttcgtgctgttgagaaaacaaggtgggtgaccatgcgaatcctaaaggcagccatgtaccattcaattggttcaccgcagctagtggactactgcctcaagacccttggtactagaacaattgatggaatgatggttgcagttcgatgcaacagcgatactaacaccctagagtacaggcttatggatgaacccatcgttctgcccaatgtatccatgccaactcaagaccatcttcgccgtgacataaagttcttgcatgatgctctcctccacccacatacaatgcatccatacaaaccggaaaactgttatgagcatggcaagaggtctgccatggtccttttggactgcaagcaattcacaaagcactatgacctggaacaggagttcttgcctcaaaacccatccatgttgcacctgtggtgtcaagtagaggtgttagaccagccgatcggcttgttgactgtggaacggcaagtgagtcaactcaactaaagctcttgtttggggcaaatggaactgttcgcgtccaaggcaggtgtgccagtggtgaacgcagggttgggatttaccggatggagagaggcgtggataaatggacagtgcgttgctcttgtggagccaaggatgatgatggtgagaggatgctgtcttgtgactcttgccatgtgtggcagcacactaggtgtgttgggattagtgatttcgatcaggtgcccaagaaatatgtatgtaactcatgtaaattacttaacaagcgtaagagcagaggtcacggaccagtttataacattggcccaagcaaaagattcaagattggcgcaggtggctttagctctaggtgggggatttttttgaggcctccagctgacatgtaaatatcaataaaatgacagtgagtttgtatgagataccggtttgtggatgttaacttgtagagtgcttggtttgagtaataagctagtccatcatcttctcact

SEQ ID NO: 42598 - DNA, 1422 bp, Zea Mays
aagtgaaaacggagttcttcggagtcctatatttgtaaataactgtactattgcaaagagcgaacgggggcgacctccaggaaaatcgcagagaatgagggggatcctcttcgggccccggcggcagccgccgccgctcccgctcttccccgccgccaagcgctcctcggcacccgcgaaccttcttttcgctcgcctctatcgcttcctcccggccagccccatcctccggctccttctcctcctcgcactcctctccctcatcccgccggccttcttccacctccgtctccgccgcttccaccaaatgcgcgagaggaagtgcgggtggatcgcgaggccacccatggtgtgcgcgcacggcggtgactccaccaacgccttccccaattcgatggacgcatttcggatggctctcgacgcgcgggtcgactgtgtggaggtggatgtttcgaggtcctatgatggtgtgctctttgctctgcatgacaggcagggatctacaaaagatgtctggtaattctacagcaaaagttggccactggaccacagatgagttttttgtagataaaagcactaaggacgaggtttcagttgtcaaaaagagtccaaaatgaggaagttcccatggcagaggaagctctggcgatgatatcacaatcatttaggcaggtcgttcttgatgtgaaagttggacccccttcatttgagaaaggtttagctgaggatattttgtctcttctcaggagaacaaattgcaagaattgtcttgtctgggcaaaaagtgatgatataggaagagagataattaaattgtctaaagatgttattgttggctatgttgtcatggtggataaatttaccaatagaagaacggagttagtgaggattgaaggggctaaagttgctggcatatatcatcctttgatccatgagaaggttatgaaggtcatgcgcaggcatgacaggagagtttttgcatggactgttgatgatagcagctccatgaagaagatgctgtatgagcatgttgatgccattgtgaccagtaacccttctcttctgcagcagcttatgcaggagaccagagctgagtgtatggaagatggttttgccttaccataggaatttctagctgtcagaacataagggtttaacttctcagcagagaggaccaactagcgagttgagtttgagggattattcataaattagatgataattactttagtttttggcacattccgcacttctgtcatataattgaaataagaaaatatggttagcttgtcatgaaatatgttgtttccttttacagcttgatcagatcaggtcagtgagaagatcgcaacaataatatcattgattaacagaatcatgctttagttaccattgatattcaagtttgtttctcactttttg

SEQ ID NO: 42599 - DNA, 1418 bp, Zea Mays
aagtgaaaacggagttcttcggagtcctatatttgtaaataactgtactattgcaaagagcgaacgggggcgacctccaggaaaatcgcagagaatgagggggatcctcttcgggccccggcggcagccgccgccgctcccgctcttccccgccgccaagcgctcctcggcacccgcgaaccttcttttcgctcgcctctatcgcttcctcccggccagccccatcctccggctccttctcctcctcgcactcctctccctcatcccgccggccttcttccacctccgtctccgccgcttccaccaaatgcgcgagaggaagtgcgggtggatcgcgaggccacccatggtgtgcgcgcacggcggtgactccaccaacgccttccccaattcgatggacgcatttcggatggctctcgacgcgcgggtcgactgtgtggaggtggatgtttcgaggtcctatgatggtgtgctctttgctctgcatgacagggatctacaaaagatgtctggtaattctacagcaaaagttggccactggaccacagatgagttttttgtagataaaagcactaaggacgaggtttcagttgtcaaaaagagtccaaaatgaggaagttcccatggcagaggaagctctggcgatgatatcacaatcatttaggcaggtcgttcttgatgtgaaagttggacccccttcatttgagaaaggtttagctgaggatattttgtctcttctcaggagaacaaattgcaagaattgtcttgtctgggcaaaaagtgatgatataggaagagagataattaaattgtctaaagatgttattgttggctatgttgtcatggtggataaatttaccaatagaagaacggagttagtgaggattgaaggggctaaagttgctggcatatatcatcctttgatccatgagaaggttatgaaggtcatgcgcaggcatgacaggagagtttttgcatggactgttgatgatagcagctccatgaagaagatgctgtatgagcatgttgatgccattgtgaccagtaacccttctcttctgcagcagcttatgcaggagaccagagctgagtgtatggaagatggttttgccttaccataggaatttctagctgtcagaacataagggtttaacttctcagcagagaggaccaactagcgagttgagtttgagggattattcataaattagatgataattactttagtttttggcacattccgcacttctgtcatataattgaaataagaaaatatggttagcttgtcatgaaatatgttgtttccttttacagcttgatcagatcaggtcagtgagaagatcgcaacaataatatcattgattaacagaatcatgctttagttaccattgatattcaagtttgtttctcactttttg

SEQ ID NO: 42600 - DNA, 1884 bp, Zea Mays
aagtgaaaacggagttcttcggagtcctatatttgtaaataactgtactattgcaaagagcgaacgggggcgacctccaggaaaatcgcagagaatgagggggatcctcttcgggccccggcggcagccgccgccgctcccgctcttccccgccgccaagcgctcctcggcacccgcgaaccttcttttcgctcgcctctatcgcttcctcccggccagccccatcctccggctccttctcctcctcgcactcctctccctcatcccgccggccttcttccacctccgtctccgccgcttccaccaaatgcgcgagaggaagtgcgggtggatcgcgaggccacccatggtgtgcgcgcacggcggtgactccaccaacgccttccccaattcgatggacgcatttcggatggctctcgacgcgcgggtcgactgtgtggaggtggatgtttcgaggtcctatgatggtgtgctctttgctctgcatgacaggcagggatctacaaaagatgtctggtaattctacagcaaaagttggccactggaccacagatgagttttttgtagataaaagcactaaggacgaggtttcagttgtcaaaaagagtccaaaatgaggaagttcccatggcagaggaagctctggcgatgatatcacaatcatttaggcaggtcgttcttgatgtgaaagttggacccccttcatttgagaaaggtttagctgaggatattttgtctcttgtaagttctgtgtctcctttctagttttgcctagtgagtaatgacatgctttaaatagaatgtgttcttttctttaccgttcttgtacctcttggctcttcacatgtacctaccgtatctgtatcatattatcaaatttctagatcttaattgcaattactgtgcgctatgtacaggtcattcatcataataaagtgtttatgcacaaatgctttgactagctagtaaaattgttaattgtttattttttcttgatcactttttgcttcagggaatgcatccatggcaagcttactgtggtcctatcagtagatatctagctagactcccctaattttgtgttcatttatctctttctgtgatttcttatttctttatctggaaactggaatgctgctatttttgcagcaattcttgtttggaaaacttatcgtgatctatgacaatttttgttctttgcagctcaggagaacaaattgcaagaattgtcttgtctgggcaaaaagtgatgatataggaagagagataattaaattgtctaaagatgttattgttggctatgttgtcatggtggataaatttaccaatagaagaacggagttagtgaggattgaaggggctaaagttgctggcatatatcatcctttgatccatgagaaggttatgaaggtcatgcgcaggcatgacaggagagtttttgcatggactgttgatgatagcagctccatgaagaagatgctgtatgagcatgttgatgccattgtgaccagtaacccttctcttctgcagcagcttatgcaggagaccagagctgagtgtatggaagatggttttgccttaccataggaatttctagctgtcagaacataagggtttaacttctcagcagagaggaccaactagcgagttgagtttgagggattattcataaattagatgataattactttagtttttggcacattccgcacttctgtcatataattgaaataagaaaatatggttagcttgtcatgaaatatgttgtttccttttacagcttgatcagatcaggtcagtgagaagatcgcaacaataatatcattgattaacagaatcatgctttagttaccattgatattcaagtttgtttctcactttttg

SEQ ID NO: 42601 - DNA, 1986 bp, Zea Mays
aagtgaaaacggagttcttcggagtcctatatttgtaaataactgtactattgcaaagagcgaacgggggcgacctccaggaaaatcgcagagaatgagggggatcctcttcgggccccggcggcagccgccgccgctcccgctcttccccgccgccaagcgctcctcggcacccgcgaaccttcttttcgctcgcctctatcgcttcctcccggccagccccatcctccggctccttctcctcctcgcactcctctccctcatcccgccggccttcttccacctccgtctccgccgcttccaccaaatgcgcgagaggaagtgcgggtggatcgcgaggccacccatggtgtgcgcgcacggcggtgactccaccaacgccttccccaattcgatggacgcatttcggatggctctcgacgcgcgggtcgactgtgtggaggtggatgtttcgaggtcctatgatggtgtgctctttgctctgcatgacagggatctacaaaagatgtctggtaattctacagcaaaagttggccactggaccacagatgagttttttgtagataaaagcactaaggacgaggtttcagttgtcaaaaagagtccaaaatgaggaagttcccatggcagaggaagctctggcgatgatatcacaatcatttaggcaggtcgttcttgatgtgaaagttggacccccttcatttgagaaaggtttagctgaggatattttgtctcttgtaagttctgtgtctcctttctagttttgcctagtgagtaatgacatgctttaaatagaatgtgttcttttctttaccgttcttgtacctcttggctcttcacatgtacctaccgtatctgtatcatattatcaaatttctagatcttaattgcaattactgtgcgctatgtacaggtcattcatcataataaagtgtttatgcacaaatgctttgactagctagtaaaattgttaattgtttattttttcttgatcactttttgcttcagggaatgcatccatggcaagcttactgtggtcctatcagtagatatctagctagactcccctaattttgtgttcatttatctctttctgtgatttcttatttctttatctggaaactggaatgctgctatttttgcagcaattcttgtttggaaaacttatcgtgatctatgacaatttttgttctttgcagctcaggagaacaaattgcaagaattgtcttgtctgggcaaaaagtgatgatataggaagagagataattaaattgtctaaagatgttattgtacattgttctctcttttttatttctttatttgaactatccatctgttatctgtacctaggaccacttttactgcacagtttaacaggcgtctcatatgctgtaggttggctatgttgtcatggtggataaatttaccaatagaagaacggagttagtgaggattgaaggggctaaagttgctggcatatatcatcctttgatccatgagaaggttatgaaggtcatgcgcaggcatgacaggagagtttttgcatggactgttgatgatagcagctccatgaagaagatgctgtatgagcatgttgatgccattgtgaccagtaacccttctcttctgcagcagcttatgcaggagaccagagctgagtgtatggaagatggttttgccttaccataggaatttctagctgtcagaacataagggtttaacttctcagcagagaggaccaactagcgagttgagtttgagggattattcataaattagatgataattactttagtttttggcacattccgcacttctgtcatataattgaaataagaaaatatggttagcttgtcatgaaatatgttgtttccttttacagcttgatcagatcaggtcagtgagaagatcgcaacaataatatcattgattaacagaatcatgctttagttaccattgatattcaagtttgtttctcactttttg

SEQ ID NO: 42602 - DNA, 2009 bp, Zea Mays
aagtgaaaacggagttcttcggagtcctatatttgtaaataactgtactattgcaaagagcgaacgggggcgacctccaggaaaatcgcagagaatgagggggatcctcttcgggccccggcggcagccgccgccgctcccgctcttccccgccgccaagcgctcctcggcacccgcgaaccttcttttcgctcgcctctatcgcttcctcccggccagccccatcctccggctccttctcctcctcgcactcctctccctcatcccgccggccttcttccacctccgtctccgccgcttccaccaaatgcgcgagaggaagtgcgggtggatcgcgaggccacccatggtgtgcgcgcacggcggtgactccaccaacgccttccccaattcggtcggtgtgacttgtgagaggctgagacggtctcagtgaattcgaatttgttctataacaagagttatttctccattctgttcggattgaggtaaatgtgttgatgagttgttagttttgtcgggatctcatgagtcagatggacgcatttcggatggctctcgacgcgcgggtcgactgtgtggaggtggatgtttcgaggtcctatgatggtgtgctctttgctctgcatgacagggatctacaaaagatgtctggtaattctacagcaaaagttggccactggaccacagatgagataaaagcactaaggacgaggtttcagttgtcaaaaagagtccaaaatgaggaagttcccatggcagaggaagctctggcgatgatatcacaatcatttaggcaggtcgttcttgatgtgaaagttggacccccttcatttgagaaaggtttagctgaggatattttgtctcttgtaagttctgtgtctcctttctagttttgcctagtgagtaatgacatgctttaaatagaatgtgttcttttctttaccgttcttgtacctcttggctcttcacatgtacctaccgtatctgtatcatattatcaaatttctagatcttaattgcaattactgtgcgctatgtacaggtcattcatcataataaagtgtttatgcacaaatgctttgactagctagtaaaattgttaattgtttattttttcttgatcactttttgcttcagggaatgcatccatggcaagcttactgtggtcctatcagtagatatctagctagactcccctaattttgtgttcatttatctctttctgtgatttcttatttctttatctggaaactggaatgctgctatttttgcagcaattcttgtttggaaaacttatcgtgatctatgacaatttttgttctttgcagctcaggagaacaaattgcaagaattgtcttgtctgggcaaaaagtgatgatataggaagagagataattaaattgtctaaagatgttattgttggctatgttgtcatggtggataaatttaccaatagaagaacggagttagtgaggattgaaggggctaaagttgctggcatatatcatcctttgatccatgagaaggttatgaaggtcatgcgcaggcatgacaggagagtttttgcatggactgttgatgatagcagctccatgaagaagatgctgtatgagcatgttgatgccattgtgaccagtaacccttctcttctgcagcagcttatgcaggagaccagagctgagtgtatggaagatggttttgccttaccataggaatttctagctgtcagaacataagggtttaacttctcagcagagaggaccaactagcgagttgagtttgagggattattcataaattagatgataattactttagtttttggcacattccgcacttctgtcatataattgaaataagaaaatatggttagcttgtcatgaaatatgttgtttccttttacagcttgatcagatcaggtcagtgagaagatcgcaacaataatatcattgattaacagaatcatgctttagttaccattgatattcaagtttgtttctcactttttg

SEQ ID NO: 42603 - DNA, 1874 bp, Zea Mays
aagtgaaaacggagttcttcggagtcctatatttgtaaataactgtactattgcaaagagcgaacgggggcgacctccaggaaaatcgcagagaatgagggggatcctcttcgggccccggcggcagccgccgccgctcccgctcttccccgccgccaagcgctcctcggcacccgcgaaccttcttttcgctcgcctctatcgcttcctcccggccagccccatcctccggctccttctcctcctcgcactcctctccctcatcccgccggccttcttccacctccgtctccgccgcttccaccaaatgcgcgagaggaagtgcgggtggatcgcgaggccacccatggtgtgcgcgcacggcggtgactccaccaacgccttccccaattcgatggacgcatttcggatggctctcgacgcgcgggtcgactgtgtggaggtggatgtttcgaggtcctatgatggtgtgctctttgctctgcatgacaggcagggatctacaaaagatgtctggtaattctacagcaaaagttggccactggaccacagatgagataaaagcactaaggacgaggtttcagttgtcaaaaagagtccaaaatgaggaagttcccatggcagaggaagctctggcgatgatatcacaatcatttaggcaggtcgttcttgatgtgaaagttggacccccttcatttgagaaaggtttagctgaggatattttgtctcttgtaagttctgtgtctcctttctagttttgcctagtgagtaatgacatgctttaaatagaatgtgttcttttctttaccgttcttgtacctcttggctcttcacatgtacctaccgtatctgtatcatattatcaaatttctagatcttaattgcaattactgtgcgctatgtacaggtcattcatcataataaagtgtttatgcacaaatgctttgactagctagtaaaattgttaattgtttattttttcttgatcactttttgcttcagggaatgcatccatggcaagcttactgtggtcctatcagtagatatctagctagactcccctaattttgtgttcatttatctctttctgtgatttcttatttctttatctggaaactggaatgctgctatttttgcagcaattcttgtttggaaaacttatcgtgatctatgacaatttttgttctttgcagctcaggagaacaaattgcaagaattgtcttgtctgggcaaaaagtgatgatataggaagagagataattaaattgtctaaagatgttattgttggctatgttgtcatggtggataaatttaccaatagaagaacggagttagtgaggattgaaggggctaaagttgctggcatatatcatcctttgatccatgagaaggttatgaaggtcatgcgcaggcatgacaggagagtttttgcatggactgttgatgatagcagctccatgaagaagatgctgtatgagcatgttgatgccattgtgaccagtaacccttctcttctgcagcagcttatgcaggagaccagagctgagtgtatggaagatggttttgccttaccataggaatttctagctgtcagaacataagggtttaacttctcagcagagaggaccaactagcgagttgagtttgagggattattcataaattagatgataattactttagtttttggcacattccgcacttctgtcatataattgaaataagaaaatatggttagcttgtcatgaaatatgttgtttccttttacagcttgatcagatcaggtcagtgagaagatcgcaacaataatatcattgattaacagaatcatgctttagttaccattgatattcaagtttgtttctcactttttg

SEQ ID NO: 42604 - DNA, 3846 bp, Zea Mays
attcctctcccatcgccgggataatataggtagataaatacccaagaatcctacggccaccaataatagaattcttatattttttctgtgaaaaaacgaagcaccgcaaaggaaggaataaaggaaatattccatatcactatggaaataaaggtggccgctttctctcctctgcgcggactcctcgacggacgccagcagcaaaggaggaaggagctgaactgctgcaggtaatacatgcatatataacccgaccagcaatcgttctgtgctgtacttgagtcgaggccggcgccgccgccgcggcagcgaggaggaggaggagcagaggcggcgaccatggcggcggggaacgagtggatcaacgggtacctggaggcgatcctggacgcgggcacgaggctgcgcgggccgtggcagcagcagggcggcgcggcttcgctgacggccgcgctgccgaggctgctggcggaggccggcggccagcagggcgccgcggcgtacagcccgacgcgctacttcgtggaggaggtggtgagccgcttcgacgaccgcgacctccacaagacgtggaccaaggtggtggcgatgcgcaacagccaggagcggagcaaccggctggtgaacctgtgctggaggatctggcacgtcgcgaggaagaagaagcaggtgcaacgggagtacgcgcggcagctggcgcagcggcgcctggagcaggagctgggcagccgggaggccgccgaggagctctccgatggcgagaaggacggcgcccccgacgccgcccagcagcctgtgtcggtggcggcgcccgacggccggatcgccaggatcgggtccgaggcccggatcgtgtcggacgacgagggcggggacggcggcaaggacgacaggaacctctacatcgtgctcatcagcatacacgggctcgtccgtggcgagaacatggagctcggccgtgacgctgacaccggggggcaggtgaagtatgtggtggagctggcccgggcgctggcggcgaccgccggcgtgcaccgcgtggacctactcacgcgccagatctcctgcccggacgtcgattggacctacggggagcccgtcgagatgatcacccatcaggccgacgacggcgacggcagcggcggcggggcctacatcgtgcgcctcccgtgcgggccccgcgacaagtacctccccaaggagtccctgtggccgcacatccccgagttcgtggaccgcgcgctggcgcacgtcaccaacgtcgcgcgcgcgctgggggaccagcagcagcagcagcccgacgccggcgcgggcgcgggcgcggccgccccggtgtggccgtacgtggtccacggccactacgcggacgcggcggaggcggcggcgcacctggccagcgcgctcaacgtgcccatggtcatgacgggccactccctggggcggaacaagctggagcagctgctcaagctgggccgcatgccgcgcgccgagatccagggcacctaccggatcgcgcgccgaatcgaggccgaggagaccggcctcgacgccgccgatatggtggtcaccagcaccaagcaggagatcgaggagcagtggggcctctacgacggcttcgacctcatggtggagcgcaagctccgggtgcgccgccgcaggggcctcagctgcctcggacgctacatgccgcggatggtcgtcatcccgccggggatggacttcagctacgtcgacacgcaggacctcgctgagggcgacgccgacctgcagatgctcatgagtcccggcaaggccaagaagccattgcctcccatttggtcagaggtcctgaggttcttcgtcaacccgcacaagcccatgatcctggcgctgtcgcggccggaccccaagaagaacgtcaccacgctgctcaaggcctatggcgagagccgccacctccgcgagcttgccaaccttacactgatactggggaaccggcatgatatcgaggagatgtccggcggcgccgccacagttctgacggcagtgctcaagctcatcgaccggtacgacctgtacggctgcgtcgcctaccctaagcaccacaagcagaccgacgtgccgcacatataccgccttgccgccaagacgaagggagtgttcattaatcctgcacttgtggagccattcggcctcaccctcatagaggccgctgcgtatggtctgcccgtggtggccaccaagaacggcggtccggtggacatcatcaaggcgctgcacaacgggctgctggtggacccgcacgacgaggcggcgataacggaggcgctgctcagcctgctagccgacaaggcgcggtgggccgagtgccggcgcaacggcctccgcaacatccaccgcttctcctggccgcaccactgccgcctctacctctcccacgtggccgccaactgcgaccacccggcgccgcaccagctgctccgcgtcccggccagcccgcgcgccgcgctcgccgagcatggcaccgacgactccctctcggagtcgctccgcggcctctccatctccatcgacgcctcgcacgacctcaaggccggggactccgccgcggccatcatggacgcgctccgccggcgccgctccgccgaccggccgccgagctcggccgcgagggcgatcgggcacgcgccgggccggcggcagggtctcctcgtcctcgccgtcgactgctacaacggcgacggcacaccggacgccgagcggatgaagaaagctgtcgacctggcgctgtcggcggcggcagcggccggcggccggctcgggtgcgtcctgtcgaccgggatgaccatagccgaggccgcggacgcgctcagcgcctgcggcgtcgacccggccggcttcgacgcgctcgtctgcagcagcggcgcggatctctgctacccgtggagggaggtcgcggcggacgacgagtacgcggggcacgtggcgttccggtggcccgggaaccacgtgcgcgcggccgtgccgaggctcggaaaggccgagggcgcgcaggaggcggacctcgccttcgacgaggccgcctgctccgggccttgccacgcctacgccgcggcgggcgcgtctaaggtgaagaaggtggactcgatccggcagtcgctgcgcatgcgcgggttccggtgcaacctcgtgtacacgcgcgcgtgcacgcgcctcaacgtcatcccgctctcggcgtcgcggccgcgcgcgctcaggtacctgtcgatacaatggggcatcgacctgtccaaggtggccgtgctcgtgggcgacaagggcgacaccgaccgcgaacggctgctccctggcctgcacagaacgctggtcctgccggagctagtttgccacggcagcgaggagctgcgccgcgaccaagacgggtttctggcagaggacgtcgtctccatggactccccgaatatcctcaccctcgccgagtaccaggcggcggtcgacatcctcaaggctatttgagagtccgggattatgatacatgatctgctccgacattccagctacgggcaatcaattgaggacctaggtgctcaacaggtggaaaatactgagcagtagctcgttgaaggcaagttgtgcccttgatcacttccatttatccaataatgttcatgttaatcattatgatctgcataggttaattttgctgggatccaatacatcaccatagtttggttatctttataccttgtttaccactgaacttttgtgtagaatttgctattgctttatgtggttttgggtgttaagatacacatcattcatgatcatgcttttatcataaatgagttatttaccgttcatgacaag

SEQ ID NO: 42605 - DNA, 4074 bp, Zea Mays
attcctctcccatcgccgggataatataggtagataaatacccaagaatcctacggccaccaataatagaattcttatattttttctgtgaaaaaacgaagcaccgcaaaggaaggaataaaggaaatattccatatcactatggaaataaaggtggccgctttctctcctctgcgcggactcctcgacggacgccagcagcaaaggaggaaggagctgaactgctgcaggtaatacatgcatatataacccgaccagcaatcgttctgtgctgtacttgagtcgaggccggcgccgccgccgcggcagcgaggaggaggaggagcagaggcggcgaccatggcggcggggaacgagtggatcaacgggtacctggaggcgatcctggacgcgggcacgaggctgcgcgggccgtggcagcagcagggcggcgcggcttcgctgacggccgcgctgccgaggctgctggcggaggccggcggccagcagggcgccgcggcgtacagcccgacgcgctacttcgtggaggaggtggtgagccgcttcgacgaccgcgacctccacaagacgtggaccaaggtggtggcgatgcgcaacagccaggagcggagcaaccggctggtgaacctgtgctggaggatctggcacgtcgcgaggaagaagaagcaggtgcaacgggagtacgcgcggcagctggcgcagcggcgcctggagcaggagctgggcagccgggaggccgccgaggagctctccgatggcgagaaggacggcgcccccgacgccgcccagcagcctgtgtcggtggcggcgcccgacggccggatcgccaggatcgggtccgaggcccggatcgtgtcggacgacgagggcggggacggcggcaaggacgacaggaacctctacatcgtgctcatcagcatacacgggctcgtccgtggcgagaacatggagctcggccgtgacgctgacaccggggggcaggtgaagtatgtggtggagctggcccgggcgctggcggcgaccgccggcgtgcaccgcgtggacctactcacgcgccagatctcctgcccggacgtcgattggacctacggggagcccgtcgagatgatcacccatcaggccgacgacggcgacggcagcggcggcggggcctacatcgtgcgcctcccgtgcgggccccgcgacaagtacctccccaaggagtccctgtggccgcacatccccgagttcgtggaccgcgcgctggcgcacgtcaccaacgtcgcgcgcgcgctgggggaccagcagcagcagcagcccgacgccggcgcgggcgcgggcgcggccgccccggtgtggccgtacgtggtccacggccactacgcggacgcggcggaggcggcggcgcacctggccagcgcgctcaacgtgcccatggtcatgacgggccactccctggggcggaacaagctggagcagctgctcaagctgggccgcatgccgcgcgccgagatccagggcacctaccggatcgcgcgccgaatcgaggccgaggagaccggcctcgacgccgccgatatggtggtcaccagcaccaagcaggagatcgaggagcagtggggcctctacgacggcttcgacctcatggtggagcgcaagctccgggtgcgccgccgcaggggcctcagctgcctcggacgctacatgccgcggatggtcgtcatcccgccggggatggacttcagctacgtcgacacgcaggacctcgctgagggcgacgccgacctgcagatgctcatgagtcccggcaaggccaagaagccattgcctcccatttggtcagaggtcctgaggttcttcgtcaacccgcacaagcccatgatcctggcgctgtcgcggccggaccccaagaagaacgtcaccacgctgctcaaggcctatggcgagagccgccacctccgcgagcttgccaaccttacactgatactggggaaccggcatgatatcgaggagatgtccggcggcgccgccacagttctgacggcagtgctcaagctcatcgaccggtacgacctgtacggctgcgtcgcctaccctaagcaccacaagcagaccgacgtgccgcacatataccgccttgccgccaagacgaagggagtgttcattaatcctgcacttgtggagccattcggcctcaccctcatagaggccgctgcgtatggtctgcccgtggtggccaccaagaacggcggtccggtggacatcatcaaggcgcggtgggccgagtgccggcgcaacggcctccgcaacatccaccgcttctcctggccgcaccactgccgcctctacctctcccacgtggccgccaactgcgaccacccggcgccgcaccagctgctccgcgtcccggccagcccgcgcgccgcgctcgccgagcatggcaccgacgactccctctcggagtcgctccgcggcctctccatctccatcgacgcctcgcacgacctcaaggccggggactccgccgcggccatcatggacgcgctccgccggcgccgctccgccgaccggccgccgagctcggccgcgagggcgatcgggcacgcgccgggccggcggcagggtctcctcgtcctcgccgtcgactgctacaacggcgacggcacaccggacgccgagcggatgaagaaagctgtcgacctggcgctgtcggcggcggcagcggccggcggccggctcgggtgcgtcctgtcgaccgggatgaccatagccgaggccgcggacgcgctcagcgcctgcggcgtcgacccggccggcttcgacgcgctcgtctgcagcagcggcgcggatctctgctacccgtggagggaggtcgcggcggacgacgagtacgcggggcacgtggcgttccggtggcccgggaaccacgtgcgcgcggccgtgccgaggctcggaaaggccgagggcgcgcaggaggcggacctcgccttcgacgaggccgcctgctccgggccttgccacgcctacgccgcggcgggcgcgtctaaggtgaagaaggtggactcgatccggcagtcgctgcgcatgcgcgggttccggtgcaacctcgtgtacacgcgcgcgtgcacgcgcctcaacgtcatcccgctctcggcgtcgcggccgcgcgcgctcaggtacctgtcgatacaatggggcatcgacctgtccaaggtggccgtgctcgtgggcgacaagggcgacaccgaccgcgaacggctgctccctggcctgcacagaacgctggtcctgccggagctagtttgccacggcagcgaggagctgcgccgcgaccaagacgggtttctggcagaggacgtcgtctccatggactccccgaatatcctcaccctcgccgagtaccaggcggcggtcgacatcctcaaggctatttgagagtccgggattatgatacatgatctgctccgacattccagctgttggttccacactctgctggggttattttggacggacagttaaaatttcacagcgaatgactgcaaactttatataaaaaagatacatgtttttgttttcggttacttttattttttttggaaggggcttatggtataagtgtacatgaatcttttggtgcacatagtatacatattaaattatatttcctctatttcaaaataatagtcgttttagttttagtcattagattttatgtctatatattcaaatagatcataaacctagacatgtgtaaaacatatatattaagtatgtatgaatctattagttatctaaaataaattataatttggaacgtagagagtaattatttatcgtaaatctattatccttcactattttgcatatttttataaaaacatcctttatcattaccttctaccatttgcatgttctatgtctagcaccggaaacttcggaaaatcataactatctaatcgtagctccgaatttagtggttctcgaacctatgatcttgtttagatgcgtagaatattatcatacagtatgttcttatgtttggtgtgatgttaatttctactataccatatttgtttgtattgttgcgagtag

SEQ ID NO: 42606 - DNA, 2227 bp, Zea Mays
ctacggccaccaataatagaattcttatattttttctgtgaaaaaacgaagcaccgcaaaggaaggaataaaggaaatattccatatcactatggaaataaaggtggccgctttctctcctctgcgcggactcctcgacggacgccagcagcaaaggaggaaggagctgaactgctgcaggtaatacatgcatatataacccgaccagcaatcgttctgtgctgtacttgagtcgaggccggcgccgccgccgcggcagcgaggaggaggaggagcagaggcggcgaccatggcggcggggaacgagtggatcaacgggtacctggaggcgatcctggacgcgggcacgaggctgcgcgggccgtggcagcagcagggcggcgcggcttcgctgacggccgcgctgccgaggctgctggcggaggccggcggccagcagggcgccgcggcgtacagcccgacgcgctacttcgtggaggaggtggtgagccgcttcgacgaccgcgacctccacaagacgtggaccaaggtggtggcgatgcgcaacagccaggagcggagcaaccggctggtgaacctgtgctggaggatctggcacgtcgcgaggaagaagaagcaggtgcaacgggagtacgcgcggcagctggcgcagcggcgcctggagcaggagctgggcagccgggaggccgccgaggagctctccgatggcgagaaggacggcgcccccgacgccgcccagcagcctgtgtcggtggcggcgcccgacggccggatcgccaggatcgggtccgaggcccggatcgtgtcggacgacgagggcggggacggcggcaaggacgacaggaacctctacatcgtgctcatcagcatacacgggctcgtccgtggcgagaacatggagctcggccgtgacgctgacaccggggggcaggtgaagtatgtggtggagctggcccgggcgctggcggcgaccgccggcgtgcaccgcgtggacctactcacgcgccagatctcctgcccggacgtcgattggacctacggggagcccgtcgagatgatcacccatcaggccgacgacggcgacggcagcggcggcggggcctacatcgtgcgcctcccgtgcgggccccgcgacaagtacctccccaaggagtccctgtggccgcacatccccgagttcgtggaccgcgcgctggcgcacgtcaccaacgtcgcgcgcgcgctgggggaccagcagcagcagcagcccgacgccggcgcgggcgcgggcgcggccgccccggtgtggccgtacgtggtccacggccactacgcggacgcggcggaggcggcggcgcacctggccagcgcgctcaacgtgcccatggtcatgacgggccactccctggggcggaacaagctggagcagctgctcaagctgggccgcatgccgcgcgccgagatccagggcacctaccggatcgcgcgccgaatcgaggccgaggagaccggcctcgacgccgccgatatggtggtcaccagcaccaagcaggagatcgaggagcagtggggcctctacgacggcttcgacctcatggtggagcgcaagctccgggtgcgccgccgcaggggcctcagctgcctcggacgctacatgccgcggatggtcgtcatcccgccggggatggacttcagctacgtcgacacgcaggacctcgctgagggcgacgccgacctgcagatgctcatgagtcccggcaaggccaagaagccattgcctcccatttggtcagaggtcctgaggttcttcgtcaacccgcacaagcccatgatcctggcgctgtcgcggccggaccccaagaagaacgtcaccacgctgctcaaggcctatggcgagagccgccacctccgcgagcttgccaaccttacactgatactggggaaccggcatgatatcgaggagatgtccggcggcgccgccacagttctgacggcagtgctcaagctcatcgaccggtacgacctgtacggctgcgtcgcctaccctaagcaccacaagcagaccgacgtgccgcacatataccgccttgccgccaagacgaagccaccccttcatgtgcttcagcatctcctccaagataaatacatcctttgacctcaacatcattccccatttctgcaagtacgcaatagcatccaacataatagttgtcagaccattaggaaaaaccttcacaatggccatctt

SEQ ID NO: 42607 - DNA, 2298 bp, Zea Mays
attcctctcccatcgccgggataatataggtagataaatacccaagaatcctacggccaccaataatagaattcttatattttttctgtgaaaaaacgaagcaccgcaaaggaaggaataaaggaaatattccatatcactatggaaataaaggtttattatatctttttttttcaatttttgaattttgtatcgatttatatatctgtttaaaaattggggggaaacaacatgctctcctcgaccctataatagcatatatatataggtggccgctttctctcctctgcgcggactcctcgacggacgccagcagcaaaggaggaaggagctgaactgctgcaggtaatacatgcatatataacccgaccagcaatcgttctgtgctgtacttgagtcgaggccggcgccgccgccgcggcagcgaggaggaggaggagcagaggcggcgaccatggcggcggggaacgagtggatcaacgggtacctggaggcgatcctggacgcgggcacgaggctgcgcgggccgtggcagcagcagggcggcgcggcttcgctgacggccgcgctgccgaggctgctggcggaggccggcggccagcagggcgccgcggcgtacagcccgacgcgctacttcgtggaggaggtggtgagccgcttcgacgaccgcgacctccacaagacgtggaccaaggtggtggcgatgcgcaacagccaggagcggagcaaccggctggtgaacctgtgctggaggatctggcacgtcgcgaggaagaagaagcaggtgcaacgggagtacgcgcggcagctggcgcagcggcgcctggagcaggagctgggcagccgggaggccgccgaggagctctccgatggcgagaaggacggcgcccccgacgccgcccagcagcctgtgtcggtggcggcgcccgacggccggatcgccaggatcgggtccgaggcccggatcgtgtcggacgacgagggcggggacggcggcaaggacgacaggaacctctacatcgtgctcatcagcatacacgggctcgtccgtggcgagaacatggagctcggccgtgacgctgacaccggggggcaggtgaagtatgtggtggagctggcccgggcgctggcggcgaccgccggcgtgcaccgcgtggacctactcacgcgccagatctcctgcccggacgtcgattggacctacggggagcccgtcgagatgatcacccatcaggccgacgacggcgacggcagcggcggcggggcctacatcgtgcgcctcccgtgcgggccccgcgacaagtacctccccaaggagtccctgtggccgcacatccccgagttcgtggaccgcgcgctggcgcacgtcaccaacgtcgcgcgcgcgctgggggaccagcagcagcagcagcccgacgccggcgcgggcgcgggcgcggccgccccggtgtggccgtacgtggtccacggccactacgcggacgcggcggaggcggcggcgcacctggccagcgcgctcaacgtgcccatggtcatgacgggccactccctggggcggaacaagctggagcagctgctcaagctgggccgcatgccgcgcgccgagatccagggcacctaccggatcgcgcgccgaatcgaggccgaggagaccggcctcgacgccgccgatatggtggtcaccagcaccaagcaggagatcgaggagcagtggggcctctacgacggcttcgacctcatggtggagcgcaagctccgggtgcgccgccgcaggggcctcagctgcctcggacgctacatgccgcggatggtcgtcatcccgccggggatggacttcagctacgtcgacacgcaggacctcgctgagggcgacgccgacctgcagatgctcatgagtcccggcaaggccaagaagccattgcctcccatttggtcagaggtcctgaggttcttcgtcaacccgcacaagcccatgatcctggcgctgtcgcggccggaccccaagaagaacgtcaccacgctgctcaaggcctatggcgagagccgccacctccgcgagcttgccaaccttacactgatactggggaaccggcatgatatcgaggagatgtccggcggcgccgccacagttctgacggcagtgctcaagctcatcgaccggtacgacctgtacggctgcgtcgcctaccctaagcaccacaagcagaccgacgtgccgcacatataccgccttgccgccaagacgaagactacaagcaccttcaagacgaagaagcaactccagcagacaacaacaag

SEQ ID NO: 42608 - DNA, 698 bp, Zea Mays
taactgcagatgagtaaagataggcaaagaaaccatttggttgaagcatatggaatcaagtttgtgtcaattttacgttacaataacacataacccaaatttatttcagacagatcataaggtgtatgaagcaatgttgtataaagatgatacgcagtgttgattgaaacaaattcaacacatggaatcaaacggaatgttgaataaataaacatgtcacaaaagtcataagtcgctagaggtgaatcgtactagaatagaaggaaaaattatattgcttgcccaagtgaaccttcagtgttgactgttagctgaaggacaaatcaggtcttcctcctaaatacctggcctgtcgggaagatattgcatagcaaaataaaataagcaatccatccccgactctccaaccaaattccaagagccagccaaaaacataaaatagaggaggaaggaaggcgcgatcccgtgggacgccaccgcgagaacagtaccgaaaatcctgcaacgagcaccgagaagggggcaccgggctctcgagctaagatccggaatcgatcggcgtcctattgcggggcgagaacctggcctcctcctgtcctgaattcccctcccctagaagggatcgatcgatcggacactgcggcgcggaagacgtggctgttgcctgtgggagcagacagcgtgacaggagcgattcg

SEQ ID NO: 42609 - DNA, 155 bp, Zea Mays
catgtccctatacgtgtagagagataagagattggttattaatactcagataaacccgtgctcaacaagaatgaccgaatgttagaaagaaaacaggatttgtttctaggaagatgaagtggttgccagtgtcatgattgttcttctcttgttgt

SEQ ID NO: 42610 - DNA, 452 bp, Zea Mays
ctcaaaggtatcgttggggctatacaaaggatgaaataattttcttcaccatgatcaatcaatacaattgaagctcgtcaatgcagccaaaaacatgcaacacaaggtgtagaaaaccaaaaaatagaacaaatcgatatccataagcattacccaagctaaagagatcagaaagagaaatgtgctaatagcgataacaaaaaaaaaacggcaattccctaaccagacaattaggatttacctcagaactcgatttctttctcttcttttcctttcaaggaaatacattggcagcaaaaattgaacaatgctccccatcttcccctctcttcattatcatccttaaacgggggagagaaaggtgggaaaagtaatgtgcaaaatagaagttggattagagttaactgctccatggtatgttttcccgtttgaagatttctgcagcttttccc

SEQ ID NO: 42611 - DNA, 1768 bp, Zea Mays
gtggctcgctagctagtgtgcctccgcatgcatccagtgctggccagccggtgagcactgccgctcgccgcatcaggtagtagggcgctagctagccatggctcgcgtcgccgccatggtggtggtgatggtgctcctccagcagttggcctcctcgtactcgtacaccgtcgcggcccacgccgatgctgctggcgtgcttggccgcaaggcgggcgtcgtcgtcgacgagactccggtggagaaatcgccggctgggccggggaggtacgcagtcatcttcgacgccggcagtacggggagtcgggtgtacatcttccggttcggcaggcagatggacctcctccgcatcggcgacgagatcgaattttttgccaagttgaagccaggtctgagctcgtatgctgggcgaccccaggaggccgcaaagtccattctgcctcttctcgagaaggccaagagcattgtcccctcatggcttatgaaaagaacccctgttaagcttggagcgactgctggattacgccttatcggaaaccaacaagcagaccaaatcctcgatgcggtcagagacctggtccacaagaagagcaaattccagtacaagcccaactggatcaatgttcttgaggggtctcaggaagcatcctacctatgggtcgctctgaattacttgctggataaactgggaggggagtattcccagacggtaggcgtgattgatttgggtggcgggtcggtgcaaatggcgtacgctgtctccgcaaacgctgctgcgagagctcccgcggtgcctgacggcgaggatccctacattaccaaggagtattttaaagggaaacagtacaatgtatacgttcacagctacttgcgctatggttcctttgcatcacgagcggagattctgatgtccaagaacggaccattcagctcctgcatgctgcgcggatttagtggtaaatatacctacaatggacagcagttcgatgcgactgctagaccagaaggagcattgtatgacaaatgcaggggagagattgccaaggcgatgaatctcaaggcaccatgcaagacagcaaagaactgcaccttctgtggtgtgtggaaagggggaggtggagctggccaaaacgacatctacgtcgcgtcaggtttctactaccttgcctcacatatagcaaagctccaagcgcaaaggcccctcctgccgcattcagggctgcggctaagaaggcctgcaaattcgatgtcaacagagcaaaagtggcctacccagatgtttctaacagtgatgtgccgtacttgtgtatggatcttacttacacgtacacattgctcgttgacggcttcggtctgcagccaatgaaaaagattacatttgtatccaaggtgaagcatggcgaatactacatcgaagccacatggcctttgggtacggctattgaggccgtgtcaccgacaaggcagatcggaaactaatgggctgctgctcgcactgaactgaactctggatttagcgcatgttatcatggttgcagttagcgctcctgacctataatatttgactctcaaataatttctgtactgctgctcggcagcgtgcatgcaaactgagcattttcgagtcagcctctgcgtgtgtgcgggctaattcaactatgaaattcattcgaatttctttccactttcactttggtatcttcagtgaatatgtaaatctttgatgttcttctgctttaatcctgtgacatgtctcacacaaagctac

SEQ ID NO: 42612 - DNA, 1654 bp, Zea Mays
gtttcaccctgccagcctcgcctcccgtgacctacgccacccgaccttcacgatagccgcgccacccagcccccgtctacctcgcctcccgctaccagcgtcgcatccaccgcacctcgtaggcctcagcctcccacgccgccggcgcgtgcaccaaacgtctgattcacccgcaagcccctccctcgtctagggtttggcattttagctgccgtcttggcatcagcgtcgctcgcgctcctcgcagccacatcagcacatcgtacaagaagagcaagctggcgagaccgcgatagggccctagaacgatgggaggaggccgacgcggtgcgcgggtggttatccgccgtcgtggagcgtaatcttgccctgcgacactgaagaggctccgcatccttctacctcccccgcggtggcttggtcagcaccgctggctccaccaaagagcgtcgcggcctccgcgaagaaaccaacgcgttctgtgcgcttggagtcggagcaaaaatggaggaaccagcgtttgatctgggcatcacgttcttctgcctcgccacaaggccaagcaaaagagcgtaggtatgtcatgaagaagatcaacctctccaagcagaacgacaacgcatgtgctcctaacataggaagacaagaagaatttctagagcggtacaccgtgatccagtacccttccttccaccgcggctgaggagcaactctcccttgatgtcctcttcctatcgttgtatccacacgacctttgtgttctataagtttgctttgttgttgatctgcctgctccgctgctcctcgtaagccttagctgatgatcttactatcttcctctttagtgaagggtggaataggaaatgatgatacactatggcagatttctccaaggtgcgcgaagaagattcttctactactttctattgttatttggaacttccgcttttactgaaaactatatttttatgtacggacgggtgggcgatatggaatttaagcttatacctattttagatctgatcgactagctataactgaatttattaggggaatccccaaactggatcattattttctcaaatagaaatgtcaattcagtttgttataatggaaaataagtgaagaaattaaaagaattaaggattagataaaaagaaagacatcagtgacaaggtcactatgaaccaatcactggtatgtggcatgcgttcaattggaacaaataagatttactattacttgctcaaggctcatgggacacaactttttaccatcaattgtggctgaaggatgtggcccttctcattttacggataccaaagattgtctgccatcttttgtactaaaatcacataaaccacaacatcttctgttaaatattttaatttttctaattctaacaactttttagagctactaagcatgcccttaacagaaccatgcaaaaaaccgggatgtgtgcggccctcccttggctcgcctctagatagtcgcacatggggcccacatccgcagatctcaactccttcacgctggtgccatggcatggagtgacgccaccggacatgagtgagagccacatgtaatatgtaagacagtgaggtcgataataatttgtgttgttcgctttcatgtaatcgttgcacactaa

SEQ ID NO: 42613 - DNA, 1105 bp, Zea Mays
gtttcaccctgccagcctcgcctcccgtgacctacgccacccgaccttcacgatagccgcgccacccagcccccgtctacctcgcctcccgctaccagcgtcgcatccaccgcacctcgtaggcctcagcctcccacgccgccggcgcgtgcaccaaacgtctgattcacccgcaagcccctccctcgtctagggtttggcattttagctgccgtcttggcatcagcgtcgctcgcgctcctcgcagccacatcagcacatcgtacaagaagagcaagctggcgagaccgcgatagggccctagaacgatgggaggaggccgacgcggtgcgcgggtggttatccgccgtcgtggagcgtaatcttgccctgcgacactgaagaggctccgcatccttctacctcccccgcggtggcttggtcagcaccgctggctccaccaaagagcgtcgcggcctccgcgaagaaaccaacgcgttctgtgcgcttggagtcggagcaaaaatggaggaaccagcgtttgatctgggcatcacgttcttctgcctcgccacaaggccaagcaaaagaggtatgtcatgaagaagatcaacctctccaagcagaacgacaacgcatgtgctcctaacataggaagacaagaagaatttctagagcggtacaccgtgatccagtacccttccttccaccgcggctgaggagcaactctcccttgatgtcctcttcctatcgttgtatccacacgacctttgtgttctataagtttgctttgttgttgatctgcctgctccgctgctcctcgtaagccttagctgatgatcttactatcttcctctttagtgaagggtggaataggaaatgatgatacactatggcagatttctccaagaaccatgcaaaaaaccgggatgtgtgcggccctcccttggctcgcctctagatagtcgcacatggggcccacatccgcagatctcaactccttcacgctggtgccatggcatggagtgacgccaccggacatgagtgagagccacatgtaatatgtaagacagtgaggtcgataataatttgtgttgttcgctttcatgtaatcgttgcacactaa

SEQ ID NO: 42614 - DNA, 1649 bp, Zea Mays
gtttcaccctgccagcctcgcctcccgtgacctacgccacccgaccttcacgatagccgcgccacccagcccccgtctacctcgcctcccgctaccagcgtcgcatccaccgcacctcgtaggcctcagcctcccacgccgccggcgcgtgcaccaaacgtctgattcacccgcaagcccctccctcgtctagggtttggcattttagctgccgtcttggcatcagcgtcgctcgcgctcctcgcagccacatcagcacatcgtacaagaagagcaagctggcgagaccgcgatagggccctagaacgatgggaggaggccgacgcggtgcgcgggtggttatccgccgtcgtggagcgtaatcttgccctgcgacactgaagaggctccgcatccttctacctcccccgcggtggcttggtcagcaccgctggctccaccaaagagcgtcgcggcctccgcgaagaaaccaacgcgttctgtgcgcttggagtcggagcaaaaatggaggaaccagcgtttgatctgggcatcacgttcttctgcctcgccacaaggccaagcaaaagaggtatgtcatgaagaagatcaacctctccaagcagaacgacaacgcatgtgctcctaacataggaagacaagaagaatttctagagcggtacaccgtgatccagtacccttccttccaccgcggctgaggagcaactctcccttgatgtcctcttcctatcgttgtatccacacgacctttgtgttctataagtttgctttgttgttgatctgcctgctccgctgctcctcgtaagccttagctgatgatcttactatcttcctctttagtgaagggtggaataggaaatgatgatacactatggcagatttctccaaggtgcgcgaagaagattcttctactactttctattgttatttggaacttccgcttttactgaaaactatatttttatgtacggacgggtgggcgatatggaatttaagcttatacctattttagatctgatcgactagctataactgaatttattaggggaatccccaaactggatcattattttctcaaatagaaatgtcaattcagtttgttataatggaaaataagtgaagaaattaaaagaattaaggattagataaaaagaaagacatcagtgacaaggtcactatgaaccaatcactggtatgtggcatgcgttcaattggaacaaataagatttactattacttgctcaaggctcatgggacacaactttttaccatcaattgtggctgaaggatgtggcccttctcattttacggataccaaagattgtctgccatcttttgtactaaaatcacataaaccacaacatcttctgttaaatattttaatttttctaattctaacaactttttagagctactaagcatgcccttaacagaaccatgcaaaaaaccgggatgtgtgcggccctcccttggctcgcctctagatagtcgcacatggggcccacatccgcagatctcaactccttcacgctggtgccatggcatggagtgacgccaccggacatgagtgagagccacatgtaatatgtaagacagtgaggtcgataataatttgtgttgttcgctttcatgtaatcgttgcacactaa

SEQ ID NO: 42615 - DNA, 544 bp, Zea Mays
atgttgtcacaagaccagcgttttgaattacaccgaaaactcaggattacataccgaaggcttatatcatttttttcatggaagattacggtcccagtaaaacactccgacacatgcctcgacaaggcacacaccattccccagaattatatactctccgaagatcgcctgcaggagagccaactcaagatgctatcatttggtgatgtccccccaagcaggaacatggtggcggcactgaagacggcgtggattgcccttgtaagttgttttttgcttgcattgacagcagtggttcagagtggatgcctgcgcttaccttcaagtttggatcatgaatcgtggtatgtggtgctccaagatggccaagagttctctgctttggctatccctttccacttgccggtcctcgagcctgcttgcagcctccacaagctgacctctaagcctttgaggcaaaagtcgcccattggaattcatgcattccttatagagcggcaggtaggccatggcaatcaccagctcaagtgggagatcccctaag

SEQ ID NO: 42616 - DNA, 1189 bp, Zea Mays
atataaagaatatgataggatagacaggcgacagctgcacttcagctgttcacccagcgcgcgcgcgcgctcgtccgccgtcgccctgcccagcccttcgccggtcctttcccaggccttcgacgcgtccttcgccgtcgaagagtccccagcagcaccatgcccttttctcggcccgccgttggtttcttagttagactggttggggtccggccaagctgctgtcctccttcccgtgcatttgcagctgtcagagctcaaaagattcagcttcccaagaaaaaaaggcgattagatgaagtgtgcttagaaaggtttcaacaatacagtagaacatacatccagtcatggattcttcaaggcaaagtcattgtggatggaagagttgtgaataaagctggaacacaagtatctgacaagtctgtcatcgaaatcaaggctgaaatcccaaaatatgacataagcttgaggcagctatcaaaggatttgatattgattgtgatggaaagatagcccttgattcaggattatccacaggtggctttactgactgtttacttcagcatggagcatcacatgtttatggtgtagatgttggctatggacaggtggctgaaaaaattcgcacacatgaacgtgtttcagtgatcgaacgcacaaatttaagatatctatctcaactgccagaaccagttgacttggtgacactagacctatcatttatctccattctcttggtcatgcctgctgttatcaaagtaatgaaaacggattctacattgataacacttatcaagcctcaatttgaagcacgtagatcacaggtaggaggtggtgggattgttcgagatcctttggttcatcaagaggtactggatagaataatttcaggcgtggaagaatttggattctgcaataagggttggatcgaatctcctataaagggtgcagaagggaataaggagtttcttgcttgcttcaacaggatccaatatcagagtcacagccagaggcaaaggaacctgtaacctaggatgtcagcagaacctattctactggtcaacatgttcaattgcaggtgttaaaaattttgtgtatcccttattactttatgaggccactaatttcgaaattaaattactaaattataatttattaaatatgtacttaatttacaatagggaaacaa

SEQ ID NO: 42617 - DNA, 1114 bp, Zea Mays
atataaagaatatgataggatagacaggcgacagctgcacttcagctgttcacccagcgcgcgcgcgcgctcgtccgccgtcgccctgcccagcccttcgccggtcctttcccaggccttcgacgcgtccttcgccgtcgaagagtccccagcagcaccatgcccttttctcggcccgccgttggtttcttagttagactggttggggtccggccaagctgctgtcctccttcccgtgcatttgcagctgtcagagctcaaaagattcagcttcccaagaagcaaagtcattgtggatggaagagttgtgaataaagctggaacacaagtatctgacaagtctgtcatcgaaatcaaggctgaaatcccaaaatatagcaggacataagcttgaggcagctatcaaaggatttgatattgattgtgatggaaagatagcccttgattcaggattatccacaggtggctttactgactgtttacttcagcatggagcatcacatgtttatggtgtagatgttggctatggacaggtggctgaaaaaattcgcacacatgaacgtgtttcagtgatcgaacgcacaaatttaagatatctatctcaactgccagaaccagttgacttggtgacactagacctatcatttatctccattctcttggtcatgcctgctgttatcaaagtaatgaaaacggattctacattgataacacttatcaagcctcaatttgaagcacgtagatcacaggtaggaggtggtgggattgttcgagatcctttggttcatcaagaggtactggatagaataatttcaggcgtggaagaatttggattctgcaataagggttggatcgaatctcctataaagggtgcagaagggaataaggagtttcttgcttgcttcaacaggatccaatatcagagtcacagccagaggcaaaggaacctgtaacctaggatgtcagcagaacctattctactggtcaacatgttcaattgcaggtgttaaaaattttgtgtatcccttattactttatgaggccactaatttcgaaattaaattactaaattataatttattaaatatgtacttaatttacaatagggaaacaa

SEQ ID NO: 42618 - DNA, 1123 bp, Zea Mays
atataaagaatatgataggatagacaggcgacagctgcacttcagctgttcacccagcgcgcgcgcgcgctcgtccgccgtcgccctgcccagcccttcgccggtcctttcccaggccttcgacgcgtccttcgccgtcgaagagtccccagcagcaccatgcccttttctcggcccgccgttggtttcttagttagactggttggggtccggccaagctgctgtcctccttcccgtgcatttgcagctgtcagagctcaaaagattcagcttcccaagaaaaaaaggcgattagatgaagtgtgcttagaaaggtttcaacaatacagtagaacatacatccagtcatggattcttcaaggcaaagtcattgtggatggaagagttgtgaataaagctggaacacaagtatctgacaagtctgtcatcgaaatcaaggctgaaatcccaaaatatagcaggacataagcttgaggcagctatcaaaggatttgatattgattgtgatggaaagatagcccttgattcaggattatccacaggtggctgaaaaaattcgcacacatgaacgtgtttcagtgatcgaacgcacaaatttaagatatctatctcaactgccagaaccagttgacttggtgacactagacctatcatttatctccattctcttggtcatgcctgctgttatcaaagtaatgaaaacggattctacattgataacacttatcaagcctcaatttgaagcacgtagatcacaggtaggaggtggtgggattgttcgagatcctttggttcatcaagaggtactggatagaataatttcaggcgtggaagaatttggattctgcaataagggttggatcgaatctcctataaagggtgcagaagggaataaggagtttcttgcttgcttcaacaggatccaatatcagagtcacagccagaggcaaaggaacctgtaacctaggatgtcagcagaacctattctactggtcaacatgttcaattgcaggtgttaaaaattttgtgtatcccttattactttatgaggccactaatttcgaaattaaattactaaattataatttattaaatatgtacttaatttacaatagggaaacaa

SEQ ID NO: 42619 - DNA, 1202 bp, Zea Mays
atataaagaatatgataggatagacaggcgacagctgcacttcagctgttcacccagcgcgcgcgcgcgctcgtccgccgtcgccctgcccagcccttcgccggtcctttcccaggccttcgacgcgtccttcgccgtcgaagagtccccagcagcaccatgcccttttctcggcccgccgttggtttcttagttagactggttggggtccggccaagctgctgtcctccttcccgtgcatttgcagctgtcagagctcaaaagattcagcttcccaagaaaaaaaggcgattagatgaagtgtgcttagaaaggtttcaacaatacagtagaacatacatccagtcatggattcttcaaggcaaagtcattgtggatggaagagttgtgaataaagctggaacacaagtatctgacaagtctgtcatcgaaatcaaggctgaaatcccaaaatatgtatgtagagcaggacataagcttgaggcagctatcaaaggatttgatattgattgtgatggaaagatagcccttgattcaggattatccacaggtggctttactgactgtttacttcagcatggagcatcacatgtttatggtgtagatgttggctatggacaggtggctgaaaaaattcgcacacatgaacgtgtttcagtgatcgaacgcacaaatttaagatatctatctcaactgccagaaccagttgacttggtgacactagacctatcatttatctccattctcttggtcatgcctgctgttatcaaagtaatgaaaacggattctacattgataacacttatcaagcctcaatttgaagcacgtagatcacaggtaggaggtggtgggattgttcgagatcctttggttcatcaagaggtactggatagaataatttcaggcgtggaagaatttggattctgcaataagggttggatcgaatctcctataaagggtgcagaagggaataaggagtttcttgcttgcttcaacaggatccaatatcagagtcacagccagaggcaaaggaacctgtaacctaggatgtcagcagaacctattctactggtcaacatgttcaattgcaggtgttaaaaattttgtgtatcccttattactttatgaggccactaatttcgaaattaaattactaaattataatttattaaatatgtacttaatttacaatagggaaacaa

SEQ ID NO: 42620 - DNA, 1119 bp, Zea Mays
atataaagaatatgataggatagacaggcgacagctgcacttcagctgttcacccagcgcgcgcgcgcgctcgtccgccgtcgccctgcccagcccttcgccggtcctttcccaggccttcgacgcgtccttcgccgtcgaagagtccccagcagtgtagcaccatgcccttttctcggcccgccgttggtttcttagttagactggttggggtccggccaagctgctgtcctccttcccgtgcatttgcagctgtcagagctcaaaagattcagcttcccaagaagcaaagtcattgtggatggaagagttgtgaataaagctggaacacaagtatctgacaagtctgtcatcgaaatcaaggctgaaatcccaaaatatagcaggacataagcttgaggcagctatcaaaggatttgatattgattgtgatggaaagatagcccttgattcaggattatccacaggtggctttactgactgtttacttcagcatggagcatcacatgtttatggtgtagatgttggctatggacaggtggctgaaaaaattcgcacacatgaacgtgtttcagtgatcgaacgcacaaatttaagatatctatctcaactgccagaaccagttgacttggtgacactagacctatcatttatctccattctcttggtcatgcctgctgttatcaaagtaatgaaaacggattctacattgataacacttatcaagcctcaatttgaagcacgtagatcacaggtaggaggtggtgggattgttcgagatcctttggttcatcaagaggtactggatagaataatttcaggcgtggaagaatttggattctgcaataagggttggatcgaatctcctataaagggtgcagaagggaataaggagtttcttgcttgcttcaacaggatccaatatcagagtcacagccagaggcaaaggaacctgtaacctaggatgtcagcagaacctattctactggtcaacatgttcaattgcaggtgttaaaaattttgtgtatcccttattactttatgaggccactaatttcgaaattaaattactaaattataatttattaaatatgtacttaatttacaatagggaaacaa

SEQ ID NO: 42621 - DNA, 1056 bp, Zea Mays
atataaagaatatgataggatagacaggcgacagctgcacttcagctgttcacccagcgcgcgcgcgcgctcgtccgccgtcgccctgcccagcccttcgccggtcctttcccaggccttcgacgcgtccttcgccgtcgaagagtccccagcagtgtagcaccatgcccttttctcggcccgccgttggtttcttagttagactggttggggtccggccaagctgctgtcctccttcccgtgcatttgcagctgtcagagctcaaaagattcagcttcccaagaagcaaagtcattgtggatggaagagttgtgaataaagctggaacacaagtatctgacaagtctgtcatcgaaatcaaggctgaaatcccaaaatatgtatgtagagcaggacataagcttgaggcagctatcaaaggatttgatattgattgtgatggaaagatagcccttgattcaggattatccacaggtggctgaaaaaattcgcacacatgaacgtgtttcagtgatcgaacgcacaaatttaagatatctatctcaactgccagaaccagttgacttggtgacactagacctatcatttatctccattctcttggtcatgcctgctgttatcaaagtaatgaaaacggattctacattgataacacttatcaagcctcaatttgaagcacgtagatcacaggtaggaggtggtgggattgttcgagatcctttggttcatcaagaggtactggatagaataatttcaggcgtggaagaatttggattctgcaataagggttggatcgaatctcctataaagggtgcagaagggaataaggagtttcttgcttgcttcaacaggatccaatatcagagtcacagccagaggcaaaggaacctgtaacctaggatgtcagcagaacctattctactggtcaacatgttcaattgcaggtgttaaaaattttgtgtatcccttattactttatgaggccactaatttcgaaattaaattactaaattataatttattaaatatgtacttaatttacaatagggaaacaa

SEQ ID NO: 42622 - DNA, 1247 bp, Zea Mays
atataaagaatatgataggatagacaggcgacagctgcacttcagctgttcacccagcgcgcgcgcgcgctcgtccgccgtcgccctgcccagcccttcgccggtcctttcccaggccttcgacgcgtccttcgccgtcgaagagtccccagcagtgtagcaccatgcccttttctcggcccgccgttggtttcttagttagactggttggggtccggccaagctgctgtcctccttcccgtgcatttgcagctgtcagagctcaaaagattcagcttcccaagaaaaaaaggcgattagatgaagtgtgcttagaaaggtttcaacaatacagtagaacatacatccagtcatggattcttcaaggcaaagtcattgtggatggaagagttgtgaataaagctggaacacaagtatctgacaagtctgtcatcgaaatcaaggctgaaatcccaaaatatagcaggacataagcttgaggcagctatcaaaggatttgatattgattgtgatggaaagatagcccttgattcaggattatccacaggtggctttactgactgtttacttcagcatggagcatcacatgtttatggtgtagatgttggctatggacaggtggctgaaaaaattcgcacacatgaacgtgtttcagtgatcgaacgcacaaatttaagatatctatctcaactgccagaaccagttgacttggtgacactagacctatcatttatctccattctcttggtcatgcctgctgttatcaaagtaatgaaaacggattctacattgataacacttatcaagcctcaatttgaagcacgtagatcacaggtaggaggtggtgggattgttcgagatcctttggttcatcaagaggtactggatagaataatttcaggcgtggaagaatttggattctgcaataagggttggatcgaatctcctataaagggtgcagaagggaataaggagtttcttgcttgcttcaacaggatccaatatcagagtcacagccagaggcaaaggaacctgtaacctaggatgtcagcagaacctgtaacctaggattatcaaccataacctctgatattcctgatattcttagactgtctccaacaataaccgctaaatggtccggtttagcgctaaatttagcggtcgaggacgtgcgcaatgcgtccaacaacaaccgtgcacgcttcctctccgtgatgggcacctgctaccgccccggccctgccaga

SEQ ID NO: 42623 - DNA, 1314 bp, Zea Mays
ctccggaccacgcgcattgtggtaaaatccagggcactcccaccaaacttattgtccgccccgtgaagagccgaacatctttgtaggaatgcaataagagacatggttgtccgtggtgctccagcaatagccatagcagcggcactagcattagccgttgaagtttctgatttagattttattggtacgcctgaagaagcagcttcttttgtttcaaagaaattggaataccttgtatccagccgaccaactgcagtgaacctatctgatgctgcaacaaagctccaaactttggtatcaaaggcagctgaaactgcaaaagattccaagtctatctttcaggtctacattgaggccgcagagacgatgcttgttgatgatgtggcagataataaagctattggctcacatggagctgtatttcttcaaaggcagcttgcaaattcaaaaaagatatctgttctaacccattgtaatactggcagtcttgcaactgctggttatggaactgcccttggggttatacgcgctcttcattcggggggagttttagagaaggccttttgcaccgaaactcgtccatttaaccagggatccagacttacagctttcgagttagttcatgaaaaaatacctgcaacactgatagcagattctgctgctgctgcgttgatgaaacaagggcatgttcaggctgtcattgttggtgctgatcgaatagcagcaaatggtgacacagccaacaagattggcacatacaacctcgccatctccgcgaagcatcatagtgtccagttctatgtgtcagcgccggtaacttccattgatctctccctcccatctggggatgagatagtcatagaagaaagatcaccaaaggagttgctgaactctgaaggtggtctgggaaagcaagttgctgcatccggtatatcagtctggaacccagctttcgatgttactccagcaaatctgatcactgcaatcataacagaaaagggtgtgatcacaaaaactgatgctgatggatctttcgacatcaaaggattccttctgcccgcaaaataatactctagcgtggcttccattctgaatgacaaatgtctggatcgacactgttgtattctgttttctctattatacacaataataaagtcatgtcctcataggattttggggctaaaaaaaataaaataaaatggaaggattaaaattagtctctagaaattaaaccccccctaagcaagatgattgtcttgcttgctttcaaaataatacattatctctatatttatagtccctagaggatttgac

SEQ ID NO: 42624 - DNA, 1476 bp, Zea Mays
gggacattcttcttcgcccagcctagccacgtccatcccgaggcaaacgaacaaagccacagcgcacctcacttattacgaaccccctctgtgccactgcccactgccacctgaaatccccgcgaacctatacttttccttcccccgatccaggcggttctcttcccagaagccagcccagaatggcggcatccgacgcgctgcagtccatcgtttacagccgtgggtcgctccgcctcctcgatcaggaatgcaataagagacatggttgtccgtggtgctccagcaatagccatagcagcggcactagcattagccgttgaagtttctgatttagattttattggtacgcctgaagaagcagcttcttttgtttcaaagaaattggaataccttgtatccagccgaccaactgcagtgaacctatctgatgctgcaacaaagctccaaactttggtatcaaaggcagctgaaactgcaaaagattccaagtctatctttcaggtctacattgaggccgcagagacgatgcttgttgatgatgtggcagataataaagctattggctcacatggagctgtatttcttcaaaggcagcttgcaaattcaaaaaagatatctgttctaacccattgtaatactggcagtcttgcaactgctggttatggaactgcccttggggttatacgcgctcttcattcggggggagttttagagaaggccttttgcaccgaaactcgtccatttaaccagggatccagacttacagctttcgagttagttcatgaaaaaatacctgcaacactgatagcagattctgctgctgctgcgttgatgaaacaagggcatgttcaggctgtcattgttggtgctgatcgaatagcagcaaatggtgacacagccaacaagattggcacatacaacctcgccatctccgcgaagcatcatagtgtccagttctatgtgtcagcgccggtaacttccattgatctctccctcccatctggggatgagatagtcatagaagaaagatcaccaaaggagttgctgaactctgaaggtggtctgggaaagcaagttgctgcatccggtatatcagtctggaacccagctttcgatgttactccagcaaatctgatcactgcaatcataacagaaaagggtgtgatcacaaaaactgatgctgatggatctttcgacatcaaaggattccttctgcccgcaaaataatactctagcgtggcttccattctgaatgacaaatgtctggatcgacactgttgtattctgttttctctattatacacaataataaagtcatgtcctcataggattttggggctaaaaaaaataaaataaaatggaaggattaaaattagtctctagaaattaaaccccccctaagcaagatgattgtcttgcttgctttcaaaataatacattatctctatatttatagtccctagaggatttgac

SEQ ID NO: 42625 - DNA, 1687 bp, Zea Mays
gggacattcttcttcgcccagcctagccacgtccatcccgaggcaaacgaacaaagccacagcgcacctcacttattacgaaccccctctgtgccactgcccactgccacctgaaatccccgcgaacctatacttttccttcccccgatccaggcggttctcttcccagaagccagcccagaatggcggcatccgacgcgctgcagtccatcgtttacagccgtgggtcgctccgcctcctcgatcagaggaagctgccgctcgagatggagtacatcgacgtcaagagttccgccgatggctggaatgcaataagagacatggttgtccgtggtgctccagcaatagccatagcagcggcactagcattagccgttgaagtttctgatttagattttattggtacgcctgaagaagcagcttcttttgtttcaaagaaattggaataccttgtatccagccgaccaactgcagtgaacctatctgatgctgcaacaaagctccaaactttggtatcaaaggcagctgaaactgcaaaagattccaagtctatctttcaggtctacattgaggccgcagagacgatgcttgttgatgatgtggcagataataaagctattggctcacatggagctgtatttcttcaaaggcagcttgcaaattcaaaaaagatatctgttctaacccattgtaatactggcagtcttgcaactgctggttatggaactgcccttggggttatacgcgctcttcattcggggggagttttagagaaggccttttgcaccgaaactcgtccatttaaccagggatccagacttacagctttcgagttagttcatgaaaaaatacctgcaacactgatagcagattctgctgctgctgcgttgatgaaacaagggcatgttcaggctgtcattgttggtgctgatcgaatagcagcaaatggtgacacagccaacaagattggcacatacaacctcgccatctccgcgaagcatcatagtgtccagttctatgtgtcagcgccggtggtctgggaaagcaagttgctgcatccggtatatcagtctggaacccagctttcgatgttactccagcaaatctgatcactgcaatcataacagaaaagggtgtgatcacaaaaactgatgctgatggatctttcgacatcaaaggattccttctgcccgcaaaataatactctagcgtggcttccattctgaatgacaaatgtctggatcgacactgttgtattctgttttctctattatacacaataataaagtcatgtcctcataggattttggtgtaagttttatggataggagatcgacgctagggtgtgtacccatagcggcgcgtatgagccgtgttttcacacgagtgggcaagtgaaaaagagatgtgggagatgacctctgaggctagggatgttttgtttctagagactaattttttagtctctttattttattttattttagttcctaaattgctaaatatggaaactaaaatagagttttagttttcgtgtttgataatttaggggctaaaaaaaataaaataaaatggaaggattaaaattagtctctagaaattaaaccccccctaagcaagatgattgtcttgcttgctttcaaaataatacattatctctatatttatagtccctagaggatttgac

SEQ ID NO: 42626 - DNA, 1197 bp, Zea Mays
atgactttcaagtttcaaggatcacacatctttatgaggaggccaagaagaggatgtatgcttttagtacgacgacttatgttggttttcaggctgtaatgaccgaggaaatgtcagaaaaatttcgcggtttgcctggagtagttttcattttgcctgattcatatctatatccagaaacaaaggagtacggaggagacaaatatgacaatggtgtcatcactccaagaccaccacctgttcattatagcagaccatcaagaactgacaggaaccgtaactaccgaggaaactaccaggatggccctccacagcaaggaaattaccagaacaaccgtcctccaccagaaggtggttaccagaacaacccgccgcagcaaggaaactaccagacataccgctcgcagcaagatggaagaggctatgccccacagcagaattatgcacaaggtggtcaggatggtagaggttttggaaggaatgattacacagaccgttcaggctacaatggaccacctgattttcgaagtcaaactcagtaccaagggcatgtaaatccagctgggcaaggtcaaggttacaacaacccccaagagcgtagcaacttctcgcaagggcagggaggaggttttaggcctggtggtccttcagcacctgggtcttatggccaaccatcagcacctggatcttatggtcaacctaatacacttggtaactatgggcaggtacctccatcagtgaatcctggtggtaacagagttcctggtgtgaatcctagttatggtggggatggcagacagggggctggaccagcatatggtggagataactggcaaagaggttctggtcagtatcctagcccaggtgaaggacaaggaaactggcaggcagtaagagctgacgtgttccactgaagacaagaatggcacttgagatttagaaatctccatctgtaaaataaacgactgtgatgcattactcttttttttttcttgcatttgaactctaaacttatgggcatgcgttattaccaaacctacggatgcaaattcattttagttttttgggccaaatgttggcatttttaaatggcgcagaatgtggaactcccctttgtcttcgtgtattgtttgcaggtatgctgtcactgtaaaacacgtgctaattactatagtattttggtgtagtttctcgttt

SEQ ID NO: 42627 - DNA, 1228 bp, Zea Mays
cctggattgtgcggttgcttcatcttgctgtgtcatggcttgccttgtgggctatatttatgaggaggccaagaagaggatgtatgcttttagtacgacgacttatgttggttttcaggctgtaatgaccgaggaaatgtcagaaaaatttcgcggtttgcctggagtagttttcattttgcctgattcatatctatatccagaaacaaaggagtacggaggagacaaatatgacaatggtgtcatcactccaagaccaccacctgttcattatagcagaccatcaagaactgacaggaaccgtaactaccgaggaaactaccaggatggccctccacagcaaggaaattaccagaacaaccgtcctccaccagaaggtggttaccagaacaacccgccgcagcaaggaaactaccagacataccgctcgcagcaagatggaagaggctatgccccacagcagaattatgcacaaggtggtcaggatggtagaggttttggaaggaatgattacacagaccgttcaggctacaatggaccacctgattttcgaagtcaaactcagtaccaagggcatgtaaatccagctgggcaaggtcaaggttacaacaacccccaagagcgtagcaacttctcgcaagggcagggaggaggttttaggcctggtggtccttcagcacctgggtcttatggccaaccatcagcacctggatcttatggtcaacctaatacacttggtaactatgggcaggtacctccatcagtgaatcctggtggtaacagagttcctggtgtgaatcctagttatggtggggatggcagacagggggctggaccagcatatggtggagataactggcaaagaggttctggtcagtatcctagcccaggtgaaggacaaggaaactggcagggaaggcagtaagagctgacgtgttccactgaagacaagaatggcacttgagatttagaaatctccatctgtaaaataaacgactgtgatgcattactcttttttttttcttgcatttgaactctaaacttatgggcatgcgttattaccaaacctacggatgcaaattcattttagttttttgggccaaatgttggcatttttaaatggcgcagaatgtggaactcccctttgtcttcgtgtattgtttgcaggtatgctgtcactgtaaaacacgtgctaattactatagtattttggtgtagtttctcgttt

SEQ ID NO: 42628 - DNA, 1131 bp, Zea Mays
cctggattgtgcggttgcttcatcttgctgtgtcatggcttgccttgtgggctatatgttatgaggaggccaagaagaggatgtatgcttttagtacgacgacttatgttggttttcaggctgtaatgaccgaggaaatgtcagaaaaatttcgcggtttgcctggagtagttttcattttgcctgattcatatctatatccagaaacaaaggagtacggaggagacaaatatgacaatggtgtcatcactccaagaccaccacctgttcattatagcagaccatcaagaactgacaggaaccgtaactaccgaggaaactaccaggatggccctccacagcaaggaaattaccagaacaaccgtcctccaccagaaggtggttaccagaacaacccgccgcagcaaggaaactaccagacataccgctcgcagcaagatggaagaggctatgccccacagcagaattatgcacaaggtggtcaggatggtagaggttttggaaggaatgattacacagaccgttcaggctacaatggaccacctgattttcgaagtcaaactcagtaccaagggcatgtaaatccagctgggcaaggtcaaggttacaacaacccccaagagcgtagcaacttctcgcaagggcagggaggaggtacctccatcagtgaatcctggtggtaacagagttcctggtgtgaatcctagttatggtggggatggcagacagggggctggaccagcatatggtggagataactggcaaagaggttctggtcagtatcctagcccaggtgaaggacaaggaaactggcagggaaggcagtaagagctgacgtgttccactgaagacaagaatggcacttgagatttagaaatctccatctgtaaaataaacgactgtgatgcattactcttttttttttcttgcatttgaactctaaacttatgggcatgcgttattaccaaacctacggatgcaaattcattttagttttttgggccaaatgttggcatttttaaatggcgcagaatgtggaactcccctttgtcttcgtgtattgtttgcaggtatgctgtcactgtaaaacacgtgctaattactatagtattttggtgtagtttctcgttt

SEQ ID NO: 42629 - DNA, 1181 bp, Zea Mays
cctggattgtgcggttgcttcatcttgctgtgtcatggcttgccttgtgggctatatgttatgaggaggccaagaagaggatgtatgcttttagtacgacgacttatgttggttttcaggctgtaatgaccgaggaaatgtcagaaaaatttcgcgaaacaaaggagtacggaggagacaaatatgacaatggtgtcatcactccaagaccaccacctgttcattatagcagaccatcaagaactgacaggaaccgtaactaccgaggaaactaccaggatggccctccacagcaaggaaattaccagaacaaccgtcctccaccagaaggtggttaccagaacaacccgccgcagcaaggaaactaccagacataccgctcgcagcaagatggaagaggctatgccccacagcagaattatgcacaaggtggtcaggatggtagaggttttggaaggaatgattacacagaccgttcaggctacaatggaccacctgattttcgaagtcaaactcagtaccaagggcatgtaaatccagctgggcaaggtcaaggttacaacaacccccaagagcgtagcaacttctcgcaagggcagggaggaggttttaggcctggtggtccttcagcacctgggtcttatggccaaccatcagcacctggatcttatggtcaacctaatacacttggtaactatgggcaggtacctccatcagtgaatcctggtggtaacagagttcctggtgtgaatcctagttatggtggggatggcagacagggggctggaccagcatatggtggagataactggcaaagaggttctggtcagtatcctagcccaggtgaaggacaaggaaactggcagggaaggcagtaagagctgacgtgttccactgaagacaagaatggcacttgagatttagaaatctccatctgtaaaataaacgactgtgatgcattactcttttttttttcttgcatttgaactctaaacttatgggcatgcgttattaccaaacctacggatgcaaattcattttagttttttgggccaaatgttggcatttttaaatggcgcagaatgtggaactcccctttgtcttcgtgtattgtttgcaggtatgctgtcactgtaaaacacgtgctaattactatagtattttggtgtagtttctcgttt

SEQ ID NO: 42630 - DNA, 628 bp, Zea Mays
tgtagcataggaattgaagattgattatggagacgcaagagtacaagcacatatatataggcaaggattgtgctagggtttggctaatagaatcagggccaaccacggccgcccgttccagggcgtcacgggcacgagcggcggcggtgtcgcgctcctggactgcggcgtttgcttcatgttcggcctcggcggcgccgaggcgcgggcaagagaggcgtagcgtgcggccttgtggcgcgggcacggtcgtccagagcagcgcgcctggcaaccacctctttggcggcggcggcagcggccagcggcggtaggagagggaggatactaccgaccattagaagtggacgtagcgtgaggggttcacgcgtggggaagcaaaccaacgatggcgaaggtacggctgatgaagggaaccgagcagccgaaggaactctcacctggctgactacagaaccagcggcggacgaccccgcccctcccctgtcctccaacgaatttgttgggagcaagctgaacgaatcgtcctcactcctcagtgcggactgccgagtcgccggcaggggctcgctgcgcgctctcactttcttggtttgggcggggggaaggaaaggccgttttttttttc

SEQ ID NO: 42631 - DNA, 2181 bp, Zea Mays
ctcaaaccattacacctttagttcttacgggttttcatgttccaaaagacagctattcataaatgcaatttggagggtaaacctgtgatcatcactagagttgtggacagcatgattgacaatctacgccctacccgtgcagaggcaactgatgttgcaaatgctgtcctagatggcactgatggcattttgcttggtgcggagacacttcgagggctttatcctgttgatgcagtgagtactgtggggagaatatgtgcagaagctgagactgtgtataatcagccgcttcaattcaagaaagtaatgtggcatgtaggtgacccaatgccccacgaggaatctgtggcatcagcagcggttggttctgcaatcaaagtaaaagctgctgccattgttgtgttcacattctcagggagagctgcgaggttagttgccaagtataggccaacaatgccaattttagcagttatcttcccacgtgaaggatccgatccatcaaagtggcgttcttatggcacaacacaggcaagacaatgtttcgcagtgagaggcgtgtaccctttgatggggagtactgatgaggccgaaactggtgggctaacaaaggaagagtatgggataaaacttgcgatgagctatggtcggtcggttggcatagtgaagcctttcgacaggttgataatctttgaaaagattggtgattcttctgttgtcaagatcattgagtgtgaaggttaggcattagatgattgatacctacaacccatgctgtagtttcatgtatcgcatgggagattacctccagttccatctcacttatttaaccaagttccaagtagagtacagcaagagcacaagatatcttgttagggaattttgccctcttttcagattgtcttttgatttgacgcaataaattatgatgtcacagatttatactggaattatgatttgattatgcaaatataggattgttggcaacaaaccatgaataatcgtcgttcctaccttattctattggacattacatgatgcagtgcatgataacatcccaaaagacaatcttagggcattatcagttaatttacctataatgttctgtctatggtacactcctgcaaccttgctgctgttgctggtatgctgctgtcagtactgctccttgaagaaaacagcatagatgatgcagcagatggagatgatgatgataacgatatcgatggtgagcgcagtcatggcctgatcgctaagcttcatgttcttgccgccgaggcggtcaaccatgtctggcacgggtttgtagttgatgatgtcctgctcgtatgggtcctcgagcctggacctgagctgctgcaggcggcggctctcggcctcctgcgccagtgtccagtcgtagaaccgccgtgtctcctccttgctcagcacgttgtacacctctcgcaggcggatgaacttctgcgacgccaccttgagcggcagcgtcgtcgtgtccgggtggtactccttggacagccgccggtacgccgtcttgatctcctcgatgtccgcctctggcgctatgccaaggaacctgggtgatagattttgcagttcagtcatgtgtcgccgttagtaacaaagtattgacatgatgatgacagtgtctcgaacagagctctacaaatttatgtacagctggacggcaatccaaaaggacatatgagcatggattggagatgaactcaactggtagtgagactcggccgcgttgttgatgaggtccgcgaacctccctcccaacggctcgttcttgctgctgccgcggccgtcgccttccttcttggccttgcctcctacccacccttcgtcggggttggaccagtgtatcctggtgtccaccgtcttcttcttccccggccctgcaccgtccgccgtcgcaggagtcggttcggcgtcgggcgggctcgcggctgcgaccacgactgccttcgtgcgccgctggtgccggtggaggaagggcgtgaagatgcgcgaggccgtggacgctgccatgggaaacgtgtgtgttagcgtctgcgcaggcagcattccaaggcgtggaggggagtcgggaggtgatgaggctcgcacgttccagttgtcgtggtaggagggcgaggcgatgaggtgtcgctgttcacttagccaatggccacatgt

SEQ ID NO: 42632 - DNA, 1194 bp, Zea Mays
cgggttgagccttgtacccttgtctccctcgtaggccagcatggtgcttcctcttgggcttcgccatccttctcttcttcaccagtgggcagctggtatatcagctataatgttctgtctatggtacactcctgcaaccttgctgctgttgctggtatgctgctgtcagtactgctccttgaagaaaacagcatagatgatgcagcagatggagatgatgatgataacgatatcgatggtgagcgcagtcatggcctgatcgctaagcttcatgttcttgccgccgaggcggtcaaccatgtctggcacgggtttgtagttgatgatgtcctgctcgtatgggtcctcgagcctggacctgagctgctgcaggcggcggctctcggcctcctgcgccagtgtccagtcgtagaaccgccgtgtctcctccttgctcagcacgttgtacacctctcgcaggcggatgaacttctgcgacgccaccttgagcggcagcgtcgtcgtgtccgggtggtactccttggacagccgccggtacgccgtcttgatctcctcgatgtccgcctctggcgctatgccaaggaacctgggtgatagattttgcagttcagtcatgtgtcgccgttagtaacaaagtattgacatgatgatgacagtgtctcgaacagagctctacaaatttatgtacagctggacggcaatccaaaaggacatatgagcatggattggagatgaactcaactggtagtgagactcggccgcgttgttgatgaggtccgcgaacctccctcccaacggctcgttcttgctgctgccgcggccgtcgccttccttcttggccttgcctcctacccacccttcgtcggggttggaccagtgtatcctggtgtccaccgtcttcttcttccccggccctgcaccgtccgccgtcgcaggagtcggttcggcgtcgggcgggctcgcggctgcgaccacgactgccttcgtgcgccgctggtgccggtggaggaagggcgtgaagatgcgcgaggccgtggacgctgccatgggaaacgtgtgtgttagcgtctgcgcaggcagcattccaaggcgtggaggggagtcgggaggtgatgaggctcgcacgttccagttgtcgtggtaggagggcgaggcgatgaggtgtcgctgttcacttagccaatggccacatgt

SEQ ID NO: 42633 - DNA, 3285 bp, Zea Mays
gtcaccccaaaccggtctttgtcgcttcaaaccgtccaagggattcaaaacgcaaatcgaaccgccacgtgttcgcttggtttctttctttctccctacgccttgtccgctcctctctccctctctcgttctcgtcctcgtctttctcgagccgcgaggcgatcgcatcggagactcggagccggcaaaaccctaaggggaaggtttctgcaaggaggagggagatgcagggcgccagccacatgctcctggaggagcccttccgcctcgcctccgtcctctcccccgccaagcctaaagtattcccatcactcaccaagatagttgggacgctcgggcccaattcacactcggttgagattattcaggaatgcctcactgctggaatgtcagttgcacggtttgatttctcatggatggatgctgcgtatcaccaggagacccttgataatttgaggaaagcggcacagaatgtgaagaagttgtgccctgtaatgttggatactcttggtccagaaattcaggttcacaattccactggtgagccaattgagttgaaagctgggaatcatgttatcataactccagatatttgtaaagctctctctgctgagatcctaccaattaagtttggtgatcttgcaaaagctgtgaagaagggtgatactctttttatgggccaatatctcttcacaggaagtgaaacaacatctgtctggctagaagttgtggaaacttctggggaaaatgtaaattgtctagtgaagaatgcagctacacttgacggccccatattcactctgcatgcttcacaagttcacatcaatttgcccactttgagtgaatatgataaacatgttgtcctgagtacagtttgcttgcaaattgcaataggtcatttcaacttggggttcatgtaacagtgttgacattatatcactttcccatacccgctctgctgaagatgtcagggagctcagggcctttttacaagcacacgcccttcccgacacacaaatatacgcgaagattgaaaattcagagggtttggatcattttgatgacattctcaacgcggcagatggtatcattatttctcgaggagacctgggtattgaccttcctccagaaaacgttttcatgttccaaaagacagctattcataaatgcaatttggagggtaaacctgtgatcatcactagagttgtggacagcatgattgacaatctacgccctacccgtgcagaggcaactgatgttgcaaatgctgtcctagatggcactgatggcattttgcttggtgcggagacacttcgagggctttatcctgttgatgcagtgagtactgtggggagaatatgtgcagaagctgagactgtgtataatcagccgcttcaattcaagaaagtaatgtggcatgtaggtgacccaatgccccacgaggaatctgtggcatcagcagcggttggttctgcaatcaaagtaaaagctgctgccattgttgtgttcacattctcagggagagctgcgaggttagttgccaagtataggccaacaatgccaattttagcagttatcttcccacgtgaaggatccgatccatcaaagtggcgttcttatggcacaacacaggcaagacaatgtttcgcagtgagaggcgtgtaccctttgatggggagtactgatgaggccgaaactggtgggctaacaaaggaagagtatgggataaaacttgcgatgagctatggtcggtcggttggcatagtgaagcctttcgacaggttgataatctttgaaaagattggtgattcttctgttgtcaagatcattgagtgtgaaggttaggcattagatgattgatacctacaacccatgctgtagtttcatgtatcgcatgggagattacctccagttccatctcacttatttaaccaagttccaagtagagtacagcaagagcacaagatatcttgttagggaattttgccctcttttcagattgtcttttgatttgacgcaataaattatgatgtcacagatttatactggaattatgatttgattatgcaaatataggattgttggcaacaaaccatgaataatcgtcgttcctaccttattctattggacattacatgatgcagtgcatgataacatcccaaaagacaatcttagggcattatcagttaatttacctataatgttctgtctatggtacactcctgcaaccttgctgctgttgctggtatgctgctgtcagtactgctccttgaagaaaacagcatagatgatgcagcagatggagatgatgatgataacgatatcgatggtgagcgcagtcatggcctgatcgctaagcttcatgttcttgccgccgaggcggtcaaccatgtctggcacgggtttgtagttgatgatgtcctgctcgtatgggtcctcgagcctggacctgagctgctgcaggcggcggctctcggcctcctgcgccagtgtccagtcgtagaaccgccgtgtctcctccttgctcagcacgttgtacacctctcgcaggcggatgaacttctgcgacgccaccttgagcggcagcgtcgtcgtgtccgggtggtactccttggacagccgccggtacgccgtcttgatctcctcgatgtccgcctctggcgctatgccaaggaacctgggtgatagattttgcagttcagtcatgtgtcgccgttagtaacaaagtattgacatgatgatgacagtgtctcgaacagagctctacaaatttatgtacagctggacggcaatccaaaaggacatatgagcatggattggagatgaactcaactggtagtgagactcggccgcgttgttgatgaggtccgcgaacctccctcccaacggctcgttcttgctgctgccgcggccgtcgccttccttcttggccttgcctcctacccacccttcgtcggggttggaccagtgtatcctggtgtccaccgtcttcttcttccccggccctgcaccgtccgccgtcgcaggagtcggttcggcgtcgggcgggctcgcggctgcgaccacgactgccttcgtgcgccgctggtgccggtggaggaagggcgtgaagatgcgcgaggccgtggacgctgccatgggaaacgtgtgtgttagcgtctgcgcaggcagcattccaaggcgtggaggggagtcgggaggtgatgaggctcgcacgttccagttgtcgtggtaggagggcgaggcgatgaggtgtcgctgttcacttagccaatggccacatgt

SEQ ID NO: 42634 - DNA, 3206 bp, Zea Mays
gtcaccccaaaccggtctttgtcgcttcaaaccgtccaagggattcaaaacgcaaatcgaaccgccacgtgttcgcttggtttctttctttctccctacgccttgtccgctcctctctccctctctcgttctcgtcctcgtctttctcgagccgcgaggcgatcgcatcggagactcggagccggcaaaaccctaaggggaaggtttctgcaaggaggagggagatgcagggcgccagccacatgctcctggaggagcccttccgcctcgcctccgtcctctcccccgccaagcctaaagtattcccatcactcaccaagatagttgggacgctcgggcccaattcacactcggttgagattattcaggaatgcctcactgctggaatgtcagttgcacggtttgatttctcatggatggatgctgcgtatcaccaggagacccttgataatttgaggaaagcggcacagaatgtgaagaagttgtgccctgtaatgttggatactcttggtccagaaattcaggttcacaattccactggtgagccaattgagttgaaagctgggaatcatgttatcataactccagatatttgtaaagctctctctgctgagatcctaccaattaagtttggtgatcttgcaaaagctgtgaagaagggtgatactctttttatgggccaatatctcttcacaggaagtgaaacaacatctgtctggctagaaaatgcagctacacttgacggccccatattcactctgcatgcttcacaagttcacatcaatttgcccactttgagtgaatatgataaacatgtcatttcaacttggggttcatgtaacagtgttgacattatatcactttcccatacccgctctgctgaagatgtcagggagctcagggcctttttacaagcacacgcccttcccgacacacaaatatacgcgaagattgaaaattcagagggtttggatcattttgatgacattctcaacgcggcagatggtatcattatttctcgaggagacctgggtattgaccttcctccagaaaacgttttcatgttccaaaagacagctattcataaatgcaatttggagggtaaacctgtgatcatcactagagttgtggacagcatgattgacaatctacgccctacccgtgcagaggcaactgatgttgcaaatgctgtcctagatggcactgatggcattttgcttggtgcggagacacttcgagggctttatcctgttgatgcagtgagtactgtggggagaatatgtgcagaagctgagactgtgtataatcagccgcttcaattcaagaaagtaatgtggcatgtaggtgacccaatgccccacgaggaatctgtggcatcagcagcggttggttctgcaatcaaagtaaaagctgctgccattgttgtgttcacattctcagggagagctgcgaggttagttgccaagtataggccaacaatgccaattttagcagttatcttcccacgtgaaggatccgatccatcaaagtggcgttcttatggcacaacacaggcaagacaatgtttcgcagtgagaggcgtgtaccctttgatggggagtactgatgaggccgaaactggtgggctaacaaaggaagagtatgggataaaacttgcgatgagctatggtcggtcggttggcatagtgaagcctttcgacaggttgataatctttgaaaagattggtgattcttctgttgtcaagatcattgagtgtgaaggttaggcattagatgattgatacctacaacccatgctgtagtttcatgtatcgcatgggagattacctccagttccatctcacttatttaaccaagttccaagtagagtacagcaagagcacaagatatcttgttagggaattttgccctcttttcagattgtcttttgatttgacgcaataaattatgatgtcacagatttatactggaattatgatttgattatgcaaatataggattgttggcaacaaaccatgaataatcgtcgttcctaccttattctattggacattacatgatgcagtgcatgataacatcccaaaagacaatcttagggcattatcagttaatttacctataatgttctgtctatggtacactcctgcaaccttgctgctgttgctggtatgctgctgtcagtactgctccttgaagaaaacagcatagatgatgcagcagatggagatgatgatgataacgatatcgatggtgagcgcagtcatggcctgatcgctaagcttcatgttcttgccgccgaggcggtcaaccatgtctggcacgggtttgtagttgatgatgtcctgctcgtatgggtcctcgagcctggacctgagctgctgcaggcggcggctctcggcctcctgcgccagtgtccagtcgtagaaccgccgtgtctcctccttgctcagcacgttgtacacctctcgcaggcggatgaacttctgcgacgccaccttgagcggcagcgtcgtcgtgtccgggtggtactccttggacagccgccggtacgccgtcttgatctcctcgatgtccgcctctggcgctatgccaaggaacctgggtgatagattttgcagttcagtcatgtgtcgccgttagtaacaaagtattgacatgatgatgacagtgtctcgaacagagctctacaaatttatgtacagctggacggcaatccaaaaggacatatgagcatggattggagatgaactcaactggtagtgagactcggccgcgttgttgatgaggtccgcgaacctccctcccaacggctcgttcttgctgctgccgcggccgtcgccttccttcttggccttgcctcctacccacccttcgtcggggttggaccagtgtatcctggtgtccaccgtcttcttcttccccggccctgcaccgtccgccgtcgcaggagtcggttcggcgtcgggcgggctcgcggctgcgaccacgactgccttcgtgcgccgctggtgccggtggaggaagggcgtgaagatgcgcgaggccgtggacgctgccatgggaaacgtgtgtgttagcgtctgcgcaggcagcattccaaggcgtggaggggagtcgggaggtgatgaggctcgcacgttccagttgtcgtggtaggagggcgaggcgatgaggtgtcgctgttcacttagccaatggccacatgt

SEQ ID NO: 42635 - DNA, 1085 bp, Zea Mays
gtcaccccaaaccggtctttgtcgcttcaaaccgtccaagggattcaaaacgcaaatcgaaccgccacgtgttcgcttggtttctttctttctccctacgccttgtccgctcctctctccctctctcgttctcgtcctcgtctttctcgagccgcgaggcgatcgcatcggagactcggagccggcaaaaccctaaggggaaggtttctgcaaggaggagggagatgcagggcgccagccacatgctcctggaggagcccttccgcctcgcctccgtcctctcccccgccaagcctaaagtattcccatcactcaccaagatagttgggacgctcgggcccaattcacactcggttgagattattcaggaatgcctcactgctggaatgtcagttgcacggtttgatttctcatggatggatgctgcgtatcaccaggagacccttgataatttgaggaaagcggcacagaatgtgaagaagttgtgccctgtaatgttggatactcttggtccagaaattcaggttcacaattccactggtgagccaattgagttgaaagctgggaatcatgttatcataactccagatatttgtaaagctctctctgctgagatcctaccaattaagtttggtgatcttgcaaaagctgtgaagaagggtgatactctttttatgggccaatatctcttcacaggaagtgaaacaacatctgtctggctagaagttgtggaaacttctggggaaaatgtaaattgtctagtgaagaatgcagctacacttgacggccccatattcactctgcatgcttcacaagttcacatcaatttgcccactttgagtgaatatgataaacatgtaacacagacatctttaaatttctttacataatattgagttttatattgccacaacacaatattcctttttactttacatgttctctgtccaaaaagattgtgctagtaacttattttgaacaatagaaaccatagttcgattgcatgtcttttgttattattttatatttccattcgactatgcttttgaagctctttcttaccaaaactcgactagagatattta

SEQ ID NO: 42636 - DNA, 851 bp, Zea Mays
atttcatccattgcaaccgaacaagaccttatatattatctaagaaatttggctgcactgaattcgttaaccccaaggaccacgacaagccagtgcaagaggtgctgattgagctgaccaacggcggcgtcgaccgcagcgtggagtgcaccggtaacatcaacgccatgatatccgccttcgaatgtgtccacgacggctggggtgtcgccgtgctggtgggtgtcccgcacaaggacgaccagttcaagacccaccccatgaacttcctcagcgagaagacactcaagggcaccttcttcggaaactacaagccccgcaccgacctgcccaacgtcgtcgagatgtacatgaagaaggagctggagctggagaagttcatcacgcacagcgtgcccttctcggagatcaacacggcgttcgacctgatgctcaagggggagagcctgcgctgcatcatgaggatggaggattagagcttcattgcaagcttgctcctcctgcagggcaggcatgtcgcacagcaaatgggcatgaaaagttgaaggcgctccagtcctccagcttgtgtagtacacagtagcaataaaacgttagtgtttgtcctgtgcccatcctgtattattctgttccagggtttcacctttatcgtcagtgtgtggtcaggtttcaacccttctcagaacaaccccctcccagaaaaaaaacaaaggaagaagtttgtgtccaggtttcagaatcccctgtctgtaattaccattttgcatgacaataatgagatactgtagatattaataatgttccagaccttcaaggcctccctccctcgcaaattgcagatttacttgagg

SEQ ID NO: 42637 - DNA, 1688 bp, Zea Mays
gcctttcttcccccacttgcgccgctacggtccaggcgttcttgctgcctccctcgtagactagactctagaccactatatatacagtactcgtccccgttttcttcctcaccaacttctcatcatcagccaagtgtaaagagtgcgaagaagcagtagcaaaaggattccattctcgtgttcttggagtggtccatcgatcgagctccgtgaaagagagagagagagagcaagcaatggcgacagcagggaaggtgatcaagtgcagagccgccgtggcgtgggaggccggcaaaccgctgtccatcgaggaggtggaggtagcgccgccgcaggccatggaggggcaaaccccggtgttcccgaggatcttaggacacgaagcgggaggcatcgtggagagcgtcggagagggcgtgaccgagctcgcgccaggcgaccacgtcctcccggtgttcaccggcgagtgcaaggagtgcgcccactgcaagtcggaggagagcaacatgtgcgacctcctcaggatcaacgtcgaccgcggcgtgatgatcggcgacggtaagtcccgcttcaccatcagcgggcagcccatcttccacttcgtcgggacgtccaccttcagcgagtacaccgtcatccacgtcggctgcctggccaagatcaaccccgaggcgcctctcgacaaagtctgcatcctcagctgtggtatctcgaccggccttggcgcgacactgaatgtggcgaaaccagccaagggctcgacggtggcgattttcgggcttggggctgtaggccttgctgctatggaaggtgctagactggctggtgcatcaaggatcatcggcgtggacatcaacccagcaaaatacgagcaagctaagaaatttggctgcactgaattcgttaaccccaaggaccacgacaagccagtgcaagaggtgctgattgagctgaccaacggcggcgtcgaccgcagcgtggagtgcaccggtaacatcaacgccatgatatccgccttcgaatgtgtccacgacggctggggtgtcgccgtgctggtgggtgtcccgcacaaggacgaccagttcaagacccaccccatgaacttcctcagcgagaagacactcaagggcaccttcttcggaaactacaagccccgcaccgacctgcccaacgtcgtcgagatgtacatgaagaaggagctggagctggagaagttcatcacgcacagcgtgcccttctcggagatcaacacggcgttcgacctgatgctcaagggggagagcctgcgctgcatcatgaggatggaggattagagcttcattgcaagcttgctcctcctgcagggcaggcatgtcgcacagcaaatgggcatgaaaagttgaaggcgctccagtcctccagcttgtgtagtacacagtagcaataaaacgttagtgtttgtcctgtgcccatcctgtattattctgttccagggtttcacctttatcgtcagtgtgtggtcaggtttcaacccttctcagaacaaccccctcccagaaaaaaaacaaaggaagaagtttgtgtccaggtttcagaatcccctgtctgtaattaccattttgcatgacaataatgagatactgtagatattaataatgttccagaccttcaaggcctccctccctcgcaaattgcagatttacttgagg

SEQ ID NO: 42638 - DNA, 1399 bp, Zea Mays
aacattttttttctcgcgtcggcctgtctacctgctctgtctccattccgccacgcaacacttccgtgccctacgccccagaacctcccaccgcatcggagggctccgcgcctccgccacgccgatggcgtcccagccgccgccagagcccgcaccggccgaggcgggtctggaaagcatggagggcctcgtcctcgacacggtcatctcaagagccggcgcgcgccccgcagcggcgctcgcctgcgccagcacgcgcctccgcaccgccgttgccgacgactccctctggcgcagattctgcggtgaggacctggggctcgacgctcccgtcgatccagagggccggcctcttccctccttccaggttgcatataaagtttggtcggagtcttttggcatgtaccctctacctatggtaaagagagtgagacaattctggacttcaatgaaaacttggttgtctgaaaactttcctgaggcatacaaaacgttatgcgaaggtgtttctgaagctcaattaaagtcagcagaggatgatcttggtttcaagctccctatgcccacaaagctgttgtatcgcttttgcaatgctcaactgccttttagtgaggaccatgacacaaataaaagcatttccacttatggattgattgggggctatgcgttttatgatcattgggtgaatgtgcatttgtcaccgcttgagcaaatagttgaagagacgaaggacttctatcgggagttccctgatgtatttcatgggcgcaaattcattgtagtggcaacttcatggtttcatccgaaaacatttcttctagattgctcaaatggtgaactttatgttggtacatacaacttaccgataggaggaatgcttccctgtgtgcccaaagcattgataaagccagcaggtaatgatctagcacaagatggactactcctgtggttagaagaacaccttaggcgtttacagagtggcatgatcaagacccgtatgctgatggcatcgagatatatcagcttatatccagaagcacctccatcatgcagttcagctgttacaaatggcattaagtatcctctactgttacctggtgaggatgagtttgtctacgagagttgcacgccactgccccaagtaccaggatctgtggagggctctttttcgtttgtgccgggcaagttgagccgacctgaagggaagccgttcgaagtcatggtggcgcctttccctcttgatgtgccagaatacatcttctgatgatcacagcagaaataaatgtatgtatggttgttgggaaaaagttcggatgcttgtaataaccttattggagtaatgtaaaataaggaaccgtgcgctcttcgtgtaaccagcgaaatgtgcctcgtacccgta

SEQ ID NO: 42639 - DNA, 1561 bp, Zea Mays
ggcaaacaagcgagttcataagggtggcaaaagaacctcccaccgcatcggagggctccgcgcctccgccacgccgatggcgtcccagccgccgccagagcccgcaccggccgaggcgggtctggaaagcatggagggcctcgtcctcgacacggtcatctcaagagccggcgcgcgccccgcagcggcgctcgcctgcgccagcacgcgcctccgcaccgccgttgccgacgactccctctggcgcagattctgcggtgaggacctggggctcgacgctcccgtcgatccagagggccggcctcttccctccttccaggttgcatataaagtttggtcggagtcttttggcatgtaccctctacctatggtaaagagagtgagacaattctggacttcaatgaaaacttggttgtctgaaaactttcctgaggcatacaaaacgttatgcgaaggtgtttctgaagctcaattaaagtcagcagaggatgatcttggtttcaagctccctatgcccacaaagctgttgtatcgcttttgcaatgctcaactgccttttagtgaggaccatgacacaaataaaagcatttccacttatggattgattgggggctatgcgttttatgatcattgggtgaatgtgcatttgtcaccgcttgagcaaatagttgaagagacgaaggacttctatcgggagttccctgatgtatttcatgggcgcaaattcattgtagtggcaacttcatggtttcatccgaaaacatttcttctagattgctcaaatggtgaactttatgttggtacatacaacttaccgataggaggaatgcttccctgtgtgcccaaagcattgataaagccagcaggtaatgatctagcacaagatggactactcctgtggttagaagaacaccttaggcgtttacagagtggcatgatcaagacccgtatgctgatggcatcgagatatatcagcttatatccagaagcacctccatcatgcagttcagctgttacaaatggcattaaggtacgctcatctgctgtctttgtgccagaacatcctgggaggcctggggaaaaatttatgttcacttactcaattcgcatgtcagttccagaggcatgcatgctaggtggcgtgtactattcttcctgccagctttgctcccgccactggaccatcagatcgtgtgacagggttgtttctgatgtgagcggaggaggggttattggagagtatcctctactgttacctggtgaggatgagtttgtctacgagagttgcacgccactgccccaagtaccaggatctgtggagggctctttttcgtttgtgccgggcaagttgagccgacctgaagggaagccgttcgaagtcatggtggcgcctttccctcttgatgtgccagaatacatcttctgatgatcacagcagaaataaatgtatgtatggttgttgggaaaaagttcggatgcttgtaataaccttattggagtaatgtaaaataaggaaccgtgcgctcttcgtgtaaccagcgaaatgtgcctcgtacccgta

SEQ ID NO: 42640 - DNA, 1256 bp, Zea Mays
attaaaactggcaaacaagcgagttcataagggtggcaaaaggttgcatataaagtttggtcggagtcttttggcatgtaccctctacctatggtaaagagagtgagacaattctggacttcaatgaaaacttggttgtctgaaaactttcctgaggcatacaaaacgttatgcgaaggtgtttctgaagctcaattaaagtcagcagaggatgatcttggtttcaagctccctatgcccacaaagctgttgtatcgcttttgcaatgctcaactgccttttagtgaggaccatgacacaaataaaagcatttccacttatggattgattgggggctatgcgttttatgatcattgggtgaatgtgcatttgtcaccgcttgagcaaatagttgaagagacgaaggacttctatcgggagttccctgatgtatttcatgggcgcaaattcattgtagtggcaacttcatggtttcatccgaaaacatttcttctagattgctcaaatggtgaactttatgttggtacatacaacttaccgataggaggaatgcttccctgtgtgcccaaagcattgataaagccagcaggtaatgatctagcacaagatggactactcctgtggttagaagaacaccttaggcgtttacagagtggcatgatcaagacccgtatgctgatggcatcgagatatatcagcttatatccagaagcacctccatcatgcagttcagctgttacaaatggcattaagaacatcctgggaggcctggggaaaaatttatgttcacttactcaattcgcatgtcagttccagaggcatgcatgctaggtggcgtgtactattcttcctgccagctttgctcccgccactggaccatcagatcgtgtgacagggttgtttctgatgtgagcggaggaggggttattggagagtatcctctactgttacctggtgaggatgagtttgtctacgagagttgcacgccactgccccaagtaccaggatctgtggagggctctttttcgtttgtgccgggcaagttgagccgacctgaagggaagccgttcgaagtcatggtggcgcctttccctcttgatgtgccagaatacatcttctgatgatcacagcagaaataaatgtatgtatggttgttgggaaaaagttcggatgcttgtaataaccttattggagtaatgtaaaataaggaaccgtgcgctcttcgtgtaaccagcgaaatgtgcctcgtacccgta

SEQ ID NO: 42641 - DNA, 992 bp, Zea Mays
gtccttctcaacgataacatgtgattcatcctctaatactagtgattctacaggcccatctttactgctcacttgtgtaacctttgcttgagtgttctgaaatacaattcattgttacaacaaaatgtagtgcagtcttatatacaaatgctacaatcctttgctggagtattctcctaaattatagaatgctaacaatcctttttgtcagtgcttgtataatcaacggtcaaaagaaaaagtatatatatgcagaggaacgcataaggtactcaaacatgatgatcacagtagagtaattttgacctaatgtggataatctagtatgtctttatgcattacacttgaagaaaatgtggcacggaaaagtgacgactaattgcaaatctgccggtaatgttttgcacaccacatttgaaagtgacactatgacaaggacgacaggcttgactagcccaatacaaaaaatctttgtatgacacatttcgtcaaacaccttctaggcaggaacctgcagctatgatcatgatgcagcagggcttattcatctcttttttcagagaacgtatcctcaactttattatgcaacaaagcgataggcccatgcatctctcagcaaggactccaggcgccatggctgccgaagctctcctctccgctagcacaggcacaacacgactgacgccaccgcctacgtttccctttccctgctccgccatggctacggcgtgctctcactcagaaccaaccgcccccgccgccgccgcgcggccccacttaggtgtcactcctcaaccatagccgccacactgtgttcgcgtcgagggaagggtgttggcgaccagggagatgtgccgtgagtgacccggcgctcacggacgctctagcgtgcatggtagagggtgacatggcattttttgagctgatagcgcataatgtaagcgaaatttaaaataaggaatgaaataagagatagaatgagtatgttagag

SEQ ID NO: 42642 - DNA, 771 bp, Zea Mays
atggggatcaccgatgggaatttatccccgcggggaacggggatggggaagaaatgtcctccgcaaccgttcatggggatctccacaggaaaaaaattcgtcgcggggatgatgatggggaggattgattcatttcagcagttatgggatatcctatgaggggttgaatgatcaatggatcgggatcagtatttattgaaacatgaggcaagtgactcctcatcaaaaaatcggcgtacagagccatcttctatggttcaatcattttcaaaccctggaagctgaatgtggaaatcttgggccctctctaaatgggaagtgttcatttgacttgcaactaaaaataaatgcagaactgcggataaaaatgaaatgggccggcacatacttgtgagatcaaatggcatagtgcccagacagtgaacttgcaaaacaggtacataaggagaaaaggcacttcataggtgttggacagctgatagacttcaaagaagggggctggatcacccagatcagtgtcctctttgtgaccaggaaaaagaaaccattgaccatctccttatgagttgtgtgtttgcaagaagctactggttcaggctgctaggacaggttaacctccaggatttcactcctcaagttcatgaagagaataccatgctctggtggaaaagatgcagtgatcagctgcatggaattgccagaaagggctaaactcacttatcagtctcggcctctagatcttgtggaactatcgaaatgcctgtgtctttg

SEQ ID NO: 42643 - DNA, 1642 bp, Zea Mays
atggtccagggttgggaaacctgtggcagcttgttactggctttggagttgtcacatatagaagtaattttaagctagagggaagatagcagtaatcggaggatgtcgtgagtacactggagctccttattttgccgctatctctgccttgaaagttggtgcagatctttcacatgttttctgcacgaaagatgctgctacagtaattaagagctatagccctgaactaattgtacatccaatattagaagaatcttacagtgtaagggttgatgaacgagcatctgtttcttctaagattcttacggaagttgcaaagtggatggagcgctttgattgcattgttgttggtcctggccttggaagggacccctttcttctggaatgtgtgagtaatatcatgaggcacgcacgacaggctaatattccaactgttgtggatggggaaaccctcttgccattttaacaccaaatgtctatgagtacaagcgtcttgttcagaaggttcttaactgtgacgtagatgaggaaagtgcttctgagcagctaatcgcactttgccaaaaaattggtgatgtaacaataatgcagaaaggaaaagctgatgtcatcagtgacggtaaaacagttacacaagtgagtacttttggttccccaagacggtgtggtggtcaaggtgacatcctttctggaagtgtggcagtatttgcatcatgggcacgacactttgtcttgacaaacgaagaacctacagagaaaagagttaatcctatgacccttgggtgcatagctgcctcccttctactccggaaagctgcgtcacatgcttttgagaagaacaagagatcgactgtcacctctgatatcattgagttcttgggcaaaagcttggaagatatctgccctgccgagcactagctcctgccagtaattgtagtcatgcacgcggaagcctaataatgtttatatgtctgttgaacagggtgttaccatgcctaattctaatgttgcccagtgatgttgagaactgtgcagtagaagcgtaagattgaaactggggaacgacgactagaattctgaacacatgtttctagtcgcctaggactatccgtcttcttctcgacaacactatcactatatataaacttgaccttaggattagtactgctattggtgctagtagtttatttgaattgaagtaatttgcgtaggttctgagcgagaattgccttaagcttgcccagctacacacaccccaagaaacttgctaacgccagtgagccgatcttgcttacccacggcagcaagaggaaaacttgcttgcacgagcttccaggtgaatagcaagccatccaacacgccttcgctcgcttcatttccttgccggcgaggaggcaagtattctgaacggaaccaaagacacttaggccagggcccttattggaagtgtagtatttttgaaacaatactatggtatttgacaatactatagtattgtaacttaaaagttgtttggattgtacagacaaagtatagttttaaataccatggtttatccaaaaccgtggtatttttggaaactccactcatgacctcagttttctctctttcctctataaatactttgtttttccaatggaat

SEQ ID NO: 42644 - DNA, 2004 bp, Zea Mays
ggaacaactgaacggccggcagtggcagaggatgcggctgcgtccgacctccttgcttttcgagaatccactgccttcgattcctagtttcccacggcagggcagcctcatcggatcccatgagccggcccacgggcgcgtggcgactagggatggcaacgtgtacaataccagcagcaccgcgtgcgcatgtgggccgcctccccggcattcggcaggcagctcgtcctgctctactgcttccttccttctcctcctccactctcctctgtcaccggcttccccccatcctgcccctcgtgctccagctcctccgggtccgggccaaccacgcgatggcggcgtccgccgggacggtgtacgaggcggacgcggaggccgtcgtgcgccggatcacgccggcactcgaccgcgccagacacaagggccaggcagggaagatagcagtaatcggaggatgtcgtgagtacactggagctccttattttgccgctatctctgccttgaaagttatctttcacatgttttctgcacgaaagatgctgctacagtaattaagagctatagccctgaactaattgtacatccaatattagaagaatcttacagtgtaagggttgatgaacgagcatctgtttcttctaagattcttacggaagttgcaaagtggatggagcgctttgattgcattgttgttggtcctggccttggaagggacccctttcttctggaatgtgtgagtaatatcatgaggcacgcacgacaggctaatattccaactgttgtggatggggatggcctatttcttgtaaacaataaccttaatcttgttgaaggaaaccctcttgccattttaacaccaaatgtctatgagtacaagcgtcttgttcagaaggttcttaactgtgacgtagatgaggaaagtgcttctgagcagctaatcgcactttgccaaaaaattggtgatgtaacaataatgcagaaaggaaaagctgatgtcatcagtgacggtaaaacagttacacaagtgagtacttttggttccccaagacggtgtggtggtcaaggtgacatcctttctggaagtgtggcagtatttgcatcatgggcacgacactttgtcttgacaaacgaagaacctacagagaaaagctgcctcccttctactccggaaagctgcgtcacatgcttttgagaagaacaagagatcgactgtcacctctgatatcattgagttcttgggcaaaagcttggaagatatctgccctgccgagcactagctcctgccagtaattgtagtcatgcacgcggaagcctaataatgtttatatgtctgttgaacagggtgttaccatgcctaattctaatgttgcccagtgatgttgagaactgtgcagtagaagcgtaagattgaaactggggaacgacgactagaattctgaacacatgtttctagtcgcctaggactatccgtcttcttctcgacaacactatcactatatataaacttgaccttaggattagtactgctattggtgctagtagtttatttgaattgaagtaatttgcgtaggttctgagcgagaattgccttaagcttgcccagctacacacaccccaagaaacttgctaacgccagtgagccgatcttgcttacccacggcagcaagaggaaaacttgcttgcacgagcttccaggtgaatagcaagccatccaacacgccttcgctcgcttcatttccttgccggcgaggaggcaagtattctgaacggaaccaaagacacttaggccagggcccttattggaagtgtagtatttttgaaacaatactatggtatttgacaatactatagtattgtaacttaaaagttgtttggattgtacagacaaagtatagttttaaataccatggtttatccaaaaccgtggtatttttggaaactccactcatgacctcagttttctctctttcctctataaatactttgtttttccaatggaat

SEQ ID NO: 42645 - DNA, 1968 bp, Zea Mays
ggaacaactgaacggccggcagtggcagaggatgcggctgcgtccgacctccttgcttttcgagaatccactgccttcgattcctagtttcccacggcagggcagcctcatcggatcccatgagccggcccacgggcgcgtggcgactagggatggcaacgtgtacaataccagcagcaccgcgtgcgcatgtgggccgcctccccggcattcggcaggcagctcgtcctgctctactgcttccttccttctcctcctccactctcctctgtcaccggcttccccccatcctgcccctcgtgctccagctcctccgggtccgggccaaccacgcgatggcggcgtccgccgggacggtgtacgaggcggacgcggaggccgtcgtgcgccggatcacgccggcactcgaccgcgccagacacaagggccaggcagggaagatagcagtaatcggaggatgtcgtgagtacactggagctccttattttgccgctatctctgccttgaaagttggtgcagatctttcacatgttttctgcacgaaagatgctgctacagtaattaagagctatagccctgaactaattgtacatccaatattagaagaatcttacagtgtaagggttgatgaacgagcatctgtttcttctaagattcttacggaagttgcaaagtggatggagcgctttgattgcattgttgttggtcctggccttggaagggacccctttcttctggaatgtgtgagtaatatcatgaggcacgcacgacaggctaatattccaactgttgtggatggggaaaccctcttgccattttaacaccaaatgtctatgagtacaagcgtcttgttcagaaggttcttaactgtgacgtagatgaggaaagtgcttctgagcagctaatcgcactttgccaaaaaattggtgatgtaacaataatgcagaaaggaaaagctgatgtcatcagtgacggtaaaacagttacacaagtgagtacttttggttccccaagacggtgtggtggtcaaggtgacatcctttctggaagtgtggcagtatttgcatcatgggcacgacactttgtcttgacaaacgaagaacctacagagaaaagctgcctcccttctactccggaaagctgcgtcacatgcttttgagaagaacaagagatcgactgtcacctctgatatcattgagttcttgggcaaaagcttggaagatatctgccctgccgagcactagctcctgccagtaattgtagtcatgcacgcggaagcctaataatgtttatatgtctgttgaacagggtgttaccatgcctaattctaatgttgcccagtgatgttgagaactgtgcagtagaagcgtaagattgaaactggggaacgacgactagaattctgaacacatgtttctagtcgcctaggactatccgtcttcttctcgacaacactatcactatatataaacttgaccttaggattagtactgctattggtgctagtagtttatttgaattgaagtaatttgcgtaggttctgagcgagaattgccttaagcttgcccagctacacacaccccaagaaacttgctaacgccagtgagccgatcttgcttacccacggcagcaagaggaaaacttgcttgcacgagcttccaggtgaatagcaagccatccaacacgccttcgctcgcttcatttccttgccggcgaggaggcaagtattctgaacggaaccaaagacacttaggccagggcccttattggaagtgtagtatttttgaaacaatactatggtatttgacaatactatagtattgtaacttaaaagttgtttggattgtacagacaaagtatagttttaaataccatggtttatccaaaaccgtggtatttttggaaactccactcatgacctcagttttctctctttcctctataaatactttgtttttccaatggaat

SEQ ID NO: 42646 - DNA, 2035 bp, Zea Mays
ggaacaactgaacggccggcagtggcagaggatgcggctgcgtccgacctccttgcttttcgagaatccactgccttcgattcctagtttcccacggcagggcagcctcatcggatcccatgagccggcccacgggcgcgtggcgactagggatggcaacgtgtacaataccagcagcaccgcgtgcgcatgtgggccgcctccccggcattcggcaggcagctcgtcctgctctactgcttccttccttctcctcctccactctcctctgtcaccggcttccccccatcctgcccctcgtgctccagctcctccgggtccgggccaaccacgcgatggcggcgtccgccgggacggtgtacgaggcggacgcggaggccgtcgtgcgccggatcacgccggcactcgaccgcgccagacacaagggccaggcagggaagatagcagtaatcggaggatgtcgtgagtacactggagctccttattttgccgctatctctgccttgaaagttggtgcagatctttcacatgttttctgcacgaaagatgctgctacagtaattaagagctatagccctgaactaattgtacatccaatattagaagaatcttacagtggttgatgaacgagcatctgtttcttctaagattcttacggaagttgcaaagtggatggagcgctttgattgcattgttgttggtcctggccttggaagggacccctttcttctggaatgtgtgagtaatatcatgaggcacgcacgacaggctaatattccaactgttgtggatggggatggcctatttcttgtaaacaataaccttaatcttgttgaaggaaaccctcttgccattttaacaccaaatgtctatgagtacaagcgtcttgttcagaaggttcttaactgtgacgtagatgaggaaagtgcttctgagcagctaatcgcactttgccaaaaaattggtgatgtaacaataatgcagaaaggaaaagctgatgtcatcagtgacggtaaaacagttacacaagtgagtacttttggttccccaagacggtgtggtggtcaaggtgacatcctttctggaagtgtggcagtatttgcatcatgggcacgacactttgtcttgacaaacgaagaacctacagagaaaagagttaatcctatgacccttgggtgcatagctgcctcccttctactccggaaagctgcgtcacatgcttttgagaagaacaagagatcgactgtcacctctgatatcattgagttcttgggcaaaagcttggaagatatctgccctgccgagcactagctcctgccagtaattgtagtcatgcacgcggaagcctaataatgtttatatgtctgttgaacagggtgttaccatgcctaattctaatgttgcccagtgatgttgagaactgtgcagtagaagcgtaagattgaaactggggaacgacgactagaattctgaacacatgtttctagtcgcctaggactatccgtcttcttctcgacaacactatcactatatataaacttgaccttaggattagtactgctattggtgctagtagtttatttgaattgaagtaatttgcgtaggttctgagcgagaattgccttaagcttgcccagctacacacaccccaagaaacttgctaacgccagtgagccgatcttgcttacccacggcagcaagaggaaaacttgcttgcacgagcttccaggtgaatagcaagccatccaacacgccttcgctcgcttcatttccttgccggcgaggaggcaagtattctgaacggaaccaaagacacttaggccagggcccttattggaagtgtagtatttttgaaacaatactatggtatttgacaatactatagtattgtaacttaaaagttgtttggattgtacagacaaagtatagttttaaataccatggtttatccaaaaccgtggtatttttggaaactccactcatgacctcagttttctctctttcctctataaatactttgtttttccaatggaat

SEQ ID NO: 42647 - DNA, 1990 bp, Zea Mays
ggaacaactgaacggccggcagtggcagaggatgcggctgcgtccgacctccttgcttttcgagaatccactgccttcgattcctagtttcccacggcagggcagcctcatcggatcccatgagccggcccacgggcgcgtggcgactagggatggcaacgtgtacaataccagcagcaccgcgtgcgcatgtgggccgcctccccggcattcggcaggcagctcgtcctgctctactgcttccttccttctcctcctccactctcctctgtcaccggcttccccccatcctgcccctcgtgctccagctcctccgggtccgggccaaccacgcgatggcggcgtccgccgggacggtgtacgaggcggacgcggaggccgtcgtgcgccggatcacgccggcactcgaccgcgccagacacaagggccaggcagggaagatagcagtaatcggaggatgtcggtgcagatctttcacatgttttctgcacgaaagatgctgctacagtaattaagagctatagccctgaactaattgtacatccaatattagaagaatcttacagtgtaagggttgatgaacgagcatctgtttcttctaagattcttacggaagttgcaaagtggatggagcgctttgattgcattgttgttggtcctggccttggaagggacccctttcttctggaatgtgtgagtaatatcatgaggcacgcacgacaggctaatattccaactgttgtggatggggatggcctatttcttgtaaacaataaccttaatcttgttgaaggaaaccctcttgccattttaacaccaaatgtctatgagtacaagcgtcttgttcagaaggttcttaactgtgacgtagatgaggaaagtgcttctgagcagctaatcgcactttgccaaaaaattggtgatgtaacaataatgcagaaaggaaaagctgatgtcatcagtgacggtaaaacagttacacaagtgagtacttttggttccccaagacggtgtggtggtcaaggtgacatcctttctggaagtgtggcagtatttgcatcatgggcacgacactttgtcttgacaaacgaagaacctacagagaaaagagttaatcctatgacccttgggtgcatagctgcctcccttctactccggaaagctgcgtcacatgcttttgagaagaacaagagatcgactgtcacctctgatatcattgagttcttgggcaaaagcttggaagatatctgccctgccgagcactagctcctgccagtaattgtagtcatgcacgcggaagcctaataatgtttatatgtctgttgaacagggtgttaccatgcctaattctaatgttgcccagtgatgttgagaactgtgcagtagaagcgtaagattgaaactggggaacgacgactagaattctgaacacatgtttctagtcgcctaggactatccgtcttcttctcgacaacactatcactatatataaacttgaccttaggattagtactgctattggtgctagtagtttatttgaattgaagtaatttgcgtaggttctgagcgagaattgccttaagcttgcccagctacacacaccccaagaaacttgctaacgccagtgagccgatcttgcttacccacggcagcaagaggaaaacttgcttgcacgagcttccaggtgaatagcaagccatccaacacgccttcgctcgcttcatttccttgccggcgaggaggcaagtattctgaacggaaccaaagacacttaggccagggcccttattggaagtgtagtatttttgaaacaatactatggtatttgacaatactatagtattgtaacttaaaagttgtttggattgtacagacaaagtatagttttaaataccatggtttatccaaaaccgtggtatttttggaaactccactcatgacctcagttttctctctttcctctataaatactttgtttttccaatggaat

SEQ ID NO: 42648 - DNA, 2031 bp, Zea Mays
gacgttgttgtgaggtatagggaacaactgaacggccggcagtggcagaggatgcggctgcgtccgacctccttgcttttcgagaatccactgccttcgattcctagtttcccacggcagggcagcctcatcggatcccatgagccggcccacgggcgcgtggcgactagggatggcaacgtgtacaataccagcagcaccgcgtgcgcatgtgggccgcctccccggcattcggcaggcagctcgtcctgctctactgcttccttccttctcctcctccactctcctctgtcaccggcttccccccatcctgcccctcgtgctccagctcctccgggtccgggccaaccacgcgatggcggcgtccgccgggacggtgtacgaggcggacgcggaggccgtcgtgcgccggatcacgccggcactcgaccgcgccagacacaagggccaggcagggaagatagcagtaatcggaggatgtcgtgagtacactggagctccttattttgccgctatctctgccttgaaagttggtgcagatctttcacatgttttctgcacgaaagatgctgctacagtaattaagagctatagccctgaactaattgtacatccaatattagaagaatcttacagtgtaagggttgatgaacgagcatctgtttcttctaagattcttacggaagttgcaaagtggatggagcgctttgattgcattgttgttggtcctggccttggaagggacccctttcttctggaatgtgtgagtaatatcatgaggcacgcacgacaggctaatattccaactgttgtggatggggatggcctatttcttgtaaacaataaccttaatcttgttgaaggaaaccctcttgccattttaacaccaaatgtctatgagtacaagcgtcttgttcagaaggttcttaactgtgacgtagatgaggaaagtgcttctgagcagctaatcgcactttgccaaaaaattggtgatgtaacaataatgcagaaaggaaaagctgatgtcatcagtgacggtaaaacagttacacaagtgagtacttttggttccccaagacggtgtggtggtcaaggtgacatcctttctggaagtgtggcagtatttgcatcatgggcacgacactttgtcttgacaaacgaagaacctacagagaaaagctgcctcccttctactccggaaagctgcgtcacatgcttttgagaagaacaagagatcgactgtcacctctgatatcattgagttcttgggcaaaagcttggaagatatctgccctgccgagcactagctcctgccagtaattgtagtcatgcacgcggaagcctaataatgtttatatgtctgttgaacagggtgttaccatgcctaattctaatgttgcccagtgatgttgagaactgtgcagtagaagcgtaagattgaaactggggaacgacgactagaattctgaacacatgtttctagtcgcctaggactatccgtcttcttctcgacaacactatcactatatataaacttgaccttaggattagtactgctattggtgctagtagtttatttgaattgaagtaatttgcgtaggttctgagcgagaattgccttaagcttgcccagctacacacaccccaagaaacttgctaacgccagtgagccgatcttgcttacccacggcagcaagaggaaaacttgcttgcacgagcttccaggtgaatagcaagccatccaacacgccttcgctcgcttcatttccttgccggcgaggaggcaagtattctgaacggaaccaaagacacttaggccagggcccttattggaagtgtagtatttttgaaacaatactatggtatttgacaatactatagtattgtaacttaaaagttgtttggattgtacagacaaagtatagttttaaataccatggtttatccaaaaccgtggtatttttggaaactccactcatgacctcagttttctctctttcctctataaatactttgtttttccaatggaat

SEQ ID NO: 42649 - DNA, 3325 bp, Zea Mays
ccttgccatccaaatggaacattagagtttttttgttcctaaactcgcatacaaatatgagattctccaagggctacgaagcatataaaggtccgggccccttaaaattcccacttatttgtcttccctctttttttcctcccgcttccgaccactcctcgtctcctccgctcacactccacatgccgacggtggtggtggcggcagcggcggcggagtcgtaggcgcccgagtaagcggtcttgtagtgacgccggaaccgggggcgtgcggggggacacgatggcggcgccggcttccgcggcggccgggcgcgccgggggcatgtcgtcggacaacgtcaagggcctggtcctcgcggtgtcgtcgagcgccttcatcggggccagcttcatcgtcaagaagatggggctcaggagggccgccgattccggcgtccgcgcgggatatggagggttttcttacttagtggagcctctttggtggataggcatggtttctatgattgtaggtgaaattgctaattttgctgcttatgcattcgctccagctattcttgtcactcctcttggtgcactaagtataatcataagcgctgcactcgcacatgccattctacaggagaaactgcacacatttggtatactcggttgtgttctctgtgttgtcggatccatcacaattgtgctccatgctccacaagagcgtgacattgattctgtaaaggaagtttgggatcttgccactgaaccagctttcctttgctatgcggctatagtagttgcgtcagccttagtgcttatatattttgttgtccctcatcatggacaaacaaacataatggtgtacattggagtttgttctcttctaggatcacttacggttatgagtgtaagagctcttggaattgccttgaagctaacattctcaggaacaaatcaattattctatcctcagacttgggcctttgcagtaattgtagctacctgtgtgagcacccaaattaactatctgaataaggcactggatacatttaatacagcagtagtctcaccaatatattacgtgatgtttacatcactaacaattatagctagtgtgataatgttcaaggattgggaccatcaaaatccaacacaaattgttacagagatgtgtggcttcatgactatcctatctgggacgtttcttcttcacaagacaaaagatatgactgagagtcctggacaatgtttgtccacacggcggtcaaagcatgctagtcagaatgcgtttgcaattgaagtcgtgccactaaaatgtcaagattctatagatgatgagaccttgactttgtcacttccccaggaagctcttggggaccattttgctctcagacatgattgattgatgtagaactggagttcacagttttacatcaacctggcctgggatagattgatattgcagattataagttgtcaactgtggtttgcctgtatctaggtgatgattttgacaaagaagcaaaccataaggatgccacattcaggccaattaagtgctagtcatccaagaatactggttctggaaaaggaaaagcgttcgaagtgtacttagtagatggtggtgttgccaactatactaccccccccccttcatttgaggacgtcatgtggtagctgcaatgcaatcttatctggtttctatcaggacgacgccaaatagaaaatcagtcttcatttttacctgtaattacctcaaattgctgcccaggtgtcattgtgtatatttggtctgtgtaagtacttaagggaccctttcatataaactgttaatcattctaattcatgtctgacattgactgtttttaagtcgtccgattagtcgcgattaatcgtccaagtcggtttggaccaatcgcgattaattgctcaagtcgtccgactaatcatgattaatcgcccaagtcggtcagctagaacgaccaacaagtcatacgacatgaaaacaatgttcctgagtatgtgccccattgataaccattatttttcattcttaatattgtttagtgttcaaaaatgcatctctgggactgggatcataagtgcgattaaagcaggaaagtttgcttagttatcacaagtatacagccaattctttaaatttgtattagttgccatactttgtaattttgcaggacacctggatgcagaaagaaacgaaagtgattttttaagggaggaccaaatagtttctctaacatgttcttctacttagtcatcactttgagctacatgcatcagagggttgaactgaatcagatgactgctagtgtgacaattacagtggtttacccagtgacaatgacagatctgtgtttgccaactgcaacaactcggatcttgagattgttacgttgggataggagccacataaaaggagattgcacccccccaccccacacaactacagaagaaactgctgcaacccacatagctgatctgaagtcatcttcagtgtgtgccatattgtctggagtcttgctatcttctataccttttttgaggcctggatttccagtcacattaagcatcacccttctagccttctaggcaagtcaggcaacgaccttgagggctatattttgggagcgagaaaaccggagggattgtaggggttaaaatccccttattcagttttgaataaggatgagattttaagttcttcaatcctctccggttatgtggcccccaaactagtcctgagagtccgttgtgaccttaacctgtaagaaaggaaacgtgtcaacatttgcaggcttgcaagtgaggacggtacctgacctgataattttttgtttgaaagataaaagaaactgcagaacattccaaattttcgatgcttgaaggaatatacccatcaagatagttatgatctagttcaatggaactcaattcggttatcatcatggggatggttcttgttagctcattgatcccgagttcaagagtctttggaaattactgtgagctgattgaagatggagttttcacgtggagcttgtttgccatgcaagtttatattggactgtgaagtattgatgtattgcatagagaagggggtatatatagagagagacttaaccttaactctaatgggccgacagcccaatagtggtgtcagcctatacacacagttcacacaatctaacacccctcgcggtcgcaacggggggcaccacacatgatgagattggactagaagccaaaggtagaagccgacggattgaaatctcttgcagtcgcaacgtcgtgagtgtgcgaatgttgcggctggagtggag

SEQ ID NO: 42650 - DNA, 1311 bp, Zea Mays
ttatattaagaggaaaaaggcactggatacatttaatacagcagtagtctcaccaatatattacgtgatgtttacatcactaacaattatagctagtgtgataatgttcaaggattgggaccatcaaaatccaacacaaattgttacagagatgtgtggcttcatgactatcctatctgggacgtttcttcttcacaagacaaaagatatgactgagagtcctggacaatgtttgtccacacggcggtcaaagcatgctagtcagaatgcgtttgcaattgaagtcgtgccactaaaatgtcaagattctatagatgatgagaccttgactttgtcacttccccaggttgaaaatggttacctaaaggaagagcatcttcttagatacaaggactcgagtattgtctgatagataattctccgccaacatttggcaggaagctcttggggaccattttgctctcagacatgattgattgatgtagaactggagttcacagttttacatcaacctggcctgggatagattgatattgcagattataagttgtcaactgtggtttgcctgtatctaggtgatgattttgacaaagaagcaaaccataaggatgccacattcaggccaattaagtgctagtcatccaagaatactggttctggaaaaggaaaagcgttcgaagtgtacttagtagatggtggtgttgccaactatactaccccccccccttcatttgaggacgtcatgtggtagctgcaatgcaatcttatctggtttctatcaggacgacgccaaatagaaaatcagtcttcatttttacctgtaattacctcaaattgctgcccaggtgtcattgtgtatatttggtctgtgtaagtacttaagggaccctttcatataaactgttaatcattctaattcatgtctgacattgactgtttttaagtcgtccgattagtcgcgattaatcgtccaagtcggtttggaccaatcgcgattaattgctcaagtcgtccgactaatcatgattaatcgcccaagtcggtcagctagaacgaccaacaagtcatacgacatgaaaacaatgttcctgagtatgtgccccattgataaccattatttttcattcttaatattgtttagtgttcaaaaatgcatctctgggactgggatcataagtgcgattaaagcaggaaagtttgcttagttatcacaagtatacagccaattctttaaatttgtattagttgccatactttgtaattttgcaggacacctggatgcagaaagaaacgaaagtgattttttaaggg

SEQ ID NO: 42651 - DNA, 1883 bp, Zea Mays
gtttgtgctttttagttgcaacttgcaagggaggctcaactaataaaaaacgaaaacgtttgtctgtcacttgtgttttacatctggtggcttttattagaaacaaggatatggagggttttcttacttagtggagcctctttggtggataggcatggtttctatgattgtaggtgaaattgctaattttgctgcttatgcattcgctccagctattcttgtcactcctcttggtgcactaagtataatcataagcgctgcactcgcacatgccattctacaggagaaactgcacacatttggtatactcggttgtgttctctgtgttgtcggatccatcacaattgtgctccatgctccacaagagcgtgacattgattctgtaaaggaagtttgggatcttgccactgaaccagctttcctttgctatgcggctatagtagttgcgtcagccttagtgcttatatattttgttgtccctcatcatggacaaacaaacataatggtgtacattggagtttgttctcttctaggatcacttacggttatgagtgtaagagctcttggaattgccttgaagctaacattctcaggaacaaatcaattattctatcctcagacttgggcctttgcagtaattgtagctacctgtgtgagcacccaaattaactatctgaataaggcactggatacatttaatacagcagtagtctcaccaatatattacgtgatgtttacatcactaacaattatagctagtgtgataatgttcaaggattgggaccatcaaaatccaacacaaattgttacagagatgtgtggcttcatgactatcctatctgggacgtttcttcttcacaagacaaaagatatgactgagagtcctggacaatgtttgtccacacggcggtcaaagcatgctagtcagaatgcgtttgcaattgaagtcgtgccactaaaatgtcaagattctatagatgatgagaccttgactttgtcacttccccaggaagctcttggggaccattttgctctcagacatgattgattgatgtagaactggagttcacagttttacatcaacctggcctgggatagattgatattgcagattataagttgtcaactgtggtttgcctgtatctaggtgatgattttgacaaagaagcaaaccataaggatgccacattcaggccaattaagtgctagtcatccaagaatactggttctggaaaaggaaaagcgttcgaagtgtacttagtagatggtggtgttgccaactatactaccccccccccttcatttgaggacgtcatgtggtagctgcaatgcaatcttatctggtttctatcaggacgacgccaaatagaaaatcagtcttcatttttacctgtaattacctcaaattgctgcccaggtgtcattgtgtatatttggtctgtgtaagtacttaagggaccctttcatataaactgttaatcattctaattcatgtctgacattgactgtttttaagtcgtccgattagtcgcgattaatcgtccaagtcggtttggaccaatcgcgattaattgctcaagtcgtccgactaatcatgattaatcgcccaagtcggtcagctagaacgaccaacaagtcatacgacatgaaaacaatgttcctgagtatgtgccccattgataaccattatttttcattcttaatattgtttagtgttcaaaaatgcatctctgggactgggatcataagtgcgattaaagcaggaaagtttgcttagttatcacaagtatacagccaattctttaaatttgtattagttgccatactttgtaattttgcaggacacctggatgcagaaagaaacgaaagtgattttttaaggg

SEQ ID NO: 42652 - DNA, 1870 bp, Zea Mays
ctttcctgaagcttttcttttattgatttagtttgtgtgagcaacacagacacgggtgaattgtcagagaatccaagttgactccggagaaaaggatatggagggttttcttacttagtggagcctctttggtggataggcatggtttctatgattgtaggtgaaattgctaattttgctgcttatgcattcgctccagctattcttgtcactcctcttggtgcactaagtataatcataagcgctgcactcgcacatgccattctacaggagaaactgcacacatttggtatactcggttgtgttctctgtgttgtcggatccatcacaattgtgctccatgctccacaagagcgtgacattgattctgtaaaggaagtttgggatcttgccactgaaccagctttcctttgctatgcggctatagtagttgcgtcagccttagtgcttatatattttgttgtccctcatcatggacaaacaaacataatggtgtacattggagtttgttctcttctaggatcacttacggttatgagtgtaagagctcttggaattgccttgaagctaacattctcaggaacaaatcaattattctatcctcagacttgggcctttgcagtaattgtagctacctgtgtgagcacccaaattaactatctgaataaggcactggatacatttaatacagcagtagtctcaccaatatattacgtgatgtttacatcactaacaattatagctagtgtgataatgttcaaggattgggaccatcaaaatccaacacaaattgttacagagatgtgtggcttcatgactatcctatctgggacgtttcttcttcacaagacaaaagatatgactgagagtcctggacaatgtttgtccacacggcggtcaaagcatgctagtcagaatgcgtttgcaattgaagtcgtgccactaaaatgtcaagattctatagatgatgagaccttgactttgtcacttccccaggaagctcttggggaccattttgctctcagacatgattgattgatgtagaactggagttcacagttttacatcaacctggcctgggatagattgatattgcagattataagttgtcaactgtggtttgcctgtatctaggtgatgattttgacaaagaagcaaaccataaggatgccacattcaggccaattaagtgctagtcatccaagaatactggttctggaaaaggaaaagcgttcgaagtgtacttagtagatggtggtgttgccaactatactaccccccccccttcatttgaggacgtcatgtggtagctgcaatgcaatcttatctggtttctatcaggacgacgccaaatagaaaatcagtcttcatttttacctgtaattacctcaaattgctgcccaggtgtcattgtgtatatttggtctgtgtaagtacttaagggaccctttcatataaactgttaatcattctaattcatgtctgacattgactgtttttaagtcgtccgattagtcgcgattaatcgtccaagtcggtttggaccaatcgcgattaattgctcaagtcgtccgactaatcatgattaatcgcccaagtcggtcagctagaacgaccaacaagtcatacgacatgaaaacaatgttcctgagtatgtgccccattgataaccattatttttcattcttaatattgtttagtgttcaaaaatgcatctctgggactgggatcataagtgcgattaaagcaggaaagtttgcttagttatcacaagtatacagccaattctttaaatttgtattagttgccatactttgtaattttgcaggacacctggatgcagaaagaaacgaaagtgattttttaaggg

SEQ ID NO: 42653 - DNA, 2208 bp, Zea Mays
aaccattccttaaacccacggagggtccaggtccagccgtccaggctccagaaagaggagaggagagagagagagagagaggaggacgaggagtttgtttggacgctgctccaaactccgagaaaggcaggcacagccagtgataactgtcaacagtcagtctatttaccgcgtctgctgcctgctggctgctgcctcgccccgcgtgaatcaataatcattgaatccattctaccgctgctcctcctccttgctctgccgagaagccggcgatgaggggccgcaagaggcagcaggtgagcgccagctcggccgccgcgctggtgaaggggagggagagcaccaagcagaaggagaaagaagctaggaaggagaaggaggcgagggaggccggcagggagccggcggcgaaggagaggcagatgaggcgcaaggagccagccaaggagaaggaggtcagggaagagggcaaggagaacgacaagcacaaggagaaggcgaagacgaaggccaacgtctgcccgcagttcttcaaggtcttcttccccgagcagtccacggagcggctgagaatcccacccatgttcaaccagcacctcaaggagcagcagccaaccggagcagtttccctgagaggcccgagcggcaacagatggcaggcagcgctcgcttcagagtccgagtcggaggccgcgtggtgcttcgaccagggctggaaggagttcgtcacggaccactccctcaggctaggccacttcctggtcttcacgcgcgacgggcccgcccagttctccgtggcggtgttctcgtcgtcaggcgtcatcgacccggcagccctggacgcgaggcctactgcgaacggcggcgcggccgtcaagctcgaagatggcgaaggcgtcggcgtccgaggggacgtggacgcaggcggcgacaccagctccgaggtgtcgcttctgcccgcggaagagggcgatggaggagcgacagggaggagaacaggagcgacgagtggtggcgctggcggcgcctctgagatgtcacttgttcttagagaagagggccgtggagtgacagggaagagagcgagagcgacgacgagtgatctcccggcagatgccagtgcgccaaagaagcactctgccctcgcgaagaaagctggtaaaaggaggcctcaagctgccacttcaaaggatgtgtcgatgattgttcacaatcccaccttcagtttgttagacgaatccaagactttcaacaagactcagatcagagacaagaacgtgcctaggagcggtaaattccttctgaggaccaccaaagcaccagttgtaatatcccaaaggcgccgagtaaccgaagaagagaagtgccttgctctcagaaaggcaatggagttcaagtcgaagcaccctttcaccatgcagataatgatcgagtcttatgtctacgtgggatttttcatgaacatcgcctgcgagttcgtcagggagtcgctcccccgcacgagcaagaagatgacgctctgggacccgatggggaagccgtgggacgtcagctacgtctactacggcgaccgcgccgccggctccttcggtggcggctggggtaggttcgctctggggaacaacctggagaagtccgacgtctgcgtcttcgagctcttcgaggaggacaacatgcgggtgcacatatacagggtcgtcccggaaattaccccgctcctgcgcgccagcaacaaggactaggcttgcggctttcctgtcgatctgcggctactagagaataacaagaagaccggttggtcattcacaatgctggaatggaattcggtgctcgttcaagagagagagatgctaataatttcccggaataaataactgactatgaacagaggagtctattagtctatgttcgcttagatttaattcgtaccggtttctactgtttatacaatgtttataaattacagttgcagcagtccaattagctggctttaatcgtgcccatattttggttggaagttggaaccctggtgactggtgtgtttgcttaactgatatcgctgtgaacttgcagccgtcggcgtgatgattcgctacatgaacattattgttgtccccattgattttttttcttcttcttcttgcggtttatggcagaaactttacttaggggtacaaaaacaggagagctgtcgcgatttatctgatc

SEQ ID NO: 42654 - DNA, 951 bp, Zea Mays
cccgaacttagatatagatggatctcaactttttaaacagatcgattcaaatacgaacatatagtatgtaccatttacatcctacacgagaactttgggattttttttttaaaaaaaggccaaaatcggttactgtcatggagagaagtacatactgcagttccctattgattgtatggtacattttctgtaagaccacagagaattgcaggagaatcatggcctcactacagtcctacagtggtgtggcaataataatacatctgggaagtccatgcccagccacaactttcccatattatccaaagaataaacagagctttacggagaataaagaaaaaccaaacaactagaacctcctaatctgcctttgtcaactgcaaaacatgaaaggcgggaactggtctgcagcactagagagtaacaagggtaaagatgacttgcattatataaagtatgaactcttcgacaggggtataaatttcaatggatcttgtgcatagctgactgctgagctgtataaaaaatacaatccctgatctctccctcttctgccccccatcaccaagaaggatgtgtcatcttgttagttgtgcaccactgtgactctcttctgatcgatgatggaatagcttcgctatcgatcgcctctcacaatcctgaagaagtgtagaataacaaaaataaattcttaaacaaaatcatcgattgaattcaaaatgatcaaggcttgcaattttcaaactagctactccggccaatggtacctaccttaaacatattgagtcggaacggtctgtcagggtttatccttcttagttttaggtacgtatatgcaaagctgagctggtcacgaggcgtgaaacgatcaacctcattgtaccacaggcaagagaataagttggacattggtgtgtgttctctcacgataaaagagccttcggggacatc

SEQ ID NO: 42655 - DNA, 1826 bp, Zea Mays
acaaagttcaccaaatccctgacttttatgtgtcgaagaaaggtaggctgtagtgcgacatctgctctgccacgtttctgctatggtggtgccgtggtggtgtgactaatcatcagagataagtagcaaaccgtcaaccaccagggagacgagccaggttgagaaggaaagcatcgcgagttcgccatacggatgggttccaaagcgcctttctgtctcacgctcctcttgctgctcgctgcggcctgtggacctgcagcacatgcccacgatgctgtcgagctcccgcatcatggcttagccttgaaggaacaaatttcttcaaccaagattcctgcccgtctcaagagtggcagcggactatgctcggcctgtgaaaacttcacgagcgaagccgtcacttatctcggcaaggaacagacacaggacaggatcatggagttccttcatgatgcttgctcccaatcattctcctttgaacagaagtgtgtcgagctgatggactcttatgcgactctcctgtttgccaagatcacggagatcagaccggaagcgttctgcaaacggtatggcctgtgcagggacacagctcttctctccggtgtgggaagtgacagcacgtgtgtgttctgccaccatctgctcgatgaaatcatgtccaaactgaaagatccagatgcggagtttgagataattcagattcttgtcaaggagtgcaataagatcgaaggtcacgtccagcaggtaggctttttggctcttcctctgtccttgtgattctgtgcaaaaggcgagctcgtcctcttccttaatgaggttcttaagagtgtttcctcagctgtattggttacccttactactttggattttggaaacagtccgagacccttattagttaacaatatcatagttgttgcaaagatactctactttttttcatcatctcttctttaccattcatatctcccagttgttgcaagggaaaattaactccagtaattctttcttgaggggtagaacaggagtgtcgttctcagattcaatgattatcaaacaacatgtactaattatattttagcaagctggcagttgatgtgattctctatgtttacattttgtcaaattaacgacaagagggttaagttttagaagcaactaccctgcactggttaataatatctgtgaggacccaagttggtcccagtcctcttcgattggtgctctgttcctgtgatttgaggaaagtttcagtacaacacattgtattttgattagtgaatgaagcatttagacgatattgttgcaggttgagcagatagtggttgaaaggtctgaaggttggcattgtggatatttttgctatcatgcatggattcccagacaatgtgaggacgaaccagaagggcgagttctgggtggcgatccactgtcggagaactctacgcgttgatcatcagggacagcccgatggccagatgcttcacatcatggaggacgacaagggagaggtggtgagagttatcatcgaagtggagggtctgtctgatgccattcatcgctgtctttgacctcgtgaaggcgtcttagccacttcaatttgattggaaatattgttgttttaagatacgggtccatggttaatgttgtacgcttctctgagaagacctgtcattccaataatttggttctggagcaacctggagctgtatactgatctagcttcttttagtaacaaatgtaagttgctcacattttctttagattgtctatagaactttgaacaaccagctcgtcccttctaatttttatttggccagcaaacaaat

SEQ ID NO: 42656 - DNA, 1393 bp, Zea Mays
acaaagttcaccaaatccctgacttttatgtgtcgaagaaaggtaggctgtagtgcgacatctgctctgccacgtttctgctatggtggtgccgtggtggtgtgactaatcatcagagataagtagcaaaccgtcaaccaccagggagacgagccaggcaagtttattttcatctcgctatctccctgatattggtgtctagattgaagattatgcatcagcgacaagtaacgaccgcccggaaagagagccagaaaaaagggcaggaaatcgccaccgcccgcccctatttgagcagccgcttgttccttccgcgtcctcgctgctcctcaattcgattggctccgtgccgacctccaggttgagaaggaaagcatcgcgagttcgccatacggatgggttccaaagcgcctttctgtctcacgctcctcttgctgctcgctgcggcctgtggacctgcagcacatgcccacgatgctgtcgagctcccgcatcatggcttagccttgaaggaacaaatttcttcaaccaagattcctgcccgtctcaagagtggcagcggactatgctcggcctgtgaaaacttcacgagcgaagccgtcacttatctcggcaaggaacagacacaggacaggatcatggagttccttcatgatgcttgctcccaatcattctcctttgaacagaagtgtgtcgagctgatggactcttatgcgactctcctgtttgccaagatcacggagatcagaccggaagcgttctgcaaacggtatggcctgtgcagggacacagctcttctctccggtgtgggaagtgacagcacgtgtgtgttctgccaccatctgctcgatgaaatcatgtccaaactgaaagatccagatgcggagtttgagataattcagattcttgtcaaggagtgcaataagatcgaaggtcacgtccagcagacaatgtgaggacgaaccagaagggcgagttctgggtggcgatccactgtcggagaactctacgcgttgatcatcagggacagcccgatggccagatgcttcacatcatggaggacgacaagggagaggtggtgagagttatcatcgaagtggagggtctgtctgatgccattcatcgctgtctttgacctcgtgaaggcgtcttagccacttcaatttgattggaaatattgttgttttaagatacgggtccatggttaatgttgtacgcttctctgagaagacctgtcattccaataatttggttctggagcaacctggagctgtatactgatctagcttcttttagtaacaaatgtaagttgctcacattttctttagattgtctatagaactttgaacaaccagctcgtcccttctaatttttatttggccagcaaacaaat

SEQ ID NO: 42657 - DNA, 1571 bp, Zea Mays
acaaagttcaccaaatccctgacttttatgtgtcgaagaaaggtaggctgtagtgcgacatctgctctgccacgtttctgctatggtggtgccgtggtggtgtgactaatcatcagagataagtagcaaaccgtcaaccaccagggagacgagccaggcaagtttattttcatctcgctatctccctgatattggtgtctagattgaagattatgcatcagcgacaagtaacgaccgcccggaaagagagccagaaaaaagggcaggaaatcgccaccgcccgcccctatttgagcagccgcttgttccttccgcgtcctcgctgctcctcaattcgattggctccgtgccgacctccaggttgagaaggaaagcatcgcgagttcgccatacggatgggttccaaagcgcctttctgtctcacgctcctcttgctgctcgctgcggcctgtggacctgcagcacatgcccacgatgctgtcgagctcccgcatcatggcttagccttgaaggaacaaatttcttcaaccaagattcctgcccgtctcaagagtggcagcggactatgctcggcctgtgaaaacttcacgagcgaagccgtcacttatctcggcaaggaacagacacaggacaggatcatggagttccttcatgatgcttgctcccaatcattctcctttgaacagaagtgtgtcgagctgatggactcttatgcgactctcctgtttgccaagatcacggagatcagaccggaagcgttctgcaaacggtatggcctgtgcagggacacagctcttctctccggtgtgggaagtgacagcacgtgtgtgttctgccaccatctgctcgatgaaatcatgtccaaactgaaagatccagatgcggagtttgagataattcagattcttgtcaaggagtgcaataagatcgaaggtcacgtccagcaggttgagcagatagtggttgaaaggtctgaaggttggcattgtggatatttttgctatcatgcatggattcccagacaatgtgaggacgaaccagaagggcgagttctgggtggcgatccactgtcggagaagtatgtatcctcggctaatgagctgccatgtcaagctgaggaagtttttgctcagcttcccaatccctgccaagtaccactacctgatgcatatcgatagcaagctctacgcgttgatcatcagggacagcccgatggccagatgcttcacatcatggaggacgacaagggagaggtggtgagagttatcatcgaagtggagggtctgtctgatgccattcatcgctgtctttgacctcgtgaaggcgtcttagccacttcaatttgattggaaatattgttgttttaagatacgggtccatggttaatgttgtacgcttctctgagaagacctgtcattccaataatttggttctggagcaacctggagctgtatactgatctagcttcttttagtaacaaatgtaagttgctcacattttctttagattgtctatagaactttgaacaaccagctcgtcccttctaatttttatttggccagcaaacaaat

SEQ ID NO: 42658 - DNA, 2009 bp, Zea Mays
acaaagttcaccaaatccctgacttttatgtgtcgaagaaaggtaggctgtagtgcgacatctgctctgccacgtttctgctatggtggtgccgtggtggtgtgactaatcatcagagataagtagcaaaccgtcaaccaccagggagacgagccaggcaagtttattttcatctcgctatctccctgatattggtgtctagattgaagattatgcatcagcgacaagtaacgaccgcccggaaagagagccagaaaaaagggcaggaaatcgccaccgcccgcccctatttgagcagccgcttgttccttccgcgtcctcgctgctcctcaattcgattggctccgtgccgacctccaggttgagaaggaaagcatcgcgagttcgccatacggatgggttccaaagcgcctttctgtctcacgctcctcttgctgctcgctgcggcctgtggacctgcagcacatgcccacgatgctgtcgagctcccgcatcatggcttagccttgaaggaacaaatttcttcaaccaagattcctgcccgtctcaagagtggcagcggactatgctcggcctgtgaaaacttcacgagcgaagccgtcacttatctcggcaaggaacagacacaggacaggatcatggagttccttcatgatgcttgctcccaatcattctcctttgaacagaagtgtgtcgagctgatggactcttatgcgactctcctgtttgccaagatcacggagatcagaccggaagcgttctgcaaacggtatggcctgtgcagggacacagctcttctctccggtgtgggaagtgacagcacgtgtgtgttctgccaccatctgctcgatgaaatcatgtccaaactgaaagatccagatgcggagtttgagataattcagattcttgtcaaggagtgcaataagatcgaaggtcacgtccagcaggtaggctttttggctcttcctctgtccttgtgattctgtgcaaaaggcgagctcgtcctcttccttaatgaggttcttaagagtgtttcctcagctgtattggttacccttactactttggattttggaaacagtccgagacccttattagttaacaatatcatagttgttgcaaagatactctactttttttcatcatctcttctttaccattcatatctcccagttgttgcaagggaaaattaactccagtaattctttcttgaggggtagaacaggagtgtcgttctcagattcaatgattatcaaacaacatgtactaattatattttagcaagctggcagttgatgtgattctctatgtttacattttgtcaaattaacgacaagagggttaagttttagaagcaactaccctgcactggttaataatatctgtgaggacccaagttggtcccagtcctcttcgattggtgctctgttcctgtgatttgaggaaagtttcagtacaacacattgtattttgattagtgaatgaagcatttagacgatattgttgcaggttgagcagatagtggttgaaaggtctgaaggttggcattgtggatatttttgctatcatgcatggattcccagacaatgtgaggacgaaccagaagggcgagttctgggtggcgatccactgtcggagaaggacagcccgatggccagatgcttcacatcatggaggacgacaagggagaggtggtgagagttatcatcgaagtggagggtctgtctgatgccattcatcgctgtctttgacctcgtgaaggcgtcttagccacttcaatttgattggaaatattgttgttttaagatacgggtccatggttaatgttgtacgcttctctgagaagacctgtcattccaataatttggttctggagcaacctggagctgtatactgatctagcttcttttagtaacaaatgtaagttgctcacattttctttagattgtctatagaactttgaacaaccagctcgtcccttctaatttttatttggccagcaaacaaat

SEQ ID NO: 42659 - DNA, 2484 bp, Zea Mays
ggacccaactgcaaacgtggcctgcaaatatctcgtgacctgcgcgggcggaggggacccgcagcccaggccctggtggacccggggcgccagtcccagtccagtccctcactgtggactcctcgcgtgccccgccgcccttaaatcccccggcagcagcgtgctgcctcgtgtctcacccctccggacgaaatctgacccgggccacactccgctgctccgccatggcgatccgctccaaggcctggatctcgctgttgctcgcgctggccgtcgcgctctccgcccgggcggaggaggagcccgccgccgccgcggagggcgaggccgtgctcaccctcgacgtcgacagcttcgacgaggccgtcgccaagcaccccttcatggtcgtcgagttctacgccccctggtgtgggcactgcaagaaacttgctccagagtatgagaatgcggccaaggcacttagcaagcatgacccaccgattgttctcgctaaggttgatgctaacgaggagaagaacaggccgcttgctaccaagtacgagatccaagggttcccaaccatcaagatattcagggaccaggggaagaacattcaggaatacaagggccctagggaggctgatggcattgtggattacttgaagaagcaggttggccctgcgtccaaggagatcaagtcaccagaagatgcgacggcccttatcgatgacaagaagatctacattgttggtatcttcgctgaattcagcggcaccgaatttacaaacttcatggaggtcgcagagaagctgaggtctgactacgactttggccacactttgcatgccaaccacctcccacgtggtgatgcagcagtggaacggccattggtcaggctgctgaagccatttgatgagcttgttgttgacagcaaggattttgatgtcgctgcactgatgaagtttattgatgctagcaccatccctagagttgtcacttttgacaagaaccctgacaaccacccatacctcatgaaattcttccaaagctcagcccccaaggctatgctgtttttgaacttctccaccggaccttttgattctttcaagtctgcctactctgctgccgcggaggaattcaaggacaaggaaatcaagttccttattggtgacatcgaagccagccagggtgccttccagtactttggcctgaaagaggaccagacaccccttatcctcatccaggatggtgactccaagaagttcttgaaggttcacgttgaggctgaccagatcgtcgcttggttgaaggagtactttgatggcaaattgacgccgttcaggaagtctgagcctattcctgaggtcaacaatgagcctgttaaggtggttgtcgctgacaacgtccacgacttcgtcttcaaatctggcaaaaatgtccttattgaattctatgccccctggtgcggacactgcaagaagctggcgcccatcttggacgaggcagccaccactctccagagcgacgaggaagtcgtgattgctaagatggacgcgactgccaatgacgttcccagtgagtttgacgtccaaggctacccgaccttgtacttcgtgaccccgagcgggaaggtgacatcctacgacagcggcaggacggcggacgacatcgtcgacttcatcaagaagagcaaggagaccgcaggcgccgccaccaccaccaccacccaggcgccaccggcatccgagaaggcagccgccgccgagcccgtcaaggacgagctgtgagcatccaaggtgtggacggctgtggctgcgtaagcatgggaggaaaacctggcgctaacgtgcctccaacgcctagtttttgcgggaccagagggagagagagagagggacggagttagagagagaggggatctgcgacgtgttttgctctgcggcggcatgtctgtgtatcccattgaggttatgtacacaattacaccgcggtcggtgggtgttttttagttaattatcacaagtgacagtagaaaggaacagattgtgatgaggttgaatggatgaataaatcgctagtccgccccgcctctggtatctcactgatggctcgggtcccccggaagggggccttcttcaccttccacctaagctgcgcacgaaaagcccaaagccaatcccagagaatagtaaagcttcatagtgtctttctgtccaggtgcaggtagtccgcatcttcacagacatgtctatttcatcgagcctctctccgagacagtgcccagatcattatgtctttcgtatgtgtcggaacttacccgacaaggaatttctctaccttaggaccattatagttacgtccgccgttcaccggggcttcggtcgccggcttccctgtcatcaattcaccaactgccttgaccttccggcactaggtaggcgtcatccctcatacatggtcttacgactttgcagagacctgtgtttttggtaaacagtcgcc

SEQ ID NO: 42660 - DNA, 1940 bp, Zea Mays
ggacccaactgcaaacgtggcctgcaaatatctcgtgacctgcgcgggcggaggggacccgcagcccaggccctggtggacccggggcgccagtcccagtccagtccctcactgtggactcctcgcgtgccccgccgcccttaaatcccccggcagcagcgtgctgcctcgtgtctcacccctccggacgaaatctgacccgggccacactccgctgctccgccatggcgatccgctccaaggcctggatctcgctgttgctcgcgctggccgtcgcgctctccgcccgggcggaggaggagcccgccgccgccgcggagggcgaggccgtgctcaccctcgacgtcgacagcttcgacgaggccgtcgccaagcaccccttcatggtcgtcgagttctacgccccctggtgtgggcactgcaagaaacttgctccagagtatgagaatgcggccaaggcacttagcaagcatgacccaccgattgttctcgctaaggttgatgctaacgaggagaagaacaggccgcttgctaccaagtacgagatccaagggttcccaaccatcaagatattcagggaccaggggaagaacattcaggaatacaagggccctagggaggctgatggcattgtggattacttgaagaagcaggttggccctgcgtccaaggagatcaagtcaccagaagatgcgacggcccttatcgatgacaagaagatctacattgttggtatcttcgctgaattcagcggcaccgaatttacaaacttcatggaggtcgcagagaagctgaggtctgactacgactttggccacactttgcatgccaaccacctcccacgtggtgatgcagcagtggaacggccattggtcaggctgctgaagccatttgatgagcttgttgttgacagcaaggattttgatgtcgctgcactgatgaagtttattgatgctagcaccatccctagagttgtcacttttgacaagaaccctgacaaccacccatacctcatgaaattcttccaaagctcagcccccaaggctatgctgtttttgaacttctccaccggaccttttgattctttcaagtctgcctactctgctgccgcggaggaattcaaggacaaggaaatcaagttccttattggtgacatcgaagccagccagggtgccttccagtactttggcctgaaagaggaccagacaccccttatcctcatccaggatggtgactccaagaagttcttgaaggttcacgttgaggctgaccagatcgtcgcttggttgaaggagtactttgatggcaaattgacgccgttcaggaagtctgagcctattcctgaggtcaacaatgagcctgttaaggtggttgtcgctgacaacgtccacgacttcgtcttcaaatctggcaaaaatgtccttattgaattctatgccccctggtgcggacactgcaagaacaaggagaccgcaggcgccgccaccaccaccaccacccaggcgccaccggcatccgagaaggcagccgccgccgagcccgtcaaggacgagctgtgagcatccaaggtgtggacggctgtggctgcgtaagcatgggaggaaaacctggcgctaacgtgcctccaacgcctagtttttgcgggaccagagggagagagagagagggacggagttagagagagaggggatctgcgacgtgttttgctctgcggcggcatgtctgtgtatcccattgaggttatgtacacaattacaccgcggtcggtgggtgttttttagttaattatcacaagtgacagtagaaaggaacagattgtgatgaggttgaatggatgaataaatcgctagtccgccccgcctcgttggatgcgtcaatgaaacaggcgcttttgtgacgtgtccaccagcactaacgctggaagcaaactcgaacggaga

SEQ ID NO: 42661 - DNA, 1560 bp, Zea Mays
caggcgacgagtggagctaggcgtcggcgccgcccaggttagaatgcgtatggcgtccgccttggcgagggtgtaagggaggaggtcattgttgaccttgttggccagtgccgatcctatcaatctcgtgtcatggatcttgttaacagtactggcgacgagagccttttatttcaggctctaggactaaatgatgagttacagcgtgttgttcagcgtcatgatgacatagcaaaggggatccctcctggtactggagcacctttacctgcttctggaaatgtcaaccaagggactgccccacctaggcccactgcggtttcattttctccacttctaaatgtacatgaggacgatgaaccagaagacgagttctctgtgctttcccgcaggtctgcgagggatggtgcagtagcacagaacaatgtgccctctgctccaagaaatgagaggtcatacccaagcccacttcttcctccaccaccagcatctaagaggcctgtttataccgaggcaagcagtgttgactatcttagtggtgactcctacaagtcagagaaggtttcagatgatttcatcaacccaactgctccagctaacatatccacatcatcccattcaaaggcagaagcacatccacctccgagttatggtggcaggccagacagagtatctgacgacttcataaacccaactgcacctagcttctcggcgccttctcgtcctacaaatgaggagccagcccgcccatccgtgaagcggcaagagagcctacctgacgacgacttcataaacccaactgctcttcctggtttctcgtcgtcttcagctactaaggagtctggcgaggaccttccaaaggctccatgggaagcacaagctgccgcgggttccctaccgccgcctccggcgaggtacggccagagacagcagtacttcgagcagaacgtgtattctggcgggagcaacgaaggcggctacaatggactgacgacacagaccgaaggtctctcgctgaacccgcggagcagcgagaacgagaggagcgcggcacggccggcagcgtcccgccctgccaaacctgaggactcgctcttcaaggacctggtcgacttcgcaaagaccaagccttcgtccccgtcgaaaccggccaacagccgcaggacccgctagaacgactcgtgcgatgcatggatggacattgggtcgttcggatattcatttcacaggttagcggcttttagatggtaccatgaaataaggccgtctggagactggttttcattgcatatttgcattgcatgggaaattgttttggttgcgtttagagtggcagatgtcagaaacgttgcttgctcataatcctgggtgtgtgatgtctagttagctgctcctaaatttctgtgtcgttggcttccgattctcattttctttttctttcacttagctgtgtatatatatgttacccgattcgacagcaaatattcatagttgagtttgtgacttgaggaatgaggtgttcctattttcggtattggataaattaggtgcctatttttc

SEQ ID NO: 42662 - DNA, 2247 bp, Zea Mays
aaaaaaagtccatgaccgcgtttttctcttctgcctttcctgccgccggccgggtctactcgtcccatcttgtagctgcagcggcaccccctcaaaatcgtccaaccaatcccaccagctgctcatctcgaatccagcccgaaacctcgcgccacgcgtgccgtgggcccagttcgtgcgcgttcagctgctgccccgcgcccagggatcgggaagggcgactaacgacatgctgatcggcccggattgggcggtcaacatcgagctctgcgacatcatcaacatggatcccggacaagcaaaggatacactcaaactcctaaagaaacgtcttgcaagcaagaatacgaaagtgcaaattctaacactttatgtgctagagactctaagcaaaaattgtggggatattgttcatcaacagattgttgagcgcgacatattgagtgaaatggttaagatagtaaagaaaaagccagacttgagcgtccgagagaagatattgagtttgattgacacatggcaagtggcttttggaggtccatctggaaaatatcgacagtatcatgcggcttaccaagaactcagggctgctggtgttgattttccgcctcgcgaggaaaattcagtcccgttgtttacaccacctcaaactcaaccattaagacatccacatctatatacacctccaggtcaaagctatgaagatgctgctatacaagcttctcttcagtctgcccctcctgcatctgccctcagggtgtaagggaggaggtcattgttgaccttgttggccagtgccgatcctatcaatctcgtgtcatggatcttgttaacagtactggcgacgagagccttttatttcaggctctaggactaaatgatgagttacagcgtgttgttcagcgtcatgatgacatagcaaaggggatccctcctggtactggagcacctttacctgcttctggaaatgtcaaccaagggactgccccacctaggcccactgcggtttcattttctccacttctaaatgtacatgaggacgatgaaccagaagacgagttctctgtgctttcccgcaggtctgcgagggatggtgcagtagcacagaacaatgtgccctctgctccaagaaatgagaggtcatacccaagcccacttcttcctccaccaccagcatctaagaggcctgtttataccgaggcaagcagtgttgactatcttagtggtgactcctacaagtcagagaaggtttcagatgatttcatcaacccaactgctccagctaacatatccacatcatcccattcaaaggcagaagcacatccacctccgagttatggtggcaggccagacagagtatctgacgacttcataaacccaactgcacctagcttctcggcgccttctcgtcctacaaatgaggagccagcccgcccatccgtgaagcggcaagagagcctacctgacgacgacttcataaacccaactgctcttcctggtttctcgtcgtcttcagctactaaggagtctggcgaggaccttccaaaggctccatgggaagcacaagctgccgcgggttccctaccgccgcctccggcgaggtacggccagagacagcagtacttcgagcagaacgtgtattctggcgggagcaacgaaggcggctacaatggactgacgacacagaccgaaggtctctcgctgaacccgcggagcagcgagaacgagaggagcgcggcacggccggcagcgtcccgccctgccaaacctgaggactcgctcttcaaggacctggtcgacttcgcaaagaccaagccttcgtccccgtcgaaaccggccaacagccgcaggacccgctagaacgactcgtgcgatgcatggatggacattgggtcgttcggatattcatttcacaggttagcggcttttagatggtaccatgaaataaggccgtctggagactggttttcattgcatatttgcattgcatgggaaattgttttggttgcgtttagagtggcagatgtcagaaacgttgcttgctcataatcctgggtgtgtgatgtctagttagctgctcctaaatttctgtgtcgttggcttccgattctcattttctttttctttcacttagctgtgtatatatatgttacccgattcgacagcaaatattcatagttgagtttgtgacttgaggaatgaggtgttcctattttcggtattggataaattaggtgcctatttttc

SEQ ID NO: 42663 - DNA, 2461 bp, Zea Mays
aaaaaaagtccatgaccgcgtttttctcttctgcctttcctgccgccggccgggtctactcgtcccatcttgtagctgcagcggcaccccctcaaaatcgtccaaccaatcccaccagctgctcatctcgaatccagcccgaaacctcgcgccacgcgtgccgtgggcccagttcgtgcgcgttcagctgctgccccgcgcccagggatcgggaaggcaagctctttggtggttcctaagggcgaatctcgtggcgattcgctcagatttggatttagggtttaggaggcggtgctggtgatcggtttgtgccgccgggagagatgtcggcggctgtggcgtgcgcggagagggcgactaacgacatgctgatcggcccggattgggcggtcaacatcgagctctgcgacatcatcaacatggatcccggacaagcaaaggatacactcaaactcctaaagaaacgtcttgcaagcaagaatacgaaagtgcaaattctaacactttatgtgctagagactctaagcaaaaattgtggggatattgttcatcaacagattgttgagcgcgacatattgagtgaaatggttaagatagtaaagaaaaagacttgagcgtccgagagaagatattgagtttgattgacacatggcaagtggcttttggaggtccatctggaaaatatcgacagtatcatgcggcttaccaagaactcagggctgctggtgttgattttccgcctcgcgaggaaaattcagtcccgttgtttacaccacctcaaactcaaccattaagacatccacatctatatacacctccaggtcaaagctatgaagatgctgctatacaagcttctcttcagtctgcccctcctgcatctgccctcagtctgagtgagattcaaagcgctcgagggattgtggatgtgttagatgaaatgttaaatgctctggaccaccggcatcctgagggtgtaagggaggaggtcattgttgaccttgttggccagtgccgatcctatcaatctcgtgtcatggatcttgttaacagtactggcgacgagagccttttatttcaggctctaggactaaatgatgagttacagcgtgttgttcagcgtcatgatgacatagcaaaggggatccctcctggtactggagcacctttacctgcttctggaaatgtcaaccaagggactgccccacctaggcccactgcggtttcattttctccacttctaaatgtacatgaggacgatgaaccagaagacgagttctctgtgctttcccgcaggtctgcgagggatggtgcagtagcacagaacaatgtgccctctgctccaagaaatgagaggtcatacccaagcccacttcttcctccaccaccagcatctaagaggcctgtttataccgaggcaagcagtgttgactatcttagtggtgactcctacaagtcagagaaggtttcagatgatttcatcaacccaactgctccagctaacatatccacatcatcccattcaaaggcagaagcacatccacctccgagttatggtggcaggccagacagagtatctgacgacttcataaacccaactgcacctagcttctcggcgccttctcgtcctacaaatgaggagccagcccgcccatccgtgaagcggcaagagagcctacctgacgacgacttcataaacccaactgctcttcctggtttctcgtcgtcttcagctactaaggagtctggcgaggaccttccaaaggctccatgggaagcacaagctgccgcgggttccctaccgccgcctccggcgaggtacggccagagacagcagtacttcgagcagaacgtgtattctggcgggagcaacgaaggcggctacaatggactgacgacacagaccgaaggtctctcgctgaacccgcggagcagcgagaacgagaggagcgcggcacggccggcagcgtcccgccctgccaaacctgaggactcgctcttcaaggacctggtcgacttcgcaaagaccaagccttcgtccccgtcgaaaccggccaacagccgcaggacccgctagaacgactcgtgcgatgcatggatggacattgggtcgttcggatattcatttcacaggttagcggcttttagatggtaccatgaaataaggccgtctggagactggttttcattgcatatttgcattgcatgggaaattgttttggttgcgtttagagtggcagatgtcagaaacgttgcttgctcataatcctgggtgtgtgatgtctagttagctgctcctaaatttctgtgtcgttggcttccgattctcattttctttttctttcacttagctgtgtatatatatgttacccgattcgacagcaaatattcatagttgagtttgtgacttgaggaatgaggtgttcctattttcggtattggataaattaggtgcctatttttc

SEQ ID NO: 42664 - DNA, 2386 bp, Zea Mays
aaaaaaagtccatgaccgcgtttttctcttctgcctttcctgccgccggccgggtctactcgtcccatcttgtagctgcagcggcaccccctcaaaatcgtccaaccaatcccaccagctgctcatctcgaatccagcccgaaacctcgcgccacgcgtgccgtgggcccagttcgtgcgcgttcagctgctgccccgcgcccagggatcgggaaggcaagctctttggtggttcctaagggcgaatctcgtggcgattcgctcagatttggatttagggtttaggaggcggtgctggtgatcggtttgtgccgccgggagagatgtcggcggctgtggcgtgcgcggagagggcgactaacgacatgctgatcggcccggattgggcggtcaacatcgagctctgcgacatcatcaacatggatcccgggtgctagagactctaagcaaaaattgtggggatattgttcatcaacagattgttgagcgcgacatattgagtgaaatggttaagatagtaaagaaaaagccagacttgagcgtccgagagaagatattgagtttgattgacacatggcaagtggcttttggaggtccatctggaaaatatcgacagtatcatgcggcttaccaagaactcagggctgctggtgttgattttccgcctcgcgaggaaaattcagtcccgttgtttacaccacctcaaactcaaccattaagacatccacatctatatacacctccaggtcaaagctatgaagatgctgctatacaagcttctcttcagtctgcccctcctgcatctgccctcagtctgagtgagattcaaagcgctcgagggattgtggatgtgttagatgaaatgttaaatgctctggaccaccggcatcctgagggtgtaagggaggaggtcattgttgaccttgttggccagtgccgatcctatcaatctcgtgtcatggatcttgttaacagtactggcgacgagagccttttatttcaggctctaggactaaatgatgagttacagcgtgttgttcagcgtcatgatgacatagcaaaggggatccctcctggtactggagcacctttacctgcttctggaaatgtcaaccaagggactgccccacctaggcccactgcggtttcattttctccacttctaaatgtacatgaggacgatgaaccagaagacgagttctctgtgctttcccgcaggtctgcgagggatggtgcagtagcacagaacaatgtgccctctgctccaagaaatgagaggtcatacccaagcccacttcttcctccaccaccagcatctaagaggcctgtttataccgaggcaagcagtgttgactatcttagtggtgactcctacaagtcagagaaggtttcagatgatttcatcaacccaactgctccagctaacatatccacatcatcccattcaaaggcagaagcacatccacctccgagttatggtggcaggccagacagagtatctgacgacttcataaacccaactgcacctagcttctcggcgccttctcgtcctacaaatgaggagccagcccgcccatccgtgaagcggcaagagagcctacctgacgacgacttcataaacccaactgctcttcctggtttctcgtcgtcttcagctactaaggagtctggcgaggaccttccaaaggctccatgggaagcacaagctgccgcgggttccctaccgccgcctccggcgaggtacggccagagacagcagtacttcgagcagaacgtgtattctggcgggagcaacgaaggcggctacaatggactgacgacacagaccgaaggtctctcgctgaacccgcggagcagcgagaacgagaggagcgcggcacggccggcagcgtcccgccctgccaaacctgaggactcgctcttcaaggacctggtcgacttcgcaaagaccaagccttcgtccccgtcgaaaccggccaacagccgcaggacccgctagaacgactcgtgcgatgcatggatggacattgggtcgttcggatattcatttcacaggttagcggcttttagatggtaccatgaaataaggccgtctggagactggttttcattgcatatttgcattgcatgggaaattgttttggttgcgtttagagtggcagatgtcagaaacgttgcttgctcataatcctgggtgtgtgatgtctagttagctgctcctaaatttctgtgtcgttggcttccgattctcattttctttttctttcacttagctgtgtatatatatgttacccgattcgacagcaaatattcatagttgagtttgtgacttgaggaatgaggtgttcctattttcggtattggataaattaggtgcctatttttc

SEQ ID NO: 42665 - DNA, 2353 bp, Zea Mays
aaaaaaagtccatgaccgcgtttttctcttctgcctttcctgccgccggccgggtctactcgtcccatcttgtagctgcagcggcaccccctcaaaatcgtccaaccaatcccaccagctgctcatctcgaatccagcccgaaacctcgcgccacgcgtgccgtgggcccagttcgtgcgcgttcagctgctgccccgcgcccagggatcgggaaggcaagctctttggtggttcctaagggcgaatctcgtggcgattcgctcagatttggatttagggtttaggaggcggtgctggtgatcggtttgtgccgccgggagagatgtcggcggctgtggcgtgcgcggagagggcgactaacgacatgctgatcggcccggattgggcggtcaacatcgagctctgcgacatcatcaacatggatcccggacaagcaaaggatacactcaaactcctaaagaaacgtcttgcaagcaagaatacgaaagtgcaaattctaacactttatgtgctagagactctaagcaaaaattgtggggatattgttcatcaacagattgttgagcgcgacatattgagtgaaatggttaagatagtaaagaaaaagccagacttgagcgtccgagagaagatattgagtttgattgacacatggcaagtggcttttggaggtccatctggaaaatatcgacagtatcatgcggcttaccaagaactcagggctgctggtgttgattttccgcctcgcgaggaaaattcagtcccgttgtttacaccacctcaaactcaaccattaagacatccacatctatatacacctccaggtcaaagctatgaagatgctgctatacaagcttctcttcagtctgcccctcctgcatctgccctcaggtttctgagtgagattcaaagcgctcgagggattgtggatgtgttagatgaaatgttaaatgctctggaccaccggcatcctgagggtgtaagggaggaggtcattgttgaccttgttggccagtgccgatcctatcaatctcgtgtcatggatcttgttaacagtactggcgacgagagccttttatttcaggctctaggactaaatgatgagttacagcgtgttgttcagcgtcatgatgacatagcaaaggggatccctcctggtactggagcacctttacctgcttctggaaatgtcaaccaagggactgccccacctaggcccactgcggtttcattttctccacttctaaatgtacatgaggacgatgaaccagaagacgagttctctgtgctttcccgcaggtctgcgagggatggtgcagtagcacagaacaatgtgccctctgctccaagaaatgagaggtcatacccaagcccacttcttcctccaccaccagcatctaagaggcctgtttataccgagaagcacatccacctccgagttatggtggcaggccagacagagtatctgacgacttcataaacccaactgcacctagcttctcggcgccttctcgtcctacaaatgaggagccagcccgcccatccgtgaagcggcaagagagcctacctgacgacgacttcataaacccaactgctcttcctggtttctcgtcgtcttcagctactaaggagtctggcgaggaccttccaaaggctccatgggaagcacaagctgccgcgggttccctaccgccgcctccggcgaggtacggccagagacagcagtacttcgagcagaacgtgtattctggcgggagcaacgaaggcggctacaatggactgacgacacagaccgaaggtctctcgctgaacccgcggagcagcgagaacgagaggagcgcggcacggccggcagcgtcccgccctgccaaacctgaggactcgctcttcaaggacctggtcgacttcgcaaagaccaagccttcgtccccgtcgaaaccggccaacagccgcaggacccgctagaacgactcgtgcgatgcatggatggacattgggtcgttcggatattcatttcacaggttagcggcttttagatggtaccatgaaataaggccgtctggagactggttttcattgcatatttgcattgcatgggaaattgttttggttgcgtttagagtggcagatgtcagaaacgttgcttgctcataatcctgggtgtgtgatgtctagttagctgctcctaaatttctgtgtcgttggcttccgattctcattttctttttctttcacttagctgtgtatatatatgttacccgattcgacagcaaatattcatagttgagtttgtgacttgaggaatgaggtgttcctattttcggtattggataaattaggtgcctatttttc

SEQ ID NO: 42666 - DNA, 397 bp, Zea Mays
cttactctccggacatcgcccttcactaccaaacatagtgaatccttcgttagcaatacttgattaacacctgccggtgagattgggagcggaggttaaaggaagacgagcacgttgttccgattaactgaccatactttggttaccacttggccgcgcaattatataccgccttccaagacagtcgtgtagatagatcacaatatatagttgttcctatcgtgctggagtggtgagtgtaacatggattttgggaaatcaagtatgggatcttgacagcaatggtaaaaaggcatcttgccatgtggattatattaaaaataatactttcgaacaaactcattacaaaaaaattaggtaccccagcgtgttgcatttttcaagggataggaggcca

SEQ ID NO: 42667 - DNA, 528 bp, Zea Mays
gtttgcaataccatgttatatattaaattttgttttcaaatacaaaccattacttatttgccatcctagcatggatgtaatacattgtgccacacatcttatcccttacaatacatattatttttctaacaaaacatgacattctcaatattgaatgagaacaatgatgaatctgtgaaccagctagagttggatgttgaaggatgtggacggttttgggacacaacaacaggaggagatccctccaacaaccttgcataccccaataccattctcccccaagacggcacatgttgctccacacaactgctcattgcaattgttagatgtcgagcattgttcccctccaaatagggcacgactgccttggcttgcatgcatggtcgaagcaagaagagctaacaatattggaacaatgagaacagcaagaatcttcttagagcacgccatgaagctctagggatggatttttttcgagtagaggataattagtgccttgatgacgcttgtatgctttctggttttttg

SEQ ID NO: 42668 - DNA, 2417 bp, Zea Mays
aaatttgaaccaaccaagcttcagaagaaaatcaaaacagatgcaacctagggactggaatcatgtgtcaacggatctatcgatgaaaacatgagggtcctcccccatgtggtggagcagatcaagtccaccctcgtccaccggtacacccgcctcatcactgctgcctccgcctcctccccagtttccctacgtgccctcctccccatccatgcccgtgccatcgtcctcggtgtatccgccaacccggccttcgccaccagcctccttgccggtgtggcgcctgcttccctcgcctacgcacgcagggtgttcgatgccacgcctgtacgcgatgcctacatgtggaacactctcctccgtgcacactcccactcccagttgtcacacgccgctgacactctcgccctttacaagcggatgcgtgccgccggtgttgcgccggaccattacacctacccaattgtgctcccggcttgtgcggctgcgcgtgagctgtggcttggacgggccgtgcatggcgacgtagtgcggttcgcgctcgcaggggacgggtttgtgcacagcgctctcatcacgatgtactttcaggaaggggaggtggccgacgctgagctggtctttgcagagagccatggctcatcccggacggtcgtgtcgtggacttccatggttgctggctacgtgcaaaactactactttggggaggcagttgcgctgttcggcacgatgattgctgagggtgtccttcctaatgagatcactctgatcagtttcctgccctgcttgcagggccaagaatggctggatgccggggaaatggttcacgggttcgtgatcaggttggggtttgatgcaaacattccattggctaatgcgctcatcgcaatgtatgggaagtgcgggagcattcccatggcacaaactctgtttgagggaatgccagcacgcagtctggcttcttggaacacgatggttgcaatgtatgaacagcatgctgatgtggttgaggcaatcaagttcttccgcaggatgcttactgagaaagtggggtttgattgtgtgactttggtcagtgttctgtctgcttgcgcacgttcaggagccttgcagactggcaaatgggtgcatgagcttgcccggaatcatgggcttgacacagatgctaggatcggcaatgttcttgttgacatgtatgcaaagtgcggtgagattgctagtgcaaggaatgtctttgactgtttgcgtatgcggagtgttgtgtcctggagtgccatgataagtgcatatgctaaccatggggcttctgaagaggctctcaagctcttctccctgatgaaaaacgaaggggtgagaccaaattctttcacattcactgcagttctagtggcatgtggtcactcaggccttgttgaagaaggactgaagcatttcaacagcatcctttctgactaccaaatgtcacctacactggagcactatgcctgcatggttgacatgctagggcgtgctggtagacttatcgaagcatatgaaatcatcaggggaatgtcgttgtgcccagacaagtgtgtgtggggtgcattccttgcaggttgtaagcttcatgctggaatgttgaaagatgcagaaaggatgaggtgggccatgaaggagatggaactcaataagacagctgggcgtagcgcaattaaccaatagggaaagaataaccgccatgagcttggccaacacaatgaggactactgcatgtgacatctgtgataatggttgctctcgagaatgtacttgtgacatgtgtttgatacatcataatgcatagtagcggaaatgatgtctgttttcttcttcgaggtttgtcaagtatgacatatttggatctgaatacttcctttcaactggttacattcgaaagggacctgggatattgccgtacatttattaaccgaaaaactttgttacttacggatttttgtttggtaaccgacctgcatacactacattgctcgctccaatacaacaccaattctttgggtatctgcatcagctgaacaaaaaatggaatacgagtcaatcctgcctgtgtgcagtcacgaagcacacaggatttaccaaccaagccgcatcgaaggttctgcagataaagaagaggaattggactaacagacggaagaagagatgtgggagtgagggatggaaggacatgtcagaacagtggcgaatctatagccaatatcattatcagggtcacccggaccaattttattaaatcagtagagaattgctgctcattgttatttatcgtcaatactgctagccctgttgtgttaatgtaatgatcctaatgagcttcgtgtttgaattggccactggacaaaataaaatcaggggttttttaaggtggtgccttcgatttt

SEQ ID NO: 42669 - DNA, 1678 bp, Zea Mays
gccggccgaccaagaacggagtcgcatacacgtctgccgccggccgcgcgtccatcgaacttcgaagccaagattgccaagtcatttcccccaaattcctttccccttcgatcctcccctgcaaaccaagtctcaacgaccatggacgtcttcccctgaccgcgccccactgccccagacgccgtcgcctacatccatgagacttcccgatcttcctgcggccgaggatgtcccagcgcgacgtcgactacagttgcggattctgtggataccctctaaacctttcatcttctaaccgaagcacgtctgaagtaggctcctcatataagaagtctctgaagaagggattgatttcattcatttctgttgatctaagccgatttactcaggtggacaaggtatcttgctttcccctcacctggcgcagttacaggccaaaaactaagcttctctgccgaaaatgcggagcatcgatcggctatggatacggtgagccagctgctttgtgcagttttgatccagcaagttcatcttcctccagtacatcccagaagtatttaataaagatccaagcactccaaccttcagacgggacccaaaagcgagtcagagaggagtgcttttggtttgacctgcaagaattggttcaaggttcggaaccttggtcggaaatcactaacattccattgttgttttaaccctgcaatagacaaggagcatgccaagtgcatccctaagacgatggcctagcacaggtggcaattgggtgccctaatttggtggtggtggaactccaaagctgctttaaaattacagatgttggcttggaaagcctttcaaaaggctggcgtgcccgtgctttgaagagtctaaaaccttggttcttgcatgggcatttcggaccaagggatctctggagtctttagcaactgttcaatcatttgcacactaagcattacaggttgcaggcgtctgtctggtgctggattcaaaggctgttcgagttcgttttgttgccttgaagctgagtcttgcatgctttctccagatggtttattggtaaccttgcttttgctaaaagcctctgcgttctgaatctcaggatgtgtcgctacctcacagatgattagcaatagccagtgggtgcccactgcttgaggagtggaaccttgctgtttgccatggtgtccatttacctggctggtctgcaatcgggttgtactgcaataagctaagagtgctgcatatgaaccgcggccggcacatctgtgaccagagtttgctggccctcggcaatggctgtctgtgccttgaggttctgcattaaatggttgcgtcaagatcaccaacaatggcctggctgatgaagtcatatccattggcccttccattgagaacttgttccggctgcattgaggagaaactgtagttaggttttctaagcctggggctaaaagtttagtagccccgtcccattacagctgattatgtgcattgtgtttgctctagtgtatacataacaagacccaccctactcatgtgggaaacatgggcactgggccagccctttaacaatagtgaatcgtaatatacaaatgaactgagcttatgtaaggtgtatttttttcctaatatgctctggcttgctctggtttactggtgcagcagattacttacg

SEQ ID NO: 42670 - DNA, 1025 bp, Zea Mays
gccttatttgctactgggaaaatagcagatttggactgttttggtaggcagtgaggccttatctataggatctgtggtggaattaactggacagcaaaaatccagtggcttcacgccttcaccccagtagcaaatatcaagttttggaccatagtgcatacccaaatgggagacttatctactccctttcctatctgtttactgaacgaagggacggatattttggctgtagaaaaatatcaaccaggtgctgtgtatctgctgaacctgtgaatctgagtgggatgtgagcatgtgagccacatagataagttcatgtattgctggcactctagaaaacactctccactgcatgctgaacaagtgtagggacaccttacccatattcaggtacttatagggcatggatatgggaagcttccttactgtcattgagctctggattccctgcatatgtaaggtggtccttatgccgtcaagatggtgtaacttcctctccccagtctctagccttgatctgaactagagccgagcacgccagccctctccgtggtaaccattgtccacatcacagtggccagaaggagtgaagattcaacctgaagtggtgactgaagaggaatctactccagtggctgctgatcaagtggaggatccatctaactggggtttaatagagggatcgagtacctcttcactgcaataaggtgatgaggagtactctagttgttcctgtggctggaaggcgtttccagttctggaggaggattagttaggattgtgtataagctttggagggttcctaccttcctgctattgtaataagttatgcactttgagtatatcaggacttgtaataaatgtaactcttcctatgcaataaacttcagttttagaaatgaaaagaatcttttataaagtcttccgctcttatctccgaagtgtgtgtgtatcgaatgtgattactgtaatatgcatgtatggtgggagatccttgggatgatgagttcaagttgttgaactcg

SEQ ID NO: 42671 - DNA, 483 bp, Zea Mays
actgaggattgtataccagtctaacacagaactaccaaaccgaccgagccgcgaacttcacccctgccttctctcccttctccgtccaggccctagtgcccgcgaatctcgtgcagcaagtgagcgccgccgccagactacgccaagtgtccagttcctcgtcgggtgatgaggagtactctagttgttcctgtggctggaaggcgtttccagttctggaggaggattagttaggattgtgtataagctttggagggttcctaccttcctgctattgtaataagttatgcactttgagtatatcaggacttgtaataaatgtaactcttcctatgcaataaacttcagttttagaaatgaaaagaatcttttataaagtcttccgctcttatctccgaagtgtgtgtgtatcgaatgtgattactgtaatatgcatgtatggtgggagatccttgggatgatgagttcaagttgttgaactcg

SEQ ID NO: 42672 - DNA, 621 bp, Zea Mays
actgaggattgtataccagtctaacacagaactaccaaaccgaccgagccgcgaacttcacccctgccttctctcccttctccgtccaggccctagtgcccgcgaatctcgtgcagcaagtgagcgccgccgccagactacgccaagtgtccagttcctcgtcggaactcctaccagaaggagtgaagattcaacctgaagtggtgactgaagaggaatctactccagtggctgctgatcaagtggaggatccatctaactggggtttaatagagggatcgagtacctcttcactgcaataaggtgatgaggagtactctagttgttcctgtggctggaaggcgtttccagttctggaggaggattagttaggattgtgtataagctttggagggttcctaccttcctgctattgtaataagttatgcactttgagtatatcaggacttgtaataaatgtaactcttcctatgcaataaacttcagttttagaaatgaaaagaatcttttataaagtcttccgctcttatctccgaagtgtgtgtgtatcgaatgtgattactgtaatatgcatgtatggtgggagatccttgggatgatgagttcaagttgttgaactcg

SEQ ID NO: 42673 - DNA, 255 bp, Zea Mays
actgaggattgtataccagtctaacacagaactaccaaaccgaccgagccgcgaacttcacccctgccttctctcccttctccgtccaggccctagtgcccgcgaatctcgtgcagcaagtgagcgccgccgccagactacgccaagtgtccagttcctcgtcggtgcagttttggagctgtgtagtgcctgttccaggtggctttgaaccaaagtttctgcagcaagtttgaagaacatgggttagagaacaac

SEQ ID NO: 42674 - DNA, 1914 bp, Zea Mays
actgaggattgtataccagtctaacacagaactaccaaaccgaccgagccgcgaacttcacccctgccttctctcccttctccgtccaggccctagtgcccgcgaatctcgtgcagcaagtgagcgccgccgccagactacgccaagtgtccagttcctcgtcggaaaatttgagtattagactctacatgtcaagaaagtatggcgccaagaagcaaggcagagcggaaagcagtactaggtgctggcgcatggatgttcaatgtcgtcacatctgttggtatcatcatggtcaacaaagccttaatggcgacacatggttttagttttggtaggagcatgccaaatcttcattcctaactgcatgcaatgcttgattcacatgcgccttcttttctgtctaaaagtgaactactattgtgcagaaaaatcagtttgcttgtcttgtgctaatttgttcactactttttgctcctacagctacaacactgactgtacttcatttttgcaatgataaccttgatgacgttagtaatggaaacgtgtcacatgatgaatgtcctcagtcctctgctatataaaaagaagaaaatgagtggagtctgccaagcaaacagtctgctaggcaaaataccaaagaccaaaggagactcgcggaaagaaaagagagagtaaaaaagataaaaagaagaaagaggaagagtcacaattattcaacatacatctctgaacatcctttgctaatgagtagattaaaacattaataaaacatttgcatgtagattatcaacaaaagagaatacactaaccatttgaaataattaattatattcatatgatattcattgctcactcatattttttatcaataataaaagacatcttggttccatagccttgccatttgcttctcgagaggcatctccatattcccttcgcgagcttaagaaaaatataaagttccaacaattatgcaatattttccttcttcaagtcctaatattgtactgactgcaaggtgtaggaaaaaggttacctgaactctttccatgcataaataaaaacatgtcgtatgaataacttacatggaaaaaatataattgtaccatcaaaacatctttggaaggtacacaatagcagtcctagcgacctactctctctacagtcagtcagtcacatataagtgaccttttgcaattgttttaggccaaccatttcaaacataggttgcatattaccttttattcagagtagcaaatgcacttgcatgaagtaaaatatgatggatagaagaatccacttttcctttaatattaggtatatatatacatgggaaaatggtctgagtatttttgtttctcaatgtagttccataaaaatatatttttgcttactgtctccaatcaccaaaaaatttagggaaagatttagtaccatccacttgatcactataaatatttgtttcatccaacccgccgacaatataatgcctacatacataacagaaaattaaatacccaagcccatagctaactaatggtgcgccaacggtgcaccatactttctagtaatactataaatacaataatgctaagacaatacttcaaatacttgctaaacaaatatacaatataaaatgcttgatttaagtgcagaatgtaaagcaaggtttagaagactcctccaatttttctcgaggtatcgaagagtgggcactctctcctagtcctcgttggagcacccgcgcaaggatatcgctccccttggtcctcgcaagaaccaagtgctcactacgagatgatcttttgccactccggtgcggtggatccctcatgaccgcttacaaacttgagtcgggtcaccaacaagatctccacggtgatcaccgagctcccaacgccaccaaaccatcta

SEQ ID NO: 42675 - DNA, 957 bp, Zea Mays
cttgttcattttaacagtttagaaaatatatgatgtgtagattattatgtcaactacaaaggaccatcctggcaaatgatatcagttcttcatgctaaagccatttgttgcattatagttttcctgagaaaaagcccaagggtagcattttgtggatataccatccctcatccttctgagaagaaagtgaacataagacttcagacaacaggagatgcagcaaaggatgtactgaaagatgccttgcagaatctgatgattatgtgccagcatgtcagagggacaatggacaccgcggtggttaaccatagagcaaaaaatgctgcagaagaaatggatgttgatcagaactagaatgaacgcagtgtttgttgagaccaaacacaatatcattacagcttttagtactggtcagaagctcggagagctcagtcattgttccagttgtttgtaggagtaacggtcgtattcattggcttccacttctgcaatactgaaacttcttcagtttactgcataattgcttttagcaacatctatactactgcttatgtctttagtgtaggcgtccatattttttgttctgccatcgtgcggtctgcctccctccccgtgcccacagtccccaccgccgagcacagccgccgcgcccgcagtcctgcggtccccgccgccgagcacagccgccgcagtctcgccgcgcccgcagtgcgacggcggtgccggtgagggggagccgtggttctacttctgcccgtggcaggagcgggaggcgcggggcgggcggcccagccggacgacgctgttggggtactggaaggccgctggtacgctcggggccgtctactccgccgaccgccgcgccatcggggtgaagaagaccatggtgttctattacggccgcgcgccgtcagggaccaagaccaagtggaagatgaacgagtacatggcgttcca

SEQ ID NO: 42676 - DNA, 860 bp, Zea Mays
aagatgatgctcagaggatgaaacaagcagcaaagtacccaagggtagcattttgtggatataccatccctcatccttctgagaagaaagtgaacataagacttcagacaacaggagatgcagcaaaggatgtactgaaagatgccttgcagaatctgatgattatgtgccagcatgtcagagggacaatggacaccgcggtggttaaccatagagcaaaaaatgctgcagaagaaatggatgttgatcagaactagaatgaacgcagtgtttgttgagaccaaacacaatatcattacagcttttagtactggtcagaagctcggagagctcagtcattgttccagttgtttgtaggagtaacggtcgtattcattggcttccacttctgcaatactgaaacttcttcagtttactgcataattgcttttagcaacatctatactactgcttatgtctttagtgtaggcgtccatattttttgttctgccatcgtgcggtctgcctccctccccgtgcccacagtccccaccgccgagcacagccgccgcgcccgcagtcctgcggtccccgccgccgagcacagccgccgcagtctcgccgcgcccgcagtgcgacggcggtgccggtgagggggagccgtggttctacttctgcccgtggcaggagcgggaggcgcggggcgggcggcccagccggacgacgctgttggggtactggaaggccgctggtacgctcggggccgtctactccgccgaccgccgcgccatcggggtgaagaagaccatggtgttctattacggccgcgcgccgtcagggaccaagaccaagtggaagatgaacgagtacatggcgttcca

SEQ ID NO: 42677 - DNA, 1023 bp, Zea Mays
gtttatccggcttctgaagggcgccttcggttttgtgcataggctcattgggttgctaactgtccgctgctcgcccgaccggagtgaggcggcgcggcgatggagcacgggtcgttgacagactcgacgtcgtcgactttctccatcatggacgaggaccacaccctcgccaactccgccagattcgtcctcaaccaggacccaagggtagcattttgtggatataccatccctcatccttctgagaagaaagtgaacataagacttcagacaacaggagatgcagcaaaggatgtactgaaagatgccttgcagaatctgatgattatgtgccagcatgtcagagggacaatggacaccgcggtggttaaccatagagcaaaaaatgctgcagaagaaatggatgttgatcagaactagaatgaacgcagtgtttgttgagaccaaacacaatatcattacagcttttagtactggtcagaagctcggagagctcagtcattgttccagttgtttgtaggagtaacggtcgtattcattggcttccacttctgcaatactgaaacttcttcagtttactgcataattgcttttagcaacatctatactactgcttatgtctttagtgtaggcgtccatattttttgttctgccatcgtgcggtctgcctccctccccgtgcccacagtccccaccgccgagcacagccgccgcgcccgcagtcctgcggtccccgccgccgagcacagccgccgcagtctcgccgcgcccgcagtgcgacggcggtgccggtgagggggagccgtggttctacttctgcccgtggcaggagcgggaggcgcggggcgggcggcccagccggacgacgctgttggggtactggaaggccgctggtacgctcggggccgtctactccgccgaccgccgcgccatcggggtgaagaagaccatggtgttctattacggccgcgcgccgtcagggaccaagaccaagtggaagatgaacgagtacatggcgttcca

SEQ ID NO: 42678 - DNA, 1007 bp, Zea Mays
ggcttgagtggtggtgctaaagtctccatgggatgagcttgagcagtccgctgctcgcccgaccggagtgaggcggcgcggcgatggagcacgggtcgttgacagactcgacgtcgtcgactttctccatcatggacgaggaccacaccctcgccaactccgccagattcgtcctcaaccaggacccaagggtagcattttgtggatataccatccctcatccttctgagaagaaagtgaacataagacttcagacaacaggagatgcagcaaaggatgtactgaaagatgccttgcagaatctgatgattatgtgccagcatgtcagagggacaatggacaccgcggtggttaaccatagagcaaaaaatgctgcagaagaaatggatgttgatcagaactagaatgaacgcagtgtttgttgagaccaaacacaatatcattacagcttttagtactggtcagaagctcggagagctcagtcattgttccagttgtttgtaggagtaacggtcgtattcattggcttccacttctgcaatactgaaacttcttcagtttactgcataattgcttttagcaacatctatactactgcttatgtctttagtgtaggcgtccatattttttgttctgccatcgtgcggtctgcctccctccccgtgcccacagtccccaccgccgagcacagccgccgcgcccgcagtcctgcggtccccgccgccgagcacagccgccgcagtctcgccgcgcccgcagtgcgacggcggtgccggtgagggggagccgtggttctacttctgcccgtggcaggagcgggaggcgcggggcgggcggcccagccggacgacgctgttggggtactggaaggccgctggtacgctcggggccgtctactccgccgaccgccgcgccatcggggtgaagaagaccatggtgttctattacggccgcgcgccgtcagggaccaagaccaagtggaagatgaacgagtacatggcgttcca

SEQ ID NO: 42679 - DNA, 1087 bp, Zea Mays
ctgatgctgtttttaatcatgctacagtagaatcgtccatcctgctcgcttgtctttctgagctgtgcatgcacaacgatttgggcttgagtggtggtgctaaagtctccatgggatgagcttgagtccgctgctcgcccgaccggagtgaggcggcgcggcgatggagcacgggtcgttgacagactcgacgtcgtcgactttctccatcatggacgaggaccacaccctcgccaactccgccagattcgtcctcaaccaggacccaagggtagcattttgtggatataccatccctcatccttctgagaagaaagtgaacataagacttcagacaacaggagatgcagcaaaggatgtactgaaagatgccttgcagaatctgatgattatgtgccagcatgtcagagggacaatggacaccgcggtggttaaccatagagcaaaaaatgctgcagaagaaatggatgttgatcagaactagaatgaacgcagtgtttgttgagaccaaacacaatatcattacagcttttagtactggtcagaagctcggagagctcagtcattgttccagttgtttgtaggagtaacggtcgtattcattggcttccacttctgcaatactgaaacttcttcagtttactgcataattgcttttagcaacatctatactactgcttatgtctttagtgtaggcgtccatattttttgttctgccatcgtgcggtctgcctccctccccgtgcccacagtccccaccgccgagcacagccgccgcgcccgcagtcctgcggtccccgccgccgagcacagccgccgcagtctcgccgcgcccgcagtgcgacggcggtgccggtgagggggagccgtggttctacttctgcccgtggcaggagcgggaggcgcggggcgggcggcccagccggacgacgctgttggggtactggaaggccgctggtacgctcggggccgtctactccgccgaccgccgcgccatcggggtgaagaagaccatggtgttctattacggccgcgcgccgtcagggaccaagaccaagtggaagatgaacgagtacatggcgttcca

SEQ ID NO: 42680 - DNA, 908 bp, Zea Mays
cctatgtgctataacgactggactgttgtgcaggtgcttcatggctttatggagccctatttccgtggtacagtttctccaatgatggatgggccttatgacgctattgaattagagacaagaatttccaagctaaaagaatccatgtgcaatttacacagcctacaaatgaagttgaaggtacctgaggatgaaccactgcaaactaacatcagggcatctctactgtggtccgagaaagaaagttttgaagagtataatgagtcttttatccctggacgcccagaacgtctctcatttgctgcgtaccaaacagtttcaggcatgtcagatgaacttctcactgtgcaaaactacaagatacaagcaatggattcgacagacacccttgaaaggctgaacactggtatcaagtttgtagaacataacatcggaatgatagccgcaaggcttgccattcaaaatatatgatcctcattggcagtgtttagttcatatgctaaatgatgtccgtgatgctaactccatctggtcgtaaaaaagaactcaaagcttttcaagtttcaactgtaaacgtggaaggtctgatctggtacattcggataacttctgacataactttgatatacattcagagaacagtacgaagatgaagaacacaatatgaagttgcctgctcatttaaatttgcatggataagctaacagaaaacaccatataagttgttcaagcatccagtacaacattattccatcagataaactatgcaactgtttatcaggtattgagatagaacataaaaaatgtctgatcagacaaaacataccataccatcttcagtgttcttaaggcgtcgcctaagcgtccaggcgctcgggcaaaggtggttgcctggtgcatttgctcgc

SEQ ID NO: 42681 - DNA, 879 bp, Zea Mays
tgatgggaatcaaggcaagatggagccctatttccgtggtacagtttctccaatgatggatgggccttatgacgctattgaattagagacaagaatttccaagctaaaagaatccatgtgcaatttacacagcctacaaatgaagttgaaggtacctgaggatgaaccactgcaaactaacatcagggcatctctactgtggtccgagaaagaaagttttgaagagtataatgagtcttttatccctggacgcccagaacgtctctcatttgctgcgtaccaaacagtttcaggcatgtcagatgaacttctcactgtgcaaaactacaagatacaagcaatggattcgacagacacccttgaaaggctgaacactggtatcaagtttgtagaacataacatcggaatgatagccgcaaggcttgccattcaaaatatatgatcctcattggcagtgtttagttcatatgctaaatgatgtccgtgatgctaactccatctggtcgtaaaaaagaactcaaagcttttcaagtttcaactgtaaacgtggaaggtctgatctggtacattcggataacttctgacataactttgatatacattcagagaacagtacgaagatgaagaacacaatatgaagttgcctgctcatttaaatttgcatggataagctaacagaaaacaccatataagttgttcaagcatccagtacaacattattccatcagataaactatgcaactgtttatcaggtattgagatagaacataaaaaatgtctgatcagacaaaacataccataccatcttcagtgttcttaaggcgtcgcctaagcgtccaggcgctcgggcaaaggtggttgcctggtgcatttgctcgc

SEQ ID NO: 42682 - DNA, 1234 bp, Zea Mays
gacgcaacgaaaaactgacaaagtttgctctatagcccagagttgatgttcttcagcgctaaggcagacgacagtagcatctgtttccaaatcttttctgaattcaagcattttaggtgttgataccatctgaatcgaagactctacacttgtatgaagcaagatatatagcattgcttgaggaggccttgtacaagagggaaaaatcttttgttcactttgtgcttgatccagttgtagatagctctactaaagcttcatttgctgtaagatatggctgcttggtccacatagaaagtgttcaaaagctggagattggagcgttgttatcaattagaggagtgtgccgtgtaaacatttcgaatcttttggatatggagccctatttccgtggtacagtttctccaatgatggatgggccttatgacgctattgaattagagacaagaatttccaagctaaaagaatccatgtgcaatttacacagcctacaaatgaagttgaaggtacctgaggatgaaccactgcaaactaacatcagggcatctctactgtggtccgagaaagaaagttttgaagagtataatgagtcttttatccctggacgcccagaacgtctctcatttgctgcgtaccaaacagtttcaggcatgtcagatgaacttctcactgtgcaaaactacaagatacaagcaatggattcgacagacacccttgaaaggctgaacactggtatcaagtttgtagaacataacatcggaatgatagccgcaaggcttgccattcaaaatatatgatcctcattggcagtgtttagttcatatgctaaatgatgtccgtgatgctaactccatctggtcgtaaaaaagaactcaaagcttttcaagtttcaactgtaaacgtggaaggtctgatctggtacattcggataacttctgacataactttgatatacattcagagaacagtacgaagatgaagaacacaatatgaagttgcctgctcatttaaatttgcatggataagctaacagaaaacaccatataagttgttcaagcatccagtacaacattattccatcagataaactatgcaactgtttatcaggtattgagatagaacataaaaaatgtctgatcagacaaaacataccataccatcttcagtgttcttaaggcgtcgcctaagcgtccaggcgctcgggcaaaggtggttgcctggtgcatttgctcgc

SEQ ID NO: 42683 - DNA, 1443 bp, Zea Mays
aaaagaaaacagtaggaaaatggttcctttcagcattatctccgtttgctgtcccgccaacgcacggaccattcccatccgctgaaaatctctccaccccggccccggccccggccgcggccatggcggcctccgctcccatccacctcctcctctcgccctcccgctctacatggccgccacaagatccgagcctgaggcccataccgcccctccacgcgtggccggcgcgccaacgccatctccgcgctgcccgctgcgcgttgtcgccgcctacgccgtcgctcgacctcccgctcctcccgttccagcctgcggaggtgttgataccatctgaatcgaagactctacacttgtatgaagcaagatatatagcattgcttgaggaggccttgtacaagagggaaaaatcttttgttcactttgtgcttgatccagttgtagatagctctactaaagcttcatttgctgtaagatatggctgcttggtccacatagaaagttgtaggttcaaaagctggagattggagcgttgttatcaattagaggagtgtgccgtgtaaacatttcgaatcttttggatatggagccctatttccgtggtacagtttctccaatgatggatgggccttatgacgctattgaattagagacaagaatttccaagctaaaagaatccatgtgcaatttacacagcctacaaatgaagttgaaggtacctgaggatgaaccactgcaaactaacatcagggcatctctactgtggtccgagaaagaaagttttgaagagtataatgagtcttttatccctggacgcccagaacgtctctcatttgctgcgtaccaaacagtttcaggcatgtcagatgaacttctcactgtgcaaaactacaagatacaagcaatggattcgacagacacccttgaaaggctgaacactggtatcaagtttgtagaacataacatcggaatgatagccgcaaggcttgccattcaaaatatatgatcctcattggcagtgtttagttcatatgctaaatgatgtccgtgatgctaactccatctggtcgtaaaaaagaactcaaagcttttcaagtttcaactgtaaacgtggaaggtctgatctggtacattcggataacttctgacataactttgatatacattcagagaacagtacgaagatgaagaacacaatatgaagttgcctgctcatttaaatttgcatggataagctaacagaaaacaccatataagttgttcaagcatccagtacaacattattccatcagataaactatgcaactgtttatcaggtattgagatagaacataaaaaatgtctgatcagacaaaacataccataccatcttcagtgttcttaaggcgtcgcctaagcgtccaggcgctcgggcaaaggtggttgcctggtgcatttgctcgc

SEQ ID NO: 42684 - DNA, 1440 bp, Zea Mays
caaaaagaaaacagtaggaaaatggttcctttcagcattatctccgtttgctgtcccgccaacgcacggaccattcccatccgctgaaaatctctccaccccggccccggccccggccgcggccatggcggcctccgctcccatccacctcctcctctcgccctcccgctctacatggccgccacaagatccgagcctgaggcccataccgcccctccacgcgtggccggcgcgccaacgccatctccgcgctgcccgctgcgcgttgtcgccgcctacgccgtcgctcgacctcccgctcctcccgttccagcctgcggaggtgttgataccatctgaatcgaagactctacacttgtatgaagcaagatatatagcattgcttgaggaggccttgtacaagagggaaaaatcttttgttcactttgtgcttgatccagttgtagatagctctactaaagcttcatttgctgtaagatatggctgcttggtccacatagaaagtgttcaaaagctggagattggagcgttgttatcaattagaggagtgtgccgtgtaaacatttcgaatcttttggatatggagccctatttccgtggtacagtttctccaatgatggatgggccttatgacgctattgaattagagacaagaatttccaagctaaaagaatccatgtgcaatttacacagcctacaaatgaagttgaaggtacctgaggatgaaccactgcaaactaacatcagggcatctctactgtggtccgagaaagaaagttttgaagagtataatgagtcttttatccctggacgcccagaacgtctctcatttgctgcgtaccaaacagtttcaggcatgtcagatgaacttctcactgtgcaaaactacaagatacaagcaatggattcgacagacacccttgaaaggctgaacactggtatcaagtttgtagaacataacatcggaatgatagccgcaaggcttgccattcaaaatatatgatcctcattggcagtgtttagttcatatgctaaatgatgtccgtgatgctaactccatctggtcgtaaaaaagaactcaaagcttttcaagtttcaactgtaaacgtggaaggtctgatctggtacattcggataacttctgacataactttgatatacattcagagaacagtacgaagatgaagaacacaatatgaagttgcctgctcatttaaatttgcatggataagctaacagaaaacaccatataagttgttcaagcatccagtacaacattattccatcagataaactatgcaactgtttatcaggtattgagatagaacataaaaaatgtctgatcagacaaaacataccataccatcttcagtgttcttaaggcgtcgcctaagcgtccaggcgctcgggcaaaggtggttgcctggtgcatttgctcgc

SEQ ID NO: 42685 - DNA, 586 bp, Zea Mays
atgctgccattagctatccaggacattgatgaatctgacgaacacattgaagaggataccactgcgcctgctgacagtccatgcgaagttgaggaacggtcacctgtggatcctgtgcctgatcgaccagaaaatgagtgtgcaagttcagatatcaggactctgactgtaaaagcctctaagaagcacgagcaacccttgcttgggactaaatcagagggccacattgagtatgacgagagacaggctcaagtcagaaaactggaagaacatcgcatctgacatctactcatacagcagttgacagctccagtggaccaaagacaccaagaaaacatgcagatgttactgctaccaccaagttcagtaacccagagacaaaaatcaggcctacagttacatcagttgtgcaaaatgttaaggagatcagatcgccctcagcataaactgtgccatctccatcacttccttcagggaaacataccgacagcaagatgacagggaacaatgttggcaacaatgctcaaatccttccaaagaagagataagacaaggttaaaacaggcccactgaaactgtctcgatc

SEQ ID NO: 42686 - DNA, 1671 bp, Zea Mays
aagaaccctaggaaataacaggagaggggacgcgcgctcactagcaaaatgcaggcctcttccctccggcgagccctccttctgcggggaccgcgaggcgcccagctcttccccattcccgtaggcaacaagccccgtgccttctcctccgcgtcccccgcggcagcgcgctctcccaaagacgctcataatgcgccgccgccgattatgccgacgctgccgtggggtgatgcgctcgcagccacgcagcgcaccttctgcctgccgctcgctgggcgcgtcctcgccgcctcggcgaccgagaacgcggccgtggcccccgtcgcagtctacgcctcgctggccctggccgccgccggcgcgcgcggcgacacgcggcggcaggtcctccaggcgctgggcggcggcggcgggggcaggggcgccgcggttcaagcggccaacttggcgtcgcgcgtggtcaagcgggtgttcaaggaccggtccacgtccggcggcccgcggctggccttcgcaggaggaatatgggccgacacctcaacgagcctatcgccggggttcgtggaggccgcccgtagtgtctacagctgcacggcgcggacggctgacttcattaacaagatgccgccaagctaattaacatgtgggtcaaacaatccacaaaagatactgttacctcgctccttccggatggactaattgacaagaatacaggacttgttattggcagcgcactgtattttaggggaagatggcttgacaggactgatacgaggagtgacgcggtacaaaaattctgctgtctggatcgaacttgtgttgacgttccttttgtggaatatgatagaactcgacctttcgcagtccacgatggatttaaagtgattaagcttccttaccagcaaggaaataatgaacggaagttctccatgtacatcttcctgcctgatgctcatgatggcttgtttgaattagctaagaaagttttcgcggaaccatcattcttagaacaacacttgccaactgagaagcggcacgtggatatcaagattcccaagttcacagtgtcattccaggtcaatatgaagcagtttctgaaagaaatgggcctcgaattacccttcctccgtgatgcagatttcactgatatggtcaaggaagatggatccagaaatccgttgtatctatccgacatacttcataaagcagttttggaggttaatgatgaaggcgttgaagaaacttctgtgagaattggcatagggaagccctcaccaggagagcactttgttgccgaccatcctttcttctttgtcattagggaggaggtgtctggctcagtaatgttcatggggcacatactggacccatcatcacaatcttaatttcgggctctgcacttttgtcacctatatattacacatatatcttgtatgatctgactttgtcagtctggttcaatgagatttttagtacttgagtaattcatgtagtggttcgtagttgtttgctttgtttttagtaacatatgagcatatagctactgtactaaactttacatcgtctcctgtgggaaaccatatgaagacaatgcatgcatgtgctcatgtatatcagttttgctttgcagaaatctgtagtcttgtccaatttataaaatagatttttttt

SEQ ID NO: 42687 - DNA, 2248 bp, Zea Mays
cagaatcttgtctctccacaagtccacagtgaaaaccatattttattgcgccaggtaaactttttgagcaagctcgttgctcttaaacctgggaaggcattggaaaggatgataaagaatgttatgaatggcagaggggaaggtgctgataacgttgaacaaccaagtgctgattcacattctgaacaggagagtctaacaggagtattaggaaggggaagtgtatctggccacaagccacggccagtccgccctggaatgttccttgagactgtttccaaggtcctgggtggcgtatatgcaagtaacacatctggtattacagctcaacatctggaatgggtacatcagacaacactcaaaattcttcaggaaatggccttctagcattgttatcagggttcactgatatagtttgtaacataagaagtataatgctgcacatccgtagctattgaaggtacatgatatcaaatagccttgtgtgcaccaaggtatgttctgttttcttcttaccggatgcactggtcctactgatccctctgtgtttgttattacagagcctttttaagtggtcacatatctttttgttgagaagtggagtggaagaaacgataatgggttatctaaagccatagatcactcaggggaagaatgttgccacgttgtgcagtccagaagtaacttacaggcttggaattgatatgaccatgtggttgcccttgccaattgactaattttaagtactagactcagtaacatatttgaggcgtaatatcattattattgacattagtcttgttccttggcaatctgtcttatcttttcgcacatttttctggacttgtgattctttattcgtcatgggtgatatatggttagaagaagctacaattaacagtggtatattggaatacgatataatgtggctacatgaatataacctcaggtcttttctccagtcggcaacaggcaaataatgggggaaatatgtgtgtgggaggggctggagagaccacatcttctgtacaaacatagaaactaattcaggataatgcacttgtgtaactcaaggttttgtaacttggcatatttacggttcacacatatatacacacacgaaaaagttgggatgcacaagcagtttggaagaattcttattacttctagttaaaagccactgggaattggagctccctccgcgcttcgcgctcgcacgctatccgcccagccgacgcgtggcccgcgctcccggcttctctcacagtacaccactgtccactgctttagtttttttctctccgctgcactagaacattctctctcttgtaaacttcatagttcctacttccgagcgagtagctaacacagccgccgagtagcttcaagtcattcaccgtggaggaccgcccgggggagcagtgggtgcgcctccacgccagcgcgggagggggaggcgaggaggtgaaggtcgaggccaccatgttcgacggcgctgcggagcgtgtcccggacgacgcgcccctcttccgccgcgtcgagtcgctcgagcgcgggccccgcctccacctcagcctcatcgtcgaggtcgcccggggcgaccgcgtcctcggcttcgtctgctccgcctggcccgacgacctcgccgtccgccacgtgctcacgttcgcagctagcggcggcagcagtggtggtggtcgtcgtggtgggcgcgatttcgagaaactatggggcgaggagagggaagcagtgacgaagttcttgaaggagaggcattgaatcaattcttggttgtgtaatgttgttttagaaaaaaaaatgggtttcttaccagttccacaagtcgttgaaaaaataatttaactgtttactacatggtgaacccacaatcaatctttttttcctgaaatgacttcaaagtttctaaaaatactaaaaaaagtgctagctacaggtcatatagagcaacatcttccatcttatggagcataatcagtttcactaatatacggccaaccatactatggtacttttctcataccattttttgaagcttcttttttttcttttctcataccattacttgatgatgatattgacaggcaatttatttccacatctgttagaccaagagagtcatcttctccaatgactgaaatgagatgagggagagaaaaattccagttcttgtcgggattacaatattatttgttgttcatgtatctggattttactggtgttacaagtt

SEQ ID NO: 42688 - DNA, 2795 bp, Zea Mays
gtcaggatgcccttccaccgtttcttgggttgcttcactgaatcactgacggagattactaatggaggacatggagatggatggtgcatttgagcaggttgctgtggagctggtggcacaaggagttattgggaagagggtggatgagatggagtcaggttttcttatggcacttgattacatgatacaacttgcacagaaggacacagatgatgagcgtaagtctattcttgaggtaattaagcagacagtgctagaccatctgacgaagaaatgtcctccacatgtccaggttgttgggctactttgccagactgaaaagaaagagagcagacatgaattgttgcgccgcgtagctgctggtggaggtgtttttaagaacgataaaggtcttaagtgccaaattcctggggcaaatcttaatgacattgcaaatcaggcagatgatctagtagagtcaatggaatctagggacaccattcctgatcgaaaacttcttgcaagattagttatagtaagagaagaagctcggaatatgatgggaggtggcctgttagatgagagaaatgatcgtggtttgactaccctccctgaggcagaggtaaactttttgagcaagctcgttgctcttaaacctgggaaggcattggaaaggatgataaagaatgttatgaatggcagaggggaaggtgctgataacgttgaacaaccaagtgctgattcacattctgaacaggagagtctaacaggagtattaggaaggggaagtgtatctggccacaagccacggccagtccgccctggaatgttccttgagactgtttccaaggtcctgggtggcgtatatgcaagtaacacatctggtattacagctcaacatctggaatgggtacatcagacaacactcaaaattcttcaggaaatggccttctagcattgttatcagggttcactgatatagtttgtaacataagaagtataatgctgcacatccgtagctattgaaggtacatgatatcaaatagccttgtgtgcaccaaggtatgttctgttttcttcttaccggatgcactggtcctactgatccctctgtgtttgttattacagagcctttttaagtggtcacatatctttttgttgagaagtggagtggaagaaacgataatgggttatctaaagccatagatcactcaggggaagaatgttgccacgttgtgcagtccagaagtaacttacaggcttggaattgatatgaccatgtggttgcccttgccaattgactaattttaagtactagactcagtaacatatttgaggcgtaatatcattattattgacattagtcttgttccttggcaatctgtcttatcttttcgcacatttttctggacttgtgattctttattcgtcatgggtgatatatggttagaagaagctacaattaacagtggtatattggaatacgatataatgtggctacatgaatataacctcaggtcttttctccagtcggcaacaggcaaataatgggggaaatatgtgtgtgggaggggctggagagaccacatcttctgtacaaacatagaaactaattcaggataatgcacttgtgtaactcaaggttttgtaacttggcatatttacggttcacacatatatacacacacgaaaaagttgggatgcacaagcagtttggaagaattcttattacttctagttaaaagccactgggaattggagctccctccgcgcttcgcgctcgcacgctatccgcccagccgacgcgtggcccgcgctcccggcttctctcacagtacaccactgtccactgctttagtttttttctctccgctgcactagaacattctctctcttgtaaacttcatagttcctacttccgagcgagtagctaacacagccgccgagtagcttcaagtcattcaccgtggaggaccgcccgggggagcagtgggtgcgcctccacgccagcgcgggagggggaggcgaggaggtgaaggtcgaggccaccatgttcgacggcgctgcggagcgtgtcccggacgacgcgcccctcttccgccgcgtcgagtcgctcgagcgcgggccccgcctccacctcagcctcatcgtcgaggtcgcccggggcgaccgcgtcctcggcttcgtctgctccgcctggcccgacgacctcgccgtccgccacgtgctcacgttcgcagctagcggcggcagcagtggtggtggtcgtcgtggtgggcgcgatttcgagaaactatggggcgaggagagggaagcagtgacgaagttcttgaaggagaggcattgaatcaattcttggttgtgtaatgttgttttagaaaaaaaaatgggtttcttaccagttccacaagtcgttgaaaaaataatttaactgtttactacatggtgaacccacaatcaatctttttttcctgaaatgacttcaaagtttctaaaaatactaaaaaaagtgctagctacaggtcatatagagcaacatcttccatcttatggagcataatcagtttcactaatatacggccaaccatactatggtacttttctcataccattttttgaagcttcttttttttcttttctcataccattacttgatgatgatattgacaggcaatttatttccacatctgttagaccaagagagtcatcttctccaatgactgaaatgagatgagggagagaaaaattccagttcttgtcgggattacaatattatttgttgttcatgtatctggattttactggtgttacaagtt

SEQ ID NO: 42689 - DNA, 2845 bp, Zea Mays
aagaagcctcttagcctcaaaccgccaagaatggaatggatagatctgcagcaacccctcccagaacctctgactttgcttcccatcgcttcgtttccaagaggagaatgtttctctcccttgcccagtcgcctgcctgcgccgtcgtctccttcccatggaggtcctcgtcccaactcatcccacgggtcccctcccgctgcaccctcgcatgccacgcagcggtgcccaaagtgcccctccccatcgcctcgccggcctccctcggggacgaccctagcaagtgggaccccgccgagtgcgacgctctcctccgcggcggggagcaggtcgcctccgtgctgcaggagatggtcacgctgatggaggacatggagatggatggtgcatttgagcaggttgctgtggagctggtggcacaaggagttattgggaagagggtggatgagatggagtcaggttttcttatggcacttgattacatgatacaacttgcacagaaggacacagatgatgagcgtaagtctattcttgaggtaattaagcagacagtgctagaccatctgacgaagaaatgtcctccacatgtccaggttgttgggctactttgccagactgaaaagaaagagagcagacatgaattgttgcgccgcgtagctgctggtggaggtgtttttaagaacgataaaggtcttaagtgccaaattcctggggcaaatcttaatgacattgcaaatcaggcagatgatctagtagagtcaatggaatctagggacaccattcctgatcgaaaacttcttgcaagattagttatagtaagagaagaagctcggaatatgatgggaggtggcctgttagatgagagaaatgatcgtggtttgactaccctccctgaggcagaggtaaactttttgagcaagctcgttgctcttaaacctgggaaggcattggaaaggatgataaagaatgttatgaatggcagaggggaaggtgctgataacgttgaacaaccaagtgctgattcacattctgaacaggagagtctaacaggagtattaggaaggggaagtgtatctggccacaagccacggccagtccgccctggaatgttccttgagactgtttccaaggtcctgggtggcgtatatgcaagtaacacatctggtattacagctcaacatctggaatgggtacatcagacaacactcaaaattcttcaggaaatggccttctagcattgttatcagggttcactgatatagtttgtaacataagaagtataatgctgcacatccgtagctattgaagagcctttttaagtggtcacatatctttttgttgagaagtggagtggaagaaacgataatgggttatctaaagccatagatcactcaggggaagaatgttgccacgttgtgcagtccagaagtaacttacaggcttggaattgatatgaccatgtggttgcccttgccaattgactaattttaagtactagactcagtaacatatttgaggcgtaatatcattattattgacattagtcttgttccttggcaatctgtcttatcttttcgcacatttttctggacttgtgattctttattcgtcatgggtgatatatggttagaagaagctacaattaacagtggtatattggaatacgatataatgtggctacatgaatataacctcaggtcttttctccagtcggcaacaggcaaataatgggggaaatatgtgtgtgggaggggctggagagaccacatcttctgtacaaacatagaaactaattcaggataatgcacttgtgtaactcaaggttttgtaacttggcatatttacggttcacacatatatacacacacgaaaaagttgggatgcacaagcagtttggaagaattcttattacttctagttaaaagccactgggaattggagctccctccgcgcttcgcgctcgcacgctatccgcccagccgacgcgtggcccgcgctcccggcttctctcacattcctacttccgagcgagtagctaacacagccgccgagtagcttcaagtcattcaccgtggaggaccgcccgggggagcagtgggtgcgcctccacgccagcgcgggagggggaggcgaggaggtgaaggtcgaggccaccatgttcgacggcgctgcggagcgtgtcccggacgacgcgcccctcttccgccgcgtcgagtcgctcgagcgcgggccccgcctccacctcagcctcatcgtcgaggtcgcccggggcgaccgcgtcctcggcttcgtctgctccgcctggcccgacgacctcgccgtccgccacgtgctcacgttcgcagctagcggcggcagcagtggtggtggtcgtcgtggtgggcgcgatttcgagaaactatggggcgaggagagggaagcagtgacgaagttcttgaaggagaggcattgaatcaattcttggttgtgtaatgttgttttagaaaaaaaaatgggtttcttaccagttccacaagtcgttgaaaaaataatttaactgtttactacatggtgaacccacaatcaatctttttttcctgaaatgacttcaaagtttctaaaaatactaaaaaaagtgctagctacaggtcatatagagcaacatcttccatcttatggagcataatcagtttcactaatatacggccaaccatactatggcaatttatttccacatctgttagaccaagagagtcatcttctccaatgactgaaatgagatgagggagagaaaaattccagttcttgtcgggattacaatattatttgttgttcatgtatctggattttactggtgttacaagtt

SEQ ID NO: 42690 - DNA, 1637 bp, Zea Mays
aagaagcctcttagcctcaaaccgccaagaatggaatggatagatctgcagcaacccctcccagaacctctgactttgcttcccatcgcttcgtttccaagaggagaatgtttctctcccttgcccagtcgcctgcctgcgccgtcgtctccttcccatggaggtcctcgtcccaactcatcccacgggtcccctcccgctgcaccctcgcatgccacgcagcggtgcccaaagtgcccctccccatcgcctcgccggcctccctcggggacgaccctagcaagtgggaccccgccgagtgcgacgctctcctccgcggcggggagcaggtcgcctccgtgctgcaggagatggtcacgctgatggaggacatggagatggatggtgcatttgagcaggttgctgtggagctggtggcacaaggagttattgggaagagggtggatgagatggagtcaggttttcttatggcacttgattacatgatacaacttgcacagaaggacacagatgatgagcgtaagtctattcttgaggtaattaagcagacagtgctagaccatctgacgaagaaatgtcctccacatgtccaggttgttgggctactttgccagactgaaaagaaagagagcagacatgaattgttgcgccgcgtagctgctggtggaggtgtttttaagaacgataaaggtcttaagtgccaaattcctggggcaaatcttaatgacattgcaaatcaggcagatgatctagtagagtcaatggaatctagggacaccattcctgatcgaaaacttcttgcaagattagttatagtaagagaagaagctcggaatatgatgggaggtggcctgttagatgagagaaatgatcgtggtttgactaccctccctgaggcagaggtaaactttttgagcaagctcgttgctcttaaacctgggaaggcattggaaaggatgataaagaatgttatgaatggcagaggggaaggtgctgataacgttgaacaaccaagtgctgattcacattctgaacaggagagtctaacaggagtattaggaaggggaagtgtatctggccacaagccacggccagtccgccctggaatgttccttgagactgtttccaaggtcctgggtggcgtatatgcaagtaacacatctggtattacagctcaacatctggaatgggtacatcagacaacactcaaaattcttcaggaaatggccttctagcattgttatcagggttcactgatatagtttgtaacataagaagtataatgctgcacatccgtagctattgaagagcctttttaagtggtcacatatctttttgttgagaagtggagtggaagaaacgataatgggttatctaaagccatagatcactcaggggaagaatgttgccacgttgtgcagtccagaagtaacttacaggcttggaattgatatgaccatgtggttgcccttgccaattgactaattttaagcaatttatttccacatctgttagaccaagagagtcatcttctccaatgactgaaatgagatgagggagagaaaaattccagttcttgtcgggattacaatattatttgttgttcatgtatctggattttactggtgttacaagtt

SEQ ID NO: 42691 - DNA, 1651 bp, Zea Mays
agacgcggctaggagcagctgctgggcagctatccagcgggccactgagtttaccttactcttactcttacatactaagatcgctaccagagcatggcgggaacttcgtcgtggtcgtcgtcttcatcctgcgcgtcgtcgttcgggtcgcccgaccacgacgtcgtctgcgtcaccgagccggactctgtgggcgccgcagccgtcgccgtcgccgacgccgagggaagcgtcaagttcctgtgcagctacggcggcaggatcctgccccgccgcaccgacggcacgctgcgctacgtcggcggcgacaaccgggtcctctccgtcgaccgtcccatccggttttacgtgttgcagcggaagctgagggaattgtgcggcggctgggaagcgcacctgcggtgtcagctaccgacggaggacctggacgcgctcatctccgtcacctgcgacgacgacctcgccaagctgctcgaggagtacgacgaggctagcaaggaccgcctccagtcgctcaagatccgggcgttcctgttcccgactaggacgccggcgccgtccatactacagcgtaggagcccgccgtcgattgctcacctccactggcaaaacacttccccgccggccgcagccggcgtctcgctgacgtgcgcgccgcggtggtgggcagcgccccaggcctctcgccaggcgcaggcgccccaggcgcagaactacgaccgacacagcctcggtgaggagcggccgcgcctgtactattcatatatgccacggacataattagatcagatttatcattagaccctgaccaaatatggtccaaaattttgttgaagttttaatagacctacatgaacaacttattgtaacatatatatacggagtaatataaaaaaatgggcgcttacagttgagttaaaattataattcaggcacgctatagtattcctgtttaatgttcatctgaactttagatcttgaccccccgccaccctaccaacctcgtgtgccccactcattgtcacgtttgtggttgtgattttagccgatctcgttttattttttttaaaccctaacaaaacctcaattacgttcgtattttcatatctatggttgattcacaatttgattgagctcaaaatttgtgaaaacttaagaaacatatctgtacaggtgtgtaaattttcatctcaatcggaattcctttggttcggttttgcatcttcctcagacagccccacgagtccttcagatagccaaccacaatcaagaatatgtcatcttcctcaatggcaaggaagtgagatggaaaatttccaagctagagatagaaactaattcaacaataggagttgagtactttgtagcttcagaagatgcaaagaacgttatatggattagaaagtttgtttctgagttgggtgactgtgatccctagttgctctagttcgatagacctctattgtgacaataatggtgctacaacacaagcaaaggagacaaggttgcaccaaaactccaattgtgcaatgtgctgctatcacctcattcgagagatctatacaagtatctttatgttctaaccccttaagtatgcagtcttataggtttgtgcaaccaatgaccatgacctaaaaacagtttctagtcg

SEQ ID NO: 42692 - DNA, 1643 bp, Zea Mays
agacgcggctaggagcagctgctgggcagctatccagcgggccactgagtttaccttactcttactcttacatactaagatcgctaccagagcatggcgggaacttcgtcgtggtcgtcgtcttcatcctgcgcgtcgtcgttcgggtcgcccgaccacgacgtcgtctgcgtcaccgagccggactctgtgggcgccgcagccgtcgccgtcgccgacgccgagggaagcgtcaagttcctgtgcagctacggcggcaggatcctgccccgccgcaccgacggcacgctgcgctacgtcggcggcgacaaccgggtcctctccgtcgaccgtcccatccggttttacgcggaagctgagggaattgtgcggcggctgggaagcgcacctgcggtgtcagctaccgacggaggacctggacgcgctcatctccgtcacctgcgacgacgacctcgccaagctgctcgaggagtacgacgaggctagcaaggaccgcctccagtcgctcaagatccgggcgttcctgttcccgactaggacgccggcgccgtccatactacagcgtaggagcccgccgtcgattgctcacctccactggcaaaacacttccccgccggccgcagccggcgtctcgctgacgtgcgcgccgcggtggtgggcagcgccccaggcctctcgccaggcgcaggcgccccaggcgcagaactacgaccgacacagcctcggtgaggagcggccgcgcctgtactattcatatatgccacggacataattagatcagatttatcattagaccctgaccaaatatggtccaaaattttgttgaagttttaatagacctacatgaacaacttattgtaacatatatatacggagtaatataaaaaaatgggcgcttacagttgagttaaaattataattcaggcacgctatagtattcctgtttaatgttcatctgaactttagatcttgaccccccgccaccctaccaacctcgtgtgccccactcattgtcacgtttgtggttgtgattttagccgatctcgttttattttttttaaaccctaacaaaacctcaattacgttcgtattttcatatctatggttgattcacaatttgattgagctcaaaatttgtgaaaacttaagaaacatatctgtacaggtgtgtaaattttcatctcaatcggaattcctttggttcggttttgcatcttcctcagacagccccacgagtccttcagatagccaaccacaatcaagaatatgtcatcttcctcaatggcaaggaagtgagatggaaaatttccaagctagagatagaaactaattcaacaataggagttgagtactttgtagcttcagaagatgcaaagaacgttatatggattagaaagtttgtttctgagttgggtgactgtgatccctagttgctctagttcgatagacctctattgtgacaataatggtgctacaacacaagcaaaggagacaaggttgcaccaaaactccaattgtgcaatgtgctgctatcacctcattcgagagatctatacaagtatctttatgttctaaccccttaagtatgcagtcttataggtttgtgcaaccaatgaccatgacctaaaaacagtttctagtcg

SEQ ID NO: 42693 - DNA, 1211 bp, Zea Mays
agacgcggctaggagcagctgctgggcagctatccagcgggccactgagtttaccttactcttactcttacatactaagatcgctaccagagcatggcgggaacttcgtcgtggtcgtcgtcttcatcctgcgcgtcgtcgttcgggtcgcccgaccacgacgtcgtctgcgtcaccgagccggactctgtgggcgccgcagccgtcgccgtcgccgacgccgagggaagcgtcaagttcctgtgcagctacggcggcaggatcctgccccgccgcaccgacggcacgctgcgctacgtcggcggcgacaaccgggtcctctccgtcgaccgtcccatccggttttacgtgttgcagcggaagctgagggaattgtgcggcggctgggaagcgcacctgcggtgtcagctaccgacggaggacctggacgcgctcatctccgtcacctgcgacgacgacctcgccaagctgctcgaggagtacgacgaggctagcaaggaccgcctccagtcgctcaagatccgggcgttcctgttcccgactaggacgccggcgccgtccatactacagcgtaggagcccgccgtcgattgctcacctccactggcaaaacacttccccgccggccgcagccggcgtctcgctgacgtgcgcgccgcggtggtgggcagcgccccaggcctctcgccaggcgcaggcgccccaggcgcagaactacgaccgacacagcctcggtgtgtaaattttcatctcaatcggaattcctttggttcggttttgcatcttcctcagacagccccacgagtccttcagatagccaaccacaatcaagaatatgtcatcttcctcaatggcaaggaagtgagatggaaaatttccaagctagagatagaaactaattcaacaataggagttgagtactttgtagcttcagaagatgcaaagaacgttatatggattagaaagtttgtttctgagttgggtgactgtgatccctagttgctctagttcgatagacctctattgtgacaataatggtgctacaacacaagcaaaggagacaaggttgcaccaaaactccaattgtgcaatgtgctgctatcacctcattcgagagatctatacaagtatctttatgttctaaccccttaagtatgcagtcttataggtttgtgcaaccaatgaccatgacctaaaaacagtttctagtcg

SEQ ID NO: 42694 - DNA, 1463 bp, Zea Mays
cctcgtccgtctccgccgcctctccgatctactctgcagctagctatagctagctagctctgtacgccaccggccggcccggtagcagcattgtcggaggggctgggctggtggtggcgcaggcaggcaggcaggtagaagaaggagatccaaccaagggatcggataggataggataggagctgggatcgtcgtcgtcggaacgaagatgagcagcaaggacgctgtgttgaacgcgttcctgagctgcttcatgcacgtgggcctggcgctggtgctcctcgtctacctccccgccgcctccgtcctccgcctcctcgtccgccccttgttggccaacaagcaggccgaggacctccgcggcaaggtcgtcctcgtcaccggcgcgtcatccggcatcggcgagtgaatcatctggtggccaacgcggggatctggtccagctgcttttttgaggagatcaccaacataaccgccttccataatgtgatggacctcaacttctggggtgccgtgtacccgacctacttcgcgctgccgtacctcaaggccagccggggcaacatcgtcgtcaccgcctccgtcgccggcagggtcccgacagccaggatgagcttctacaacgcaagcaaaggcgccgtgatacgtttctacgagacgctaagggccgagctggggtcgcacgtgcgcgtcaccatcctcatgcccggctacgtcgtctccaacctcaccaagggcaggggcctccagaaggacggccgcgtcggcgtcgacgaggaggcccgcgacatcaacgtggggccgatgccggtgggcaagacggagtcgctggcggaggtggtggtggcgagcgtgcggcgcggggactactacgtgacgtggcccggctggtactggcccttccacatggtcatgtgcgccgcgccggagctgctcgactggttctcccgggccttctacgtctccaagtccggcggccaggacggcggcgccgcgctgagtaagaagatcctggaggccgtcggcgggaagaagttcctctacccccagaccatccgctgccagcagaccaccatgggtgccagctaactactgactcgctcaagatgttagccagacataaagataccacattttacatgtataaactcgcgcatggttgatgtgctgttggattagcacggcatgaggatcaaagggccggctgggtgaagttgatgaaatgcttttattcgttttctttctttctttttttttcattttctctacctttaatttctcccctttccgtttaaaagtgatcaatgtgtgtatgatacggatgtttagtcgtagttggtttgtacgcccgtcatattgggggcgtgtgccaattgcaaaatggatgtatgtaaaagacagcatttatttgctgatttcaaacagaacattatatcacctggatgccatgaaaatgggcgtcc

SEQ ID NO: 42695 - DNA, 1651 bp, Zea Mays
cctcgtccgtctccgccgcctctccgatctactctgcagctagctatagctagctagctctgtacgccaccggccggcccggtagcagcattgtcggaggggctgggctggtggtggcgcaggcaggcaggcaggtagaagaaggagatccaaccaagggatcggataggataggataggagctgggatcgtcgtcgtcggaacgaagatgagcagcaaggacgctgtgttgaacgcgttcctgagctgcttcatgcacgtgggcctggcgctggtgctcctcgtctacctccccgccgcctccgtcctccgcctcctcgtccgccccttgttggccaacaagcaggccgaggacctccgcggcaaggtcgtcctcgtcaccggcgcgtcatccggcatcggcgagcacctggtgtacgagtacgcgaggaacggcgcgtgcgtggcgctggtggcgcggacggaggtggcgctgcgcgccgtggccaaggcggcgcgcgacctcggctcccccgacgtgctggtcgtgccggccgacgtcaccaaggtggacgacgccaagcgcgccgtcgacgagaccctcgcgcacttcggcaaactgaatcatctggtggccaacgcggggatctggtccagctgcttttttgaggagatcaccaacataaccgccttccataatgtgatggacctcaacttctggggtgccgtgtacccgacctacttcgcgctgccgtacctcaaggccagccggggcaacatcgtcgtcaccgcctccgtcgccggcagggtcccgacagccaggatgagcttctacaaccaaaggcgccgtgatacgtttctacgagacgctaagggccgagctggggtcgcacgtgcgcgtcaccatcctcatgcccggctacgtcgtctccaacctcaccaagggcaggggcctccagaaggacggccgcgtcggcgtcgacgaggaggcccgcgacatcaacgtggggccgatgccggtgggcaagacggagtcgctggcggaggtggtggtggcgagcgtgcggcgcggggactactacgtgacgtggcccggctggtactggcccttccacatggtcatgtgcgccgcgccggagctgctcgactggttctcccgggccttctacgtctccaagtccggcggccaggacggcggcgccgcgctgagtaagaagatcctggaggccgtcggcgggaagaagttcctctacccccagaccatccgctgccagcagaccaccatgggtgccagctaactactgactcgctcaagatgttagccagacataaagataccacattttacatgtataaactcgcgcatggttgatgtgctgttggattagcacggcatgaggatcaaagggccggctgggtgaagttgatgaaatgcttttattcgttttctttctttctttttttttcattttctctacctttaatttctcccctttccgtttaaaagtgatcaatgtgtgtatgatacggatgtttagtcgtagttggtttgtacgcccgtcatattgggggcgtgtgccaattgcaaaatggatgtatgtaaaagacagcatttatttgctgatttcaaacagaacattatatcacctggatgccatgaaaatgggcgtcc

SEQ ID NO: 42696 - DNA, 1339 bp, Zea Mays
cctcgtccgtctccgccgcctctccgatctactctgcagctagctatagctagctagctctgtacgccaccggccggcccggtagcagcattgtcggaggggctgggctggtggtggcgcaggcaggcaggcaggtagaagaaggagatccaaccaagggatcggataggataggataggagctgggatcgtcgtcgtcggaacgaagatgagcagcaaggacgctgtgttgaacgcgttcctgagctgcttcatgcacgtgggcctggcgctggtgctcctcgtctacctccccgccgcctccgtcctccgcctcctcgtccgccccttgttggccaacaagcaggccgaggacctccgcggcaaggtcgtcctcgtcaccggcgcgtcatccggcatcggcgagcacctggtgtacgagtacgcgaggaacggcgcgtgcgtggcgctggtggcgcggacggaggtggcgctgcgcgccgtggccaaggcggcgcgcgacctcggctcccccgacgtgctggtcgtgccggccgacgtcaccaaggtggacgacgccaagcgcgccgtcgacgagaccctcgcgcacttcggcaaactgaatcatctggtggccaacgcggggatctggtccagctgcttttttgaggagatcaccaacataaccgccttccataatgtgatggacctcaacttctggggtgccgtgtacccgacctacttcgcgctgccgtacctcaaggccagccggggcaacatcgtcgtcaccgcctccgtcgccggcagggtcccgacagccaggatgagcttctacaacgcaagcaaaggcgccgtgatacgtttctacgagacgctaagggccgagctggggtcgcacgtgcgcgtcaccatcctcatgcccggctacgtcgtctccaacctcaccaagggcaggggcctccagaaggacggccgcgtcggcgtcgacgaggaggcccgcgacatcaacgtggggccgatgccggtgggcaagacggagtcgctggcggaggtggtggtggcgagcgtgcggcgcggggactactacgtgacgtgggccggctgggtgaagttgatgaaatgcttttattcgttttctttctttctttttttttcattttctctacctttaatttctcccctttccgtttaaaagtgatcaatgtgtgtatgatacggatgtttagtcgtagttggtttgtacgcccgtcatattgggggcgtgtgccaattgcaaaatggatgtatgtaaaagacagcatttatttgctgatttcaaacagaacattatatcacctggatgccatgaaaatgggcgtcc

SEQ ID NO: 42697 - DNA, 328 bp, Zea Mays
ctggaggtgatttctgaccagagactaccccagtgcagttcagatatcagtttctttgctgtagatgcgtcatttctcccggtcagattgtggtctgtctgtgccatgggatctgatccatctgtagattctgtagtatggtgttcctgagaaaaggatcgattagaagcaggaagatccagaccttgtgtagtcatattcgtcatcagttggtgaaggttcactgaactggacatgaaagaaaggcgcttgccgtatgatctgtgatcgcccagcatattggacatgaaagaaaggctgcaggcaagagaaacacgcactaaaaaac

SEQ ID NO: 42698 - DNA, 1473 bp, Zea Mays
cgcagacccgtggacggcgcaccggtccaaagtcaaaagggcaagagggggcaaaaagggagaaatttcctctcacaaaaccctcgccagcttatcccccttcctccctcacacgatctctcctcgacggctaacccggattgccgtctcaggctcgggatccgggcgctcgcggcgatggacggcggcggcggcgctggcggcgcggagggggagctcacggcgcaggagacagcgctctacgaccgccagatccgcgtctggggcgtcgatgcccagaagagttctgcaagaatattgttctagctggagttggaagtttatccttgatggatgataatgtagtcacagaggaggatctgaatgcaaatttcctaattcctcctgatgagagcatatatggtggtagatctcgagcccaagtttgctgcgagtctttgatagatttcaatcctatggttcgagtttttgttgaaaagggtgatccatcattaattgatggagaattccttgacaagtttgacattgttgtacttagccgtgcatctcttaaaacaaagaaaaagcctggaggagcaactgaacaacaggagttgacatattctagccttcaggaagctatctctgtgccttggaatagtctaccgaagaagacggcaaaattatactttgctatgagagtactggaggattatgaattatctgaagggcgcagccctggcgaaacaacactttctgatatagatgcagttctggctcggaggaaggatatgtgtgataaaatgtctttgaatgagtctcgtattcctactactctcgtggaacgactgctagcagctggaaagaaggagcatcctcctgtatgtgctatccttggtggtattcttggtcaggaggtgatcaaatcgatatcctgcaagggcgatccagtcaagaatttcttctatttcgatgtggctgacggtaaaggtgtcatcgaggatatcccaccaccaccacctgcaaaataaagcactcagctgcgtaactctcgactcgacttggttcactaatcgttttctgtacccactcagcttcgaacatgtagtagcaacttttagatctagagccatgtgaaaaaaggcaggtttgactttaacccagatgtttagggatttttcgagcagcaaactgtgacagtatgtatgcattgacaatttaaagctgaagtctggaccggtttccatgcttttgggggcggatttcctttgtcgtccctttacccatttgtcaaatttggtagcggtggttgtggggaggggggaatgaagtgagaaggctatgtttataactgtgaaccgacggttgcagctatacatatcgtcatgcctgtgtactcatgtggcatgtttcatgcttgattacaatgcctgttgcttgaatggctccctgcatatgcgtgtcgttgttgctcactgccagattgtttggtcg

SEQ ID NO: 42699 - DNA, 1440 bp, Zea Mays
cgcagacccgtggacggcgcaccggtccaaagtcaaaagggcaagagggggcaaaaagggagaaatttcctctcacaaaaccctcgccagcttatcccccttcctccctcacacgatctctcctcgacggctaacccggattgccgtctcaggctcgggatccgggcgctcgcggcgatggacggcggcggcggcgctggcggcgcggagggggagctcacggcgcaggagacagcgctctacgaccgccagatccgcgtctggggcgtcgatgcccagaagagttctgcaagaatattgttctagctggagttggaagtttatccttgatggatgataatgtagtcacagaggaggatctgaatgcaaatttcctaattcctcctgatgagagcatatatggtggtagatctcgagcccaagtttgctgcgagtctttgatagatttcaatcctatggttcgagtttttgttgaaaagggtgatccatcattaattgatggagaattccttgacaagtttgacattgttgtacttagccgtgcatctcttaaaacaaagaaaaagcctggaggagcaactgaacaacaggagttgacatattctagccttcaggaagctatctctgtgccttggaatagtctaccgaagaagacggcaaaattatactttgctatgagagtactggaggattatgaattatctgaagggcgcagccctggcgaaacaacactttctgatatagatgcagttctggctcggaggaaggatatgtgtgataaaatgtctttgaatgagtctcgtattcctactactctcgtggaacgactgctagcagctggaaagaaggagcatcctcctgaggtgatcaaatcgatatcctgcaagggcgatccagtcaagaatttcttctatttcgatgtggctgacggtaaaggtgtcatcgaggatatcccaccaccaccacctgcaaaataaagcactcagctgcgtaactctcgactcgacttggttcactaatcgttttctgtacccactcagcttcgaacatgtagtagcaacttttagatctagagccatgtgaaaaaaggcaggtttgactttaacccagatgtttagggatttttcgagcagcaaactgtgacagtatgtatgcattgacaatttaaagctgaagtctggaccggtttccatgcttttgggggcggatttcctttgtcgtccctttacccatttgtcaaatttggtagcggtggttgtggggaggggggaatgaagtgagaaggctatgtttataactgtgaaccgacggttgcagctatacatatcgtcatgcctgtgtactcatgtggcatgtttcatgcttgattacaatgcctgttgcttgaatggctccctgcatatgcgtgtcgttgttgctcactgccagattgtttggtcg

SEQ ID NO: 42700 - DNA, 1608 bp, Zea Mays
gccaaataaaaactagactaagcttccttagcgtgaatctggaccgtcagctctccgttcgtcctcgacggacggctcgatgacgcagacccgtggacggcgcaccggtccaaagtcaaaagggcaagagggggcaaaaagggagaaatttcctctcacaaaaccctcgccagcttatcccccttcctccctcacacgatctctcctcgacggctaacccggattgccgtctcaggctcgggatccgggcgctcgcggcgatggacggcggcggcggcgctggcggcgcggagggggagctcacggcgcaggagacagcgctctacgaccgccagatccgcgtctggggcgtcgatgcccagaagagactaagtaaggcgcacgtgcttgtgtgtggcatgaacggaaccaccatcgagttctgcaagaatattgttctagctggagttggaagtttatccttgatggatgataatgtagtcacagaggaggatctgaatgcaaatttcctaattcctcctgatgagagcatatatggtggtagatctcgagcccaagtttgctgcgagtctttgatagatttcaatcctatggttcgagtttttgttgaaaagggtgatccatcattaattgatggagaattccttgacaagtttgacattgttgtacttagccgtgcatctcttaaaacaaagaaaaagcctggaggagcaactgaacaacaggagttgacatattctagccttcaggaagctatctctgtgccttggaatagtctaccgaagaagacggcaaaattatactttgctatgagagtactggaggattatgaattatctgaagggcgcagccctggcgaaacaacactttctgatatagatgcagttctggctcggaggaaggatatgtgtgataaaatgtctttgaatgagtctcgtattcctactactctcgtggaacgactgctagcagctggaaagaaggagcatcctcctgtatgtgctatccttggtggtattcttggtcaggaggtgatcaaatcgatatcctgcaagggcgatccagtcaagaatttcttctatttcgatgtggctgacggtaaaggtgtcatcgaggatatcccaccaccaccacctgcaaaataaagcactcagctgcgtaactctcgactcgacttggttcactaatcgttttctgtacccactcagcttcgaacatgtagtagcaacttttagatctagagccatgtgaaaaaaggcaggtttgactttaacccagatgtttagggatttttcgagcagcaaactgtgacagtatgtatgcattgacaatttaaagctgaagtctggaccggtttccatgcttttgggggcggatttcctttgtcgtccctttacccatttgtcaaatttggtagcggtggttgtggggaggggggaatgaagtgagaaggctatgtttataactgtgaaccgacggttgcagctatacatatcgtcatgcctgtgtactcatgtggcatgtttcatgcttgattacaatgcctgttgcttgaatggctccctgcatatgcgtgtcgttgttgctcactgccagattgtttggtcg

SEQ ID NO: 42701 - DNA, 714 bp, Zea Mays
agacaacatgagtcagatgaacccaaccttccatccgttcggccctcagcaaaatgccactacgctatatatcgcgtcacgcaacgcacgttctctccactggtcctacaacactctccctaccacaccgaaccaacaagaggagcaagaggtagctatagcagcctagcacacaccaccacccaccaccaccgcgccacagagctgccgagagtgtgctgtgcttcgctcatcgaccgaccgatcgatctcggcatggcggactgggggccggtgctgatcgggctggtgctcttcatcctgctctccccgggcctgctcttccagatccccggcaagggccggatcatcgagttcggcaacttccagaccagcggcctctccatcctcatccacgccgtcatctacttcgccctcctcgccatcttcctcctcgccgtcggcgtccacatttacctcggctagctagtcgcccgtcgtcgccgccgggctgagcgaggctagctgctggcgcgcggcggcccggcccggcctggctttatttgacatcaatctgggtggctggattagggtcatgagacaattcaagtccctcccaatgtggcaacaattcattccaaacaatcaatttgggagcaaagagttgttccatcgggaaaggttcggagatgaagagctcaatacttcttggtctagcaatattataaagggaag

SEQ ID NO: 42702 - DNA, 2092 bp, Zea Mays
atcctgtccacggccacgctggtgtcgcagttcaagaatggtgatcctctatccagggtgtgttgctccaacagttcaccgtgattttctgcccagatgggtgctgctgaacaacagctcgagaatgtactgccatgtctttccagatagaacgaaaccgaaaaggcaatacaggcatcagtgggtgccttgcttctccaagggatcttcgttccaagatccactgccctctgtaaagccttcacgccttcttccagcagaggaactaaagacatatcccaacactgttcctgaggagatatttaacacgatcatactagatgactccgatgcattctatgtgctagaactgagcacgagtagagaatttagttcctctttggataaaaattctgcaatcttaatctgcctatttgatgtcgatggtgactccctattacaaagagtaccggcaatctatttgggtcaacctacacatggatttaagacagagcagcagatacccttccaaagtggttcagttgatatcgttactttcaaggggtcaaaactgaaaacgattaaagaagtctggatcggtcttgaatcaggttcatggagattagatggtttgagcttgaaagtaatacatggaccagttggtcagcctaaagaaataaatggaactccagaacagaagttcagcggtttgcagtacacttttgagaacgtaaatgtgttccttggagatgatggagcttcagtagctgaagcaaggccgacggctatcactgacctctcaggagtcggcctttctgatcttcaacaagggatgttatcctcaagaagcaaagcttcaagcattcaggaagtaagagaggatgggttgagagagtacgccgaccttaaacaatctctgctgctctatgacgcatctatagtgataaccggcttctctaccttcatcttggcttcaaatgacagcgctgcctattcgttcctgataggtggcattggagggttcctgtacctgttgctgctccaaagatcggttgatggtttgcctgtgatcggttcaccttcagaagctggcggtgcacagccttcggtaaaaagtttcagcggtgtaaggaggccatggttgatactatcactagtactggttgcaggtgcagttgcactgaagtatggtgctggaggcgacagctttgcgctcacacccaccgacctctttgttggcactgcagggttcctagcaaacaaggttgctgttcttcttgcagcgttcatgcctatgctaagtgactcaaagagtgaagatggatctggtgacagcagttaattggacttctttaaaaatatgttagtaatagtttcctatagaagatctgtattcaagactggaacggaattagctgaagtgcaaaggacaagtcctagtttctgaactggaaaaaagaaccctctcatcttggtgactgtgtcatccttgcaagggttcaattcacagcaagagttcaagtgttgtggcagtttgaagtcagaaacttaagttgtatttttcagacatgcaggacagctgtgtatcattatatcaagaagaagaagaacaaaagtctaggatactttgaagcacccttagaaaggcatgaccagtacagcagaagaaaaacagagacacaaaaactaaggacatggccataaactacggagcgttttggcttttgccatacagcacaacttgatttcatcttagaaacttgagttgtagtatagtatactcacctatcggacactgaactgttaagatgatataccgactacagctttgttgtatgtaaaaatatgacatttgtgaggttaaatacacagtaactatcgaaacaaaatgcttggcgttgctccaaatcactatcatctgagtattttcttgaactggaagctctagagcgattgtagattcactcaacacaacattagcagtatacgactgtgaaaagttcctgtcaagttccgctgggcagtaattttttaaacttattatcttatacagatctgagatgaacaccatttcctaggcagaattatcattatattcaattgtaagtatttt

SEQ ID NO: 42703 - DNA, 2136 bp, Zea Mays
tcccacccacgtgtctttctccgccgccgaactcgaacgcggcacgcctcttgcctcaccacaggccagacgaagaagcggaccacacgccaccagctccacctccacggaatcagacggtctcctcctccttttctttctcccgtggactgcagcgccgccgggtagagatcccaaatctgcgcctcgaccaattcctccttcctccgagaatggtgatcctctatccagggtgtgttgctccaacagttcaccgtgattttctgcccagatgggtgctgctgaacaacagctcgagaatgtactgccatgtctttccagatagaacgaaaccgaaaaggcaatacaggcatcagtgggtgccttgcttctccaagggatcttcgttccaagatccactgccctctgtaaagccttcacgccttcttccagcagaggaactaaagacatatcccaacactgttcctgaggagatatttaacacgatcatactagatgactccgatgcattctatgtgctagaactgagcacgagtagagaatttagttcctctttggataaaaattctgcaatcttaatctgcctatttgatgtcgatggtgactccctattacaaagagtaccggcaatctatttgggtcaacctacacatggatttaagacagagcagcagatacccttccaaagtggttcagttgatatcgttactttcaaggggtcaaaactgaaaacgattaaagaagtctggatcggtcttgaatcaggtcaggttcatggagattagatggtttgagcttgaaagtaatacatggaccagttggtcagcctaaagaaataaatggaactccagaacagaagttcagcggtttgcagtacacttttgagaacgtaaatgtgttccttggagatgatggagcttcagtagctgaagcaaggccgacggctatcactgacctctcaggagtcggcctttctgatcttcaacaagggatgttatcctcaagaagcaaagcttcaagcattcaggaagtggcattggagggttcctgtacctgttgctgctccaaagatcggttgatggtttgcctgtgatcggttcaccttcagaagctggcggtgcacagccttcggtaaaaagtttcagcggtgtaaggaggccatggttgatactatcactagtactggttgcaggtgcagttgcactgaagtatggtgctggaggcgacagctttgcgctcacacccaccgacctctttgttggcactgcagggttcctagcaaacaaggttgctgttcttcttgcagcgttcatgcctatgctaagtgactcaaagagtgaagatggatctggtgacagcagttaattggacttctttaaaaatatgttagtaatagtttcctatagaagatctgtattcaagactggaacggaattagctgaagtgcaaaggacaagtcctagtttctgaactggaaaaaagaaccctctcatcttggtgactgtgtcatccttgcaagggttcaattcacagcaagagttcaagtgttgtggcagtttgaagtcagaaacttaagttgtatttttcagacatgcaggacagctgtgtatcattatatcaagaagaagaagaacaaaagtctaggatactttgaagcacccttagaaaggcatgaccagtacagcagaagaaaaacagagacacaaaaactaaggacatggccataaactacggagcgttttggcttttgccatacagcacaacttgatttcatcttagaaacttgagttgtagtatagtatactcacctatcggacactgaactgttaagatgatataccgactacagctttgttgtatgtaaaaatatgacatttgtgaggttaaatacacagtaactatcgaaacaaaatgcttggcgttgctccaaatcactatcatctgagtattttcttgaactggaagctctagagcgattgtagattcactcaacacaacattagcagtatacgactgtgaaaagttcctgtcaagttccgctgggcagtaattttttaaacttattatcttatacagatctgagatgaacaccatttcctaggcagaattatcattatattcaattgtaagtatttt

SEQ ID NO: 42704 - DNA, 2131 bp, Zea Mays
tcccacccacgtgtctttctccgccgccgaactcgaacgcggcacgcctcttgcctcaccacaggccagacgaagaagcggaccacacgccaccagctccacctccacggaatcagacggtctcctcctccttttctttctcccgtggactgcagcgccgccgggtagagatcccaaatctgcgcctcgaccaattcctccttcctccgagaatggtgatcctctatccagggtgtgttgctccaacagttcaccgtgattttctgcccagatgggtgctgctgaacaacagctcgagaatgtactgccatgtctttccagatagaacgaaaccgaaaaggcaatacaggcatcagtgggtgccttgcttctccaagggatcttcgttccaagatccactgccctctgtaaagccttcacgccttcttccagcagaggaactaaagacatatcccaacactgttcctgaggagatatttaacacgatcatactagatgactccgatgcattctatgtgctagaactgagcacgagtagagaatttagttcctctttggataaaaattctgcaatcttaatctgcctatttgatgtcgatggtgactccctattacaaagagtaccggcaatctatttgggtcaacctacacatggatttaagacagagcagcagatacccttccaaagtggttcagttgatatcgttactttcaaggggtcaaaactgaaaacgattaaagaagtctggatcggtcttgaatcaggttcatggagattagatggtttgagcttgaaagtaatacatggaccagttggtcagcctaaagaaataaatggaactccagaacagaagttcagcggtttgcagtacacttttgagaacgtaaatgtgttccttggagatgatggagcttcagtagctgaagcaaggccgacggctatcactgacctctcaggagtcggcctttctgatcttcaacaagggatgttatcctcaagaagcaaagcttcaagcattcaggaagtggcattggagggttcctgtacctgttgctgctccaaagatcggttgatggtttgcctgtgatcggttcaccttcagaagctggcggtgcacagccttcggtaaaaagtttcagcggtgtaaggaggccatggttgatactatcactagtactggttgcaggtgcagttgcactgaagtatggtgctggaggcgacagctttgcgctcacacccaccgacctctttgttggcactgcagggttcctagcaaacaaggttgctgttcttcttgcagcgttcatgcctatgctaagtgactcaaagagtgaagatggatctggtgacagcagttaattggacttctttaaaaatatgttagtaatagtttcctatagaagatctgtattcaagactggaacggaattagctgaagtgcaaaggacaagtcctagtttctgaactggaaaaaagaaccctctcatcttggtgactgtgtcatccttgcaagggttcaattcacagcaagagttcaagtgttgtggcagtttgaagtcagaaacttaagttgtatttttcagacatgcaggacagctgtgtatcattatatcaagaagaagaagaacaaaagtctaggatactttgaagcacccttagaaaggcatgaccagtacagcagaagaaaaacagagacacaaaaactaaggacatggccataaactacggagcgttttggcttttgccatacagcacaacttgatttcatcttagaaacttgagttgtagtatagtatactcacctatcggacactgaactgttaagatgatataccgactacagctttgttgtatgtaaaaatatgacatttgtgaggttaaatacacagtaactatcgaaacaaaatgcttggcgttgctccaaatcactatcatctgagtattttcttgaactggaagctctagagcgattgtagattcactcaacacaacattagcagtatacgactgtgaaaagttcctgtcaagttccgctgggcagtaattttttaaacttattatcttatacagatctgagatgaacaccatttcctaggcagaattatcattatattcaattgtaagtatttt

SEQ ID NO: 42705 - DNA, 1030 bp, Zea Mays
atgagacgtccacttatatgttatagatctggcacaccaaccagcactaggagtcaagttgttgttagaagtggggctggcgagtttgacacggcctcttgtttgcaatctcttgtcaagtgttatcttcatggctcattgcatttgtcatgttatccttagcatccaactcaacaattggacttgatctgacaggactttgtttatcattcaatctttaattctgtgcatgcatatcctccagatcttccacaggaaagtgtaccccgagagcgcggccctggcgcggaacctgaccaagaagagccgcaagcgcggcagcggcgcctaccacaagccggagccggcggcgtccaagctccggtgcctcaaggagcagcgcgcgccggggttcggctgctgcgccagccgggcctccttcggcggcgccgcctctcccatcgacggcgacgacgacgacgagctcaacggcagcaagagcggccactggatcaagaccgacgctgaatacttggtgctggagctgtagaatgagaaataacaagagagagatcaggatctgttggctggtcagcatcaagcatatatagtgagtatattgagcataatgcctgcttatgtttctgtgcttgctcttcacagaaaaaaaaaacccccatcatacatatgtttgttcatgtgattacctgacggatgagttgtacgtgtccgtctatatatctgtataaaggggaaaaggactgcgagtgtatgaacttaatgtatggtttgcgtcaagatgtgatcgctgcctcctctctactcctagttgatagcctcctgttggtgcatgtgggggcttaggcacttggctggccccccaaatcatgctgcttcttgaactcttgttggtggcctgattgcagaggaatatcctgtcacagggactgtgctaacgacagttgccatttcccgcaataggctggatgcagctttgatatgcatcattattcatatagcccgtttaatttaaatcaggaccttttatata

SEQ ID NO: 42706 - DNA, 470 bp, Zea Mays
tggttgagcgccttatctgtacaaatgattggattcgcggatctgatttcattagtgttgaagagaacctagaagaactatccaagcttgatgatgagttttgtggcctcactgtttctaaggagacaacaaccacccctactacttcttgagcaagaaaatttgatgactggtgaatttgtgatggcataatgttgcaggctatgtgatctatgatctactgatctaaaattatcaataattcaaagttctataatgtttgaacttgttgtcatgtttgtaactttgttattgtatttgtgacttgttggttgttatgtacaactacttgttgttgtttattgatttttgaatatggtcatagcataggagcaggcgtccaacagaggtttagttgagattatgaatttcagagttcagttttaaccacaccgaaccaaaaaaccgagaaccgaatatcacggttttct

SEQ ID NO: 42707 - DNA, 1050 bp, Zea Mays
gagggattattcattttccgaccaaaaaacgaaaaaggcaaatccaaagacggagaagaagaagagtcgcgaaggaatggggaagggcaaggtgcatccctcgccgccgccagctgccgcggccgcggccgcgggcggcggagccggggagacgacggcggaggcggtgctgatgcggctgatgccggcggcggtgctcgcggccgcggcgccgctcggggccgaggggaaggaggtgctggcgtacctggtgctggcgtcgctgcggtcctcggccccgccgacgccggcgcgcggggacgggcaccgcccggagctcgggtgcggctgcttcgggtgctacacggcctactggtcccgctgggacgggtcccccgagggcgaccgcgaggccatccaccgcgccatcgaggcgttcgaggagcacctggcggaggaggagaagggccgcgggaagggaggcgggccccgccgcgggcggaagaagcgcgccgagggcaaggggaggtggaaggtgaagaaggaaaaggaggtggaggtcggcgccgatccactcccgcccccgtccgatctccccgccccggaggaggcccccaaggcggaggacggcgcggagtacctgacggcggaggacgagaaggaggaggacgctccgaccgcggccgccggcgccgaggatgagaagcggcggcgctggtggggctccgtgctgagctggaaggcgtggggcctctgagggtcccactagtcaggtggattagttggtgatggttagtactcctacgctatttggcagtctggatggggatgctgtgttttagtatctgttggtgcggtgtgtcacgtgttaggctcttctcttgtgtactgtacatacacgcaggcatggagtgtgtggtttggttggtgtaaattatcattgtaatgtaatgtactcctactaatgtaaatgcggcagtagttgtgatacgactatgcattgcaatttccagatgatttgaacgtgtgcccacttccagccactggcctgtggcatagctaggacttggg

SEQ ID NO: 42708 - DNA, 1882 bp, Zea Mays
acttccgtccgttcccccgaactctctctctcctcctcggccacctcccatccccgttccttcccctccatctcatcaccgccgccagcgccaaaaccctacccacccacccaccgatggcctccccggcgccggcgtcccccgcggccgcggcggcgcactgccccccgccgcgcatcgggctcgcgggcctcgccaccatgggccagaacctggccctgaacatcgccgagaaagggttcccgatctccgtctacaaccgcaccgccgccaaggtggactccacgctgtcccgcgcgcgggacgagggctcgctgccggtgctgggccaccgcgacccgcgcgggttcgtgctgtccctcgcgcgcccgcgcgccgtcgtgctgctcgtccaggccggccccgccgtcgacgccaccatccaggccctctccccctacctcgagcccggggacgccatcgtcgacggcggcaacgagtggtaccagaacacggagcgccgcatccaggaggcggcggcgcgcggcgtcctgtacctcgggatgggcgtctccggcggcgaggagggcgcgcggaacgggccctcgctcatgcccggcggcagcgccgacgcctacgccaacatcagggacatcctccagaaggccgccgcgcagacggaggacggcgcctgcgtcaccttcgtcgggcccggcggcgccggcaacttcgtcaagatggtgcacaacgggatcgagtacggcgacatgcagctcatcgccgaggcgtacgacgtgctccgcaggctcgggggcctgtccaactccgagatcgccgatgtcttcgctgagtggaacaggggggagctcgagagcttcctggtccagatcaccgccgacattttcaccgtggctgacccgttggacgggagcgggagtggcggcggggcgctggttgacaggattctggacaagactgggatgaaggggaccgggaaatggaccgtgcagcaggcggcggagcttgcggtggcagcgcccacgattgccgcgtcgctggacgggaggtacctgtcagggttgaaggacgaacgggtcgcagccgctggggtgctggaggaagaggggatgccggcgggcctgttggagacggttaatgtcgacaagaaggtgctggtggatagggtcaggcaagcgctctacgcctccaagatttgcagctatgcgcagggcatgaatctgctgcgagccaagagcgtggagaagggatggaaccttaacctcgcagagcttgccaggatctggaagggcggctgcattatccgtgcgaggttccttgataggatcaagagcgcgtacgacaggaatcctgagctcgccaatttgattgttgacagagagtttgcaagggagatggtgcagcggcagaacgcgtggaggtgggttgtggcacgcgcggtggaggctggcattagcacgccaggaatgactgctagcctttcgtacttcgatacctacagatcaagtcgattgcctgcaaatctgatccaagcgcagagggatctgtttggtgcacacacctatgagcgcattgactgtccgggttcattccacaccgaatggaccaagctggcgaggaggagcaatggcgcagccatttgaggaattggttgatccaagtcgagtacttcaaataatgctgtactgtatggttggcaagtgaagaacattgtgtagcttcagttttactgtgatgtaggtacacacagtttgattctcttaattttggtatgcaattgctatgatgcctctcaaactccaatgttgtgtgtttaaagagttatctgaaatgtgttgaaactgctactaagagtagcgagttttgcatcatagcctctcaaatc

SEQ ID NO: 42709 - DNA, 2499 bp, Zea Mays
tgcagtttcttgcctcaacagaagttgtagactgtactttgttgaacaagtcgcactaggaacttactacattcttgctctatagaaactgtcaggcttgtgagagttctgttatgtaccgcttcttttctaaagaaaaatagtagagttttagaaaacataatgaatacagcttcttttattgaactcttagaagtactccagccattgtagtttaatttatctgcatacagttggttgtattgaacactgggacaccctgaggtctttgttgttcaattatgattatatttctgtatactttatttttaatggttaatcaaaatgctagcttatataatgctccctcaaatgcaggttgcaatattttccagcatagcttgctcacctacttctcaatttagaagacttcaatttctggatctgagcatcaaatcaagaccataccactttagtcagtcctgtctgatggcactggctgcagctccagccagtggtgattcacagagtggtcctcagaggaactatcaggttgttgtggctgccactcgtgacatgggcattggcaagggtggggtcatgccatggaagcttcttggtgatcttaaattcttcaaagaacttacactaactacaactgatcctgccaaaaagaatgcagttataatgggaaggaaaacatgggagagcattcctgttaagtcaaggccactgcctggtcgtttgaatgtcatacttactcgatctggtagttttgattttgcaacagtagagaatgttgttatatgtggaagtatgaagtctgccttagagctgctagcatcaactccatactgcttatcaattgagaaagtttttgtcataggaggtgggcaggtactgagagaatatttgaatggacctgcatgtgaggctatccatctgactgatattcagtcaagcattgagtgtgatactttcatccctccagttgacttttcagtgttccagccatggtattcatctttcccagtggtagagagcaacattaggcattcttttgtgacttttgttcgtgttagaaagtcagtggcagaaactcatgagtcaaatggcaaggaatcaactgagattgataccaagaatgacaaatttgaaatagagaatttctcttttctccccaagatagtatatgaccgccatgaggagtatcaatatctcaatcttgttgaagatattataaggttcggtgctcagaaaaatgacaggacaggaactggaacattgtcaaaatttgggtgtcagatgcgattcaacttaaggaaaaattttcctctgctgacaacaaagagggtgttttggcgtggtgttgtcgaagaactcctttggttcatcagtggctcaacaaatgcaaaggttttgcaagaaaagggtattcatatctgggatggcaatgcttcaagagagtatcttgaccgggaggaaggtgatctaggtccagtttatggatttcaatggcgacactttggtgccgaatatactgacatgcatgctgactatactggaaaaggctttgatcagctaatggatgtgattgacaagattaagaacaatcctgatgaccgccgaataattttatcggcgtggaatccttcagatctcaagaagatggctcttcctccttgccacatgtttgcacaattttatgtggagaacggggagctatcctgccagatgtatcaacgctctgcagacatggggcttggtgttccattcaacatcgcatcatattctcttttgacatatatgattgctcaagtttgtgatctttctccaggagattttgtccatgttataggggatgctcatgtctatagaaatcacgttcgagctctggaggaacagattcagaagatgcctaaaccatttccaattttgaagataaatccttcgaaaaaggatatagattctttcatggcgtcagacttcaagctggttggctatgatcctcaccagaagctagagatgaaaatggcagtgtaacggtggcttagctctggagcccccagccttggaacctcggtgggtgaaatcagtcgaacgaactggtactacataaaaaatgaaccggacatcgcactagcttgtttttggtgatggtgctgaatgttgtgcgggaggcgttttcccccgttattagtagcgatctgcgtgctatatatggtcgctgaagtcaaaattggctctcttttattttttatctactactactactcatttgcgagtgagagatggtctgggcacaccattcaattgcaacggcctactggtgtgttgccccccaatgagggctgtgacgattgcgccactacctcgtgagaaacatgatgtgaccgaaattgctgtgtacctgcatggtagaacaacgcactctttggtatctggttgccttaatacgtgacctggttaattcagtttccagtttggatgggcacaagatagcgatttgctgtggcgttt

SEQ ID NO: 42710 - DNA, 2191 bp, Zea Mays
tctgctcccccaaggcggccgcgccgctttggttgcaatattttccagcatagcttgctcacctacttctcaatttagaagacttcaatttctggatctgagcatcaaatcaagaccataccactttagtcagtcctgtctgatggcactggctgcagctccagccagtggtgattcacagagtggtcctcagaggaactatcaggttgttgtggctgccactcgtgacatgggcattggcaagggtggggtcatgccatggaagcttcttggtgatcttaaattcttcaaagaacttacactaactacaactgatcctgccaaaaagaatgcagttataatgggaaggaaaacatgggagagcattcctgttaagtcaaggccactgcctggtcgtttgaatgtcatacttactcgatctggtagttttgattttgcaacagtagagaatgttgttatatgtggaagtatgaagtctgccttagagctgctagcatcaactccatactgcttatcaattgagaaagtttttgtcataggaggtgggcaggtactgagagaatatttgaatggacctgcatgtgaggctatccatctgactgatattcagtcaagcattgagtgtgatactttcatccctccagttgacttttcagtgttccagccatggtattcatctttcccagtggtagagagcaacattaggcattcttttgtgacttttgttcgtgttagaaagtcagtggcagaaactcatgagtcaaatggcaaggaatcaactgagattgataccaagaatgacaaatttgaaatagagaatttctcttttctccccaagatagtatatgaccgccatgaggagtatcaatatctcaatcttgttgaagatattataaggttcggtgctcagaaaaatgacaggacaggaactggaacattgtcaaaatttgggtgtcagatgcgattcaacttaaggaaaaattttcctctgctgacaacaaagagggtgttttggcgtggtgttgtcgaagaactcctttggttcatcagtggctcaacaaatgcaaaggttttgcaagaaaagggtattcatatctgggatggcaatgcttcaagagagtatcttgaccgtattggcttggcacacagggaggaaggtgatctaggtccagtttatggatttcaatggcgacactttggtgccgaatatactgacatgcatgctgactatactggaaaaggctttgatcagctaatggatgtgattgacaagattaagaacaatcctgatgaccgccgaataattttatcggcgtggaatccttcagatctcaagaagatggctcttcctccttgccacatgtttgcacaattttatgtggagaacggggagctatcctgccagatgtatcaacgctctgcagacatggggcttggtgttccattcaacatcgcatcatattctcttttgacatatatgattgctcaagtttgtgatctttctccaggagattttgtccatgttataggggatgctcatgtctatagaaatcacgttcgagctctggaggaacagattcagaagatgcctaaaccatttccaattttgaagataaatccttcgaaaaaggatatagattctttcatggcgtcagacttcaagctggttggctatgatcctcaccagaagctagagatgaaaatggcagtgtaacggtggcttagctctggagcccccagccttggaacctcggtgggtgaaatcagtcgaacgaactggtactacataaaaaatgaaccggacatcgcactagcttgtttttggtgatggtgctgaatgttgtgcgggaggcgttttcccccgttattagtagcgatctgcgtgctatatatggtcgctgaagtcaaaattggctctcttttattttttatctactactactactcatttgcgagtgagagatggtctgggcacaccattcaattgcaacggcctactggtgtgttgccccccaatgagggctgtgacgattgcgccactacctcgtgagaaacatgatgtgaccgaaattgctgtgtacctgcatggtagaacaacgcactctttggtatctggttgccttaatacgtgacctggttaattcagtttccagtttggatgggcacaagatagcgatttgctgtggcgttt

SEQ ID NO: 42711 - DNA, 2285 bp, Zea Mays
gcgggagccagcaggctctgctcccccaaggcggccgcgccgctttgttcttggtccagatgttagttgcagaggtgctcagagctggagcgtacatctctaggttttctcggcgtgcatgcaaagttgcaatattttccagcatagcttgctcacctacttctcaatttagaagacttcaatttctggatctgagcatcaaatcaagaccataccactttagtcagtcctgtctgatggcactggctgcagctccagccagtggtgattcacagagtggtcctcagaggaactatcaggttgttgtggctgccactcgtgacatgggcattggcaagggtggggtcatgccatggaagcttcttggtgatcttaaattcttcaaagaacttacactaactacaactgatcctgccaaaaagaatgcagttataatgggaaggaaaacatgggagagcattcctgttaagtcaaggccactgcctggtcgtttgaatgtcatacttactcgatctggtagttttgattttgcaacagtagagaatgttgttatatgtggaagtatgaagtctgccttagagctgctagcatcaactccatactgcttatcaattgagaaagtttttgtcataggaggtgggcaggtactgagagaatatttgaatggacctgcatgtgaggctatccatctgactgatattcagtcaagcattgagtgtgatactttcatccctccagttgacttttcagtgttccagccatggtattcatctttcccagtggtagagagcaacattaggcattcttttgtgacttttgttcgtgttagaaagtcagtggcagaaactcatgagtcaaatggcaaggaatcaactgagattgataccaagaatgacaaatttgaaatagagaatttctcttttctccccaagatagtatatgaccgccatgaggagtatcaatatctcaatcttgttgaagatattataaggttcggtgctcagaaaaatgacaggacaggaactggaacattgtcaaaatttgggtgtcagatgcgattcaacttaaggaaaaattttcctctgctgacaacaaagagggtgttttggcgtggtgttgtcgaagaactcctttggttcatcagtggctcaacaaatgcaaaggttttgcaagaaaagggtattcatatctgggatggcaatgcttcaagagagtatcttgaccgtattggcttggcacacagggaggaaggtgatctaggtccagtttatggatttcaatggcgacactttggtgccgaatatactgacatgcatgctgactatactggaaaaggctttgatcagctaatggatgtgattgacaagattaagaacaatcctgatgaccgccgaataattttatcggcgtggaatccttcagatctcaagaagatggctcttcctccttgccacatgtttgcacaattttatgtggagaacggggagctatcctgccagatgtatcaacgctctgcagacatggggcttggtgttccattcaacatcgcatcatattctcttttgacatatatgattgctcaagtttgtgatctttctccaggagattttgtccatgttataggggatgctcatgtctatagaaatcacgttcgagctctggaggaacagattcagaagatgcctaaaccatttccaattttgaagataaatccttcgaaaaaggatatagattctttcatggcgtcagacttcaagctggttggctatgatcctcaccagaagctagagatgaaaatggcagtgtaacggtggcttagctctggagcccccagccttggaacctcggtgggtgaaatcagtcgaacgaactggtactacataaaaaatgaaccggacatcgcactagcttgtttttggtgatggtgctgaatgttgtgcgggaggcgttttcccccgttattagtagcgatctgcgtgctatatatggtcgctgaagtcaaaattggctctcttttattttttatctactactactactcatttgcgagtgagagatggtctgggcacaccattcaattgcaacggcctactggtgtgttgccccccaatgagggctgtgacgattgcgccactacctcgtgagaaacatgatgtgaccgaaattgctgtgtacctgcatggtagaacaacgcactctttggtatctggttgccttaatacgtgacctggttaattcagtttccagtttggatgggcacaagatagcgatttgctgtggcgttt

SEQ ID NO: 42712 - DNA, 2737 bp, Zea Mays
cattgcgctgcttgcggccggcgggtagcgggagccagcaggctctgctcccccaaggcggccgcgccgctttgttcttggtccagatgttagttgcagaggtgctcagagctggagcgtacatctctaggttttctcggcgtgcatgcaaagtatacactactagcggaatatattgtggtagcattttgcatctaaatgcttttgagttctaacaaaatgcagtttcttgcctcaacagaagttgtagactgtactttgttgaacaagtcgcactaggaacttactacattcttgctctatagaaactgtcaggcttgtgagagttctgttatgtaccgcttcttttctaaagaaaaatagtagagttttagaaaacataatgaatacagcttcttttattgaactcttagaagtactccagccattgtagtttaatttatctgcatacagttggttgtattgaacactgggacaccctgaggtctttgttgttcaattatgattatatttctgtatactttatttttaatggttaatcaaaatgctagcttatataatgctccctcaaatgcaggttgcaatattttccagcatagcttgctcacctacttctcaatttagaagacttcaatttctggatctgagcatcaaatcaagaccataccactttagtcagtcctgtctgatggcactggctgcagctccagccagtggtgattcacagagtggtcctcagaggaactatcaggttgttgtggctgccactcgtgacatgggcattggcaagggtggggtcatgccatggaagcttcttggtgatcttaaattcttcaaagaacttacactaactacaactgatcctgccaaaaagaatgcagttataatgggaaggaaaacatgggagagcattcctgttaagtcaaggccactgcctggtcgtttgaatgtcatacttactcgatctggtagttttgattttgcaacagtagagaatgttgttatatgtggaagtatgaagtctgccttagagctgctagcatcaactccatactgcttatcaattgagaaagtttttgtcataggaggtgggcaggtactgagagaatatttgaatggacctgcatgtgaggctatccatctgactgatattcagtcaagcattgagtgtgatactttcatccctccagttgacttttcagtgttccagccatggtattcatctttcccagtggtagagagcaacattaggcattcttttgtgacttttgttcgtgttagaaagtcagtggcagaaactcatgagtcaaatggcaaggaatcaactgagattgataccaagaatgacaaatttgaaatagagaatttctcttttctccccaagatagtatatgaccgccatgaggagtatcaatatctcaatcttgttgaagatattataaggttcggtgctcagaaaaatgacaggacaggaactggaacattgtcaaaatttgggtgtcagatgcgattcaacttaaggaaaaattttcctctgctgacaacaaagagggtgttttggcgtggtgttgtcgaagaactcctttggttcatcagtggctcaacaaatgcaaaggttttgcaagaaaagggtattcatatctgggatggcaatgcttcaagagagtatcttgaccgtattggcttggcacacagggaggaaggtgatctaggtccagtttatggatttcaatggcgacactttggtgccgaatatactgacatgcatgctgactatactggaaaaggctttgatcagctaatggatgtgattgacaagattaagaacaatcctgatgaccgccgaataattttatcggcgtggaatccttcagatctcaagaagatggctcttcctccttgccacatgtttgcacaattttatgtggagaacggggagctatcctgccagatgtatcaacgctctgcagacatggggcttggtgttccattcaacatcgcatcatattctcttttgacatatatgattgctcaagtttgtgatctttctccaggagattttgtccatgttataggggatgctcatgtctatagaaatcacgttcgagctctggaggaacagattcagaagatgcctaaaccatttccaattttgaagataaatccttcgaaaaaggatatagattctttcatggcgtcagacttcaagctggttggctatgatcctcaccagaagctagagatgaaaatggcagtgtaacggtggcttagctctggagcccccagccttggaacctcggtgggtgaaatcagtcgaacgaactggtactacataaaaaatgaaccggacatcgcactagcttgtttttggtgatggtgctgaatgttgtgcgggaggcgttttcccccgttattagtagcgatctgcgtgctatatatggtcgctgaagtcaaaattggctctcttttattttttatctactactactactcatttgcgagtgagagatggtctgggcacaccattcaattgcaacggcctactggtgtgttgccccccaatgagggctgtgacgattgcgccactacctcgtgagaaacatgatgtgaccgaaattgctgtgtacctgcatggtagaacaacgcactctttggtatctggttgccttaatacgtgacctggttaattcagtttccagtttggatgggcacaagatagcgatttgctgtggcgttt

SEQ ID NO: 42713 - DNA, 2302 bp, Zea Mays
ccgactcgcgctcggcacgcaggcaggcgactgcggtggcgctcaggctcgggctctcagcaacggcggggcagtcccagactcagcggctccctctctccaatcgccttgcgccctcgctccgttcctctgctcaccggccgattctgcgttgcaatattttccagcatagcttgctcacctacttctcaatttagaagacttcaatttctggatctgagcatcaaatcaagaccataccactttagtcagtcctgtctgatggcactggctgcagctccagccagtggtgattcacagagtggtcctcagaggaactatcaggttgttgtggctgccactcgtgacatgggcattggcaagggtggggtcatgccatggaagcttcttggtgatcttaaattcttcaaagaacttacactaactacaactgatcctgccaaaaagaatgcagttataatgggaaggaaaacatgggagagcattcctgttaagtcaaggccactgcctggtcgtttgaatgtcatacttactcgatctggtagttttgattttgcaacagtagagaatgttgttatatgtggaagtatgaagtctgccttagagctgctagcatcaactccatactgcttatcaattgagaaagtttttgtcataggaggtgggcagagaatatttgaatggacctgcatgtgaggctatccatctgactgatattcagtcaagcattgagtgtgatactttcatccctccagttgacttttcagtgttccagccatggtattcatctttcccagtggtagagagcaacattaggcattcttttgtgacttttgttcgtgttagaaagtcagtggcagaaactcatgagtcaaatggcaaggaatcaactgagattgataccaagaatgacaaatttgaaatagagaatttctcttttctccccaagatagtatatgaccgccatgaggagtatcaatatctcaatcttgttgaagatattataaggttcggtgctcagaaaaatgacaggacaggaactggaacattgtcaaaatttgggtgtcagatgcgattcaacttaaggaaaaattttcctctgctgacaacaaagagggtgttttggcgtggtgttgtcgaagaactcctttggttcatcagtggctcaacaaatgcaaaggttttgcaagaaaagggtattcatatctgggatggcaatgcttcaagagagtatcttgaccgtattggcttggcacacagggaggaaggtgatctaggtccagtttatggatttcaatggcgacactttggtgccgaatatactgacatgcatgctgactatactggaaaaggctttgatcagctaatggatgtgattgacaagattaagaacaatcctgatgaccgccgaataattttatcggcgtggaatccttcagatctcaagaagatggctcttcctccttgccacatgtttgcacaattttatgtggagaacggggagctatcctgccagatgtatcaacgctctgcagacatggggcttggtgttccattcaacatcgcatcatattctcttttgacatatatgattgctcaagtttgtgatctttctccaggagattttgtccatgttataggggatgctcatgtctatagaaatcacgttcgagctctggaggaacagattcagaagatgcctaaaccatttccaattttgaagataaatccttcgaaaaaggatatagattctttcatggcgtcagacttcaagctggttggctatgatcctcaccagaagctagagatgaaaatggcagtgtaacggtggcttagctctggagcccccagccttggaacctcggtgggtgaaatcagtcgaacgaactggtactacataaaaaatgaaccggacatcgcactagcttgtttttggtgatggtgctgaatgttgtgcgggaggcgttttcccccgttattagtagcgatctgcgtgctatatatggtcgctgaagtcaaaattggctctcttttattttttatctactactactactcatttgcgagtgagagatggtctgggcacaccattcaattgcaacggcctactggtgtgttgccccccaatgagggctgtgacgattgcgccactacctcgtgagaaacatgatgtgaccgaaattgctgtgtacctgcatggtagaacaacgcactctttggtatctggttgccttaatacgtgacctggttaattcagtttccagtttggatgggcacaagatagcgatttgctgtggcgttt

SEQ ID NO: 42714 - DNA, 2225 bp, Zea Mays
ccgactcgcgctcggcacgcaggcaggcgactgcggtggcgctcaggctcgggctctcagcaacggttgcaatattttccagcatagcttgctcacctacttctcaatttagaagacttcaatttctggatctgagcatcaaatcaagaccataccactttagtcagtcctgtctgatggcactggctgcagctccagccagtggtgattcacagagtggtcctcagaggaactatcaggttgttgtggctgccactcgtgacatgggcattggcaagggtggggtcatgccatggaagcttcttggtgatcttaaattcttcaaagaacttacactaactacaactgatcctgccaaaaagaatgcagttataatgggaaggaaaacatgggagagcattcctgttaagtcaaggccactgcctggtcgtttgaatgtcatacttactcgatctggtagttttgattttgcaacagtagagaatgttgttatatgtggaagtatgaagtctgccttagagctgctagcatcaactccatactgcttatcaattgagaaagtttttgtcataggaggtgggcaggtactgagagaatatttgaatggacctgcatgtgaggctatccatctgactgatattcagtcaagcattgagtgtgatactttcatccctccagttgacttttcagtgttccagccatggtattcatctttcccagtggtagagagcaacattaggcattcttttgtgacttttgttcgtgttagaaagtcagtggcagaaactcatgagtcaaatggcaaggaatcaactgagattgataccaagaatgacaaatttgaaatagagaatttctcttttctccccaagatagtatatgaccgccatgaggagtatcaatatctcaatcttgttgaagatattataaggttcggtgctcagaaaaatgacaggacaggaactggaacattgtcaaaatttgggtgtcagatgcgattcaacttaaggaaaaattttcctctgctgacaacaaagagggtgttttggcgtggtgttgtcgaagaactcctttggttcatcagtggctcaacaaatgcaaaggttttgcaagaaaagggtattcatatctgggatggcaatgcttcaagagagtatcttgaccgtattggcttggcacacagggaggaaggtgatctaggtccagtttatggatttcaatggcgacactttggtgccgaatatactgacatgcatgctgactatactggaaaaggctttgatcagctaatggatgtgattgacaagattaagaacaatcctgatgaccgccgaataattttatcggcgtggaatccttcagatctcaagaagatggctcttcctccttgccacatgtttgcacaattttatgtggagaacggggagctatcctgccagatgtatcaacgctctgcagacatggggcttggtgttccattcaacatcgcatcatattctcttttgacatatatgattgctcaagtttgtgatctttctccaggagattttgtccatgttataggggatgctcatgtctatagaaatcacgttcgagctctggaggaacagattcagaagatgcctaaaccatttccaattttgaagataaatccttcgaaaaaggatatagattctttcatggcgtcagacttcaagctggttggctatgatcctcaccagaagctagagatgaaaatggcagtgtaacggtggcttagctctggagcccccagccttggaacctcggtgggtgaaatcagtcgaacgaactggtactacataaaaaatgaaccggacatcgcactagcttgtttttggtgatggtgctgaatgttgtgcgggaggcgttttcccccgttattagtagcgatctgcgtgctatatatggtcgctgaagtcaaaattggctctcttttattttttatctactactactactcatttgcgagtgagagatggtctgggcacaccattcaattgcaacggcctactggtgtgttgccccccaatgagggctgtgacgattgcgccactacctcgtgagaaacatgatgtgaccgaaattgctgtgtacctgcatggtagaacaacgcactctttggtatctggttgccttaatacgtgacctggttaattcagtttccagtttggatgggcacaagatagcgatttgctgtggcgttt

SEQ ID NO: 42715 - DNA, 2292 bp, Zea Mays
ccgactcgcgctcggcacgcaggcaggcgactgcggtggcgctcaggctcgggctctcagcaacggcggggcagtcccagactcagcggctccctctctccaatcgccttgcgccctcgctccgttcctctgctcaccggccgattctgcgttgcaatattttccagcatagcttgctcacctacttctcaatttagaagacttcaatttctggatctgagcatcaaatcaagaccataccactttagtcagtcctgtctgatggcactggctgcagctccagccagtggtgattcacagagtggtcctcagaggaactatcaggttgttgtggctgccactcgtgacatgggcattggcaagggtggggtcatgccatggaagcttcttggtgatcttaaattcttcaaagaacttacactaactacaactgatcctgccaaaaagaatgcagttataatgggaaggaaaacatgggagagcattcctgttaagtcaaggccactgcctggtcgtttgaatgtcatacttactcgatctggtagttttgattttgcaacagtagagaatgttgttatatgtggaagtatgaagtctgccttagagctgctagcatcaactccatactgcttatcaattgagaaagtttttgtcataggaggtgggcaggtactgagagaatatttgaatggacctgcatgtgaggctatccatctgactgatattcagtcaagcattgagtgtgatactttcatccctccagttgacttttcagtgttccagccatggtattcatctttcccagtggtagagagcaacattaggcattcttttgtgacttttgttcgtgttagaaagtcagtggcagaaactcatgagtcaaatggcaaggaatcaactgagattgataccaagaatgacaaatttgaaatagagaatttctcttttctccccaagatagtatatgaccgccatgaggagtatcaatatctcaatcttgttgaagatattataaggttcggtgctcagaaaaatgacaggacaggaactggaacattgtcaaaatttgggtgtcagatgcgattcaacttaaggaaaaattttcctctgctgacaacaaagagggtgttttggcgtggtgttgtcgaagaactcctttggttcatcagtggctcaacaaatgcaaaggttttgcaagaaaagggtattcatatctgggatggcaatgcttcaagagagtatcttgaccgggaggaaggtgatctaggtccagtttatggatttcaatggcgacactttggtgccgaatatactgacatgcatgctgactatactggaaaaggctttgatcagctaatggatgtgattgacaagattaagaacaatcctgatgaccgccgaataattttatcggcgtggaatccttcagatctcaagaagatggctcttcctccttgccacatgtttgcacaattttatgtggagaacggggagctatcctgccagatgtatcaacgctctgcagacatggggcttggtgttccattcaacatcgcatcatattctcttttgacatatatgattgctcaagtttgtgatctttctccaggagattttgtccatgttataggggatgctcatgtctatagaaatcacgttcgagctctggaggaacagattcagaagatgcctaaaccatttccaattttgaagataaatccttcgaaaaaggatatagattctttcatggcgtcagacttcaagctggttggctatgatcctcaccagaagctagagatgaaaatggcagtgtaacggtggcttagctctggagcccccagccttggaacctcggtgggtgaaatcagtcgaacgaactggtactacataaaaaatgaaccggacatcgcactagcttgtttttggtgatggtgctgaatgttgtgcgggaggcgttttcccccgttattagtagcgatctgcgtgctatatatggtcgctgaagtcaaaattggctctcttttattttttatctactactactactcatttgcgagtgagagatggtctgggcacaccattcaattgcaacggcctactggtgtgttgccccccaatgagggctgtgacgattgcgccactacctcgtgagaaacatgatgtgaccgaaattgctgtgtacctgcatggtagaacaacgcactctttggtatctggttgccttaatacgtgacctggttaattcagtttccagtttggatgggcacaagatagcgatttgctgtggcgttt

SEQ ID NO: 42716 - DNA, 2309 bp, Zea Mays
cgacgctgcaacttccgctccctccccgactcgcgctcggcacgcaggcaggcgactgcggtggcgctcaggctcgggctctcagcaacggcggggcagtcccagactcagcggctccctctctccaatcgccttgcgccctcgctccgttcctctgctcaccggccgattctgcgttgcaatattttccagcatagcttgctcacctacttctcaatttagaagacttcaatttctggatctgagcatcaaatcaagaccataccactttagtcagtcctgtctgatggcactggctgcagctccagccagtggtgattcacagagtggtcctcagaggaactatcaggttgttgtggctgccactcgtgacatgggcattggcaagggtggggtcatgccatggaagcttcttggtgatcttaaattcttcaaagaacttacactaactacaactgatcctgccaaaaagaatgcagttataatgggaaggaaaacatgggagagcattcctgttaagtcaaggccactgcctggtcgtttgaatgtcatacttactcgatctggtagttttgattttgcaacagtagagaatgttgttatatgtggaagtatgaagtctgccttagagctgctagcatcaactccatactgcttatcaattgagaaagtttttgtcataggaggtgggcagagaatatttgaatggacctgcatgtgaggctatccatctgactgatattcagtcaagcattgagtgtgatactttcatccctccagttgacttttcagtgttccagccatggtattcatctttcccagtggtagagagcaacattaggcattcttttgtgacttttgttcgtgttagaaagtcagtggcagaaactcatgagtcaaatggcaaggaatcaactgagattgataccaagaatgacaaatttgaaatagagaatttctcttttctccccaagatagtatatgaccgccatgaggagtatcaatatctcaatcttgttgaagatattataaggttcggtgctcagaaaaatgacaggacaggaactggaacattgtcaaaatttgggtgtcagatgcgattcaacttaaggaaaaattttcctctgctgacaacaaagagggtgttttggcgtggtgttgtcgaagaactcctttggttcatcagtggctcaacaaatgcaaaggttttgcaagaaaagggtattcatatctgggatggcaatgcttcaagagagtatcttgaccgggaggaaggtgatctaggtccagtttatggatttcaatggcgacactttggtgccgaatatactgacatgcatgctgactatactggaaaaggctttgatcagctaatggatgtgattgacaagattaagaacaatcctgatgaccgccgaataattttatcggcgtggaatccttcagatctcaagaagatggctcttcctccttgccacatgtttgcacaattttatgtggagaacggggagctatcctgccagatgtatcaacgctctgcagacatggggcttggtgttccattcaacatcgcatcatattctcttttgacatatatgattgctcaagtttgtgatctttctccaggagattttgtccatgttataggggatgctcatgtctatagaaatcacgttcgagctctggaggaacagattcagaagatgcctaaaccatttccaattttgaagataaatccttcgaaaaaggatatagattctttcatggcgtcagacttcaagctggttggctatgatcctcaccagaagctagagatgaaaatggcagtgtaacggtggcttagctctggagcccccagccttggaacctcggtgggtgaaatcagtcgaacgaactggtactacataaaaaatgaaccggacatcgcactagcttgtttttggtgatggtgctgaatgttgtgcgggaggcgttttcccccgttattagtagcgatctgcgtgctatatatggtcgctgaagtcaaaattggctctcttttattttttatctactactactactcatttgcgagtgagagatggtctgggcacaccattcaattgcaacggcctactggtgtgttgccccccaatgagggctgtgacgattgcgccactacctcgtgagaaacatgatgtgaccgaaattgctgtgtacctgcatggtagaacaacgcactctttggtatctggttgccttaatacgtgacctggttaattcagtttccagtttggatgggcacaagatagcgatttgctgtggcgttt

SEQ ID NO: 42717 - DNA, 2355 bp, Zea Mays
cttcatcttcctcgcaacgccgacgctgcaacttccgctccctccccgactcgcgctcggcacgcaggcaggcgactgcggtggcgctcaggctcgggctctcagcaacggcggggcagtcccagactcagcggctccctctctccaatcgccttgcgccctcgctccgttcctctgctcaccggccgattctgcgttgcaatattttccagcatagcttgctcacctacttctcaatttagaagacttcaatttctggatctgagcatcaaatcaagaccataccactttagtcagtcctgtctgatggcactggctgcagctccagccagtggtgattcacagagtggtcctcagaggaactatcaggttgttgtggctgccactcgtgacatgggcattggcaagggtggggtcatgccatggaagcttcttggtgatcttaaattcttcaaagaacttacactaactacaactgatcctgccaaaaagaatgcagttataatgggaaggaaaacatgggagagcattcctgttaagtcaaggccactgcctggtcgtttgaatgtcatacttactcgatctggtagttttgattttgcaacagtagagaatgttgttatatgtggaagtatgaagtctgccttagagctgctagcatcaactccatactgcttatcaattgagaaagtttttgtcataggaggtgggcaggtactgagagaatatttgaatggacctgcatgtgaggctatccatctgactgatattcagtcaagcattgagtgtgatactttcatccctccagttgacttttcagtgttccagccatggtattcatctttcccagtggtagagagcaacattaggcattcttttgtgacttttgttcgtgttagaaagtcagtggcagaaactcatgagtcaaatggcaaggaatcaactgagattgataccaagaatgacaaatttgaaatagagaatttctcttttctccccaagatagtatatgaccgccatgaggagtatcaatatctcaatcttgttgaagatattataaggttcggtgctcagaaaaatgacaggacaggaactggaacattgtcaaaatttgggtgtcagatgcgattcaacttaaggaaaaattttcctctgctgacaacaaagagggtgttttggcgtggtgttgtcgaagaactcctttggttcatcagtggctcaacaaatgcaaaggttttgcaagaaaagggtattcatatctgggatggcaatgcttcaagagagtatcttgaccgtattggcttggcacacagggaggaaggtgatctaggtccagtttatggatttcaatggcgacactttggtgccgaatatactgacatgcatgctgactatactggaaaaggctttgatcagctaatggatgtgattgacaagattaagaacaatcctgatgaccgccgaataattttatcggcgtggaatccttcagatctcaagaagatggctcttcctccttgccacatgtttgcacaattttatgtggagaacggggagctatcctgccagatgtatcaacgctctgcagacatggggcttggtgttccattcaacatcgcatcatattctcttttgacatatatgattgctcaagtttgtgatctttctccaggagattttgtccatgttataggggatgctcatgtctatagaaatcacgttcgagctctggaggaacagattcagaagatgcctaaaccatttccaattttgaagataaatccttcgaaaaaggatatagattctttcatggcgtcagacttcaagctggttggctatgatcctcaccagaagctagagatgaaaatggcagtgtaacggtggcttagctctggagcccccagccttggaacctcggtgggtgaaatcagtcgaacgaactggtactacataaaaaatgaaccggacatcgcactagcttgtttttggtgatggtgctgaatgttgtgcgggaggcgttttcccccgttattagtagcgatctgcgtgctatatatggtcgctgaagtcaaaattggctctcttttattttttatctactactactactcatttgcgagtgagagatggtctgggcacaccattcaattgcaacggcctactggtgtgttgccccccaatgagggctgtgacgattgcgccactacctcgtgagaaacatgatgtgaccgaaattgctgtgtacctgcatggtagaacaacgcactctttggtatctggttgccttaatacgtgacctggttaattcagtttccagtttggatgggcacaagatagcgatttgctgtggcgttt

SEQ ID NO: 42718 - DNA, 2227 bp, Zea Mays
cttcatcttcctcgcaacgccgacgctgcaacttccgctccctccccgactcgcgctcggcacgcaggttgcaatattttccagcatagcttgctcacctacttctcaatttagaagacttcaatttctggatctgagcatcaaatcaagaccataccactttagtcagtcctgtctgatggcactggctgcagctccagccagtggtgattcacagagtggtcctcagaggaactatcaggttgttgtggctgccactcgtgacatgggcattggcaagggtggggtcatgccatggaagcttcttggtgatcttaaattcttcaaagaacttacactaactacaactgatcctgccaaaaagaatgcagttataatgggaaggaaaacatgggagagcattcctgttaagtcaaggccactgcctggtcgtttgaatgtcatacttactcgatctggtagttttgattttgcaacagtagagaatgttgttatatgtggaagtatgaagtctgccttagagctgctagcatcaactccatactgcttatcaattgagaaagtttttgtcataggaggtgggcaggtactgagagaatatttgaatggacctgcatgtgaggctatccatctgactgatattcagtcaagcattgagtgtgatactttcatccctccagttgacttttcagtgttccagccatggtattcatctttcccagtggtagagagcaacattaggcattcttttgtgacttttgttcgtgttagaaagtcagtggcagaaactcatgagtcaaatggcaaggaatcaactgagattgataccaagaatgacaaatttgaaatagagaatttctcttttctccccaagatagtatatgaccgccatgaggagtatcaatatctcaatcttgttgaagatattataaggttcggtgctcagaaaaatgacaggacaggaactggaacattgtcaaaatttgggtgtcagatgcgattcaacttaaggaaaaattttcctctgctgacaacaaagagggtgttttggcgtggtgttgtcgaagaactcctttggttcatcagtggctcaacaaatgcaaaggttttgcaagaaaagggtattcatatctgggatggcaatgcttcaagagagtatcttgaccgtattggcttggcacacagggaggaaggtgatctaggtccagtttatggatttcaatggcgacactttggtgccgaatatactgacatgcatgctgactatactggaaaaggctttgatcagctaatggatgtgattgacaagattaagaacaatcctgatgaccgccgaataattttatcggcgtggaatccttcagatctcaagaagatggctcttcctccttgccacatgtttgcacaattttatgtggagaacggggagctatcctgccagatgtatcaacgctctgcagacatggggcttggtgttccattcaacatcgcatcatattctcttttgacatatatgattgctcaagtttgtgatctttctccaggagattttgtccatgttataggggatgctcatgtctatagaaatcacgttcgagctctggaggaacagattcagaagatgcctaaaccatttccaattttgaagataaatccttcgaaaaaggatatagattctttcatggcgtcagacttcaagctggttggctatgatcctcaccagaagctagagatgaaaatggcagtgtaacggtggcttagctctggagcccccagccttggaacctcggtgggtgaaatcagtcgaacgaactggtactacataaaaaatgaaccggacatcgcactagcttgtttttggtgatggtgctgaatgttgtgcgggaggcgttttcccccgttattagtagcgatctgcgtgctatatatggtcgctgaagtcaaaattggctctcttttattttttatctactactactactcatttgcgagtgagagatggtctgggcacaccattcaattgcaacggcctactggtgtgttgccccccaatgagggctgtgacgattgcgccactacctcgtgagaaacatgatgtgaccgaaattgctgtgtacctgcatggtagaacaacgcactctttggtatctggttgccttaatacgtgacctggttaattcagtttccagtttggatgggcacaagatagcgatttgctgtggcgttt

SEQ ID NO: 42719 - DNA, 1224 bp, Zea Mays
agagctcaaagttactgatgtatcaacatatcatgaaaacaaatgttcatttttttgtaaaaaaacaatataggatccaatacccttgttggcaaacagatataaaatctatatatcaacaaaatacatctcacgttcagacaatctggaactacatcccgacattcttccaatcacaccaatatgtccaagaaaatccaatggccaatggagatacagggaatgttacttaatactacctccgttctcaaatatttgtcgcccgctagttcatttttgaactaaaacacgagaaataaaaaagaacggagggagtacaaaatgacaaattatattgatataatcaactacaccatgttgatataaatagtgtggttccacacaagccatgaaactcaatactaagaactttgtctactaccattgcataatgatatcctcgcctagcaactctgagtagatattatacagcacatggtgcgatgtaacattaattgacataactaaaagaggagtaagctagtccacgctccacagcacgcagatctatttagatgtagcgagatcttgcaacggatctggtctagttaacaggcaagattttatcagcctcaccaaaggtagccggggatcttgatgcggaggaagagcatggccatggcgtaggcgatgagaacggcgactgcgccggcgcttccaaacgaggcgcggaggctccggggcctggtgcggtcgaccgcaaggtcgaggaggatgatgccaacgccgccaaggacgaacatgaacccggaggagagcccctcgatgatgtactggccgttgacgcgccctgggaggaagacgactgggcggacggcgccggtgccggggtcctgggcgctgccgatgccggggggctcaacgatgacgtcgtagacgaggccggagacgaccgcgaagtaggtgagtaggatgagggagaagacggtcatgggtgagggaagcgccaggttcgacggcagcctcaggcgggtgcgcggcggccgaaggaaggagaatggtagcacgcggaggacgtggaagaggggatccatggagtcgaagtgggcctgcgtggccaccggagcggcggcgctgccgccggcgtgatccgatctaggggccatcgcgccttagagtggggaagggagaaaatacggggtacgcttgggtttggcctttttttttagttatggcactttaagt

SEQ ID NO: 42720 - DNA, 4189 bp, Zea Mays
ctgccctccgccccctaaaccctagccgtttcccatagccgctcgccccagcctcctctgcccagagacttttctttgcggccgaaatggatgactcggagaacaacgcaccctcgacgccggggtcccccgggttcagcaccgaccggctgccacccaacaccaccaccagccgcggcgccaccgacccgtcatcttactccgacgacgatggcgaagctgaggtcgatcctcacgtgctacccgatgacgacgaccccgccgctgtagcggctcccgacgaggacgaggagggggaggacctcttcaacgacaactacctcgatgattaccgaaggatggatgagcatgatcaatatgagtcagttggtttagatgattcactcgaggatgagaggaatcttgatgaaatcatggctgatcgaagggccgcggaagcggagcttgatgcaagggaagtgaggactggtgcaacagctgataggaagctgccacgaatgctccacgatcagatacagatgatgatacgaatttcaggcgtcctaaaaggcacagggctagttttagacaaccaagtggaccaagaacaccaagaagtgatgatgatggtgatggtgccactcctagttcacctggaagatctcatcgtggaatgtcatctggtggtgatgtgcctatgactgatcagactgatgatgacccatatgaggatgaatttgatgaagaagatgagatgaacatgtaccgtgtccaaggtacattgagagagtgggtcacaagagatgaagtccgtcgctttattgcaaagaaatttaaagaatttcttctgacatatgttcatccgaagaacgatcaaggagagtttgagtatgttcggcttattaatgagatggttttagctaacaagtgtagcctggaaatagactacaagcagtttatttatatacatccaaacattgccatctggttggctgatgcgcctcaatcggtgcttgaagttatggaagaagttgccaaaaatgttgtttttgatcttcacaagaattataggaacatccaccaaaagatctatgttcgaatatcgaaccttcctgtctatgatcaaatacgcaatatcaggcaaatccatctgaacacaatgattcgaattggtggtgttgttacccgacgatctggtgtattccctcagctgcagcaggtgaagtatgactgtaacaaatgtggaactatcctgggccctttcttccaaaactcctacactgaggtgaaagttggatcatgccctgaatgtcaatccaaagggccattcacagtcaatgtcgagcagactatatataggaactaccagaaactcactcttcaggaaagcccaggaattgttcctgctggaaggcttcccagatacaaggaagtcatacttctgaatgatctgattgactgtgctcgtccaggagaggagattgaggtcactgggatatacacaaataattttgacctgtctttgaatacaaagaatggtttccctgtttttgccacagtggttgaggcaaactatgtggcaaaaaaacaggatttgttttctgcatacaaattaacggacgaggacaaagcagagattgagaagttgtcaaaggatccaaggattggagaaaggattatcaaatcaattgcaccatccatttacgggcatgaagatatcaagactgccattgcacttgctatgtttggtggacaagagaagaatgtgaagggaaaacatcgcctgagaggcgacatcaatgtcctcctcctgggtgatccaggcactgcaaaatcacagtttcttaagtatgtggagaaaacaggacacagagcagtatatacaactggaaaaggagcctctgctgttggtcttactgctgcagttcacaaagatccagtaacacgagaatggacacttgagggaggtgcactagttcttgctgataggggcatttgcctcattgatgagtttgacaagatgaatgatcaagatagggtaagtattcatgaagctatggagcaacagagtatcagtatatcaaaagcaggaatcgtcacatctcttcaagctagatgcagtgttattgctgcggcaaacccagtagggggaaggtatgattcatcaaagacattcactcagaatgtcgaattgacggatcccattatttcacgttttgacgtcctctgtgtggttaaggatattgtcgatccatttacagatgaaatgctcgcaaggtttgttgtagatagtcacgccagatcccagccgaagggggctaaccttgaagacagggtttcaactgatgtggatgatgatccactggctgctgcaaggcaagctgacccagatgtcctttcccaagacatgctgaagaaatacatgatgccgatctagacaagattagccatgtttatgctgaactccgccgtgaatcctctcatggccaaggggttcctattgcagtaaggcatatagagtcaatcatccggatgtcggaggcacatgcaaggatgcatctgaggagctacgtgtctcaggaagatgttgacatggccatccgtgtcttgcttgactcttttatttcgactcagaagttcggtgtgcagaaagcacttcaaaagaatttccggaagtacatgacattcaagaaggactacaacgagctgctcctgctgctcctgcgcacactggtcaaggacgccgtgcacttcgaagaaatcatggcaggatcagcctcacgtcttactcacgtcgaggtcaaattggaggacctgaggaacaaggcccaagaatacgagatctacgatctgaagccgttcttctccagcgcgtgcttcagggacaacggcttccttctggatgaagggcgtgggatcatcaggcatccactggcggagtaacaactgagaactgatcttcctcatgtctagaaccggcctttgtctgttacggccctgagatgaagagtgatgatatctgacctcatttgttataggcatacaattgacacttggctggtcgccttttggatttagtatctgttgtgtcttgtttgagagtttcgtactatatgcacttgctgccatttaggcgtgactgtatggtgtgtgaaatcattcgttagatagaatgatcggtgtggctgcaagcaacaaatagttagaaaaagaaacaaaaacgaactgcagccaaaagaccctgagggttattgaagatgatgaatgcatcagttgccatgccttagaagaagagtatgctaagcttttccatcaacccttgtctgacgaatatgtggctgccttagctgccctctttggctgttctgttcagttacaaccttttgtagatagaattgtagatcaactctccggatggaaatcatattcacgagagtgcaagaacattatgtgcttaatgggatgcttatgtatctttctatagttattaatattccctcttgggctatcaagactattgataaaaatcagaataagttttctttagggcttggtattcatcccaatactcatgggttgagggggattaagatgtaaattaaaccgatttatatctcatgccttgttcggttattctaattccatgtggattagaatgtatttcggttattctaattcatgtggattagaatgtattgagatgtattttaacttgctatgtatttaaaccgactcaataccattcaatccacatgtattaacggtgaaacgaacgagccctcaatccaccccaaccatatgtatcgaagtaaatataagagtatccaaacataaccttatatggtgaaatgaagtcgaaagggcactgcttcgttgcatgaggaagtgtttgtagacctctctagatggacagacttgcatctccggtctcaaagagcttagttggacattgtgtagtttacctatccaagtgtcaggcaaaaagcacgagctttcttcccggtggtgctgctctcggaagttgggaattgggcacacactttgttctagattgataaatggatttatgggtagaaaattgctaatcttgcacctagaatatttaaggcaattccgaagagaatttctaacaaaagaacgattcatgaagccttctcagatataagatggatttttgatattgctagatctccatctgtttggatcttag

SEQ ID NO: 42721 - DNA, 4199 bp, Zea Mays
cgcccccgtctgccctccgccccctaaaccctagccgtttcccatagccgctcgccccagcctcctctgcccagagacttttctttgcggccgaaatggatgactcggagaacaacgcaccctcgacgccggggtcccccgggttcagcaccgaccggctgccacccaacaccaccaccagccgcggcgccaccgacccgtcatcttactccgacgacgatggcgaagctgaggtcgatcctcacgtgctacccgatgacgacgaccccgccgctgtagcggctcccgacgaggacgaggagggggaggacctcttcaacgacaactacctcgatgattaccgaaggatggatgagcatgatcaatatgagtcagttggtttagatgattcactcgaggatgagaggaatcttgatgaaatcatggctgatcgaagggccgcggaagcggagcttgatgcaagggaagtgaggactggtgcaacagctgataggaagctgccacgaatgctccacgatcaggatacagatgatgatacgaatttcaggcgtcctaaaaggcacagggctagttttagacaaccaagtggaccaagaacaccaagaagtgatgatgatggtgatggtgccactcctagttcacctggaagatctcatcgtggaatgtcatctggtggtgatgtgcctatgactgatcagactgatgatgacccatatgaggatgaatttgatgaagaagatgagatgaacatgtaccgtgtccaaggtacattgagagagtgggtcacaagagatgaagtccgtcgctttattgcaaagaaatttaaagaatttcttctgacatatgttcatccgaagaacgatcaaggagagtttgagtatgttcggcttattaatgagatggttttagctaacaagtgtagcctggaaatagactacaagcagtttatttatatacatccaaacattgccatctggttggctgatgcgcctcaatcggtgcttgaagttatggaagaagttgccaaaaatgttgtttttgatcttcacaagaattataggaacatccaccaaaagatctatgttcgaatatcgaaccttcctgtctatgatcaaatacgcaatatcaggcaaatccatctgaacacaatgattcgaattggtggtgttgttacccgacgatctggtgtattccctcagctgcagcaggtgaagtatgactgtaacaaatgtggaactatcctgggccctttcttccaaaactcctacactgaggtgaaagttggatcatgccctgaatgtcaatccaaagggccattcacagtcaatgtcgagcagactatatataggaactaccagaaactcactcttcaggaaagcccaggaattgttcctgctggaaggcttcccagatacaaggaagtcatacttctgaatgatctgattgactgtgctcgtccaggagaggagattgaggtcactgggatatacacaaataattttgacctgtctttgaatacaaagaatggtttccctgtttttgccacagtggttgaggcaaactatgtggcaaaaaaacaggatttgttttctgcatacaaattaacggacgaggacaaagcagagattgagaagttgtcaaaggatccaaggattggagaaaggattatcaaatcaattgcaccatccatttacgggcatgaagatatcaagactgccattgcacttgctatgtttggtggacaagagaagaatgtgaagggaaaacatcgcctgagaggcgacatcaatgtcctcctcctgggtgatccaggcactgcaaaatcacagtttcttaagtatgtggagaaaacaggacacagagcagtatatacaactggaaaaggagcctctgctgttggtcttactgctgcagttcacaaagatccagtaacacgagaatggacacttgagggaggtgcactagttcttgctgataggggcatttgcctcattgatgagtttgacaagatgaatgatcaagatagggtaagtattcatgaagctatggagcaacagagtatcagtatatcaaaagcaggaatcgtcacatctcttcaagctagatgcagtgttattgctgcggcaaacccagtagggggaaggtatgattcatcaaagacattcactcagaatgtcgaattgacggatcccattatttcacgttttgacgtcctctgtgtggttaaggatattgtcgatccatttacagatgaaatgctcgcaaggtttgttgtagatagtcacgccagatcccagccgaagggggctaaccttgaagacagggtttcaactgatgtggatgatgatccactggctgctgcaaggcaagctgacccagatgtcctttcccaagacatgctgaagaaatacatgatgccgatctagacaagattagccatgtttatgctgaactccgccgtgaatcctctcatggccaaggggttcctattgcagtaaggcatatagagtcaatcatccggatgtcggaggcacatgcaaggatgcatctgaggagctacgtgtctcaggaagatgttgacatggccatccgtgtcttgcttgactcttttatttcgactcagaagttcggtgtgcagaaagcacttcaaaagaatttccggaagtacatgacattcaagaaggactacaacgagctgctcctgctgctcctgcgcacactggtcaaggacgccgtgcacttcgaagaaatcatggcaggatcagcctcacgtcttactcacgtcgaggtcaaattggaggacctgaggaacaaggcccaagaatacgagatctacgatctgaagccgttcttctccagcgcgtgcttcagggacaacggcttccttctggatgaagggcgtgggatcatcaggcatccactggcggagtaacaactgagaactgatcttcctcatgtctagaaccggcctttgtctgttacggccctgagatgaagagtgatgatatctgacctcatttgttataggcatacaattgacacttggctggtcgccttttggatttagtatctgttgtgtcttgtttgagagtttcgtactatatgcacttgctgccatttaggcgtgactgtatggtgtgtgaaatcattcgttagatagaatgatcggtgtggctgcaagcaacaaatagttagaaaaagaaacaaaaacgaactgcagccaaaagaccctgagggttattgaagatgatgaatgcatcagttgccatgccttagaagaagagtatgctaagcttttccatcaacccttgtctgacgaatatgtggctgccttagctgccctctttggctgttctgttcagttacaaccttttgtagatagaattgtagatcaactctccggatggaaatcatattcacgagagtgcaagaacattatgtgcttaatgggatgcttatgtatctttctatagttattaatattccctcttgggctatcaagactattgataaaaatcagaataagttttctttagggcttggtattcatcccaatactcatgggttgagggggattaagatgtaaattaaaccgatttatatctcatgccttgttcggttattctaattccatgtggattagaatgtatttcggttattctaattcatgtggattagaatgtattgagatgtattttaacttgctatgtatttaaaccgactcaataccattcaatccacatgtattaacggtgaaacgaacgagccctcaatccaccccaaccatatgtatcgaagtaaatataagagtatccaaacataaccttatatggtgaaatgaagtcgaaagggcactgcttcgttgcatgaggaagtgtttgtagacctctctagatggacagacttgcatctccggtctcaaagagcttagttggacattgtgtagtttacctatccaagtgtcaggcaaaaagcacgagctttcttcccggtggtgctgctctcggaagttgggaattgggcacacactttgttctagattgataaatggatttatgggtagaaaattgctaatcttgcacctagaatatttaaggcaattccgaagagaatttctaacaaaagaacgattcatgaagccttctcagatataagatggatttttgatattgctagatctccatctgtttggatcttag

SEQ ID NO: 42722 - DNA, 904 bp, Zea Mays
aagcattactgaaagggcagctgaaaagaaggtgatagatgtggaatgtgcaatggtaaaggaatgttaccttgtatagcatgtggatcacgtggattagtgacatgcaacacatgtactggatatggttccctccttgcacaaagcatggctcatgttcaatgacgctgtcagctagaaaagttagtgcagctagaggggctgcctcggtccctgaagaagttttccacagagccaaaggagtgcagctatgcaacatacaggcataccagtgcactcctgcattttttgctgattcatacccactcaaccagttctcctcagaagtcatcgctagccggctgccagttccaccatctgcaagggttatttccgagagacacatcatttcagttgtgcctgtaacccgtgtcacaatggcgcgtcgcaagcagtcatttagcttctatgtcgttggctacagcagggatgtgttcataagagactatccttcgaagttttgctggggcctctgctgctgcttcgagtggctggggaaatagttatttcctgggcacgaatgaatgccttctttcagtgtgcagtgtttcattgtacagaaggctgcgtgaaagcttaaaataagcattgcgaattcttgtattttctattaaagaatatatctgtgcgtattgcagtattagattctgcatatttggatttcctgtgtataagtacatcactgtatatattgttcagtgaaaataaaaaatggcgacgtctggccatttcaaacgtgatgtatagtattttgaaatggcttttgatcagtttacacatgcacagtgcagtatcgttttattcactattagtcccggatacgtttgtttaactgtttttttctagtaaagcatatattgttgtt

SEQ ID NO: 42723 - DNA, 2691 bp, Zea Mays
agaggcactcatcattgttcttgtcctttctccttttccgttttccagaggctgaagcatattctggaggcaaaaaaatgagatttgtttgaagtttttggcggccattagttcatccgtgtttctccatggaagtgtaggatgaaacatcatgtggatcaccgagatggatagggagaggcctctcgtgtgtgtgcatcaagcggaaaggcacatatgaaaggatatgcatgaacctcacaccagtgcaggaagaaaggcttcagagattgaagcatcgcatgaaggtttactttgatccatctagacgagatcaccaggaagccctgaaagctctttggcatgcaacataccctgatcaagaacttgaaggtttgatatctgagcagtggaaggacatgggctggcaaggaagagacccatcaactgactttagaggcgcaggattcatatccctggagaatcttttgttctttgccaagacgttctccgcatcgtttcagagacttctaaataaacagtgcggtaacagagccacatgggagtacccatttgcggttgctggtgtaaatattacattcatgatcatgcagatgctagatctccagtctactaagccaagaacatttgtgcgagccatttttatccaaatgctctcagaggatgagtgggcatttgatctgctctactgtgtcgcatttgttgtgatggacaagcagtggctggacaagaatgcatcttacatggacttcaatgaggtgctgaagtcgacacgagcccagctggagagggagcttatgctggacgatgtcatccgcatcgaagacatgccgtcatacagcctgctttgctagtaaccaaaacaccgaattcgccggagaacagaactgagttgatggttcaactgtatagtacctccctttgtctgatttctgggaggattttttttagcaacaaagtagagtgatgacgtactggtatcatgcttaatttgggctaatgatggtgatatgcacattctcagaagtgttacaatgttctgtacttgtctaagcatttgtcagatatctaatattgatcatttgatccacccatcattctcctatctgcatcatcttttctggggattgccataaactttcatgagcacaacggggaactagaccagcacatttccttgtggtggcgataactatggttgctccagtgacccatcaccattaactgcgcttgccccagggattttagagagcctcgctcccttcatcaccttcctcagcttgtccacgtcctgccacctaccagcctcggcatacaagttggacagtaccacatacactccatggttactgggatttagtttcagcatctccaccgctgcccgctccgcaatctcaatgacaccgtggttcttgcaggccgtcaggagtgctccccatatcacggtgtccgccttgcatgacatctcccgtatcatatcctccgcttccgataagaggccagcacggccaaggaggtccaccatgcatccgtagtgctggattcctggaacgatcccgaagtccttctccatggacctgaacagccggcgggcctcgtccagcagccctgggtgggagcacgccgagagtgccccgacgagtgtggtcgcattcggtggcacaccctcccgctgcatccgtctgaaaaagtcgagtgcacgctcaccgtgcccgaggttcgccagccccgagatgagagggttccatgcagccggcacgcgccgctctggcagcccgtcgaacactgccaaggcctcctcaatggcgccatttttgacgtacatgtcgaccagcgccgtgccgaggatgggaccaactgccacgccccgtgccaccattaggtcgtgcacgtgacggcccatctcgagcccgcccgacggcgaccgcgcgcacgcagacagcaccgaggccagcgcggcgccgcagggctcgaagcccacgcggaccatctggacgaacgccgccatcgcgtcctcgtgcctcccgttctgcgcgtacgcggagaccatggtagtgtacacggccgcgttccgctcgggcacctcgtcgaacaccctgcgcgcggggcggagaaggcccgccacggagtaggcccgaacgaggccattggcgacgtaggcatcgaggtggaccccgtgccggacggcgagcgcgtggagctgttcggtgacggggagagagagcggaaggcgcgcggcggccttcaggaggaaggggaatgtgtgccggccgggcacgagggctccagtgccgtggatgcgggagaagaaggggaatgcggtggccgggtccggggaggaagcgagcacgcggagcgtggtgttgaacatgaaggagttgggcgcgcagggcagggaggagaggagcgcgagtgcggcggcagcgggatccggagagagcgcgacgtaggcgtccaggagccgggacgcggcgaaagcgtcctcggcgaggcggccggagacgagcatggcggcgtgcacgcgggctagggcgcaaggtgtagcgcaacgatcggcgaggagtgagaggttcgggcggaggctgacgcgcgtgccgatggcagccgcgacgagcggcgccgaaggcatatttggatcgtgtgccttcgatgctcggtagatccgtagatggggaggtgccgagcggaaaa

SEQ ID NO: 42724 - DNA, 5194 bp, Zea Mays
gataaaaaaacttatatatatttttaaaaaatataatgtgggcatttaaattggagcccttgtgccaccggagcgtggcgacaagccgcaacgcgacgtgctcctccccggaacagcgccacccaaccacgcgacgaccgccaccgcccgaccgacgccgccccggttccgtccatcaccttcccctcctctcctgcttctcctccgcattattctcgcgcgctgctcgcatctctctctgcgccgcgagaagaacgcgtccgcccagctgcgcgcggaggtgtgggcggcgctgagttacgtgcagcagcgcgagagaatggaggctgcggcagcggcagcggcggcagctccagcgcctgcgggggagagggaccccgagcaccaccacggatgtctggccgtcaggacgtcgctgccgcggtgcgccatcggcgccggcggcggctcctcgctgcctggatcttccggtcagtacgtcgtctctcctgactaacccctctcccttgcgattcgtccccccttcgcaatgcgcgatgcctgcagttagttcctcctcctcctcctcctcccgttcgcgtaattcatctggcagctttcctgcattcatggaatctttacttacttttaccgctgtttgttatcgtcttggtgtgttcttgaagcgggcgaatattctctcctctgctgtgggcctgtcgccgtgctgacgagctgtcaatgatattcctgtgttcctcagagtccatcacttcttttcttgcacactcttttcagtttcaggagctgttctaatccttgcaggagccggtcgtcgtccttttcttttctttctttctttttcacgtcttttgctgctgcgctcttgtggcgttcttttggggcaatgtcatttttgcggcgtattgatgtcacctaaatggtagcaggacgatgcgattttgcatgcgaaaaaaagtcagcaccgcatgtgcctctctcctcaatcctgtacttgcgtcgcttttggcaccattttaaccgcctaggagaaacgggataaacctagagaggcactcatcattgttcttgtcctttctccttttccgttttccagaggctgaagcatattctggaggcaaaaaaatgagatttgtttgaagtttttggcggccattagttcatccgtgtttctccatggaagtgtagggtattgcgtatttctccatgtttggcagactgagagacagcgttgatcgcatgagaatattaaaaaaaactcgtaccgttcggtgtcagtcttgcttgtatttttcctcctttttttaacaatttgtattgtagcgaacactggtattgtttccgttcttttttagacttttagcattttcaattgtgctccaggaaatccagaaatgcaagattcatccgttgccgtcccgtcctcttcctttccctgctcattttggcgcctttctgcctcaactcaaagatacacatgaccgaccaagccacgcaaccactaatccactatttcgagaaaataattctgaaccatcggctcaacagcaagacaagccagcagtcgctttgccttctggacatggctttgctgggctcacgcgtctctcaccggtggggaggcatccgatttggtaggaaatctgggagctggtagatccactgggcagatttgttggccaatgaaaaacagtggttggtgagaacatgtcatgtaacctcatgtcaggggtaggattcagaaaatatacttgttctgccttcatcatcctattatgatagatccattccagtacaatactaaggccgtctgcagcagtctacccaaagtttacctaaaaacactgttttgtactttctacactatagtgttcgcagagtgaagtttgaatatgagtatagagatgagtaatttgttggagatagcctaagagtctaaactagcacttaagatagcctataaaggggtgtgcagtgtcaaatagctctgaaatccctggccttgaggaacttttggctctgggatgctagggcagctagcactgtgggccaaaattgcaagttctgatattcctcatcttgtctcaagctcactttatttttggtttttacttttagtacagcacacatatatatagatgatttcaagttagtgacaatatgtacagctggttttgcatttgatattacgagaaacacacgtttcatgtcactgattatatatgagatgtaatgtgactgtccctgtgcagatgaaacatcatgtggatcaccgagatggatagggagaggcctctcgtgtgtgtgcatcaagcggaaaggcacatatgaaaggatatgcatgaacctcacaccagtgcaggtagcagactaacagctaattgttacaattattgtgcaggagtttctatgatggcaagtgacaactcaaaaggatttccaagggcttttcctttaagctattattagtttcttacagtccaatgagtgtttggtggtcctgtgtgacttcaacgtacaatttgaactctgaagggtagacatggcaaaataggtggtcctgctcaaaaaattgtctgaagaatgtctttccatatgcaccaagatttttattggcgggaaatccttaattgtgtatcacatattaggttaaaagtagtaaagctaatgacttcaataggcaagttgcttaatgagactgaaaccacttgttattctattccgaattgttggtaatttgcaggaagaaaggcttcagagattgaagcatcgcatgaaggtttactttgatccatctagacgagatcaccaggaagccctgaaagctctttggcatgcaacataccctgatcaagaacttgaaggtttgatatctgagcagtggaaggacatgggctggcaaggaagagacccatcaactgactttagaggcgcaggattcatatccctggagaatcttttgttctttgccaagacgttctccgtaagcaatatgcatcgtttcagagacttctaaataaacagtgcggtaacagagccacatgggagtacccatttgcggttgctggtgtaaatattacattcatgatcatgcagatgctagatctccagtctactaagccaagaacatttgtgcgagccatttttatccaaatgctctcagaggatgagtgggcatttgatctgctctactgtgtcgcatttgttgtgatggacaagcagtggctggacaagaatgcatcttacatggacttcaatgaggtgctgaagtcgacacgagcccagctggagagggagcttatgctggacgatgtcatccgcatcgaagacatgccgtcatacagcctgctttgctagtaaccaaaacaccgaattcgccggagaacagaactgagttgatggttcaactgtatagtacctccctttgtctgatttctgggaggattttttttagcaacaaagtagagtgatgacgtactggtatcatgcttaatttgggctaatgatggtgatatgcacattctcagaagtgttacaatgttctgtacttgtctaagcatttgtcagatatctaatattgatcatttgatccacccatcattctcctatctgcatcatcttttctggggattgccataaactttcatgagcacaacggggaactagaccagcacatttccttgtggtggcgataactatggttgctccagtgacccatcaccattaactgcgcttgccccagggattttagagagcctcgctcccttcatcaccttcctcagcttgtccacgtcctgccacctaccagcctcggcatacaagttggacagtaccacatacactccatggttactgggatttagtttcagcatctccaccgctgcccgctccgcaatctcaatgacaccgtggttcttgcaggccgtcaggagtgctccccatatcacggtgtccgccttgcatgacatctcccgtatcatatcctccgcttccgataagaggccagcacggccaaggaggtccaccatgcatccgtagtgctggattcctggaacgatcccgaagtccttctccatggacctgaacagccggcgggcctcgtccagcagccctgggtgggagcacgccgagagtgccccgacgagtgtggtcgcattcggtggcacaccctcccgctgcatccgtctgaaaaagtcgagtgcacgctcaccgtgcccgaggttcgccagccccgagatgagagggttccatgcagccggcacgcgccgctctggcagcccgtcgaacactgccaaggcctcctcaatggcgccatttttgacgtacatgtcgaccagcgccgtgccgaggatgggaccaactgccacgccccgtgccaccattaggtcgtgcacgtgacggcccatctcgagcccgcccgacggcgaccgcgcgcacgcagacagcaccgaggccagcgcggcgccgcagggctcgaagcccacgcggaccatctggacgaacgccgccatcgcgtcctcgtgcctcccgttctgcgcgtacgcggagaccatggtagtgtacacggccgcgttccgctcgggcacctcgtcgaacaccctgcgcgcggggcggagaaggcccgccacggagtaggcccgaacgaggccattggcgacgtaggcatcgaggtggaccccgtgccggacggcgagcgcgtggagctgttcggtgacggggagagagagcggaaggcgcgcggcggccttcaggaggaaggggaatgtgtgccggccgggcacgagggctccagtgccgtggatgcgggagaagaaggggaatgcggtggccgggtccggggaggaagcgagcacgcggagcgtggtgttgaacatgaaggagttgggcgcgcagggcagggaggagaggagcgcgagtgcggcggcagcgggatccggagagagcgcgacgtaggcgtccaggagccgggacgcggcgaaagcgtcctcggcgaggcggccggagacgagcatggcggcgtgcacgcgggctagggcgcaaggtgtagcgcaacgatcggcgaggagtgagaggttcgggcggaggctgacgcgcgtgccgatggcagccgcgacgagcggcgccgaaggcatatttggatcgtgtgccttcgatgctcggtagatccgtagatggggaggtgccgagcggaaaa

SEQ ID NO: 42725 - DNA, 5183 bp, Zea Mays
gataaaaaaacttatatatatttttaaaaaatataatgtgggcatttaaattggagcccttgtgccaccggagcgtggcgacaagccgcaacgcgacgtgctcctccccggaacagcgccacccaaccacgcgacgaccgccaccgcccgaccgacgccgccccggttccgtccatcaccttcccctcctctcctgcttctcctccgcattattctcgcgcgctgctcgcatctctctctgcgccgcgagaagaacgcgtccgcccagctgcgcgcggaggtgtgggcggcgctgagttacgtgcagcagcgcgagagaatggaggctgcggcagcggcagcggcggcagctccagcgcctgcgggggagagggaccccgagcaccaccacggatgtctggccgtcaggacgtcgctgccgcggtgcgccatcggcgccggcggcggctcctcgctgcctggatcttccggtcagtacgtcgtctctcctgactaacccctctcccttgcgattcgtccccccttcgcaatgcgcgatgcctgcagttagttcctcctcctcctcctcctcccgttcgcgtaattcatctggcagctttcctgcattcatggaatctttacttacttttaccgctgtttgttatcgtcttggtgtgttcttgaagcgggcgaatattctctcctctgctgtgggcctgtcgccgtgctgacgagctgtcaatgatattcctgtgttcctcagagtccatcacttcttttcttgcacactcttttcagtttcaggagctgttctaatccttgcaggagccggtcgtcgtccttttcttttctttctttctttttcacgtcttttgctgctgcgctcttgtggcgttcttttggggcaatgtcatttttgcggcgtattgatgtcacctaaatggtagcaggacgatgcgattttgcatgcgaaaaaaagtcagcaccgcatgtgcctctctcctcaatcctgtacttgcgtcgcttttggcaccattttaaccgcctaggagaaacgggataaacctagagaggcactcatcattgttcttgtcctttctccttttccgttttccagaggctgaagcatattctggaggcaaaaaaatgagatttgtttgaagtttttggcggccattagttcatccgtgtttctccatggaagtgtagggtattgcgtatttctccatgtttggcagactgagagacagcgttgatcgcatgagaatattaaaaaaaactcgtaccgttcggtgtcagtcttgcttgtatttttcctcctttttttaacaatttgtattgtagcgaacactggtattgtttccgttcttttttagacttttagcattttcaattgtgctccaggaaatccagaaatgcaagattcatccgttgccgtcccgtcctcttcctttccctgctcattttggcgcctttctgcctcaactcaaagatacacatgaccgaccaagccacgcaaccactaatccactatttcgagaaaataattctgaaccatcggctcaacagcaagacaagccagcagtcgctttgccttctggacatggctttgctgggctcacgcgtctctcaccggtggggaggcatccgatttggtaggaaatctgggagctggtagatccactgggcagatttgttggccaatgaaaaacagtggttggtgagaacatgtcatgtaacctcatgtcaggggtaggattcagaaaatatacttgttctgccttcatcatcctattatgatagatccattccagtacaatactaaggccgtctgcagcagtctacccaaagtttacctaaaaacactgttttgtactttctacactatagtgttcgcagagtgaagtttgaatatgagtatagagatgagtaatttgttggagatagcctaagagtctaaactagcacttaagatagcctataaaggggtgtgcagtgtcaaatagctctgaaatccctggccttgaggaacttttggctctgggatgctagggcagctagcactgtgggccaaaattgcaagttctgatattcctcatcttgtctcaagctcactttatttttggtttttacttttagtacagcacacatatatatagatgatttcaagttagtgacaatatgtacagctggttttgcatttgatattacgagaaacacacgtttcatgtcactgattatatatgagatgtaatgtgactgtccctgtgcagatgaaacatcatgtggatcaccgagatggatagggagaggcctctcgtgtgtgtgcatcaagcggaaaggcacatatgaaaggatatgcatgaacctcacaccagtgcaggtagcagactaacagctaattgttacaattattgtgcaggagtttctatgatggcaagtgacaactcaaaaggatttccaagggcttttcctttaagctattattagtttcttacagtccaatgagtgtttggtggtcctgtgtgacttcaacgtacaatttgaactctgaagggtagacatggcaaaataggtggtcctgctcaaaaaattgtctgaagaatgtctttccatatgcaccaagatttttattggcgggaaatccttaattgtgtatcacatattaggttaaaagtagtaaagctaatgacttcaataggcaagttgcttaatgagactgaaaccacttgttattctattccgaattgttggtaatttgcaggaagaaaggcttcagagattgaagcatcgcatgaaggtttactttgatccatctagacgagatcaccaggaagccctgaaagctctttggcatgcaacataccctgatcaagaacttgaaggtttgatatctgagcagtggaaggacatgggctggcaaggaagagacccatcaactgactttagaggcgcaggattcatatccctggagaatcttttgttctttgccaagacgttctccgcatcgtttcagagacttctaaataaacagtgcggtaacagagccacatgggagtacccatttgcggttgctggtgtaaatattacattcatgatcatgcagatgctagatctccagtctactaagccaagaacatttgtgcgagccatttttatccaaatgctctcagaggatgagtgggcatttgatctgctctactgtgtcgcatttgttgtgatggacaagcagtggctggacaagaatgcatcttacatggacttcaatgaggtgctgaagtcgacacgagcccagctggagagggagcttatgctggacgatgtcatccgcatcgaagacatgccgtcatacagcctgctttgctagtaaccaaaacaccgaattcgccggagaacagaactgagttgatggttcaactgtatagtacctccctttgtctgatttctgggaggattttttttagcaacaaagtagagtgatgacgtactggtatcatgcttaatttgggctaatgatggtgatatgcacattctcagaagtgttacaatgttctgtacttgtctaagcatttgtcagatatctaatattgatcatttgatccacccatcattctcctatctgcatcatcttttctggggattgccataaactttcatgagcacaacggggaactagaccagcacatttccttgtggtggcgataactatggttgctccagtgacccatcaccattaactgcgcttgccccagggattttagagagcctcgctcccttcatcaccttcctcagcttgtccacgtcctgccacctaccagcctcggcatacaagttggacagtaccacatacactccatggttactgggatttagtttcagcatctccaccgctgcccgctccgcaatctcaatgacaccgtggttcttgcaggccgtcaggagtgctccccatatcacggtgtccgccttgcatgacatctcccgtatcatatcctccgcttccgataagaggccagcacggccaaggaggtccaccatgcatccgtagtgctggattcctggaacgatcccgaagtccttctccatggacctgaacagccggcgggcctcgtccagcagccctgggtgggagcacgccgagagtgccccgacgagtgtggtcgcattcggtggcacaccctcccgctgcatccgtctgaaaaagtcgagtgcacgctcaccgtgcccgaggttcgccagccccgagatgagagggttccatgcagccggcacgcgccgctctggcagcccgtcgaacactgccaaggcctcctcaatggcgccatttttgacgtacatgtcgaccagcgccgtgccgaggatgggaccaactgccacgccccgtgccaccattaggtcgtgcacgtgacggcccatctcgagcccgcccgacggcgaccgcgcgcacgcagacagcaccgaggccagcgcggcgccgcagggctcgaagcccacgcggaccatctggacgaacgccgccatcgcgtcctcgtgcctcccgttctgcgcgtacgcggagaccatggtagtgtacacggccgcgttccgctcgggcacctcgtcgaacaccctgcgcgcggggcggagaaggcccgccacggagtaggcccgaacgaggccattggcgacgtaggcatcgaggtggaccccgtgccggacggcgagcgcgtggagctgttcggtgacggggagagagagcggaaggcgcgcggcggccttcaggaggaaggggaatgtgtgccggccgggcacgagggctccagtgccgtggatgcgggagaagaaggggaatgcggtggccgggtccggggaggaagcgagcacgcggagcgtggtgttgaacatgaaggagttgggcgcgcagggcagggaggagaggagcgcgagtgcggcggcagcgggatccggagagagcgcgacgtaggcgtccaggagccgggacgcggcgaaagcgtcctcggcgaggcggccggagacgagcatggcggcgtgcacgcgggctagggcgcaaggtgtagcgcaacgatcggcgaggagtgagaggttcgggcggaggctgacgcgcgtgccgatggcagccgcgacgagcggcgccgaaggcatatttggatcgtgtgccttcgatgctcggtagatccgtagatggggaggtgccgagcggaaaa

SEQ ID NO: 42726 - DNA, 2446 bp, Zea Mays
aaacttttcagatcattgactgattttattgcttgtggactttggagagatgggacccattcggtgttctcgttgcaaagcatacataaatcctttcatgaaatttgttgatcaagggaggcatttcgtctgtaacttatgtggattcagaaatgatactcctagagaatacatgtgcaacttagggcccgatggtaggcggcgtgatgctgatgacaggcctgaattgtctagaggaactgttgaatttgttgctacgaaggaatttctggttcgtgatccaatgcctgctgtatacttcttccttattgatgtctccatgaatgctatacaaactggtgcaactgctgcagcttgcagtgctatttcccagtctatttcagatctaccagaaggtcctcggacaatggttggaattgcaacatttgattctgctattcacttctacagtcttaaacgtgctcagcagcagcctttgatgctcatcgttcctgatgttcaagatgtatatacacctcttcagactgaccttattcttccagtttctgagtgccgggagaatctggagcagttgctagaaagtatcccaaacatgtttgagaataatagggttgctgattctgcttttggagcagcaatgaaggctggcttcctggcgatgaaatctactggcggaaaacttcttgttttccaatcagtgctgccatcacttgggattggttctttatctgctagagaagccgaaggcagagcaaacattacaactggtgacaaggaagcccataaacttttgcagcctgttgacaataccctccagacaatggcactagaatttgctgaatatcaggtctgtgtggacgtattcctcacaacacaatcctacgttgatattgcttctatatccgttgtgcctcagactacaggtggccgggtctactactactatccattttctgctctttcagatccagccaagctcttcaatgatctcagatggaatatcagtagaccccagggttttgaggctgttatgcgtgtaaggtgcagtcagggtctccaagttcaggactattttggcaatttctgcaagcgtgttcccactgacattgatcttccagcgattgattccgacaaaactgtgatggtcacgtttaagcatgatgacaagttaccagaaaatgtggaatgtggcttccagtgtgcacttctctatactactgtatatggacaaaggaggatccgagtcataaacctctcactttcatgtacaaatttgcttgccaatcttttccggtatgctgatttggagacacagtttgcatgcttcctgaagcaagctgctaatggcatcccgacctcttcattacctcgtattcgggatgaagcaacaaacacatgcataaatattcttcaatcttaccgcaaacactgtgcatctgtaacctcatcggggcagttgattctcccagaggctctaaaactgctgcctttatatactctggcactggtaaaaagtgtaggcttgagaactgatgggcgattagatgaccgttcctattggatatctctggtctcgtcagtttctgtagtactagctgttcctctggtgttccctagattgattcctatccatgatctcacgtccagggatgatgatgattcccttgtaccaagtccacttatgctcaaaagtgaaaatgtacaagaggatggggtctatttattggaaaacggtgaggatggtctagtctacgtaggaaacatggtaaatccggctaccctggaacaaatattcggtgtctcttctttggctgcattaccagcccagttagcattggagcagtttgacaacgaactctcgaggaagattaacgaagttgtaaatgaaattaggcgccagaggtgctcatacttgaggttgagactatgcagaaggggcgaaccatctggagattttttccggtcatttctaatagaggacaaggcacctggcgtcttctcctacgaggagtttctcgtgcatgtccacaggcagatccaaagcaagatgacctgaggggcccagatcctgtctgtagcatttcggtcagtagatggattgtaggtaccaaaacgagttcgatttctgcataaggagacagcgaagtggcgattccacatcactatggagcataatgtttgctcggacagtagaactcaggaatagaggcaccgtttttggagtggggtggtatatgtgttgtatacagagatgagaggcgttagtttttgtgttgtcattgtcgctgtgcatccttattgttttaccccttgtccaaaaagggatgcattattatgttgagaggaaggttatagaggtttcgcaataaaatgcacctagccaattgatagtatgaatcagatatataatctaatttatgactgcctattcgccttgtaccctgtc

SEQ ID NO: 42727 - DNA, 3793 bp, Zea Mays
cacgaaacgatccatgttctaacaggaggagtgcacaagaggggcctccgcctcccctgcccccgcttgctatcgcgcgccagatcccgatctcgccgcgatccatggcgtcgtcgccgcagcagccgccgccgttcgccacgcaaaaccctactgcgcagggtccaggccaggggcctccagtctcggggacgggggcactccccggggcgttctccaatctccagatctcccgcggcgcggccccgccgcccggtgccccgcgggggctcacgcctcagcaggcaccgcccgccttcgccgcgctttcgggtcctccaccggctgcagcccggcccttcttccctggcagcccgcccgcaccgccgttcgtgcgggcgccgacggcggcagcttccgtctcgccgcccttcggcggacaaccgggggtagtgtcccagcagccgccaccgtttgggggacctccaggtgcggcgtctcagccgccgccgccgttcggtgttgcccccggggtggtgtcccaggcgccgcctccgttcggaggccctcctactgcggcgtcgcaggcccctcctccgtttggaggccctcctgccatggcatcgcaggtgccttcgccctttgttggtcactctgttgctgcgtctcaggcagcaccgttcggcgtcccccctgttgcggggtcacatcctccgccgttcggtgggcctcctggagcagggcctcatccagcaccgccactacggcagacattccctggccagtctgggccaatggcatccgcggcagcttggacgcagccaacaccacctagctttggagccccgcaacaatctccaccaccattcagttcgcggccagttgggcagccgccctttgctacgcaatcagcgcctgtggcacagcagctgcccttcatggggccacccagggcaaatgccccggcgtttgggcctccatcctggcaaactcagggagctgggtctggtgcaatgcagccacctatgagaatgccaggcattcctggtagcatgcagccaaacacactaggaccccctggcaccccgactatgacttattctccacatgctggaacacaggtatcaaccccatccaaaattgatcccaatcaaattccacggcctatgcctgaatcatcagtcatcatttatgagacccgtcaaggtggccaagcaaccatccccccggctgcatctagtgaatttattgtgaaggacactgggaactgtagcccccgtttaatgcgctgcactgtgaatcaaataccttgtaccggtgatctcttgatgacttcgggtatgcctttagctctgatggttcaacctttttctcttcctcacccatccgaggaacctattcagcttgtggactttggagagatgggacccattcggtgttctcgttgcaaagcatacataaatcctttcatgaaatttgttgatcaagggaggcatttcgtctgtaacttatgtggattcagaaatgatactcctagagaatacatgtgcaacttagggcccgatggtaggcggcgtgatgctgatgacaggcctgaattgtctagaggaactgttgaatttgttgctacgaaggaatttctggttcgtgatccaatgcctgctgtatacttcttccttattgatgtctccatgaatgctatacaaactggtgcaactgctgcagcttgcagtgctatttcccagtctatttcagatctaccagaaggtcctcggacaatggttggaattgcaacatttgattctgctattcacttctacagtcttaaacgtgctcagcagcagcctttgatgctcatcgttcctgatgttcaagatgtatatacacctcttcagactgaccttattcttccagtttctgagtgccgggagaatctggagcagttgctagaaagtatcccaaacatgtttgagaataatagggttgctgattctgcttttggagcagcaatgaaggctggcttcctggcgatgaaatctactggcggaaaacttcttgttttccaatcagtgctgccatcacttgggattggttctttatctgctagagaagccgaaggcagagcaaacattacaactggtgacaaggaagcccataaacttttgcagcctgttgacaataccctccagacaatggcactagaatttgctgaatatcaggtctgtgtggacgtattcctcacaacacaatcctacgttgatattgcttctatatccgttgtgcctcagactacaggtggccgggtctactactactatccattttctgctctttcagatccagccaagctcttcaatgatctcagatggaatatcagtagaccccagggttttgaggctgttatgcgtgtaaggtgcagtcagggtctccaagttcaggactattttggcaatttctgcaagcgtgttcccactgacattgatcttccagcgattgattccgacaaaactgtgatggtcacgtttaagcatgatgacaagttaccagaaaatgtggaatgtggcttccagtgtgcacttctctatactactgtatatggacaaaggaggatccgagtcataaacctctcactttcatgtacaaatttgcttgccaatcttttccggtatgctgatttggagacacagtttgcatgcttcctgaagcaagctgctaatggcatcccgacctcttcattacctcgtattcgggatgaagcaacaaacacatgcataaatattcttcaatcttaccgcaaacactgtgcatctgtaacctcatcggggcagttgattctcccagaggctctaaaactgctgcctttatatactctggcactggtaaaaagtgtaggcttgagaactgatgggcgattagatgaccgttcctattggatatctctggtctcgtcagtttctgtagtactagctgttcctctggtgttccctagattgattcctatccatgatctcacgtccagggatgatgatgattcccttgtaccaagtccacttatgctcaaaagtgaaaatgtacaagaggatggggtctatttattggaaaacggtgaggatggtctagtctacgtaggaaacatggtaaatccggctaccctggaacaaatattcggtgtctcttctttggctgcattaccagcccagcattggagcagtttgacaacgaactctcgaggaagattaacgaagttgtaaatgaaattaggcgccagaggtgctcatacttgaggttgagactatgcagaaggggcgaaccatctggagattttttccggtcatttctaatagaggacaaggcacctggcgtcttctcctacgaggagtttctcgtgcatgtccacaggcagatccaaagcaagatgacctgaggggcccagatcctgtctgtagcatttcggtcagtagatggattgtaggtaccaaaacgagttcgatttctgcataaggagacagcgaagtggcgattccacatcactatggagcataatgtttgctcggacagtagaactcaggaatagaggcaccgtttttggagtggggtggtatatgtgttgtatacagagatgagaggcgttagtttttgtgttgtcattgtcgctgtgcatccttattgttttaccccttgtccaaaaagggatgcattattatgttgagaggaaggttatagaggtttcgcaataaaatgcacctagccaattgatagtatgaatcagatatataatctaatttatgactgcctattcgccttgtaccctgtc

SEQ ID NO: 42728 - DNA, 1545 bp, Zea Mays
attagatgttgctgttgtgaagagagatgaccttggaaagaaaagattgtgcagcttcttttggggtatttgccaactgatcgttccttatggacttatgagttagaaaagaagcggagtcaatatagtgcatacagagaagagtttcttctaaatccttcagaaaaactacgaatgattgaggaaacaaagctgtcaagaaagaaagacacaagtattgagaggattggctttctttcgagattcgaagttactaatgaagagcatcctttaagctctggtaaatctagcctgtggaaccaatattttcaggattcagagttactagaacagatagaccgagatgtaaagcgaacacatcctgatatttcatttttctcatcaaagtctaaccaggaatccttgaggagaattttaattatattttcaaaattgaaccccagtataagatatgtgcaagggatgaatgaagttttggcacctttattttatgtattcaagaatgaccctgacccaagcaactcagcgtcagctgaagcagacgcatacttttgctttgtcgaattgttgagtggctttagagacaactattgcaagcatcttgacaatagcagcgtgggtattcgatctacactttcaaaattatcacaactcttgaagcgacatgatgaggaactatggcgtcacatggaggtcaccacaaaggtttacccacaatattatgcctttagatggatcacactgttgttgacgatggagttcagctttaacgtgtgtatacatatctgggatgctatcttgggtgatccagaaggcccatcggacacattgatgaggatatgctgtgccatgctcatcctagtccgaaagcgtctcttagctggagacttcaccgccaatgtccagctgctgcaacattacccagccaccaacatcgatcacctcctccacatcgccaaccggttgagaggaactgtacccggctagtgttttgttgcctttcctgcatacctgtacttcagttttgcccatgtgaccttcgtctggttaagtcgctaaatgcaatgttggtagcttgaaatatcactctgctccttgtgttctgttttgcctgtttcggtgtggccggagccggacgatgaatatcggagacacttcatgtgtcacagctctgagtagcgcttctgttttcattcacatggaaacacactattggagctccttccagcttgtagtacctgggaaagggaagaatggatgcattcctgaattgtgaaaactgaatatgggttctgctggatacgctcctctgtaccaaaagtcatatcctttgtagtgtactcttttaatgctttatgaattagagtatgtagaatgacttttgcaagaactgaaaataggaattgctgtgcaaagttattttgtcttgatgacatttgttgtgaaactggtgccaaatttcttgtcataaaaatatctagtgagagttggggtggttgttttaaagagtaaaatgcaatagtgatccccaaatttgcacttgta

SEQ ID NO: 42729 - DNA, 1980 bp, Zea Mays
aagcaatccctctctgcattaacagcaaggagcgctgcaactcgccacttgcagtttcgacttttcgagatctgcgccgctgttgctgtccccactcggcctcccctctctctccccttcttccagacccttcccttcttccgctcacccacgcggacgccggctgcccccttccctgactgaccccctcgaggcccctcgatacgatacttcgggtgtaggggagcatgcggaagaaagggcgggcggtgccggagtggctcaacagcccaatttggtccgctaccccgcccgcgcccgcccagccggacccctacggcgccgacctcgctccgccgccacccccaaagccgccgccgccgccagctactgcctctcccgtaccgccgccgccgtcgtacgagcaggccgtaggggtgggtggtggccggagggaggaggaggacgacgagggcgccggggcggtgatacgggcacacctgctctccgacttcaaggccgcgctatcgaagaaggtggtgaacatgggagagctgcggcgcttagcctgcctcggcgtccccgacggcggtactggtgtccgacccgtcgtctggaagtgtgcagcttcttttggggtatttgccaactgatcgttccttatggacttatgagttagaaaagaagcggagtcaatatagtgcatacagagaagagtttcttctaaatccttcagaaaaactacgaatgattgaggaaacaaagctgtcaagaaagaaagacacaagtattgagaggattggctttctttcgagattcgaagttactaatgaagagcatcctttaagctctggtaaatctagcctgtggaaccaatattttcaggattcagagttactagaacagatagaccgagatgtaaagcgaacacatcctgatatttcatttttctcatcaaagtctaaccaggaatccttgaggagaattttaattatattttcaaaattgaaccccagtataagatatgtgcaagggatgaatgaagttttggcacctttattttatgtattcaagaatgaccctgacccaagcaactcagcgtcagctgaagcagacgcatacttttgctttgtcgaattgttgagtggctttagagacaactattgcaagcatcttgacaatagcagcgtgggtattcgatctacactttcaaaattatcacaactcttgaagcgacatgatgaggaactatggcgtcacatggaggtcaccacaaaggacacattgatgaggatatgctgtgccatgctcatcctagtccgaaagcgtctcttagctggagacttcaccgccaatgtccagctgctgcaacattacccagccaccaacatcgatcacctcctccacatcgccaaccggttgagaggaactgtacccggctagtgttttgttgcctttcctgcatacctgtacttcagttttgcccatgtgaccttcgtctggttaagtcgctaaatgcaatgttggtagcttgaaatatcactctgctccttgtgttctgttttgcctgtttcggtgtggccggagccggacgatgaatatcggagacacttcatgtgtcacagctctgagtagcgcttctgttttcattcacatggaaacacactattggagctccttccagcttgtagtacctgggaaagggaagaatggatgcattcctgaattgtgaaaactgaatatgggttctgctggatacgctcctctgtaccaaaagtcatatcctttgtagtgtactcttttaatgctttatgaattagagtatgtagaatgacttttgcaagaactgaaaataggaattgctgtgcaaagttattttgtcttgatgacatttgttgtgaaactggtgccaaatttcttgtcataaaaatatctagtgagagttggggtggttgttttaaagagtaaaatgcaatagtgatccccaaatttgcacttgta

SEQ ID NO: 42730 - DNA, 1510 bp, Zea Mays
ctgatacagagcgtgaaaagttcggcaacatgtatcataacgacaaaaaacgaccatcgtgtgcgaccttttcgtgtttccccagctaccaaatctcttcacatcgtcaatccctcttccacagtttctgaaatcagaagggaaacacaggaacgacaggcaattcgaggctggcaatctaatcgtctgccatcccgtctcatcgttctcccaaatctgagagcgttcccaggacctagggttcttgagatccagccccaggatggatccgaaccctagagctcccctcctcctcgccatcgtcgttctcgcgcttggcgtatccgtggccagcgccgaggacgacgcgtcgggggtctctctgggccgccgcgccggggggttcttgcacggcctgaagaaggatgcactggcggagggcgatcatggggtggcactagacgaggttggaccggggctgttcgacgcactctttgccagcctctccatgatactagtcagtgagattggagatgagacattcatcattgctgcgctgatggcgatgcggcaccccaagtcaattgtgttgtctggtgcactatctgcgctttatgtgatgacagtattgtcaactggacttggcagaatagtgcccaacttgatatcaaggaagcacactaatagtgctgctacagttttgtacttattctttggactacggctgctgtatattgcatggaaatctgacccaaagggatcccagaagaaggaaatggaagaagtagaagagaagcttgagtcgggtcaagggaaatcaaccatccgtaggttctttgcaagattctgtacaccaatctttttggaggctttcatcttaaccttcttagctgaatggggcgaccggagccaaatagcgacaatcgcgctggcaacacacaagaacgcaatcggagtcgcagtgggagcgtcactggggcacacggtgtgcacatctctcgccgtggtaggagggagcatgctggcgtccaagatctcgcagcgaactgtagcgacgatcggaggcgttctcttcctagggttttctgtttcgtcctacttctaccctccgttgtgatgaaaaggctgctgatcgaaacatagatggcgtaacaacccagatcgtaacagcacgcctcgagtcgcgggcttcgtgtaatgtacagacacattcgaacattcctgacaacaatgttctctgccatgctgccttcaagtccgtatgtagaagatgtctcattgagagcatggccgactttttattgcttgtatccgaagtattaacttatactatacgctgctccaatctcgttcaccaggaaatcatgttagtccctcgttctttcaaaagcgtgataaaatgtagaaaaggcatcaagaagcccatctctagttgtaaatccttctgctttttctaagtacagatttttattgcacatctagatactatgcacacattacagctatctatctagagaaaaaaataatcact

SEQ ID NO: 42731 - DNA, 996 bp, Zea Mays
ccagaatcaaacggtccaaaccccaagcccctcctcgcctcctcggccacgcatggggaacgcgcggcgccccgccgctgactcggcggcggcgtcggaccgggaggtcggatttgcgaagctacatggcgagtgcttcgagtactacatgcagacctactccatcgttctaggtcgccatagccgccgtcgcagcaagggccccgtcgccgccccgccggaggccgacgacggcgtcgacgtggacctcggcgccctcggagcaggcatgaacgtctcccgccgccacgcgcgcattttctacgacttcctgcgccgccgtttcgcgcttgaggtgcttggtaagaacggctgcctcgtcgagggcgtgcaccacgtccccgggtccgcccccgtcaagctcgactcccaggacctcctccagatgggggacaccaagttctacttcctcctcccctcccgctccgtcttcgacgccggcatcacgcgccggtcatccgccgttcagcgcgcgatcccgccgcctccgtctgatgatgacgaggatgaggatgaacatgaagaggccgtggcagcggcgaagcgtcggagggacggttataacggatcaaaatcttacagggaagcagatgatcaactattgcttcagttggaagagaaagatgtcatctcatctgctgctactatcttgtctgatctctgtggacctcaggaatggatttctataaacaagcttcatgaagtgatgtttgataagtacggcggtatgtggcaccacagcagggtgcgaaaatacctgacatccgaagactttgcggaggctgaaactgacggcaggctatggcatggacttgcgttgctgctgagaaagtaccctgagcatttcgtgatcaacattaggaaagagtgaggatgggatttacggcgtttccgcaatctagggagccaaaacgaagaaagctacataataactaggagaaggggagggcaacaaat

SEQ ID NO: 42732 - DNA, 845 bp, Zea Mays
atccccaatatatccccactcttcgcctcctttctggagcagctagggttccgtcctcgatccgatccgccgagtgcacaccacctttccccactccgatcgaatcgatggccgccgagggcgagaagaagatgataaccctcaaaagctccgatggcgaggagttcgaggtggaagaggcggtggcgatggagtcgcagaccatccgccacatgatcgaggatgactgcgccgacaacgcaccgccgcctccggtgaggacctcaagaactgggatgcggacttcgtcaaggtcgaccaggccacgcttttcgacctcatcttggctgcaaactatctgaacatcaagggtctgctcgacctgacctgtcagactgttgctgacatgatcaagggcaagacaccagaagagattcgcaagaccttcaacatcaagaatgacttcacccctgaggaggaagaggagatccgcagggagaaccagtgggccttcgagtaaggaggtgctggatctattgatgcctaagtttggtggtgtctactactatgtctactttatgttgtcctaatggttgtaagtattttgggagtcactttgcttgcgaatgtctcgcgtaagacttatgttggtcaatggtcggttattaacttattaccatgaaagcacttcgtctgctgccctaagaggtttagtcccatttgcattataaccaattcaatccttgtggatgatttgtgtgattccatcgtgaatctcatggtaaaatattttcattgttgtgatactgcctattcgcagtccagttgtattttttgttttttactatttgctgatgttgagtttt

SEQ ID NO: 42733 - DNA, 906 bp, Zea Mays
atccccaatatatccccactcttcgcctcctttctggagcagctagggttccgtcctcgatccgatccgccgagtgcacaccacctttccccactccgatcgaatcgatggccgccgagggcgagaagaagatgataaccctcaaaagctccgatggcgaggagttcgaggtggaagaggcggtggcgatggagtcgcagaccatccgccacatgatcgaggatgactgcgccgacaacggtatccctcttcctaacgtcaactccaagatcctatccaaggtaatcgagtactgcaacaacaccgccgcctccggtgaggacctcaagaactgggatgcggacttcgtcaaggtcgaccaggccacgcttttcgacctcatcttggctgcaaactatctgaacatcaagggtctgctcgacctgacctgtcagactgttgctgacatgatcaagggcaagacaccagaagagattcgcaagaccttcaacatcaagaatgacttcacccctgaggaggaagaggagatccgcagggagaaccagtgggccttcgagtaaggaggtgctggatctattgatgcctaagtttggtggtgtctactactatgtctactttatgttgtcctaatggttgtaagtattttgggagtcactttgcttgcgaatgtctcgcgtaagacttatgttggtcaatggtcggttattaacttattaccatgaaagcacttcgtctgctgccctaagaggtttagtcccatttgcattataaccaattcaatccttgtggatgatttgtgtgattccatcgtgaatctcatggtaaaatattttcattgttgtgatactgcctattcgcagtccagttgtattttttgttttttactatttgctgatgttgagtttt

SEQ ID NO: 42734 - DNA, 1198 bp, Zea Mays
aacaccgccctgcagcgtcgaaggagcgaggagcagcagccccacacccacttccctttgcaaggcgacggagcaagcaaagcaagagcctagggatccgcgtccctgcacctggtgatgctctcgcagccccgggtgtaggggttggcggtggtcgagatccggcagttgtagtagggcaccccggtcctggagcacggcaccacgtcgccccgcagggcgtcgtagctgatgtacctccgccccgtggtcgcctcccacagcagccgccggtgcgcctccgagtccatctccagctccgccgcctccatgccgacgcagtggcctcctctcccgtgcaggacgagcagcagcaggaggaggagtggcgctgctgcccacgcccttgggagcaagatcggcttggtggttgccggcattgtgttgtgagagactggctgactgagatctctctagctctttcttttcttgttcagagtgccatggcgcttctctctctctctgcactggatctttgctgtttcttgatggagggaacagggaagcactgcactgagatctatccgagttttagtggaggaggcccgaggggagggtgaagcttaaatgcggtgtcggacagccagttgttgttgacagcagccgctgcctcctgctgctgagcgagcgagggaatatctcaaatggggagaggatgaggtttccttcaaatgttacttttaccacgaccgaatggtttgtactaactggaacttttctgaaattgttttcttatcgaaagttcagagaagcggctattcctcaggtgccgtgccatcatggggttttggcagctcatgtggtcacgatgcctgcctggcacaagctttggatatcatgtcacttgacagtgccctcaatatggacaggaatggagtccaagttgttttctcctccgtcccaccgttccaaagcaacttatctcgtttcttgatgacttaaatcattttaaatctaagtaagtttattttaaaaataatgttaatggtacctaataatagtgtagtgtttggctgcatgagtaagcagcagctgcccgcctgctgctgctattgatctgagagacaagagaagcacacttagcagcggcagtttcttacactgcagattgtaatgtttacttagtgaagtttgaaataaaagatgtgatgttactgtc

SEQ ID NO: 42735 - DNA, 1181 bp, Zea Mays
cctgttgaaatggcgatggatggaagctgcaaatccttttgaatattgtgatgtggttaccacaaccacgcacaagtccctcagagggccaagggctggcatgatcttctacaggaaaggccctaagccccccaagaagggccagcctgagggtgctgtttatgattacgaagacaagatcaactttgcagtgttcccatctctccaaggtggccctcacaaccaccagattgctgcacttgctgttgctctacagcaaactatgtcgcctggcttcaaggcctatgcaaagcaagtgaaggccaatgctgttgcaattggaaactatctcatgagcaagggctacaagatggtgactgatggaactgagaaccaccttgttctctgggatctccgcccccttggcttgactggaaacaaggtcgaaaagctatgtgatctttgccacatcacattgaacaagaatgctgtcttcggtgacagcagtgcattgtctccgggtggtgtccgcattggcgcgccagcaatgacctcgaggggtctactggagaaggatttcgagcagattggggagttcctccaccaggcagtgaccatctgcctgaacatccagaaggagtacggcaagctcctcaaggacttcaacaagggcctggtgaacaacaaggacatcgagaacctcaaggtccaggtggagaagtttgccgactccttcgacatgcctgggttcacgcttgagagcatgaaatacaaggagtagatatgcctctttcatgcgcggcaaggtcctcctgtaccgatgtctttccttgtggtggcgcagggtgccatggcactgcattgccgccacacttacgatgatgatgatgggttatggattttgtctacaatgtcagcaggataggctcacaattgccccctgccctccggtttggtcgcctctcaggttttcatttggtagttgttcgcagggaaccatatgagaattgcaatgtcaatcaggtgtttgccaataataattgggtggtttctgctcttgctctgatcattaccatgcgttttttattctgttggtgggttggtcgattgattatctcctgcagtcctgctggcactgccggtggtcgtttgattatcatgtatgaatcttcctggagactgttgctggattaacatatcgc

SEQ ID NO: 42736 - DNA, 2877 bp, Zea Mays
agcagatagcagatatagagatgggttgatgcccttgcgagatagcatgtacatcggtcctagcggtggcttctttgttacaaactggtatcaaattttacgcgaggaggtgactctccaatccaagtaagtagaaagctcatggcagcccccgttcctctcgggcagcacaattcgatgcgtttcctcagcttcccgcagggcggcaggaggattccttggcaacagagcaccgcaacccctgttgcttccttcacgtcgccacgggcaagggccacacactcttagcacctgttgtcatgttatttaactcgatctcatcagctatctagtcagtcagcgacgctcacatggacgaggttcatcgttctgctctggccgccgcgcgccggcgcagatacgtttcatggtaccctcttgcatcgcactcccacatggcggctgcggctcaagctaggtcgtccttcctcgtcctgctcgtcgccacgtggtcgctgtcgccgcggcttgccggggcctccacgtccacggaagcagcagctgccggccgtggcgttacgctacgcctcgacgcgagccaggtggtcgtggacaatggcgcggtgcaggtggcgctgtcggcgccggagggccggatcaccggcgtcagctacagcggcgacggcgagaccaccaacctgctggggtacgacgccggcgagggagactccggagggtattgggattcggtatggaactatcccggctctggtctcccaggacagtacaatacgttggatagcacagagttcaacgtagtgtcctcaagtgaagatcaagtggagctttctttcaggagcacatacaacccgtcgcatcgaaacagccttcggctaaacatcgacaagaggtgccaaaatccttcacgttattcgctccacgcaacaacctgttttggatactgttttcctcatctgaaacagtaccaaactgtctctcgggagttcgctaagacggctggttcaggctggtgatgctcagaggtagctctgggttctactgctacgccatctttgagcatgacagggcctaccccgctctcaacatcacggaggctcggctcgtcttcaagcttaacacggcaaagttcaattacatggctattacagacgatatacagaggtacatgcccagcgcggcggacagagaagagcctcgtgctgtcccgctggcttacaaggaggctgttctgctggttgaccccaaggaaccccagttccgaggagaggtggatgacaagtaccagtactcgctggacaacaaggacaacgttgttcacggatggattagccgcggcgatcccaacgccgtgggtttctgggtcatcactcccagcaacgagttcaagagcggcggccctctcaagcgggagctcacctcccacgtcggccccacatccctcactatgtttatggggacacattacgttggcaagtacatggtggccaacatcaacgacggcgaggcgtggaagaaagtgctaggcccggtgttcatctacctcaactcaggtcccagcagaggtgagctctgggaggacgccaaggctcgggcgcgggcggaggcggcgagctggccctacagcttcctcgcgtcaccggagttccccaaggcggccgagagaggatccgtcgtaggaaggctcctggtcagggacagccacgagaagcatggcatgcctgctgggtcgtcggccttcgtcggcctcgcctcgcctgggccgcccgggtcctgggcgacggagagcaagggctaccagttctggacgagggccgcgcccgacggcaccttccgcatcgccaacgtcagggaaggagtgtacggtctgtacgcgttcgttcccgggtttctcggagactactgctacggttcgccgctgaccgtagcgccaggccgtgccatcggcgtcggcgacctcgtgttcgagcccccgaggtcgggcccgacggtgtgggagattggcgtccccgaccggacggcggcggagttctacgtcccggatccggaccccaggtacgtcaacaggctcttcgtcgtccgagacaggtaccggcagtacggtctgtgggagaggtacgccgacctgtacccggacaaggatctcgtcttcaccgtcggcgaaagcgacgaatccaaggactggttctttgcacacgtcacaagaaaggtagggcaggttgccgtgccaacaacatggcagatacggttcagtctggaccgcgtcgtggcagacgacgacacctacacgctgcggatctcccttgcagcttctcaaatgtgcaggttgcaggtgcaagtgaatggggatgcaaggagaggcagggattttacaacgcccgacatgggcgatgacaatgcgatcacacgccatgggatacatggctcacagtggagccttgagtgtgtggtcgggggccacctgctacgccaaggcgataacaccattgacataaaactcatcgcacaacaaggaccgaaaggtcctgccatggtcgccggggtcatgtatgactatatccgcctagaagggccaccatctagaggcgttgcctcgagccgcattccagcgttctcccttcaccggattttgttcctgttagccttcctagtcatgtcctagtatgtctagctatgtggccatctaacatgtagcattttttttgctagttgttgtatgaaagcaagaaatatgatgatgtagtacaagcaatgttattgtggagagaatggaggcccatgctacactgattaagtatgtattcaacagatcatcaattggccggagataagggatcatgctaaatgttcacatgcaacttctgagtgttaaactagata

SEQ ID NO: 42737 - DNA, 2935 bp, Zea Mays
ctacagggtgaacttagcattgtacttaattttgattacaaattgtttgccaagacttctagtctggagattgttggaaatgataagcccttggattttcgatcaagagactggggatcagctccaaggtgggtggcgtttgttgatttctttatagctgcacaggccaggtacgcagtcgtcactggagcacatcgtcgtgtggggaccacctacgcacaactcattacagcattggctgcggcaaacaggcatggcccttgcgagatagcatgtacatcggtcctagcggtggcttctttgttacaaactggtatcaaattttacgcgaggaggtgactctccaatccaacttcccgcagggcggcaggaggattccttggcaacagagcaccgcaacccctgttgcttccttcacgtcgccacgggcaagggccacacactcttagcacctgttgtcatgttatttaactcgatctcatcagctatctagtcagtcagcgacgctcacatggacgaggttcatcgttctgctctggccgccgcgcgccggcgcagatacgtttcatggtaccctcttgcatcgcactcccacatggcggctgcggctcaagctaggtcgtccttcctcgtcctgctcgtcgccacgtggtcgctgtcgccgcggcttgccggggcctccacgtccacggaagcagcagctgccggccgtggcgttacgctacgcctcgacgcgagccaggtggtcgtggacaatggcgcggtgcaggtggcgctgtcggcgccggagggccggatcaccggcgtcagctacagcggcgacggcgagaccaccaacctgctggggtacgacgccggcgagggagactccggagggtattgggattcggtatggaactatcccggctctggtctcccaggacagtacaatacgttggatagcacagagttcaacgtagtgtcctcaagtgaagatcaagtggagctttctttcaggagcacatacaacccgtcgcatcgaaacagccttcggctaaacatcgacaagagacggctggttcaggctggtgatgctcagaggtagctctgggttctactgctacgccatctttgagcatgacagggcctaccccgctctcaacatcacggaggctcggctcgtcttcaagcttaacacggcaaagttcaattacatggctattacagacgatatacagaggtacatgcccagcgcggcggacagagaagagcctcgtgctgtcccgctggcttacaaggaggctgttctgctggttgaccccaaggaaccccagttccgaggagaggtggatgacaagtaccagtactcgctggacaacaaggacaacgttgttcacggatggattagccgcggcgatcccaacgccgtgggtttctgggtcatcactcccagcaacgagttcaagagcggcggccctctcaagcgggagctcacctcccacgtcggccccacatccctcactatgtttatggggacacattacgttggcaagtacatggtggccaacatcaacgacggcgaggcgtggaagaaagtgctaggcccggtgttcatctacctcaactcaggtcccagcagaggtgagctctgggaggacgccaaggctcgggcgcgggcggaggcggcgagctggccctacagcttcctcgcgtcaccggagttccccaaggcggccgagagaggatccgtcgtaggaaggctcctggtcagggacagccacgagaagcatggcatgcctgctgggtcgtcggccttcgtcggcctcgcctcgcctgggccgcccgggtcctgggcgacggagagcaagggctaccagttctggacgagggccgcgcccgacggcaccttccgcatcgccaacgtcagggaaggagtgtacggtctgtacgcgttcgttcccgggtttctcggagactactgctacggttcgccgctgaccgtagcgccaggccgtgccatcggcgtcggcgacctcgtgttcgagcccccgaggtcgggcccgacggtgtgggagattggcgtccccgaccggacggcggcggagttctacgtcccggatccggaccccaggtacgtcaacaggctcttcgtcgtccgagacaggtaccggcagtacggtctgtgggagaggtacgccgacctgtacccggacaaggatctcgtcttcaccgtcggcgaaagcgacgaatccaaggactggttctttgcacacgtcacaagaaaggtagggcaggttgccgtgccaacaacatggcagatacggttcagtctggaccgcgtcgtggcagacgacgacacctacacgctgcggatctcccttgcagcttctcaaatgtgcaggttgcaggtgcaagtgaatggggatgcaaggagaggcagggattttacaacgcccgacatgggcgatgacaatgcgatcacacgccatgggatacatggctcacagtggagccttgagtgtgtggtcgggggccacctgctacgccaaggcgataacaccattgacataaaactcatcgcacaacaaggaccgaaaggtcctgccatggtcgccggggtcatgtatgactatatccgcctagaagggccaccatctagaggcgttgcctcgagccgcattccagcgttctcccttcaccggattttgttcctgttagccttcctagtcatgtcctagtatgtctagctatgtggccatctaacatgtagcattttttttgctagttgttgtatgaaagcaagaaatatgatgatgtagtacaagcaatgttattgtggagagaatggaggcccatgctacactgattaagtatgtattcaacagatcatcaattggccggagataagggatcatgctaaatgttcacatgcaacttctgagtgttaaactagata

SEQ ID NO: 42738 - DNA, 6190 bp, Zea Mays
gtcattttctagagagctttttgtgatactcttattactcagggtagcaatcccaaaaatgcagggctagtttagaaacttaaatcatttctaggattcccggatcaaagaaaaaaatatatttatatatttacattttaaatgatatattaaataaaactaaaatatgtatgtaactatttaaatttaatggttatgacagatacatacgcatagcaatttattcctctcctctatatattttcaaaaacataaaaaagaaaaaaaatcaacaccggaccaatgcgcgctcgctccagcacagtattgcggcagtattgcagtccagaacagggcaccgccgcaccggtgctcgttccagcccaggaggccagtaccgcagtcccgcgcagccggccattcccatgccgccggcacccatgagatggcggcgcgggggccgctcgtcatcgcgtctccttcagcgagccctcctcttggccgccttctccgctgcggccctcatcctcctcgtactccagcaccaccacggtcctaaacgcccaaacccttccgccgcgtcccacgcccgcgactcctcagacgagctcctcgacgactcgcctcccgcggagcgggatccggatgccagtgaccctgcggtagttgttgacagggccacgtgcgcaacggtggagatgatgggggaggaggccgctggtgctgggcggggctctccggagcaggccagcctgcgggtccgcgagatgatccggcgccacttcgagctccacggggactgtatccttttggggagtacatttcttataccaaccagtcattcactattcatgaaatcaaacatttgtggaggaagcatcgctgtgctaggacatatggtagagatctgaatatcagagtggatatttttgaaaatccaactgagacgaatgttctgtgtagtgactggaatagctggaaggattcaattatctggtttgatggcgcaacagatgcagttgggattcagttctttctgaagaatgttcatcctagaatgaaggctgccgcgtcggctctttttggattgccagactcattgtacgccaggcctaatacatttggtgaacttatgcgagctattatatctccatccagcaaagtccaagaagcagttgactgggctttgaagggtgtgaatccagatattgttttgcacatgcgcatgatggcgaataggccagtccgagcaagaaaagctgcagttctttgtatcaagaaagccctacagtttagccatattaagggtacagctctggtggccttggtctcagacacaccagcatttgtgaaggagataaagtcagacatcagtgagtttgcagaggtacttaattttgattacaaattgtttgccaagacttctagtctggagattgttggaaatgataagcccttggattttcgatcaagagactggggatcagctccaaggtgggtggcgtttgttgatttctttatagctgcacaggccaggtacgcagtcgtcactggagcacatcgtcgtgtggggaccacctacgcacaactcattacagcattggctgcggcaaacaggcatggtcgagagccttcaggcaccaacttcacgttcctaagtagtgtccacagcaacttgctggtggaggggctgtcgacgcaggttggttggggccatatctggaacagatatgctggtcctctaagctgtcggcgccagccacaccaatgcgccttgaccccgctcctccctcctgcttggtgggacggtcgatggcaaagccctattcccagggatgtgaggaggctactggagtacggtgtccggttatcagatactggggaggtggacgagaggcacctgttgtcgtactgcaggtcaaggaaagatcatgtgaagaggttccatgtccttccaccatacaagaacccggcacgactgtaggctgaggaggtcggcgaggagcagtagagagctcaattttgcattaaccacttatgacgagtgtaggtttgagtggccaagcttttaaactggccatgctggtaaatttcgtgtcgtgactggtgtaggttttggtaatctggtgactggtgcactggtgttcaggcggtagtatatcatgcatcgtacatcactattgttcatctgtgataagattggaaagcaggtagcagacctggagatgatagcatgatgtatatagggtaaaggcatagcattgcattgtcgatgagttataagctggtggtctatctgtcaattaactatatagcagagcaccgacccagaattgtaagcctttcgtctactgatgcaattttgatgtttatcgttctcctgtatcttcgatttgacaattatgcgattgcttggaaggactgagttctatgaaattgcttcttttcctgttgtcgttgccaaaatattgttcaaactttttgttgcttgtatattgttaatttttacaggatgcttgattgtgaattgttgcgtattatcatggctgtggacccatgacaaatagattctctagtttaatagcagtggtgaactggtgattgatattcattatccccttaccgaatttttgttcctgtctgacaaacaggggattgtatccttttgaggagcacatttcttataccaaccagtcattcactattcatgaaatcaaacatttctggaggaaacatcaatgtgctagggcatatgatagagatctgaatatcagagtggacaaactgttgttcatccgtgataagattggaaagcagatagcagatatagagatgggttgatgtataaattcatagcataacattgcattgcatcgtcaattagttataagctggtggtctaatctactggtgcgattttgaggtttttcgttctcctgtctagtatacgtgcacgcttaggcggccttgtctgtttcagctcaggactgtgttcagacgtgcaagcttgcctgcttgggatggctttccaagctgaaacaaaaaaggttcttgaaagatgcgtgggtgcacgatgccagttcggtgtcgagccatgccgcgcaaagtggacatctagtgggcctgtggcgactcagtgatttgaacctaacgcatgatgtcactagatatactacctccatttttgatatactacctccatttttatttatttgacgccagttagttcaattttatactaatcggtgtcaaataaaaataaacagaggaagtactagatagaaggtctaacagctaatagaagggccccttattaccagtcatatttcagtttcagttcaaatggtcgaaggctctcgattctcgaagctaacaattttccttgtttctttctttaggcccttgcgagatagcatgtacatcggtcctagcggtggcttctttgttacaaactggtatcaaattttacgcgaggaggtgactctccaatccaagtaagtagaaagctcatggcagcccccgttcctctcgggcagcacaattcgatgcgtttcctcagcttcccgcagggcggcaggaggattccttggcaacagagcaccgcaacccctgttgcttccttcacgtcgccacgggcaagggccacacactcttagcacctgttgtcatgttatttaactcgatctcatcagctatctagtcagtcagcgacgctcacatggacgaggttcatcgttctgctctggccgccgcgcgccggcgcagatacgtttcatggtaccctcttgcatcgcactcccacatggcggctgcggctcaagctaggtcgtccttcctcgtcctgctcgtcgccacgtggtcgctgtcgccgcggcttgccggggcctccacgtccacggaagcagcagctgccggccgtggcgttacgctacgcctcgacgcgagccaggtggtcgtggacaatggcgcggtgcaggtggcgctgtcggcgccggagggccggatcaccggcgtcagctacagcggcgacggcgagaccaccaacctgctggggtacgacgccggcgagggagactccggagggtaactgacgagtgcatgcgtattacacttgtgctgcctcttcttttatctgcctgcactctgccctctgccactcggaatgtcccttctctcttgcaggtattgggattcggtatggaactatcccggctctggtctcccaggacagtacaatacgttggatagcacagagttcaacgtagtgtcctcaagtgaagatcaagtggagctttctttcaggagcacatacaacccgtcgcatcgaaacagccttcggctaaacatcgacaagagacggctggttcaggctggtgatgctcagaggtagctctgggttctactgctacgccatctttgagcatgacagggcctaccccgctctcaacatcacggaggctcggctcgtcttcaagcttaacacggcaaagttcaattacatggctattacagacgatatacagaggtacatgcccagcgcggcggacagagaagagcctcgtgctgtcccgctggcttacaaggaggctgttctgctggttgaccccaaggaaccccagttccgaggagaggtggatgacaagtaccagtactcgctggacaacaaggacaacgttgttcacggatggattagccgcggcgatcccaacgccgtgggtttctgggtcatcactcccagcaacgagttcaagagcggcggccctctcaagcgggagctcacctcccacgtcggccccacatccctcacttacatggtggccaacatcaacgacggcgaggcgtggaagaaagtgctaggcccggtgttcatctacctcaactcaggtcccagcagaggtgagctctgggaggacgccaaggctcgggcgcgggcggaggcggcgagctggccctacagcttcctcgcgtcaccggagttccccaaggcggccgagagaggatccgtcgtaggaaggctcctggtcagggacagccacgagaagcatggcatgcctgctgggtcgtcggccttcgtcggcctcgcctcgcctgggccgcccgggtcctgggcgacggagagcaagggctaccagttctggacgagggccgcgcccgacggcaccttccgcatcgccaacgtcagggaaggagtgtacggtctgtacgcgttcgttcccgggtttctcggagactactgctacggttcgccgctgaccgtagcgccaggccgtgccatcggcgtcggcgacctcgtgttcgagcccccgaggtcgggcccgacggtgtgggagattggcgtccccgaccggacggcggcggagttctacgtcccggatccggaccccaggtacgtcaacaggctcttcgtcgtccgagacaggtaccggcagtacggtctgtgggagaggtacgccgacctgtacccggacaaggatctcgtcttcaccgtcggcgaaagcgacgaatccaaggactggttctttgcacacgtcacaagaaaggtagggcaggttgccgtgccaacaacatggcagatacggttcagtctggaccgcgtcgtggcagacgacgacacctacacgctgcggatctcccttgcagcttctcaaatgtgcaggttgcaggtgcaagtgaatggggatgcaaggagaggcagggattttacaacgcccgacatgggcgatgacaatgcgatcacacgccatgggatacatggctcacagtggagccttgagtgtgtggtcgggggccacctgctacgccaaggcgataacaccattgacataaaactcatcgcacaacaaggaccgaaaggtcctgccatggtcgccggggtcatgtatgactatatccgcctagaagggccaccatctagaggcgttgcctcgagccgcattccagcgttctcccttcaccggattttgttcctgttagccttcctagtcatgtcctagtatgtctagctatgtggccatctaacatgtagcattttttttgctagttgttgtatgaaagcaagaaatatgatgatgtagtacaagcaatgttattgtggagagaatggaggcccatgctacactgattaagtatgtattcaacagatcatcaattggccggagataagggatcatgctaaatgttcacatgcaacttctgagtgttaaactagata

SEQ ID NO: 42739 - DNA, 6456 bp, Zea Mays
gtcattttctagagagctttttgtgatactcttattactcagggtagcaatcccaaaaatgcagggctagtttagaaacttaaatcatttctaggattcccggatcaaagaaaaaaatatatttatatatttacattttaaatgatatattaaataaaactaaaatatgtatgtaactatttaaatttaatggttatgacagatacatacgcatagcaatttattcctctcctctatatattttcaaaaacataaaaaagaaaaaaaatcaacaccggaccaatgcgcgctcgctccagcacagtattgcggcagtattgcagtccagaacagggcaccgccgcaccggtgctcgttccagcccaggaggccagtaccgcagtcccgcgcagccggccattcccatgccgccggcacccatgagatggcggcgcgggggccgctcgtcatcgcgtctccttcagcgagccctcctcttggccgccttctccgctgcggccctcatcctcctcgtactccagcaccaccacggtcctaaacgcccaaacccttccgccgcgtcccacgcccgcgactcctcagacgagctcctcgacgactcgcctcccgcggagcgggatccggatgccagtgaccctgcggtagttgttgacagggccacgtgcgcaacggtggagatgatgggggaggaggccgctggtgctgggcggggctctccggagcaggccagcctgcgggtccgcgagatgatccggcgccacttcgagctccacggagcagaaagagtgagaatgcttcctgcccatgaattctgcaaacaaggatttgtgttggggaaagcatctgaagctggatttggcaatgaaatgtacaagatcttaacagcgggagccttgagtgtcatgttaaaccgatctttgatcatcgggcaaacaaggggactgtatccttttggggagtacatttcttataccaaccagtcattcactattcatgaaatcaaacatttgtggaggaagcatcgctgtgctaggacatatggtagagatctgaatatcagagtggatatttttgaaaatccaactgagacgaatgttctgtgtagtgactggaatagctggaaggattcaattatctggtttgatggcgcaacagatgcagttgggattcagttctttctgaagaatgttcatcctagaatgaaggctgccgcgtcggctctttttggattgccagactcattgtacgccaggcctaatacatttggtgaacttatgcgagctattatatctccatccagcaaagtccaagaagcagttgactgggctttgaagggtgtgaatccagatattgttttgcacatgcgcatgatggcgaataggccagtccgagcaagaaaagctgcagttctttgtatcaagaaagccctacagtttagccatattaagggtacagctctggtggccttggtctcagacacaccagcatttgtgaaggagataaagtcagacatcagtgagtttgcagaggtacttaattttgattacaaattgtttgccaagacttctagtctggagattgttggaaatgataagcccttggattttcgatcaagagactggggatcagctccaaggtgggtggcgtttgttgatttctttatagctgcacaggccaggtacgcagtcgtcactggagcacatcgtcgtgtggggaccacctacgcacaactcattacagcattggctgcggcaaacaggcatggtcgagagccttcaggcaccaacttcacgttcctaagtagtgtccacagcaacttgctggtggaggggctgtcgacgcaggttggttggggccatatctggaacagatatgctggtcctctaagctgtcggcgccagccacaccaatgcgccttgaccccgctcctccctcctgcttggtgggacggtcgatggcaaagccctattcccagggatgtgaggaggctactggagtacggtgtccggttatcagatactggggaggtggacgagaggcacctgttgtcgtactgcaggtcaaggaaagatcatgtgaagaggttccatgtccttccaccatacaagaacccggcacgactgtaggctgaggaggtcggcgaggagcagtagagagctcaattttgcattaaccacttatgacgagtgtaggtttgagtggccaagcttttaaactggccatgctggtaaatttcgtgtcgtgactggtgtaggttttggtaatctggtgactggtgcactggtgttcaggcggtagtatatcatgcatcgtacatcactattgttcatctgtgataagattggaaagcaggtagcagacctggagatgatagcatgatgtatatagggtaaaggcatagcattgcattgtcgatgagttataagctggtggtctatctgtcaattaactatatagcagagcaccgacccagaattgtaagcctttcgtctactgatgcaattttgatgtttatcgttctcctgtatcttcgatttgacaattatgcgattgcttggaaggactgagttctatgaaattgcttcttttcctgttgtcgttgccaaaatattgttcaaactttttgttgcttgtatattgttaatttttacaggatgcttgattgtgaattgttgcgtattatcatggctgtggacccatgacaaatagattctctagtttaatagcagtggtgaactggtgattgatattcattatccccttaccgaatttttgttcctgtctgacaaacaggggattgtatccttttgaggagcacatttcttataccaaccagtcattcactattcatgaaatcaaacatttctggaggaaacatcaatgtgctagggcatatgatagagatctgaatatcagagtggacaaactgttgttcatccgtgataagattggaaagcagatagcagatatagagatgggttgatgtataaattcatagcataacattgcattgcatcgtcaattagttataagctggtggtctaatctactggtgcgattttgaggtttttcgttctcctgtctagtatacgtgcacgcttaggcggccttgtctgtttcagctcaggactgtgttcagacgtgcaagcttgcctgcttgggatggctttccaagctgaaacaaaaaaggttcttgaaagatgcgtgggtgcacgatgccagttcggtgtcgagccatgccgcgcaaagtggacatctagtgggcctgtggcgactcagtgatttgaacctaacgcatgatgtcactagatatactacctccatttttgatatactacctccatttttatttatttgacgccagttagttcaattttatactaatcggtgtcaaataaaaataaacagaggaagtactagatagaaggtctaacagctaatagaagggccccttattaccagtcatatttcagtttcagttcaaatggtcgaaggctctcgattctcgaagctaacaattttccttgtttctttctttaggcccttgcgagatagcatgtacatcggtcctagcggtggcttctttgttacaaactggtatcaaattttacgcgaggaggtgactctccaatccaagtaagtagaaagctcatggcagcccccgttcctctcgggcagcacaattcgatgcgtttcctcagcttcccgcagggcggcaggaggattccttggcaacagagcaccgcaacccctgttgcttccttcacgtcgccacgggcaagggccacacactcttagcacctgttgtcatgttatttaactcgatctcatcagctatctagtcagtcagcgacgctcacatggacgaggttcatcgttctgctctggccgccgcgcgccggcgcagatacgtttcatggtaccctcttgcatcgcactcccacatggcggctgcggctcaagctaggtcgtccttcctcgtcctgctcgtcgccacgtggtcgctgtcgccgcggcttgccggggcctccacgtccacggaagcagcagctgccggccgtggcgttacgctacgcctcgacgcgagccaggtggtcgtggacaatggcgcggtgcaggtggcgctgtcggcgccggagggccggatcaccggcgtcagctacagcggcgacggcgagaccaccaacctgctggggtacgacgccggcgagggagactccggagggtaactgacgagtgcatgcgtattacacttgtgctgcctcttcttttatctgcctgcactctgccctctgccactcggaatgtcccttctctcttgcaggtattgggattcggtatggaactatcccggctctggtctcccaggacagtacaatacgttggatagcacagagttcaacgtagtgtcctcaagtgaagatcaagtggagctttctttcaggagcacatacaacccgtcgcatcgaaacagccttcggctaaacatcgacaagaggtgccaaaatccttcacgttattcgctccacgcaacaacctgttttggatactgttttcctcatctgaaacagtaccaaactgtctctcgggagttcgctaagacggctggttcaggctggtgatgctcagaggtagctctgggttctactgctacgccatctttgagcatgacagggcctaccccgctctcaacatcacggaggctcggctcgtcttcaagcttaacacggcaaagttcaattacatggctattacagacgatatacagaggtacatgcccagcgcggcggacagagaagagcctcgtgctgtcccgctggcttacaaggaggctgttctgctggttgaccccaaggaaccccagttccgaggagaggtggatgacaagtaccagtactcgctggacaacaaggacaacgttgttcacggatggattagccgcggcgatcccaacgccgtgggtttctgggtcatcactcccagcaacgagttcaagagcggcggccctctcaagcgggagctcacctcccacgtcggccccacatccctcacttacatggtggccaacatcaacgacggcgaggcgtggaagaaagtgctaggcccggtgttcatctacctcaactcaggtcccagcagaggtgagctctgggaggacgccaaggctcgggcgcgggcggaggcggcgagctggccctacagcttcctcgcgtcaccggagttccccaaggcggccgagagaggatccgtcgtaggaaggctcctggtcagggacagccacgagaagcatggcatgcctgctgggtcgtcggccttcgtcggcctcgcctcgcctgggccgcccgggtcctgggcgacggagagcaagggctaccagttctggacgagggccgcgcccgacggcaccttccgcatcgccaacgtcagggaaggagtgtacggtctgtacgcgttcgttcccgggtttctcggagactactgctacggttcgccgctgaccgtagcgccaggccgtgccatcggcgtcggcgacctcgtgttcgagcccccgaggtcgggcccgacggtgtgggagattggcgtccccgaccggacggcggcggagttctacgtcccggatccggaccccaggtacgtcaacaggctcttcgtcgtccgagacaggtaccggcagtacggtctgtgggagaggtacgccgacctgtacccggacaaggatctcgtcttcaccgtcggcgaaagcgacgaatccaaggactggttctttgcacacgtcacaagaaaggtagggcaggttgccgtgccaacaacatggcagatacggttcagtctggaccgcgtcgtggcagacgacgacacctacacgctgcggatctcccttgcagcttctcaaatgtgcaggttgcaggtgcaagtgaatggggatgcaaggagaggcagggattttacaacgcccgacatgggcgatgacaatgcgatcacacgccatgggatacatggctcacagtggagccttgagtgtgtggtcgggggccacctgctacgccaaggcgataacaccattgacataaaactcatcgcacaacaaggaccgaaaggtcctgccatggtcgccggggtcatgtatgactatatccgcctagaagggccaccatctagaggcgttgcctcgagccgcattccagcgttctcccttcaccggattttgttcctgttagccttcctagtcatgtcctagtatgtctagctatgtggccatctaacatgtagcattttttttgctagttgttgtatgaaagcaagaaatatgatgatgtagtacaagcaatgttattgtggagagaatggaggcccatgctacactgattaagtatgtattcaacagatcatcaattggccggagataagggatcatgctaaatgttcacatgcaacttctgagtgttaaactagata

SEQ ID NO: 42740 - DNA, 4499 bp, Zea Mays
gtcattttctagagagctttttgtgatactcttattactcagggtagcaatcccaaaaatgcagggctagtttagaaacttaaatcatttctaggattcccggatcaaagaaaaaaatatatttatatatttacattttaaatgatatattaaataaaactaaaatatgtatgtaactatttaaatttaatggttatgacagatacatacgcatagcaatttattcctctcctctatatattttcaaaaacataaaaaagaaaaaaaatcaacaccggaccaatgcgcgctcgctccagcacagtattgcggcagtattgcagtccagaacagggcaccgccgcaccggtgctcgttccagcccaggaggccagtaccgcagtcccgcgcagccggccattcccatgccgccggcacccatgagatggcggcgcgggggccgctcgtcatcgcgtctccttcagcgagccctcctcttggccgccttctccgctgcggccctcatcctcctcgtactccagcaccaccacggtcctaaacgcccaaacccttccgccgcgtcccacgcccgcgactcctcagacgagctcctcgacgactcgcctcccgcggagcgggatccggatgccagtgaccctgcggtagttgttgacagggccacgtgcgcaacggtggagatgatgggggaggaggccgctggtgctgggcggggctctccggagcaggccagcctgcgggtccgcgagatgatccggcgccacttcgagctccacggggactgtatccttttggggagtacatttcttataccaaccagtcattcactattcatgaaatcaaacatttgtggaggaagcatcgctgtgctaggacatatggtagagatctgaatatcagagtggatatttttgaaaatccaactgagacgaatgttctgtgtagtgactggaatagctggaaggattcaattatctggtttgatggcgcaacagatgcagttgggattcagttctttctgaagaatgttcatcctagaatgaaggctgccgcgtcggctctttttggattgccagactcattgtacgccaggcctaatacatttggtgaacttatgcgagctattatatctccatccagcaaagtccaagaagcagttgactgggctttgaagggtgtgaatccagatattgttttgcacatgcgcatgatggcgaataggccagtccgagcaagaaaagctgcagttctttgtatcaagaaagccctacagtttagccatattaagggtacagctctggtggccttggtctcagacacaccagcatttgtgaaggagataaagtcagacatcagtgagtttgcagaggtacttaattttgattacaaattgtttgccaagacttctagtctggagattgttggaaatgataagcccttggattttcgatcaagagactggggatcagctccaaggtgggtggcgtttgttgatttctttatagctgcacaggccaggtacgcagtcgtcactggagcacatcgtcgtgtggggaccacctacgcacaactcattacagcattggctgcggcaaacaggcatggcccttgcgagatagcatgtacatcggtcctagcggtggcttctttgttacaaactggtatcaaattttacgcgaggaggtgactctccaatccaagtaagtagaaagctcatggcagcccccgttcctctcgggcagcacaattcgatgcgtttcctcagcttcccgcagggcggcaggaggattccttggcaacagagcaccgcaacccctgttgcttccttcacgtcgccacgggcaagggccacacactcttagcacctgttgtcatgttatttaactcgatctcatcagctatctagtcagtcagcgacgctcacatggacgaggttcatcgttctgctctggccgccgcgcgccggcgcagatacgtttcatggtaccctcttgcatcgcactcccacatggcggctgcggctcaagctaggtcgtccttcctcgtcctgctcgtcgccacgtggtcgctgtcgccgcggcttgccggggcctccacgtccacggaagcagcagctgccggccgtggcgttacgctacgcctcgacgcgagccaggtggtcgtggacaatggcgcggtgcaggtggcgctgtcggcgccggagggccggatcaccggcgtcagctacagcggcgacggcgagaccaccaacctgctggggtacgacgccggcgagggagactccggagggtaactgacgagtgcatgcgtattacacttgtgctgcctcttcttttatctgcctgcactctgccctctgccactcggaatgtcccttctctcttgcaggtattgggattcggtatggaactatcccggctctggtctcccaggacagtacaatacgttggatagcacagagttcaacgtagtgtcctcaagtgaagatcaagtggagctttctttcaggagcacatacaacccgtcgcatcgaaacagccttcggctaaacatcgacaagagacggctggttcaggctggtgatgctcagaggtagctctgggttctactgctacgccatctttgagcatgacagggcctaccccgctctcaacatcacggaggctcggctcgtcttcaagcttaacacggcaaagtgagctagctagcatccctctttaagtttttgaacacaaatgatcatctcgatcgagctgtatcgtacgtgaaatctttgctaggttcaattacatggctattacagacgatatacagaggtacatgcccagcgcggcggacagagaagagcctcgtgctgtcccgctggcttacaaggaggctgttctgctggttgaccccaaggaaccccagttccgaggagaggtggatgacaagtaccagtactcgctggacaacaaggacaacgttgttcacggatggattagccgcggcgatcccaacgccgtgggtttctgggtcatcactcccagcaacgagttcaagagcggcggccctctcaagcgggagctcacctcccacgtcggccccacatccctcacttacatggtggccaacatcaacgacggcgaggcgtggaagaaagtgctaggcccggtgttcatctacctcaactcaggtcccagcagaggtgagctctgggaggacgccaaggctcgggcgcgggcggaggcggcgagctggccctacagcttcctcgcgtcaccggagttccccaaggcggccgagagaggatccgtcgtaggaaggctcctggtcagggacagccacgagaagcatggcatgcctgctgggtcgtcggccttcgtcggcctcgcctcgcctgggccgcccgggtcctgggcgacggagagcaagggctaccagttctggacgagggccgcgcccgacggcaccttccgcatcgccaacgtcagggaaggagtgtacggtctgtacgcgttcgttcccgggtttctcggagactactgctacggttcgccgctgaccgtagcgccaggccgtgccatcggcgtcggcgacctcgtgttcgagcccccgaggtcgggcccgacggtgtgggagattggcgtccccgaccggacggcggcggagttctacgtcccggatccggaccccaggtacgtcaacaggctcttcgtcgtccgagacaggtaccggcagtacggtctgtgggagaggtacgccgacctgtacccggacaaggatctcgtcttcaccgtcggcgaaagcgacgaatccaaggactggttctttgcacacgtcacaagaaaggtagggcaggttgccgtgccaacaacatggcagatacggttcagtctggaccgcgtcgtggcagacgacgacacctacacgctgcggatctcccttgcagcttctcaaatgtgcaggttgcaggtgcaagtgaatggggatgcaaggagaggcagggattttacaacgcccgacatgggcgatgacaatgcgatcacacgccatgggatacatggctcacagtggagccttgagtgtgtggtcgggggccacctgctacgccaaggcgataacaccattgacataaaactcatcgcacaacaaggaccgaaaggtcctgccatggtcgccggggtcatgtatgactatatccgcctagaagggccaccatctagaggcgttgcctcgagccgcattccagcgttctcccttcaccggattttgttcctgttagccttcctagtcatgtcctagtatgtctagctatgtggccatctaacatgtagcattttttttgctagttgttgtatgaaagcaagaaatatgatgatgtagtacaagcaatgttattgtggagagaatggaggcccatgctacactgattaagtatgtattcaacagatcatcaattggccggagataagggatcatgctaaatgttcacatgcaacttctgagtgttaaactagata

SEQ ID NO: 42741 - DNA, 4467 bp, Zea Mays
gtcattttctagagagctttttgtgatactcttattactcagggtagcaatcccaaaaatgcagggctagtttagaaacttaaatcatttctaggattcccggatcaaagaaaaaaatatatttatatatttacattttaaatgatatattaaataaaactaaaatatgtatgtaactatttaaatttaatggttatgacagatacatacgcatagcaatttattcctctcctctatatattttcaaaaacataaaaaagaaaaaaaatcaacaccggaccaatgcgcgctcgctccagcacagtattgcggcagtattgcagtccagaacagggcaccgccgcaccggtgctcgttccagcccaggaggccagtaccgcagtcccgcgcagccggccattcccatgccgccggcacccatgagatggcggcgcgggggccgctcgtcatcgcgtctccttcagcgagccctcctcttggccgccttctccgctgcggccctcatcctcctcgtactccagcaccaccacggtcctaaacgcccaaacccttccgccgcgtcccacgcccgcgactcctcagacgagctcctcgacgactcgcctcccgcggagcgggatccggatgccagtgaccctgcggtagttgttgacagggccacgtgcgcaacggtggagatgatgggggaggaggccgctggtgctgggcggggctctccggagcaggccagcctgcgggtccgcgagatgatccggcgccacttcgagctccacggggactgtatccttttggggagtacatttcttataccaaccagtcattcactattcatgaaatcaaacatttgtggaggaagcatcgctgtgctaggacatatggtagagatctgaatatcagagtggatatttttgaaaatccaactgagacgaatgttctgtgtagtgactggaatagctggaaggattcaattatctggtttgatggcgcaacagatgcagttgggattcagttctttctgaagaatgttcatcctagaatgaaggctgccgcgtcggctctttttggattgccagactcattgtacgccaggcctaatacatttggtgaacttatgcgagctattatatctccatccagcaaagtccaagaagcagttgactgggctttgaagggtgtgaatccagatattgttttgcacatgcgcatgatggcgaataggccagtccgagcaagaaaagctgcagttctttgtatcaagaaagccctacagtttagccatattaagggtacagctctggtggccttggtctcagacacaccagcatttgtgaaggagataaagtcagacatcagtgagtttgcagaggtacttaattttgattacaaattgtttgccaagacttctagtctggagattgttggaaatgataagcccttggattttcgatcaagagactggggatcagctccaaggtgggtggcgtttgttgatttctttatagctgcacaggccaggtacgcagtcgtcactggagcacatcgtcgtgtggggaccacctacgcacaactcattacagcattggctgcggcaaacaggcatggcccttgcgagatagcatgtacatcggtcctagcggtggcttctttgttacaaactggtatcaaattttacgcgaggaggtgactctccaatccaagtaagtagaaagctcatggcagcccccgttcctctcgggcagcacaattcgatgcgtttcctcagcttcccgcagggcggcaggaggattccttggcaacagagcaccgcaacccctgttgcttccttcacgtcgccacgggcaagggccacacactcttagcacctgttgtcatgttatttaactcgatctcatcagctatctagtcagtcagcgacgctcacatggacgaggttcatcgttctgctctggccgccgcgcgccggcgcagatacgtttcatggtaccctcttgcatcgcactcccacatggcggctgcggctcaagctaggtcgtccttcctcgtcctgctcgtcgccacgtggtcgctgtcgccgcggcttgccggggcctccacgtccacggaagcagcagctgccggccgtggcgttacgctacgcctcgacgcgagccaggtggtcgtggacaatggcgcggtgcaggtggcgctgtcggcgccggagggccggatcaccggcgtcagctacagcggcgacggcgagaccaccaacctgctggggtacgacgccggcgagggagactccggagggtaactgacgagtgcatgcgtattgggattcggtatggaactatcccggctctggtctcccaggacagtacaatacgttggatagcacagagttcaacgtagtgtcctcaagtgaagatcaagtggagctttctttcaggagcacatacaacccgtcgcatcgaaacagccttcggctaaacatcgacaagaggtgccaaaatccttcacgttattcgctccacgcaacaacctgttttggatactgttttcctcatctgaaacagtaccaaactgtctctcgggagttcgctaagacggctggttcaggctggtgatgctcagaggtagctctgggttctactgctacgccatctttgagcatgacagggcctaccccgctctcaacatcacggaggctcggctcgtcttcaagcttaacacggcaaagttcaattacatggctattacagacgatatacagaggtacatgcccagcgcggcggacagagaagagcctcgtgctgtcccgctggcttacaaggaggctgttctgctggttgaccccaaggaaccccagttccgaggagaggtggatgacaagtaccagtactcgctggacaacaaggacaacgttgttcacggatggattagccgcggcgatcccaacgccgtgggtttctgggtcatcactcccagcaacgagttcaagagcggcggccctctcaagcgggagctcacctcccacgtcggccccacatccctcactatgtttatggggacacattacgttggcaagtacatggtggccaacatcaacgacggcgaggcgtggaagaaagtgctaggcccggtgttcatctacctcaactcaggtcccagcagaggtgagctctgggaggacgccaaggctcgggcgcgggcggaggcggcgagctggccctacagcttcctcgcgtcaccggagttccccaaggcggccgagagaggatccgtcgtaggaaggctcctggtcagggacagccacgagaagcatggcatgcctgctgggtcgtcggccttcgtcggcctcgcctcgcctgggccgcccgggtcctgggcgacggagagcaagggctaccagttctggacgagggccgcgcccgacggcaccttccgcatcgccaacgtcagggaaggagtgtacggtctgtacgcgttcgttcccgggtttctcggagactactgctacggttcgccgctgaccgtagcgccaggccgtgccatcggcgtcggcgacctcgtgttcgagcccccgaggtcgggcccgacggtgtgggagattggcgtccccgaccggacggcggcggagttctacgtcccggatccggaccccaggtacgtcaacaggctcttcgtcgtccgagacaggtaccggcagtacggtctgtgggagaggtacgccgacctgtacccggacaaggatctcgtcttcaccgtcggcgaaagcgacgaatccaaggactggttctttgcacacgtcacaagaaaggtagggcaggttgccgtgccaacaacatggcagatacggttcagtctggaccgcgtcgtggcagacgacgacacctacacgctgcggatctcccttgcagcttctcaaatgtgcaggttgcaggtgcaagtgaatggggatgcaaggagaggcagggattttacaacgcccgacatgggcgatgacaatgcgatcacacgccatgggatacatggctcacagtggagccttgagtgtgtggtcgggggccacctgctacgccaaggcgataacaccattgacataaaactcatcgcacaacaaggaccgaaaggtcctgccatggtcgccggggtcatgtatgactatatccgcctagaagggccaccatctagaggcgttgcctcgagccgcattccagcgttctcccttcaccggattttgttcctgttagccttcctagtcatgtcctagtatgtctagctatgtggccatctaacatgtagcattttttttgctagttgttgtatgaaagcaagaaatatgatgatgtagtacaagcaatgttattgtggagagaatggaggcccatgctacactgattaagtatgtattcaacagatcatcaattggccggagataagggatcatgctaaatgttcacatgcaacttctgagtgttaaactagata

SEQ ID NO: 42742 - DNA, 6121 bp, Zea Mays
gtcattttctagagagctttttgtgatactcttattactcagggtagcaatcccaaaaatgcagggctagtttagaaacttaaatcatttctaggattcccggatcaaagaaaaaaatatatttatatatttacattttaaatgatatattaaataaaactaaaatatgtatgtaactatttaaatttaatggttatgacagatacatacgcatagcaatttattcctctcctctatatattttcaaaaacataaaaaagaaaaaaaatcaacaccggaccaatgcgcgctcgctccagcacagtattgcggcagtattgcagtccagaacagggcaccgccgcaccggtgctcgttccagcccaggaggccagtaccgcagtcccgcgcagccggccattcccatgccgccggcacccatgagatggcggcgcgggggccgctcgtcatcgcgtctccttcagcgagccctcctcttggccgccttctccgctgcggccctcatcctcctcgtactccagcaccaccacggtcctaaacgcccaaacccttccgccgcgtcccacgcccgcgactcctcagacgagctcctcgacgactcgcctcccgcggagcgggatccggatgccagtgaccctgcggtagttgttgacagggccacgtgcgcaacggtggagatgatgggggaggaggccgctggtgctgggcggggctctccggagcaggccagcctgcgggtccgcgagatgatccggcgccacttcgagctccacggggactgtatccttttggggagtacatttcttataccaaccagtcattcactattcatgaaatcaaacatttgtggaggaagcatcgctgtgctaggacatatggtagagatctgaatatcagagtggatatttttgaaaatccaactgagacgaatgttctgtgtagtgactggaatagctggaaggattcaattatctggtttgatggcgcaacagatgcagttgggattcagttctttctgaagaatgttcatcctagaatgaaggctgccgcgtcggctctttttggattgccagactcattgtacgccaggcctaatacatttggtgaacttatgcgagctattatatctccatccagcaaagtccaagaagcagttgactgggctttgaagggtgtgaatccagatattgttttgcacatgcgcatgatggcgaataggccagtccgagcaagaaaagctgcagttctttgtatcaagaaagccctacagtttagccatattaagggtacagctctggtggccttggtctcagacacaccagcatttgtgaaggagataaagtcagacatcagtgagtttgcagaggtacttaattttgattacaaattgtttgccaagacttctagtctggagattgttggaaatgataagcccttggattttcgatcaagagactggggatcagctccaaggtgggtggcgtttgttgatttctttatagctgcacaggccaggtacgcagtcgtcactggagcacatcgtcgtgtggggaccacctacgcacaactcattacagcattggctgcggcaaacaggcatggtcgagagccttcaggcaccaacttcacgttcctaagtagtgtccacagcaacttgctggtggaggggctgtcgacgcaggttggttggggccatatctggaacagatatgctggtcctctaagctgtcggcgccagccacaccaatgcgccttgaccccgctcctccctcctgcttggtgggacggtcgatggcaaagccctattcccagggatgtgaggaggctactggagtacggtgtccggttatcagatactggggaggtggacgagaggcacctgttgtcgtactgcaggtcaaggaaagatcatgtgaagaggttccatgtccttccaccatacaagaacccggcacgactgtaggctgaggaggtcggcgaggagcagtagagagctcaattttgcattaaccacttatgacgagtgtaggtttgagtggccaagcttttaaactggccatgctggtaaatttcgtgtcgtgactggtgtaggttttggtaatctggtgactggtgcactggtgttcaggcggtagtatatcatgcatcgtacatcactattgttcatctgtgataagattggaaagcaggtagcagacctggagatgatagcatgatgtatatagggtaaaggcatagcattgcattgtcgatgagttataagctggtggtctatctgtcaattaactatatagcagagcaccgacccagaattgtaagcctttcgtctactgatgcaattttgatgtttatcgttctcctgtatcttcgatttgacaattatgcgattgcttggaaggactgagttctatgaaattgcttcttttcctgttgtcgttgccaaaatattgttcaaactttttgttgcttgtatattgttaatttttacaggatgcttgattgtgaattgttgcgtattatcatggctgtggacccatgacaaatagattctctagtttaatagcagtggtgaactggtgattgatattcattatccccttaccgaatttttgttcctgtctgacaaacaggggattgtatccttttgaggagcacatttcttataccaaccagtcattcactattcatgaaatcaaacatttctggaggaaacatcaatgtgctagggcatatgatagagatctgaatatcagagtggacaaactgttgttcatccgtgataagattggaaagcagatagcagatatagagatgggttgatgtataaattcatagcataacattgcattgcatcgtcaattagttataagctggtggtctaatctactggtgcgattttgaggtttttcgttctcctgtctagtatacgtgcacgcttaggcggccttgtctgtttcagctcaggactgtgttcagacgtgcaagcttgcctgcttgggatggctttccaagctgaaacaaaaaaggttcttgaaagatgcgtgggtgcacgatgccagttcggtgtcgagccatgccgcgcaaagtggacatctagtgggcctgtggcgactcagtgatttgaacctaacgcatgatgtcactagatatactacctccatttttgatatactacctccatttttatttatttgacgccagttagttcaattttatactaatcggtgtcaaataaaaataaacagaggaagtactagatagaaggtctaacagctaatagaagggccccttattaccagtcatatttcagtttcagttcaaatggtcgaaggctctcgattctcgaagctaacaattttccttgtttctttctttaggcccttgcgagatagcatgtacatcggtcctagcggtggcttctttgttacaaactggtatcaaattttacgcgaggaggtgactctccaatccaagtaagtagaaagctcatggcagcccccgttcctctcgggcagcacaattcgatgcgtttcctcagcttcccgcagggcggcaggaggattccttggcaacagagcaccgcaacccctgttgcttccttcacgtcgccacgggcaagggccacacactcttagcacctgttgtcatgttatttaactcgatctcatcagctatctagtcagtcagcgacgctcacatggacgaggttcatcgttctgctctggccgccgcgcgccggcgcagatacgtttcatggtaccctcttgcatcgcactcccacatggcggctgcggctcaagctaggtcgtccttcctcgtcctgctcgtcgccacgtggtcgctgtcgccgcggcttgccggggcctccacgtccacggaagcagcagctgccggccgtggcgttacgctacgcctcgacgcgagccaggtggtcgtggacaatggcgcggtgcaggtggcgctgtcggcgccggagggccggatcaccggcgtcagctacagcggcgacggcgagaccaccaacctgctggggtacgacgccggcgagggagactccggagggtattgggattcggtatggaactatcccggctctggtctcccaggacagtacaatacgttggatagcacagagttcaacgtagtgtcctcaagtgaagatcaagtggagctttctttcaggagcacatacaacccgtcgcatcgaaacagccttcggctaaacatcgacaagagacggctggttcaggctggtgatgctcagaggtagctctgggttctactgctacgccatctttgagcatgacagggcctaccccgctctcaacatcacggaggctcggctcgtcttcaagcttaacacggcaaagttcaattacatggctattacagacgatatacagaggtacatgcccagcgcggcggacagagaagagcctcgtgctgtcccgctggcttacaaggaggctgttctgctggttgaccccaaggaaccccagttccgaggagaggtggatgacaagtaccagtactcgctggacaacaaggacaacgttgttcacggatggattagccgcggcgatcccaacgccgtgggtttctgggtcatcactcccagcaacgagttcaagagcggcggccctctcaagcgggagctcacctcccacgtcggccccacatccctcactatgtttatggggacacattacgttggcaagtacatggtggccaacatcaacgacggcgaggcgtggaagaaagtgctaggcccggtgttcatctacctcaactcaggtcccagcagaggtgagctctgggaggacgccaaggctcgggcgcgggcggaggcggcgagctggccctacagcttcctcgcgtcaccggagttccccaaggcggccgagagaggatccgtcgtaggaaggctcctggtcagggacagccacgagaagcatggcatgcctgctgggtcgtcggccttcgtcggcctcgcctcgcctgggccgcccgggtcctgggcgacggagagcaagggctaccagttctggacgagggccgcgcccgacggcaccttccgcatcgccaacgtcagggaaggagtgtacggtctgtacgcgttcgttcccgggtttctcggagactactgctacggttcgccgctgaccgtagcgccaggccgtgccatcggcgtcggcgacctcgtgttcgagcccccgaggtcgggcccgacggtgtgggagattggcgtccccgaccggacggcggcggagttctacgtcccggatccggaccccaggtacgtcaacaggctcttcgtcgtccgagacaggtaccggcagtacggtctgtgggagaggtacgccgacctgtacccggacaaggatctcgtcttcaccgtcggcgaaagcgacgaatccaaggactggttctttgcacacgtcacaagaaaggtagggcaggttgccgtgccaacaacatggcagatacggttcagtctggaccgcgtcgtggcagacgacgacacctacacgctgcggatctcccttgcagcttctcaaatgtgcaggttgcaggtgcaagtgaatggggatgcaaggagaggcagggattttacaacgcccgacatgggcgatgacaatgcgatcacacgccatgggatacatggctcacagtggagccttgagtgtgtggtcgggggccacctgctacgccaaggcgataacaccattgacataaaactcatcgcacaacaaggaccgaaaggtcctgccatggtcgccggggtcatgtatgactatatccgcctagaagggccaccatctagaggcgttgcctcgagccgcattccagcgttctcccttcaccggattttgttcctgttagccttcctagtcatgtcctagtatgtctagctatgtggccatctaacatgtagcattttttttgctagttgttgtatgaaagcaagaaatatgatgatgtagtacaagcaatgttattgtggagagaatggaggcccatgctacactgattaagtatgtattcaacagatcatcaattggccggagataagggatcatgctaaatgttcacatgcaacttctgagtgttaaactagata

SEQ ID NO: 42743 - DNA, 4332 bp, Zea Mays
gtcattttctagagagctttttgtgatactcttattactcagggtagcaatcccaaaaatgcagggctagtttagaaacttaaatcatttctaggattcccggatcaaagaaaaaaatatatttatatatttacattttaaatgatatattaaataaaactaaaatatgtatgtaactatttaaatttaatggttatgacagatacatacgcatagcaatttattcctctcctctatatattttcaaaaacataaaaaagaaaaaaaatcaacaccggaccaatgcgcgctcgctccagcacagtattgcggcagtattgcagtccagaacagggcaccgccgcaccggtgctcgttccagcccaggaggccagtaccgcagtcccgcgcagccggccattcccatgccgccggcacccatgagatggcggcgcgggggccgctcgtcatcgcgtctccttcagcgagccctcctcttggccgccttctccgctgcggccctcatcctcctcgtactccagcaccaccacggtcctaaacgcccaaacccttccgccgcgtcccacgcccgcgactcctcagacgagctcctcgacgactcgcctcccgcggagcgggatccggatgccagtgaccctgcggtagttgttgacagggccacgtgcgcaacggtggagatgatgggggaggaggccgctggtgctgggcggggctctccggagcaggccagcctgcgggtccgcgagatgatccggcgccacttcgagctccacggggactgtatccttttggggagtacatttcttataccaaccagtcattcactattcatgaaatcaaacatttgtggaggaagcatcgctgtgctaggacatatggtagagatctgaatatcagagtggatatttttgaaaatccaactgagacgaatgttctgtgtagtgactggaatagctggaaggattcaattatctggtttgatggcgcaacagatgcagttgggattcagttctttctgaagaatgttcatcctagaatgaaggctgccgcgtcggctctttttggattgccagactcattgtacgccaggcctaatacatttggtgaacttatgcgagctattatatctccatccagcaaagtccaagaagcagttgactgggctttgaagggtgtgaatccagatattgttttgcacatgcgcatgatggcgaataggccagtccgagcaagaaaagctgcagttctttgtatcaagaaagccctacagtttagccatattaagggtacagctctggtggccttggtctcagacacaccagcatttgtgaaggagataaagtcagacatcagtgagtttgcagaggtacttaattttgattacaaattgtttgccaagacttctagtctggagattgttggaaatgataagcccttggattttcgatcaagagactggggatcagctccaaggtgggtggcgtttgttgatttctttatagctgcacaggccaggtacgcagtcgtcactggagcacatcgtcgtgtggggaccacctacgcacaactcattacagcattggctgcggcaaacaggcatggcccttgcgagatagcatgtacatcggtcctagcggtggcttctttgttacaaactggtatcaaattttacgcgaggaggtgactctccaatccaagtaagtagaaagctcatggcagcccccgttcctctcgggcagcacaattcgatgcgtttcctcagcttcccgcagggcggcaggaggattccttggcaacagagcaccgcaacccctgttgcttccttcacgtcgccacgggcaagggccacacactcttagcacctgttgtcatgttatttaactcgatctcatcagctatctagtcagtcagcgacgctcacatggacgaggttcatcgttctgctctggccgccgcgcgccggcgcagatacgtttcatggtaccctcttgcatcgcactcccacatggcggctgcggctcaagctaggtcgtccttcctcgtcctgctcgtcgccacgtggtcgctgtcgccgcggcttgccggggcctccacgtccacggaagcagcagctgccggccgtggcgttacgctacgcctcgacgcgagccaggtggtcgtggacaatggcgcggtgcaggtggcgctgtcggcgccggagggccggatcaccggcgtcagctacagcggcgacggcgagaccaccaacctgctggggtacgacgccggcgagggagactccggagggtattgggattcggtatggaactatcccggctctggtctcccaggacagtacaatacgttggatagcacagagttcaacgtagtgtcctcaagtgaagatcaagtggagctttctttcaggagcacatacaacccgtcgcatcgaaacagccttcggctaaacatcgacaagaggctggtgatgctcagaggtagctctgggttctactgctacgccatctttgagcatgacagggcctaccccgctctcaacatcacggaggctcggctcgtcttcaagcttaacacggcaaagttcaattacatggctattacagacgatatacagaggtacatgcccagcgcggcggacagagaagagcctcgtgctgtcccgctggcttacaaggaggctgttctgctggttgaccccaaggaaccccagttccgaggagaggtggatgacaagtaccagtactcgctggacaacaaggacaacgttgttcacggatggattagccgcggcgatcccaacgccgtgggtttctgggtcatcactcccagcaacgagttcaagagcggcggccctctcaagcgggagctcacctcccacgtcggccccacatccctcactatgtttatggggacacattacgttggcaagtacatggtggccaacatcaacgacggcgaggcgtggaagaaagtgctaggcccggtgttcatctacctcaactcaggtcccagcagaggtgagctctgggaggacgccaaggctcgggcgcgggcggaggcggcgagctggccctacagcttcctcgcgtcaccggagttccccaaggcggccgagagaggatccgtcgtaggaaggctcctggtcagggacagccacgagaagcatggcatgcctgctgggtcgtcggccttcgtcggcctcgcctcgcctgggccgcccgggtcctgggcgacggagagcaagggctaccagttctggacgagggccgcgcccgacggcaccttccgcatcgccaacgtcagggaaggagtgtacggtctgtacgcgttcgttcccgggtttctcggagactactgctacggttcgccgctgaccgtagcgccaggccgtgccatcggcgtcggcgacctcgtgttcgagcccccgaggtcgggcccgacggtgtgggagattggcgtccccgaccggacggcggcggagttctacgtcccggatccggaccccaggtacgtcaacaggctcttcgtcgtccgagacaggtaccggcagtacggtctgtgggagaggtacgccgacctgtacccggacaaggatctcgtcttcaccgtcggcgaaagcgacgaatccaaggactggttctttgcacacgtcacaagaaaggtagggcaggttgccgtgccaacaacatggcagatacggttcagtctggaccgcgtcgtggcagacgacgacacctacacgctgcggatctcccttgcagcttctcaaatgtgcaggttgcaggtgcaagtgaatggggatgcaaggagaggcagggattttacaacgcccgacatgggcgatgacaatgcgatcacacgccatgggatacatggctcacagtggagccttgagtgtgtggtcgggggccacctgctacgccaaggcgataacaccattgacataaaactcatcgcacaacaaggaccgaaaggtcctgccatggtcgccggggtcatgtatgactatatccgcctagaagggccaccatctagaggcgttgcctcgagccgcattccagcgttctcccttcaccggattttgttcctgttagccttcctagtcatgtcctagtatgtctagctatgtggccatctaacatgtagcattttttttgctagttgttgtatgaaagcaagaaatatgatgatgtagtacaagcaatgttattgtggagagaatggaggcccatgctacactgattaagtatgtattcaacagatcatcaattggccggagataagggatcatgctaaatgttcacatgcaacttctgagtgttaaactagata

SEQ ID NO: 42744 - DNA, 1816 bp, Zea Mays
gtcattttctagagagctttttgtgatactcttattactcagggtagcaatcccaaaaatgcagggctagtttagaaacttaaatcatttctaggattcccggatcaaagaaaaaaatatatttatatatttacattttaaatgatatattaaataaaactaaaatatgtatgtaactatttaaatttaatggttatgacagatacatacgcatagcaatttattcctctcctctatatattttcaaaaacataaaaaagaaaaaaaatcaacaccggaccaatgcgcgctcgctccagcacagtattgcggcagtattgcagtccagaacagggcaccgccgcaccggtgctcgttccagcccaggaggccagtaccgcagtcccgcgcagccggccattcccatgccgccggcacccatgagatggcggcgcgggggccgctcgtcatcgcgtctccttcagcgagccctcctcttggccgccttctccgctgcggccctcatcctcctcgtactccagcaccaccacggtcctaaacgcccaaacccttccgccgcgtcccacgcccgcgactcctcagacgagctcctcgacgactcgcctcccgcggagcgggatccggatgccagtgaccctgcggtagttgttgacagggccacgtgcgcaacggtggagatgatgggggaggaggccgctggtgctgggcggggctctccggagcaggccagcctgcgggtccgcgagatgatccggcgccacttcgagctccacggagcagaaagagtgagaatgcttcctgcccatgaattctgcaaacaaggatttgtgttggggaaagcatctgaagctggatttggcaatgaaatgtacaagatcttaacagcgggagccttgagtgtcatgttaaaccgatctttgatcatcgggcaaacaaggggactgtatccttttggggagtacatttcttataccaaccagtcattcactattcatgaaatcaaacatttgtggaggaagcatcgctgtgctaggacatatggtagagatctgaatatcagagtggatatttttgaaaatccaactgagacgaatgttctgtgtagtgactggaatagctggaaggattcaattatctggtttgatggcgcaacagatgcagttgggattcagttctttctgaagaatgttcatcctagaatgaaggctgccgcgtcggctctttttggattgccagactcattgtacgccaggcctaatacatttggtgaacttatgcgagctattatatctccatccagcaaagtccaagaagcagttgactgggctttgaagggtgtgaatccagatattgttttgcacatgcgcatgatggcgaataggccagtccgagcaagaaaagctgcagttctttgtatcaagaaagccctacagtttagccatattaagggtacagctctggtggccttggtctcagacacaccagcatttgtgaaggagataaagtcagacatcagtgagtttgcagaggtacttaattttgattacaaattgtttgccaagacttctagtctggagattgttggaaatgataagcccttggattttcgatcaagagactggggatcagctccaaggtgggtggcgtttgttgatttctttatagctgcacaggccaggtacgcagtcgtcactggagcacatcgtcgtgtggggaccacctacgcacaactcattacagcattggctgcggcaaacaggggattgtatccttttgaggagcacatttcttataccaaccagtcattcactattca

SEQ ID NO: 42745 - DNA, 1573 bp, Zea Mays
gctctataaatacgtacaccagttcatcgccctagctagctccaccagttcaccttccccttcccctgcccctgcgtgcgtgaccggcgacctagctcgcagtcgcactacactactcctcgaccaccactccgatccttcctgcctcgacgacggtcgcgcgcgcggcagcccatgaaggcgcgggcgaggcggcagcgcgtcccggcgttcggggagtggaaccatgcctacggctacggcggcggcggcggcgaccaacggcccgtcgtcacccactacgacctggactccgccatgcagatgcaggccaggcgactcgtcgtggcgataccggcggtgccgcccaagcctgccagcaaggtggtgaagtggaggcaaagtgccacagccacgcttgagctggaggacgaagatggcgagcacgagcacgaggacgagaagaagaagcagctgcagcagcagcatttgggtttggacgtggtggtgggactgggactgggcggcgctggcgctggcgctgccaggaagcaggggaagcagcagagcccggtggtgggctaccaggcgcgacggaggagggcggcggtcaagaccgtggaccaggacctctaccacatcccgcccgacatgctctgccacgagcccaggaaacgtctgacaaggaggaagagcctgtggacgggctgcctgggtctcagctgcgtcgtcgcatagggatccgccattgcccacctgctgacagctcatcatgagtcgcccctcggccctcgcctggcctgccttgttttgcgtgttgtgccacccacccgtactgtaaagacactcggctgctccatagcagaaaaccatggccatcatgttgtcacaccaccatcatcatcatctccacagtgttgtgctggctcgtcaactcgtcgtcgtactacgcgcgtgggagcagtgggcggacgggaaacgacttgttgttggatgtcgccgccgtgcccccgacgtgcgcggccgcccgccccggcagcgtcatttccccgtgcccgagacccactcgagcgctgcttttccaatttccacggcgtgcggtggcgttgcgttgcgacttgcgacctgctgctgtacggcgcccccggtgaatccggcgggaaaaggttgtgcgtcgtcgaaaggtcgatgacatgacagtgacatcgatgccttgtaggagtattaacttcgcaccactctaaaaaaacacttctctgaaatacgtaaaaaaaaggaactccaaaaggccttgttctgcgcgggggtgtcgccgtgttcagcttaagatcccatcttggggatttggagttgacgatgatgggcgaatgacgccggacaccccctgctgcatggcccctcaatcatgctacctagctagctatctagctaacggtgtgttgatcgagcgcgggtttcatgtccgccctgtttatagcttgttccccatatgcctctgtttctttttattagtcgttgaatagtgcaattttgcactatccagcgactaataaaaagaaacggaaacggagggagtattagcatgcgttacaag

SEQ ID NO: 42746 - DNA, 727 bp, Zea Mays
cttgcttccttggtagaggtgtatgggattcgatcaaccccgtggcaaatgggcaacacgacttgtgggtaaaaatgtgcaacctctgcagagtgtaaaactggtatactagccgtgctcacagtcatgagcagcttggacactcacatgattaatttatggaattaaattcaatttatcatttgcatcgcattgggattattttattattacttttattactaaggtttgatatttacttacacttagtaactgctaataaaattttgaccaacttataaaagcaatgctcagcttcaacctttattttgttgatcagccttacacctcacatgaactcccacctttggtgagtttatgcacattattccccacaacttgttgagcgatgaacatatgtgagctcacccttgctatctcacaccccccgcaggagaagaacaggtggtcgaagaggagcctcccaacagtgaagcttacgacttgatctaggtggcgtctcccagtcagctttgtggcgccagggaaataataattagtttgttttatatttatcagttattttgtaagacttccgctatgtaataagtacatttatgatatttatgacatttatctctatgcactctgttattatatgtgttgttctttcttggtgcacatatgatacgcacccggctttgtcccttaaatccgggtgtgacaaacctagatttcataattaatc

SEQ ID NO: 42747 - DNA, 790 bp, Zea Mays
ctccttcgcacaattcactggtcgacgggacccgcttgacagctgcttctccgcgcccatgacgcaaccagttcctcactgcgctgtgggacccgtaggtcagcacgtctcccacctccctcaacggatgctccagaactcggcgggagaccgcaccggaatcgtcgggccgttgagaccgaccccgttcccccttcgcgcataaagcttctactgcggccctatcttaatcgctttgccacacttgtcccgcaactcgagcgccaccggtgcagtagagagagaacccgagaacccgtctgcatcgccgcccggggaaagctcgcccccttgccgatctggtcatgtggtcgggccgtagtgcatcgcaggcgcgtggtgaagctgttcgtggtcttgcggaggtcggagaagcgaggtgtcgctagaaattcctcgctgaagatcttctccggcgcagcgccgtgggcagggtgtctctgtgggtgaaatcttagagaagaacaggtggtcgaagaggagcctcccaacagtgaagcttacgacttgatctaggtggcgtctcccagtcagctttgtggcgccagggaaataataattagtttgttttatatttatcagttattttgtaagacttccgctatgtaataagtacatttatgatatttatgacatttatctctatgcactctgttattatatgtgttgttctttcttggtgcacatatgatacgcacccggctttgtcccttaaatccgggtgtgacaaacctagatttcataattaatc

SEQ ID NO: 42748 - DNA, 983 bp, Zea Mays
ctccttcgcacaattcactggtcgacgggacccgcttgacagctgcttctccgcgcccatgacgcaaccagttcctcactgcgctgtgggacccgtaggtcagcacgtctcccacctccctcaacggatgctccagaactcggcgggagaccgcaccggaatcgtcgggccgttgagaccgaccccgttcccccttcgcgcataaagcttctactgcggccctatcttaatcgctttgccacacttgtcccgcaactcgagcgccaccggtgcagtagagagagaacccgagaacccgtctgcatcgccgcccggggaaagctcgcccccttgccgatctggtcatgtggtcgggccgtagtgcatcgcaggcgcgtggtgaagctgttcgtggtcttgcggaggtcggagaagcgaggtgtcgctagaaattcctcgctgaagatcttctccggcgcagcgccgtgggcagggtgtctctgtgggtgaaatcttagtgagtatccctccatcgaagtcgcatttaccactgcatcgtttgccgtgacccggtgttaaggttagaccattagctcgagctcgggcgggcgtcacctatgacgccgccgcggaagctggccaccgccgccgcggatcggcgagcgtcgagtgtatcagcgcaaagctacgacgaccgtcgatgtgtgagggtacggttaggattatatctcagatacctctttgagttttagatctggtccgttagatcgtaaatggacggccgcgtggtgatcctaacattttaaatccaagccgttggattagatcgggcggtttacgccacgtaccgctttgcgggttttccgatctaatctggtgcatcgaaggagaatcagacgacttagattagccggtaccccttcgttgtgttgcttttgctaaacagtgcatgagcttctaggaaaccaactcgtcgtccgcattcattattcactgaatctagg

SEQ ID NO: 42749 - DNA, 1939 bp, Zea Mays
gtttagtcgcagcagtacaggctccacttgggagcgaggacgaggaggcgggtgccgctcctgtggcttcgccatgtgctctcgccccgcgtcctcggctcctccctcctcggtatctacatgccattatgccaagatctcccactctccgatctgaccagggccgggccaccgcagccatttgcgtctgctcttcccgaatccctgtctcgctttgccctccgtttctccagctataaagccggggggtcctgtggcgtgtgacctttttataccggatgtgcagcgcagggtcaacttcgtcaggtttcttggctccaacaaccttcctgggtcactctaaactgtaaagagatggggtgtggcccatcaatccccgacaagtacacgataggtgggaaggggcgcaagcgccggagcgtcatacaggaggttgccgtgttcgtgcccaccatccgcatcccagtggcctctgacatagctcatccgctcaggggaatagtttccaaggatcttgtcgaccgactctccacactccgtgcccatgtcgcctcgctggctgaagaaatctatcacgcggacgtatcagctgttcaagaactgcagcatgcgctagaggagtacttgccagttgttcttggtttaacaacgaaagagagccgtcttgaatcgtcagtacagttcagatggaagaccttagacgacgaccaggagtgttgtctggcgagcgcgtggtatgaggtgctctcggtggtccacatgatggccatgcttgcgttgtttgaggctaacctattgctcatcccaaagagcagccaaggtggtggtgaaaggaaggtagcagaagacgcaaagaaggatgtcgtcgattcattgctcagggcgtcgggatgcttagactactccgtgcatcgcatacttgttcagatacctgcgcaagtcaagaagggttttcccagttacttgcaggagggcatgcttgaggccatctcaattcaggcattggctcagtgtgtggaaatacagcttggcttggcttctgaatgtgagaaggcaacgctgtcagtaaagaggaggctagcttgtgagcaagtcagctatttttctcaggctcactattgtctgtcgggatgcgatacgagtgactcgtacgggaagaagcttctgctgttcctcaagtggaagtggatggaggccaaggctgtagcgtattactaccatggtctggtgctcgacaagggcggcgaaccggcaaaccatatcagtgcagtctgctgcctctctgcagctgatgacctgctctcagacagcaaaagggcttgcttgagtttttgcttggcaaatcctgtcacgagatcccagatgtcgcttacaagaagttccaagcgcacgggcatctgtttgagcaaaacaagaacagcgcactccaatccgttcctgacctaccagagtttgcgctgtcgctgagaccggatggatacgagttgccaagcactgattcgatctgggataatgttgatggccaacctcagattcaaagcctcaaggagcatatgatagatgacgaagatgaagtaggcacaaaatgatagttctcacttccaaatgcttcttttcattgtaccaccaaaagtagcagagctcaaaaacgcttaatccaaaatgttttggattcagcatatggctcaactgaaaaaggaatcgcgatctctgtattattgcaagtattaccatatgatatagtaaagtcttatgtgtaatagaatcataaataatagttggtttcttgctgtaatcgcctttaattttattttcccaactggcagaatagagcatcacagaaaaaaaaaatacggcacgcatttcagtagaacaatagtctgcgtgtttggttgggtggctaagtggagaatgtagaagagtgaattattgtattgat

SEQ ID NO: 42750 - DNA, 2077 bp, Zea Mays
acggtggccatagtttagtcgcagcagtacaggctccacttgggagcgaggacgaggaggcgggtgccgctcctgtggcttcgccatgtgctctcgccccgcgtcctcggctcctccctcctcggtatctacatgccattatgccaagatctcccactctccgatctgaccagggccgggccaccgcagccatttgcgtctgctcttcccgaatccctgtctcgctttgccctccgtttctccagctataaagccggggggtcctgtggcgtgtgacctttttataccggatgtgcagcgcagggtcaacttcgtcaggtttcttggctccaacaaccttcctgggtcactctccagtcagtcaatctcaaactctccatgcggtttcaaaacatttgatggcaactccgctcctctgaattcgactgctacccagaaactgtaaagagatggggtgtggcccatcaatccccgacaagtacacgataggtgggaaggggcgcaagcgccggagcgtcatacaggaggttgccgtgttcgtgcccaccatccgcatcccagtggcctctgacatagctcatccgctcaggggaatagtttccaaggatcttgtcgaccgactctccacactccgtgcccatgtcgcctcgctggctgaagaaatctatcacgcggacgtatcagctgttcaagaactgcagcatgcgctagaggagtacttgccagttgttcttggtttaacaacgaaagagagccgtcttgaatcgtcagtacagttcagatggaagaccttagacgacgaccaggagtgttgtctggcgagcgcgtggtatgaggtgctctcggtggtccacatgatggccatgcttgcgttgtttgaggctaacctattgctcatcccaaagagcagccaaggtggtggtgaaaggaaggtagcagaagacgcaaagaaggatgtcgtcgattcattgctcagggcgtcgggatgcttagactactccgtgcatcgcatacttgttcagatacctgcgcaagtcaagaagggttttcccagttacttgcaggagggcatgcttgaggccatctcaattcaggcattggctcagtgtgtggaaatacagcttggcttggcttctgaatgtgagaaggcaacgctgtcagtaaagaggaggctagcttgtgagcaagtcagctatttttctcaggctcactattgtctgtcgggatgcgatacgagtgactcgtacgggaagaagcttctgctgttcctcaagtggaagtggatggaggccaaggctgtagcgtattactaccatggtctggtgctcgacaagggcggcgaaccggcaaaccatatcagtgcagtctgctgcctctctgcagctgatgacctgctctcagacagcaaaagggcttgcttgagtttttgcttggcaaatcctgtcacgagggtgcctcctccttggggtgtcatgaaaaacatgcacaaaaagatcccagatgtcgcttacaagaagttccaagcgcacgggcatctgtttgagcaaaacaagaacagcgcactccaatccgttcctgacctaccagagtttgcgctgtcgctgagaccggatggatacgagttgccaagcactgattcgatctgggataatgttgatggccaacctcagattcaaagcctcaaggagcatatgatagatgacgaagatgaagtaggcacaaaatgatagttctcacttccaaatgcttcttttcattgtaccaccaaaagtagcagagctcaaaaacgcttaatccaaaatgttttggattcagcatatggctcaactgaaaaaggaatcgcgatctctgtattattgcaagtattaccatatgatatagtaaagtcttatgtgtaatagaatcataaataatagttggtttcttgctgtaatcgcctttaattttattttcccaactggcagaatagagcatcacagaaaaaaaaaatacggcacgcatttcagtagaacaatagtctgcgtgtttggttgggtggctaagtggagaatgtagaagagtgaattattgtattgat

SEQ ID NO: 42751 - DNA, 1998 bp, Zea Mays
cacgacggtggccatagtttagtcgcagcagtacaggctccacttgggagcgaggacgaggaggcgggtgccgctcctgtggcttcgccatgtgctctcgccccgcgtcctcggctcctccctcctcggtatctacatgccattatgccaagatctcccactctccgatctgaccagggccgggccaccgcagccatttgcgtctgctcttcccgaatccctgtctcgctttgccctccgtttctccagctataaagccggggggtcctgtggcgtgtgacctttttataccggatgtgcagcgcagggtcaacttcgtcaggtttcttggctccaacaaccttcctgggtcactctaaactgtaaagagatggggtgtggcccatcaatccccgacaagtacacgataggtgggaaggggcgcaagcgccggagcgtcatacaggaggttgccgtgttcgtgcccaccatccgcatcccagtggcctctgacatagctcatccgctcaggggaatagtttccaaggatcttgtcgaccgactctccacactccgtgcccatgtcgcctcgctggctgaagaaatctatcacgcggacgtatcagctgttcaagaactgcagcatgcgctagaggagtacttgccagttgttcttggtttaacaacgaaagagagccgtcttgaatcgtcagtacagttcagatggaagaccttagacgacgaccaggagtgttgtctggcgagcgcgtggtatgaggtgctctcggtggtccacatgatggccatgcttgcgttgtttgaggctaacctattgctcatcccaaagagcagccaaggtggtggtgaaaggaaggtagcagaagacgcaaagaaggatgtcgtcgattcattgctcagggcgtcgggatgcttagactactccgtgcatcgcatacttgttcagatacctgcgcaagtcaagaagggttttcccagttacttgcaggagggcatgcttgaggccatctcaattcaggcattggctcagtgtgtggaaatacagcttggcttggcttctgaatgtgagaaggcaacgctgtcagtaaagaggaggctagcttgtgagcaagtcagctatttttctcaggctcactattgtctgtcgggatgcgatacgagtgactcgtacgggaagaagcttctgctgttcctcaagtggaagtggatggaggccaaggctgtagcgtattactaccatggtctggtgctcgacaagggcggcgaaccggcaaaccatatcagtgcagtctgctgcctctctgcagctgatgacctgctctcagacagcaaaagggcttgcttgagtttttgcttggcaaatcctgtcacgagggtgcctcctccttggggtgtcatgaaaaacatgcacaaaaagatcccagatgtcgcttacaagaagttccaagcgcacgggcatctgtttgagcaaaacaagaacagcgcactccaatccgttcctgacctaccagagtttgcgctgtcgctgagaccggatggatacgagttgccaagcactgattcgatctgggataatgttgatggccaacctcagattcaaagcctcaaggagcatatgatagatgacgaagatgaagtaggcacaaaatgatagttctcacttccaaatgcttcttttcattgtaccaccaaaagtagcagagctcaaaaacgcttaatccaaaatgttttggattcagcatatggctcaactgaaaaaggaatcgcgatctctgtattattgcaagtattaccatatgatatagtaaagtcttatgtgtaatagaatcataaataatagttggtttcttgctgtaatcgcctttaattttattttcccaactggcagaatagagcatcacagaaaaaaaaaatacggcacgcatttcagtagaacaatagtctgcgtgtttggttgggtggctaagtggagaatgtagaagagtgaattattgtattgat

SEQ ID NO: 42752 - DNA, 1879 bp, Zea Mays
aaacactcgcactgtttgtgcattgggagtgcatttcacgtaaccacctcctgttcaaagattaattaaggttcagtgtctcaacaccaacactaatgtacgtaagctagcctttttggttggtggtctgccacacagatccccccagcagcccatcgacatggatcccacaacagcctgcaggtctcccaattctgattgcttcggcaggccaatcgctagcgcaccggactcatggttcgatgtggtggagcgtacctcagacgacaacaacaagacattgcagcgcacctcaaagaccactagatgcctgaacctgacgtcctacaactacctcgggttcgccgcggccgatgagtactgcgtcccacgcgttgtcgactccctcaagaaatactcggcgagcacctgcagtgctcgagttgatggcggcacgaccaagcttcacaccgagctggaggagctggttgcgcgttttgtcgggaagcctgctgctgtcgtcttcggcatgggttacgttacaaactctgccaccattccctgcctaatcggaaagggtgggctgattatcagtgactcactgaaccacaactcgatcgtcaatggcgcaagaggatccgatgcgactgtcagggttttccggcacaactgccctgcccatctggagaaggtcctgagagagcaggtagctggtggccagccgcggacgcacagagcgtggaagaagatcgtcgtcgtcgtcgaggggatctacagcatggaaggggagctgtgcaaactccccgagatcatagccgtctgcaagaagtacaaggcctacacgtacctggacgaggctcacagcatcggcgccgtcggacggtcgggccgcggcgtctgcgagctcctcggcgtcgacccggccgacgtcgacgtaatgatgggcactttcaccaagtctttcggatcatgcggtggatatatcgctgcatccgaggagatagtccagcacttgaagcacacctgtccgggccatctgtacgctacctccatgtcgccgcctgcagtgcagcaggtcatctcggctattagagttgtccttggggaggatggctccagcagaggtgcccagaaactggcgcgcatccgtgagaacagcaacttcttcaggtcagagctcaagaagatgggctttgaggttcttggtgacaacgactctcctgtcatgcccataatgctctacaatccggccaagattcctgcgttttctcgggagtgctttagacaaaaggttgccgttatcactgtggcgtttcctgtgactcctctccttctcgcaagagcacgtttctgcatttcagcttcgcacactagggaggacctgacgaaagccctcgatgttatcagcagagttggtgacctcgtgggcatcaagtacttccctgcacaacgaccaaagattgctgaagctggtcacggcaattgaggcggtagagaggaatgagccctgaaattaccccatgagtggctgaagttgttaagagtccttttaaaagttatcaaataaatagattatcatggaaacaagcacgcgcgcattgatcagtttcgtcgggattctgtcgtattagctgtgttgagcctgcttttgagccggcggacggttcggcactgaggccggacggtccgcggtccggacagttcgcgcctgtgggccggacggtccgcgcatgcgcagagcagtttagggttccgagttttgtgctacgattgttagctatattcgcgggattagctcggaatcagttgtgtaaagagttcaggctccctcctctataaatagagaggtctacggccgatttgtaaggaacaatcgaatcaatacaacttctatttcgca

SEQ ID NO: 42753 - DNA, 2055 bp, Zea Mays
agaacagtagcgggcgggtaggccgccggtaccagtacggcctcagccagcctcctgtacttgcataggggaggctaggggctagtagtgcaatcctcacagagaagaatcccgcgagcgagcgagcgagcgcgcgaggcggcaaggacgaacccaagacgtacgatggcgaggaggctggcgtacacgacggcgctgaccacgctcttcagctacgggctgctcttcgccttcggccagctcagggatctcttccgccacctgctcggctgcttcagacccaacaaggacgacgacgtcaagcaggggtacgcgccgatctgcgtcggcctggaggatttcttcgtgcgacgcctctacctgcgggttcaggattgcttcggcaggccaatcgctagcgcaccggactcatggttcgatgtggtggagcgtacctcagacgacaacaacaagacattgcagcgcacctcaaagaccactagatgcctgaacctgacgtcctacaactacctcgggttcgccgcggccgatgagtactgcgtcccacgcgttgtcgactccctcaagaaatactcggcgagcacctgcagtgctcgagttgatggcggcacgaccaagcttcacaccgagctggaggagctggttgcgcgttttgtcgggaagcctgctgctgtcgtcttcggcatgggttacgttacaaactctgccaccattccctgcctaatcggaaagggtgggctgattatcagtgactcactgaaccacaactcgatcgtcaatggcgcaagaggatccgatgcgactgtcagggttttccggcacaactgccctgcccatctggagaaggtcctgagagagcaggtagctggtggccagccgcggacgcacagagcgtggaagaagatcgtcgtcgtcgtcgaggggatctacagcatggaaggggagctgtgcaaactccccgagatcatagccgtctgcaagaagtacaaggcctacacgtacctggacgaggctcacagcatcggcgccgtcggacggtcgggccgcggcgtctgcgagctcctcggcgtcgacccggccgacgtcgacgtaatgatgggcactttcaccaagtctttcggatcatgcggtggatatatcgctgcatccgaggagatagtccagcacttgaagcacacctgtccgggccatctgtacgctacctccatgtcgccgcctgcagtgcagcaggtcatctcggctattagagttgtccttggggaggatggctccagcagaggtgcccagaaactggcgcgcatccgtgagaacagcaacttcttcaggtcagagctcaagaagatgggctttgaggttcttggtgacaacgactctcctgtcatgcccataatgctctacaatccggccaagattcctgcgttttctcgggagtgctttagacaaaaggttgccgttatcactgtggcgtttcctgtgactcctctccttctcgcaagagcacgtttctgcatttcagcttcgcacactagggaggacctgacgaaagccctcgatgttatcagcagagttggtgacctcgtgggcatcaagtacttccctgcacaacgaccaaagattgctgaagctggtcacggcaattgaggcggtagagaggaatgagccctgaaattaccccatgagtggctgaagttgttaagagtccttttaaaagttatcaaataaatagattatcatggaaacaagcacgcgcgcattgatcagtttcgtcgggattctgtcgtattagctgtgttgagcctgcttttgagccggcggacggttcggcactgaggccggacggtccgcggtccggacagttcgcgcctgtgggccggacggtccgcgcatgcgcagagcagtttagggttccgagttttgtgctacgattgttagctatattcgcgggattagctcggaatcagttgtgtaaagagttcaggctccctcctctataaatagagaggtctacggccgatttgtaaggaacaatcgaatcaatacaacttctatttcgca

SEQ ID NO: 42754 - DNA, 633 bp, Zea Mays
atttcttcccctctttagtcctatttttagtaatttaaggactaaaaaagagggactaaagtttagtctcatgtaaccaaatatgcccttaactgtatctatttggattgtagtgatcaaggtttataactcacaagtcacagagaggtctgaaggatgaggaaaggactgcatcctcagatgcaatggatttcatatgtgacgcagagtggtaggctgatcaatatcatgatgaccaaggtgaatcatactggcaaagtgtaccacatgagggccaagcggcaaatggctcaaagcctcggccagattgcgaagttcaaacgtcgatatgagcaggaagcagagaaaagcaaagacaagtaggatggtgttgggaaggaggtgtagcctctgtggtcttagtcagttctgttgactgcgaagttttcagctaaggatcttcgattgaatgattttattttagatcacatcatcttttgctccacttcataattgtgttgtaccccatcttgagcaaacactttggcacttgttgcaccttaaagccccaagaagatagtctatggatcgcctttgctctgacgttcgagttttatggtttatatttctccatgttattatgtttgatgatat

SEQ ID NO: 42755 - DNA, 675 bp, Zea Mays
gttgcttctccagagtttggcccgaggacttttcttgcatatccatagacaagctcagcttcatacacagtgaaccaaacaagagaaaaagcaagaagagcctggctgcgtccatacggtctacaaccaaatacatcgtcgctcataaagcctagttgtcctatatgcgggcaaccaatcacgtccaaggtctgaaggatgaggaaaggactgcatcctcagatgcaatggatttcatatgtgacgcagagtggtaggctgatcaatatcatgatgaccaaggtgaatcatactggcaaagtgtaccacatgagggccaagcggcaaatggctcaaagcctcggccagattgcgaagttcaaacgtcgatatgagcaggaagcagagaaaagcaaagacaagtaggatggtgttgggaaggaggtgtagcctctgtggtcttagtcagttctgttgactgcgaagttttcagctaaggatcttcgattgaatgattttattttagatcacatcatcttttgctccacttcataattgtgttgtaccccatcttgagcaaacactttggcacttgttgcaccttaaagccccaagaagatagtctatggatcgcctttgctctgacgttcgagttttatggtttatatttctccatgttattatgtttgatgatat

SEQ ID NO: 42756 - DNA, 687 bp, Zea Mays
aagaagacgatgcactagcttgttctcaaacaaacaccccgttggctactaaaaaccgattctgactgatccggcagaagctgaacctaagacaagtccgtttgtgttgcgtggcgtgattcgtgtgaaacaccttcgagtcttcgatcttcttgggcgccgccaacgcgccggcgccctccgcccctgcgcctcagcctggtctgaaggatgaggaaaggactgcatcctcagatgcaatggatttcatatgtgacgcagagtggtaggctgatcaatatcatgatgaccaaggtgaatcatactggcaaagtgtaccacatgagggccaagcggcaaatggctcaaagcctcggccagattgcgaagttcaaacgtcgatatgagcaggaagcagagaaaagcaaagacaagtaggatggtgttgggaaggaggtgtagcctctgtggtcttagtcagttctgttgactgcgaagttttcagctaaggatcttcgattgaatgattttattttagatcacatcatcttttgctccacttcataattgtgttgtaccccatcttgagcaaacactttggcacttgttgcaccttaaagccccaagaagatagtctatggatcgcctttgctctgacgttcgagttttatggtttatatttctccatgttattatgtttgatgatat

SEQ ID NO: 42757 - DNA, 440 bp, Zea Mays
atggccgcggcgtcaacctgcctccctgcgtgcggagacggcggcggcgggggcaggagaacgtggcaggggtcccagaccttgatgccgggacccgcgaggaggcgcggggtgcccgccgccgagggctgcggcgagagcggcgagtccgcggcgaggcacggcagcacctcgggctcctgctccagcactttggacgcggaggccgggggcacgcggaccggcgacggcgacagagcgggcggtggcgcctgtgcgcccgcggaggagacggctgacgcggacggatcctcgtcgtcttcttcgtcttcgccgccagtggtggagacggacgagtgggcggagcccatcgcggcggcgagatctgacaccgggcggtgggagcgcgaggtgtagagggcggagtgagtgatgtcgcggtagtggtccgtccgtccgtg

SEQ ID NO: 42758 - DNA, 7221 bp, Zea Mays
caactttttaacttttaaacgtttaaacgaatgttgaaacgtcttttcagacttgacatagaaattcaaatatagaataagttcacatataagttgagttcacacataagccttcgcgattgatctttgagctggtcttgcggagtggccgcagaggtgaggcgcagcgcaaaggtcgacggtctacgacgcagtgggaagtggctgggacccctcactcccaatcccagccgcagaggtgattcactgtgaggggcagcgagggcagcggatggatctgggccgtcgagggcagcgacagcaagtggatgcggcggcgcactggagcttggccgggcaagtggatgcagcggcagcaagtgggcactggagcatagccgggcaagtggatgcagcggcagcaagtgggcactgggcagtggcacgacggcgcactagcctgtgggcggactggcggagggaagagggaggaggggggccggcggcgtacctggggacaggagggcggtcgcactgtcgcaggcgcggctgggcagccgctccgggagatctccagcgctagctgaggtgtgaggaggcgcggtctgcagtcgcaggcgcggctgggcgacctccagcgctggttcgaagcgaaagcgagtagtcgagtacataaagcccaggaaggcccactagtaactagaacgtcctcagaacgtctaaaacgacataaaacgcgtttcggacgtttaaacaacgattaaacgtccaaaacggacgttctacgctgatttgttagaacgttcggacgttttagtttctaatcacgttttaccgcttaaacgtcgtttaagcgacgttttaataaccatggtgtatccaaacatgtcctgatttgatttgaacatggttctgccaattcatagtttgcatacttgaatacactatgcaatagtgtcgtaatgctaccaattttttttttgtcaaaatttgctgatatctgaaatatgtgcttcacatagatccgattctcaaggatgaatcatcttctgtctttaggatgatagctaatttttagccaaactatcaactagccatgtgtatccaaacatgtcctaatttgatttggacatggttctgccaatttatagtttgcatacttcaatacactatgcaagtagtgtcgtaatgctaccattttttttgtcaaaatttgctcatatctgaaatatgtgcttcacatagatccgattcgcaaggatgaatcaacttctgtctttaggatgatttagctaatcctgtgatttgttacccaaattacagagattctaaacttgttgttagagcttggtcattttttttgcttgccggctggggggccgaagttatgatggcctggtataaccgtgtgtgtgtgttgggggggtacaaacaaatcctggacataatcggaggccatgttgggctcattgttagctacctaattttagctgggtctaataggcgggctaatgtttttagccaagtccccaaccagttgttagctagccatgcctaatttgaccttatttttagccaaactagcaactaaccatgtgcatccaaccatgtcctgatttgatttggacatggtgctgccatttatagtttgaatacttcaatacactatgcaagtagtgtcgtaatgctatcaatttctttttggtcaaaatttgctcttatctgaaacatgtgcaaattttaacgagatatgttcttagaatttatgcatacttgctaaaggataaagtttgacttaggacaaattcacagagccaaacttaactacaattcggaatggatggcatagaaggctggatgatagacgacccaacgattttagtagttacccccactagatgtaaaacttatgacattttaaagaagtttgttttctgtccacgaatttgttttctgcacctttaatgcttgttcgtacttcgtgcatatgcaaggtgtgtatcaatgtcgccgtcaattctgttgctgctgttgccctatgtcctccaactgatgccaacttcatttgctcaagtatcgacgttaccattaccattcggcaatgagactgccactgacagggacgccctgctccagttcaaggcaagcctgagccagcagtcgcccacacttgtctcatggaacaaaactagtgatttctgccactggacaggggttacctgcagccttaggcacaagggaagggtgtcagctctgaacctatcgtcggcagggcttgtcggctccctctcccctgccatcggaaacttaacattcttgaagatcctcgacctcagctcaaataatctgcagggcgggattccatcgaccattggccgccttcggcggttgcagtatctggtttttactggaaactcacttcatggtggaatcactgatggattaagtaactgcactggtcttgtaatcatctttcttggcaacaaccatcttactggggaaatcccctcttggcttggtggttttccaaagcttgcggctttggacttgtcaaaaaacaatttgaccggcagcatcccgccatccctgggcaatctcacaagcctgcaggagctgtatcttcagattaaccagcttgagggttccatcccaaaagagcttggaaggctcaagaacgtccagtggtttgcgttgtttgtgaaccacctctcgggtgaggtcccggaagctgtgttcaacctatcatcagtggttgcgttcggtgtggatcaaaatgatctgcacggtacactgccatccaactggggaaacaaccaaccagaccttgagttcatctacctcgcaattaatcacttcacagggaatgtcccggcctcccttgccaatgcaaccatgatggacaccatagacctgagtgtcaacaatttcactggaaggatgccaccggagataggaacactttgcccaagaatattttcctttgactcaaaccagattgaggcaagcgccacggagggctgggagttcgtcacgctcttgaccaactgcaccaggctacgcgtgcttagcttccgcaacaatatgcttgcaggtgagttgccaccctctgtcggaaacttatcatcaacacatctgcaggtgctttacactggatggaacgagatctatgggaacataccacctggcattagtaatcttgtaaacttgcagaagcttttcctcagccagaaccatttcaccggtgctctgccaaacacaattggtcggctgaaaatgatgcgggctttgggaatcgatggcaacctgctgtcggggacaattccaccctcaatcggtaacctaacactgcttcagataatcactatggacaacaacaatcttgaggggtctcttccttctagcattagcaacctacagatgttgagcatcgcaaccctctcgcgcaatgcatttgcagaaataacctatctggttcactacccgacctcagcaactgccaaagcttgcttcagctccatttggatggtaactccttcagcggaagcctccctgcgtctattactgaaatgtatggtttggtagttctgaatttgacagagaactccttgtcgggtgcaattcctcaagagtttggacgcatgaagggcttggaagaactgtatcttgcgcacaacaacttgtctgggcagattccgacgaccttgcagaatatgacctccttgtcccaacttgacatttctttcaaccatctcagtggccaagttcctatgcaaggcgtgtttgccaaatcgacggggttcttgtttgttggtaacgataggctgtgtggcggtgtgcaggaactacatctgcctgcctgtccagtccattccaggaagcatagggacatgaaaagtcgtgtagttctcgtaatcataatctctactgggagccttttttgtgtgatgctggtgcttctctccttctattggagaaggaaaaagggacctcgtgctacagcaatggcaggggcagccgtctctttgttggatgataaatatcctaaagtttcttatgccgagctgttccgaggaactaatggcttttctgatggcaatttgattgggagaggaagatacgggtccgtatataagggcacactgtcgctgacaaacgtagaaactcaagtagctgttaaggtttttgatctgcagcagtcaggttcctccaaaagctttgtggtcgagtgtgaagctcttaggaagatccgccaccgcaacttgatcagcgtcataacctgctgctctagcactgactcggagcagaataatttcaaagccatcgtgttcgagttcatgccgaaccagagccttgacaagtggctacatgaccttgatcctgattcagatgcgtccggacgtgtaccaggcctgacgctactgcagagattgaacattgctgtcaatgtcgccgacgctatggactatttgcataacaactgcgagcccccaatagtccactgcgacctgaagccgggcaacgttcttcttaacgcggactttgttgcctgtgttggagacttcggcattgcaaagattctttcagattcagatggtgatcctgtgaccaattcgagtaccttcaccggaataagaggaacagttggatatgtgcctccagaatacggggagtgccgccaggtctcctcgtgcggagatgtcttcagctttggagtcacgctccttgagatgttcacagggaaggcccccaccgacgccatgtttgaggacggattgaccttacagggcttcgtggagatagcgtttccagagaagctgatggacatcgttgatccagtactgctgtccactgatgagaggttcgcaagaaagccgcgacacagaagcgttggaggggaagagattgagaacgccatagcttctgtcactaagctcgcgctgtcctgcaccaagctaacaccatcagagagaaagcccatgggtgatgccgcagccgagatgcgcaagataagggactgctatctcgcagacctaacaagggcaaacaattaagtgatcatatatgtaactgataggggacaagttttgcactctatttatgtattttagacatacagtatgctgctgaactggcttggtgccctgcccccagcattgccgagactattttgttttcattagaactttggtttcattgcagctatgtatttgtgtctttattgaaatgaagaaaatgcatggaactgcggtctggaggcgtatacttcccgtttcctgtctttttgtgtcctccaacaggcaatgagtggtggacaacatccagctgaaatgactggttccgaccacgctgagtgtcaccgtcgcagtgatttcatttgcatgtcctccaacactcgccgtacgttacgcttacacatttatcatccttgattcatgtccacgtcatacatggctcactagaatataccaacgcctgtacagactgtaccgtatgtgctctatagaatagaactgtgagaaagccacgtcagttctagtgccatggctgcagcagcgccgcacttcgtgctcgtgccgatgctggcgcagggccacttgctccccatgctggacctggcgcgcctcatcgccagccacggcgctcgtgccacggtggtgctgacgcccatcaacgccgcgcgcaacagggccttcctggagcaggccgcgcgggcggggctcaccatcaacttcgccgagctcgcgttcccggggccagcgctcggcctcgccgcgggctgcgagagggtcgacatgctggacgacatctccctcatcatcccgttctacgatgccgtgtggctgctcgccgagccgctcgaggcgtacctccgctcgctgccccggctgccggactgcctcgtctccgactcgtgcatgccgtggactgccagcgtcacgcggcggcacggcatccttcggttcgtggtccatttcccgtccgcgttctacatcctcgccgcgcacatcctcgaaaagcgcggcctctacgaccgcgccgacgacgacgacgacttcgaaccgttcgaggtgccggagttccccgtacgcgccgtggtgagcagggcgacggcgcaagggctcttccagtggcctgcaggcatggagaggttccggcgtgacacgctcgatgccgaggccaccgccgacgggatactgttcaacacgtgcgccgccctggagggcgcgttcgtggagcgcctcgcttcggagctcggcaagaagatttgggtggtcgggccgctgtgcctcctcagttccgactccgacgccggcgcgatggccgggagaggcaaccgcgcggcggtggacgccgaccgaatcgtgtcctggcttgacgcgcggccggcggcgtccgtgctctacatcagcttcggtagcatcgcccgtctgttcccggctcaggtcgccgagctcgccgccggactggaggcgtcgcgccggccgttcatctggtcggccaaggagacggcgcccgccctcgacgcggagttcgaggagcgcgtgaaggaccggggcctcgtcgtccgtgggtgggcgccgcagatgaccatcctgtcgcaccctgccgcgggcggcttcctgacgcactgcggctggaactccatcctggagagcctctgctacggcgtgccgctcatgacctggccgcagttcgtcgaccagttcctgaacgaggcgttgatcgtggacgtgctcggcaccggcgtccgctccggcgccaaggtgccggcgacgcacgtgacggtcgttaagccaggggaggtgctggaggtgcaggtctggagggacggcgtcgacagggcggtcaccgacctcatggacgagggccccgcgggcgcggcgaggcgggcgagggccaaggagctcgggcaacagatgagggccgcaatggcgaagggtgggtcgtcggacaccgatgtgagggacttggttcgccacgtcgttgaggtcgcgcggaaaaagggggagcacgaggacacagctcttgcagtcttgctggagtcgagcacgtgagcaagagcaaggaaaagacaatgaaaggcactggtggcaaacactactgttgaaattcgtgtggtactatcgttctcgccagcttcaaagagaatctctcgagtgttagctggtagccacgcgaaaaaaattctctggggaagtaaaaccaccccacacatctgcaggctaacacgaagtcacgaac

SEQ ID NO: 42759 - DNA, 2893 bp, Zea Mays
cagcccggcggcggcaagggcatgcggcgtggtcagccgacgggcagtgtgctcagcggcagggcggggtggtcagttggaggattggagcacttgagccatagccatggtgttgcttctgatttgaagaggctacgcctgacgctactgcagagattgaacattgctgtcaatgtcgccgacgctatggactatttgcataacaactgcgagcccccaatagtccactgcgacctgaagccgggcaacgttcttcttaacgcggactttgttgcctgtgttggagacttcggcattgcaaagattctttcagattcagatggtgatcctgtgaccaattcgagtaccttcaccggaataagaggaacagttggatatgtgcctccagggaaggcccccaccgacgccatgtttgaggacggattgaccttacagggcttcgtggagatagcgtttccagagaagctgatggacatcgttgatccagtactgctgtccactgatgagaggttcgcaagaaagccgcgacacagaagcgttggaggggaagagattgagaacgccatagcttctgtcactaagctcgcgctgtcctgcaccaagctaacaccatcagagagaaagcccatgggtgatgccgcagccgagatgcgcaagataagggactgctatctcgcagacctaacaagggcaaacaattaagtgatcatatatgtaactgataggggacaagttttgcactctatttatgtattttagacatacagtatgctgctgaactggcttggtgccctgcccccagcattgccgagactattttgttttcattagaactttggtttcattgcagctatgtatttgtgtctttattgaaatgaagaaaatgcatggaactgcggtctggaggcgtatacttcccgtttcctgtctttttgtgtcctccaacaggcaatgagtggtggacaacatccagctgaaatgactggttccgaccacgctgagtgtcaccgtcgcagtgatttcatttgcatgtcctccaacactcgccgtacgttacgcttacacatttatcatccttgattcatgtccacgtcatacatggctcactagaatataccaacgcctgtacagactgtaccgtatgtgctctatagaatagaactgtgagaaagccacgtcagttctagtgccatggctgcagcagcgccgcacttcgtgctcgtgccgatgctggcgcagggccacttgctccccatgctggacctggcgcgcctcatcgccagccacggcgctcgtgccacggtggtgctgacgcccatcaacgccgcgcgcaacagggccttcctggagcaggccgcgcgggcggggctcaccatcaacttcgccgagctcgcgttcccggggccagcgctcggcctcgccgcgggctgcgagagggtcgacatgctggacgacatctccctcatcatcccgttctacgatgccgtgtggctgctcgccgagccgctcgaggcgtacctccgctcgctgccccggctgccggactgcctcgtctccgactcgtgcatgccgtggactgccagcgtcacgcggcggcacggcatccttcggttcgtggtccatttcccgtccgcgttctacatcctcgccgcgcacatcctcgaaaagcgcggcctctacgaccgcgccgacgacgacgacgacttcgaaccgttcgaggtgccggagttccccgtacgcgccgtggtgagcagggcgacggcgcaagggctcttccagtggcctgcaggcatggagaggttccggcgtgacacgctcgatgccgaggccaccgccgacgggatactgttcaacacgtgcgccgccctggagggcgcgttcgtggagcgcctcgcttcggagctcggcaagaagatttgggtggtcgggccgctgtgcctcctcagttccgactccgacgccggcgcgatggccgggagaggcaaccgcgcggcggtggacgccgaccgaatcgtgtcctggcttgacgcgcggccggcggcgtccgtgctctacatcagcttcggtagcatcgcccgtctgttcccggctcaggtcgccgagctcgccgccggactggaggcgtcgcgccggccgttcatctggtcggccaaggagacggcgcccgccctcgacgcggagttcgaggagcgcgtgaaggaccggggcctcgtcgtccgtgggtgggcgccgcagatgaccatcctgtcgcaccctgccgcgggcggcttcctgacgcactgcggctggaactccatcctggagagcctctgctacggcgtgccgctcatgacctggccgcagttcgtcgaccagttcctgaacgaggcgttgatcgtggacgtgctcggcaccggcgtccgctccggcgccaaggtgccggcgacgcacgtgacggtcgttaagccaggggaggtgctggaggtgcaggtctggagggacggcgtcgacagggcggtcaccgacctcatggacgagggccccgcgggcgcggcgaggcgggcgagggccaaggagctcgggcaacagatgagggccgcaatggcgaagggtgggtcgtcggacaccgatgtgagggacttggttcgccacgtcgttgaggtcgcgcggaaaaagggggagcacgaggacacagctcttgcagtcttgctggagtcgagcacgtgagcaagagcaaggaaaagacaatgaaaggcactggtggcaaacactactgttgaaattcgtgtggtactatcgttctcgccagcttcaaagagaatctctcgagtgttagctggtagccacgcgaaaaaaattctctggggaagtaaaaccaccccacacatctgcaggctaacacgaagtcacgaac

SEQ ID NO: 42760 - DNA, 5494 bp, Zea Mays
cgagcgcgcggcagggcgtcgtgggccctgcagcccggcggcggcaagggcatgcggcgtggtcagccgacgggcagtgtgctcagcggcagggcggggtggtcagttggaggattggagcacttgagccatagccatggtgttgcttctgatttgaagaggctacagccaaacttaactacaattcggaatggatggcatagaaggctggatgatagacgacccaacgattttagtagttacccccactagatgtaaaacttatgacattttaaagaagtttgttttctgtccacgaatttgttttctgcacctttaatgcttgttcgtacttcgtgcatatgcaaggtgtgtatcaatgtcgccgtcaattctgttgctgctgttgccctatgtcctccaactgatgccaacttcatttgctcaagtatcgacgttaccattaccattcggcaatgagactgccactgacagggacgccctgctccagttcaaggcaagcctgagccagcagtcgcccacacttgtctcatggaacaaaactagtgatttctgccactggacaggggttacctgcagccttaggcacaagggaagggtgtcagctctgaacctatcgtcggcagggcttgtcggctccctctcccctgccatcggaaacttaacattcttgaagatcctcgacctcagctcaaataatctgcagggcgggattccatcgaccattggccgccttcggcggttgcagtatctggtttttactggaaactcacttcatggtggaatcactgatggattaagtaactgcactggtcttgtaatcatctttcttggcaacaaccatcttactggggaaatcccctcttggcttggtggttttccaaagcttgcggctttggacttgtcaaaaaacaatttgaccggcagcatcccgccatccctgggcaatctcacaagcctgcaggagctgtatcttcagattaaccagcttgagggttccatcccaaaagagcttggaaggctcaagaacgtccagtggtttgcgttgtttgtgaaccacctctcgggtgaggtcccggaagctgtgttcaacctatcatcagtggttgcgttcggtgtggatcaaaatgatctgcacggtacactgccatccaactggggaaacaaccaaccagaccttgagttcatctacctcgcaattaatcacttcacagggaatgtcccggcctcccttgccaatgcaaccatgatggacaccatagacctgagtgtcaacaatttcactggaaggatgccaccggagataggaacactttgcccaagaatattttcctttgactcaaaccagattgaggcaagcgccacggagggctgggagttcgtcacgctcttgaccaactgcaccaggctacgcgtgcttagcttccgcaacaatatgcttgcaggtgagttgccaccctctgtcggaaacttatcatcaacacatctgcaggtgctttacactggatggaacgagatctatgggaacataccacctggcattagtaatcttgtaaacttgcagaagcttttcctcagccagaaccatttcaccggtgctctgccaaacacaattggtcggctgaaaatgatgcgggctttgggaatcgatggcaacctgctgtcggggacaattccaccctcaatcggtaacctaacactgcttcagataatcactatggacaacaacaatcttgaggggtctcttccttctagcattagcaacctacagatgttgagcatcgcaaccctctcgcgcaatgcatttgcagaaataacctatctggttcactacccgacctcagcaactgccaaagcttgcttcagctccatttggatgagtttggacgcatgaagggcttggaagaactgtatcttgcgcacaacaacttgtctgggcagattccgacgaccttgcagaatatgacctccttgtcccaacttgacatttctttcaaccatctcagtggccaagttcctatgcaaggcgtgtttgccaaatcgacggggttcttgtttgttggtaacgataggctgtgtggcggtgtgcaggaactacatctgcctgcctgtccagtccattccaggaagcatagggacatgaaaagtcgtgtagttctcgtaatcataatctctactgggagccttttttgtgtgatgctggtgcttctctccttctattggagaaggaaaaagggacctcgtgctacagcaatggcaggggcagccgtctctttgttggatgataaatatcctaaagtttcttatgccgagctgttccgaggaactaatggcttttctgatggcaatttgattgggagaggaagatacgggtccgtatataagggcacactgtcgctgacaaacgtagaaactcaagtagctgttaaggtttttgatctgcagcagtcaggttcctccaaaagctttgtggtcgagtgtgaagctcttaggaagatccgccaccgcaacttgatcagcgtcataacctgctgctctagcactgactcggagcagaataatttcaaagccatcgtgttcgagttcatgccgaaccagagccttgacaagtggctacatgaccttgatcctgattcagatgcgtccggacgtgtaccaggcctgacgctactgcagagattgaacattgctgtcaatgtcgccgacgctatggactatttgcataacaactgcgagcccccaatagtccactgcgacctgaagccgggcaacgttcttcttaacgcggactttgttgcctgtgttggagacttcggcattgcaaagattctttcagattcagatggtgatcctgtgaccaattcgagtaccttcaccggaataagaggaacagttggatatgtgcctccagaatacggggagtgccgccaggtctcctcgtgcggagatgtcttcagctttggagtcacgctccttgagatgttcacagggaaggcccccaccgacgccatgtttgaggacggattgaccttacagggcttcgtggagatagcgtttccagagaagctgatggacatcgttgatccagtactgctgtccactgatgagaggttcgcaagaaagccgcgacacagaagcgttggaggggaagagattgagaacgccatagcttctgtcactaagctcgcgctgtcctgcaccaagctaacaccatcagagagaaagcccatgggtgatgccgcagccgagatgcgcaagataagggactgctatctcgcagacctaacaagggcaaacaattaagtgatcatatatgtaactgataggggacaagttttgcactctatttatgtattttagacatacagtatgctgctgaactggcttggtgccctgcccccagcattgccgagactattttgttttcattagaactttggtttcattgcagctatgtatttgtgtctttattgaaatgaagaaaatgcatggaactgcggtctggaggcgtatacttcccgtttcctgtctttttgtgtcctccaacaggcaatgagtggtggacaacatccagctgaaatgactggttccgaccacgctgagtgtcaccgtcgcagtgatttcatttgcatgtcctccaacactcgccgtacgttacgcttacacatttatcatccttgattcatgtccacgtcatacatggctcactagaatataccaacgcctgtacagactgtaccgtatgtgctctatagaatagaactgtgagaaagccacgtcagttctagtgccatggctgcagcagcgccgcacttcgtgctcgtgccgatgctggcgcagggccacttgctccccatgctggacctggcgcgcctcatcgccagccacggcgctcgtgccacggtggtgctgacgcccatcaacgccgcgcgcaacagggccttcctggagcaggccgcgcgggcggggctcaccatcaacttcgccgagctcgcgttcccggggccagcgctcggcctcgccgcgggctgcgagagggtcgacatgctggacgacatctccctcatcatcccgttctacgatgccgtgtggctgctcgccgagccgctcgaggcgtacctccgctcgctgccccggctgccggactgcctcgtctccgactcgtgcatgccgtggactgccagcgtcacgcggcggcacggcatccttcggttcgtggtccatttcccgtccgcgttctacatcctcgccgcgcacatcctcgaaaagcgcggcctctacgaccgcgccgacgacgacgacgacttcgaaccgttcgaggtgccggagttccccgtacgcgccgtggtgagcagggcgacggcgcaagggctcttccagtggcctgcaggcatggagaggttccggcgtgacacgctcgatgccgaggccaccgccgacgggatactgttcaacacgtgcgccgccctggagggcgcgttcgtggagcgcctcgcttcggagctcggcaagaagatttgggtggtcgggccgctgtgcctcctcagttccgactccgacgccggcgcgatggccgggagaggcaaccgcgcggcggtggacgccgaccgaatcgtgtcctggcttgacgcgcggccggcggcgtccgtgctctacatcagcttcggtagcatcgcccgtctgttcccggctcaggtcgccgagctcgccgccggactggaggcgtcgcgccggccgttcatctggtcggccaaggagacggcgcccgccctcgacgcggagttcgaggagcgcgtgaaggaccggggcctcgtcgtccgtgggtgggcgccgcagatgaccatcctgtcgcaccctgccgcgggcggcttcctgacgcactgcggctggaactccatcctggagagcctctgctacggcgtgccgctcatgacctggccgcagttcgtcgaccagttcctgaacgaggcgttgatcgtggacgtgctcggcaccggcgtccgctccggcgccaaggtgccggcgacgcacgtgacggtcgttaagccaggggaggtgctggaggtgcaggtctggagggacggcgtcgacagggcggtcaccgacctcatggacgagggccccgcgggcgcggcgaggcgggcgagggccaaggagctcgggcaacagatgagggccgcaatggcgaagggtgggtcgtcggacaccgatgtgagggacttggttcgccacgtcgttgaggtcgcgcggaaaaagggggagcacgaggacacagctcttgcagtcttgctggagtcgagcacgtgagcaagagcaaggaaaagacaatgaaaggcactggtggcaaacactactgttgaaattcgtgtggtactatcgttctcgccagcttcaaagagaatctctcgagtgttagctggtagccacgcgaaaaaaattctctggggaagtaaaaccaccccacacatctgcaggctaacacgaagtcacgaac

SEQ ID NO: 42761 - DNA, 2825 bp, Zea Mays
ctcaactctgaacttttaaacattccaagatacctaaaagttcacaaagattgttattgctagatttgttaaaaaagaatttcataacatatacaacaatatagtttacatatattgcttgtgattttttttttaaaaaaatggttaggcagttggcacaaacatcaatacaatacacacattatattaattgtgggaaacatgtcacgtagggttctttgaacgcaagaaactaaacatctgtataatagatcgactgatgttatgaatgagatatggtacaagacggtgtatgccttacaaacacaagataaagttctactcaattatgatctatattatgggagctagggacccaacatagaggcatgtgcatgatttgagagacagggaagagatatggaaaatagacatgtttaaagacaactcacaagactagctcattacatcaactcatctatacacagcaaaagcaccagttgttacgcacggtggaatggttgagtttgggcaccactcccgtcacttgtctcctctttcgaagatttcgtaatcggtagtaatggtgccaatacacgacggacgccgccgccagccaccggacgtagccgggatccaaactgttctctgtctgtcgttcccttttcctctacgccaaggcaagggtccttatgatgaggacatcacttctatacatacaatgaatggaccgataacacgatctcgtgcacgacagctaaatctccaggtacattctaccatagtcaattgtgtttcagagcttatgcttgggaccatggatgttttgatgattaggtaccttggagagaaccagcaaggacttgggaaaggtcgggcggccaaaacaggaaggagatcaagtctgactcagctgtgactccatctcgggtttcaggaccagtctgcactaaaatggacgcccaagatgcaaccggacttcgattgcgacggactggatatagttggaaagataacgaaattatctaaccaacccaactgattccaccctaaaattcatccggagtcaacgggaatagtcaaaaaaagtcatcgttcagattctgttttggtgctgcgacaccgtctgttgggccgttgggccgtgtatcgcatcagagcccattaggggcgagtccaggggtcacgcacgccctaatactctatttattcagcagccgccgccacatttaggtttaggttttgcttagatcaattctgtcatcgaacagtgtcgccgtcatcggcttgtgagaccctatcacgtaatcaatacaattttggttgcgtttctttcctgttcttgcttgtattcttgattgcgcttgcagagataagccttcatggcgaggtcattcgtgtgtcacgggtgataaccaacggagccgtggtgtagtgattgcgaggaaccgttcgctcggagccttggatcatcaacgtcgagatctccactcaatcaagttatcgtatcgtacggaagatcgggccgcgtctactatcaattggtatcagatttctaggttgcccgtgaggtataatcctacctttagattagttttgttttgtcccatagtccacaaaaagccaaaaaaaattacgatcagtttattccgacctaaaaccatcgccttagcctttgcacaattcagttttagagtccgcagttctgagttcgtgttctagttgagttcggttgctgaattagatttgttttggttcaatttgattttgtccatccgcttccatcctacaaaaccgaccctatctacaaaatagattttatctctaaaaccgaccctatccacaaaacagatcctatccacaaaacagatcctatctatacaacccactctatccaaaaaacagatcctatctctaaaaccgaccctatccacaaaacagatcttgtatctaaaccaaccatatccacaaaacaaatcctatctctaaaaccgaccctgtgctccatagccgccgcttcggtttctgccgatttgtgcctctgaaaaccataacttgaggtaccttccataaaacaggcataacttttcgctcggtgctccgtttgagctccattttttacagcagattcttgactccattctggggtaacccaaactcacctttggcttgtttggttcggtcaaaaaattcaaaaaaaatcaggaagataattaaaaaaattgtttaagtgttttcaggaattttagagatcctttgtgaatttctctaggtcacaatacaactatgtttcaattgaaattttgtgtgcttccatcttttgtgattttgcatcagtgataaaaaattcagaatatttcaagctcttttgctggtactcctttggaaacgtgcctttgatttctactagtgctgaaaaatctcctatatttacagaactttcatttctactagatacttgtacctcctttcttgtgccttggtccaactgttctattacattttctaggccagcaactaggacgagtacttggaacacttattcagcattgctatctgttactgacttgtgtgccacatatatatatttagtcagccttcccaaaactccagctttctctcgagcagaacaggtactcctttgcaatcacacccacgctcgttggatggtcacaccggtcaccgtttgccacctgcagtgctggtaagaacgttgtaagagcggggtaagacgctccataatttgtattccacctccacacccaccctgggagatagttgtagggttcatattgtttgttgccttttgtctctgttttctgctaacaatgacaggaccaaagaat

SEQ ID NO: 42762 - DNA, 3319 bp, Zea Mays
ctcaccgccggcttcaagccgagcaaaagacacgcacccgcgaccgcgaccgcgacgagcgaagtgagagaggggaaggcgaggagaccactgcaccagcaccaccaccaccgtgccgcgagcgaagtgacgtcgcgttcacttccctcataaaatctcgccccccactctctctctacccgagcccagcagtaatttttttttggggaaggtgaagcgagaggagcaggaggagagaaaggggaacgaggccggccgcgaatcggaggggaattcggggggcggggctcggtccggccggaaattcgcgcgattcgggcgcgggcgccgcggatgtgaagatctggtgctcggcgggatgacttcttcggcggcggccgcggctgctgccgcccaggtggcgggaggaggtggaggcggcgagggagatgccgccgctgcggcgcgaggcggaggcggaacggaggacggcatgtacacggagctgtggaacctctgcgccggcccgctggtcacggtgcccagggtcggggacaaggtgtactacttcccgcagggccatatcgagcaggtggaggcgtcgaccaaccaggtggctgagcagcacatgcaattttacgatctcccgtggaagatcctgtgtgaggtcatgaacgttgaattgaaggctgagccagacaatgatgaggtttatgcccagctcactctgctacctgaatcaaagccagaggagaatggctctagtgaggagatgcctgcttcacctcctgctgcacttgcaaggccacgcgtgcactccttctgcaagacattgacagcctctgataccagcactcatggtggattctcggtgctgcggcgccatgcagatgagtgtcttccgccactggatatgacccgtcaacctccaacacaagagcttgtagccaaggacctgcatggtgtggaatggcgctttcgccacatattcagaggtcaaccacgaaggcatcttttgcagagtggctggagtgtttttgttagtgccaaacgtcttgttgctggcgatgccttcatctttctaagaggtgatagtggggagcttcgtgtaggagtcaggcgtgccatgaggcagcaagcaaatgttccgtcttcagtaatatcaagccacagcatgcatcttggtgttcttgctacagcatggcatgctgttaacactgggaccatgtttactgtctactacaagcctaggacaagtccagctgagtttgttgttccctgtgatcgctatatggaatcactgaaacgaaattaccctatagggatgagatttaaaatgaggtttgaaggtgaagaggctccagaacaaaggttcactgggaccattgttggaaatgtggatcctgatcaagctggatgggctgaatctaaatggcgttacctcaaggtgaggtgggatgaagcttcctccattccacgtcctgaaagggtttctccctggcaaatagaacctgcagtcagccctccccctatcaacccacttccagtgcacagacccaagagacctcgctctaatgctgtagcttctctgcccgagtcttcagctccaacaaaagaagctgctccaaaggtcacattagagactcaacaacatgccctgcaaaggcccttgcagacccaggataatgtggccccgaaaagtgtttttggtgataacagtgaattggactctgctcataagtcctccctgcgaccgtcaggttttgatctggacaagagcaccattggcatgcagaggaagctgggttcagatatttggatgcgaatgaacagacctgatggttacagtgaaatgttatcgggatatcaaccacctaatgaaggtgcacggaattcgcagggtttctgttctttacctgatcagattgccgctggacgtcctaatttctggcacactgtaaacgctcattaccaagaccagcaaggcaatcacaatctgttccctggttcatggtccatgatgccttcaagtactggctttgggatgaacagacagagctatccaatgatccaggaagtcggtgggatgtctcagagttgtacaaacaccaagtttgggaatggagtttatgctgcactacctggccgaggcattgatcgatacccatctggatggtttgggcacacgacacccggtggtcgcgtggacgatgcccagccacgcgtgattaagcctcaacctttggtccttgctcacggcgaagctctgaaaatgaagggcaactcgtgcaagctttttggaatccatctcgacagcccagccaaatctgaacctttgaagtctccgccaagcgttgccacaccggcagctgagaagtggatggcagacggaatcgacgcagacaaaagccctgagccgcacaagacgccaaagcaactcggtgctacacaggtggatcctgtcccagagagatgcccacaagcttcaaggggcacacagtgcaaatcacaaggcgggtcgactaggagctgcaagaaggtccacaagcaaggaatggcgctgggcaggtccgtggaccttaccaagttcaacggctacacggagctggtggcggagctggacgagatgttcgacttcaacggcgagctgaaaggctgtagcaaggagtggatggtcgtgtacaccgactacgaaggcgacatgatgctggtcggggacgacccctggaatgagttctgcagcatggtgcacaagatcttcgtgtacacgagggaggaggtccagcgcatgaacccgggcgccctgaactcgaggccggaggacagcggcctcgccaattcgacggagaggggctccgcatctactgctgctgctagagaggcacccggctaccagtccgcctcgtcgcttaactccgacaactgctgatgccttggcagctagctggtcgtcccaagtagtagagaacaaggcaaatgtatccatagatctccttgtagcggagcttaatgcctttttttcccctttctaatatgcattggatgagcccgtagcgcaccgtagtagtatctaaagctggtgttctgagttggttggaccttcctgcagttttggtttctccttctgatgtggcaagttttagctggtcgcacctacctaatgtatgcttagcaaacgaagtcccactaagcgctgtacataactgcccctccctgcatcaactctaatatatcatctgcttaatcgtcacccctgggcccccgtgctggttgctcaagatcccagctgcttgttgtggcgcttggtttggttcgttgtcggccgtggctcatgtttgtt

SEQ ID NO: 42763 - DNA, 3412 bp, Zea Mays
ccccacggtaacctcaccgccggcttcaagccgagcaaaagacacgcacccgcgaccgcgaccgcgacgagcgaagtgagagaggggaaggcgaggagaccactgcaccagcaccaccaccaccgtgccgcgagcgaagtgacgtcgcgttcacttccctcataaaatctcgccccccactctctctctacccgagcccagcagtaatttttttttggggaaggtgaagcgagaggagcaggaggagagaaaggggaacgaggccggccgcgaatcggaggggaattcggggggcggggctcggtccggccggaaattcgcgcgattcgggcgcgggcgccgcggatgtgaagatctggtgctcggcgggatgacttcttcggcggcggccgcggctgctgccgcccaggtggcgggaggaggtggaggcggcgagggagatgccgccgctgcggcgcgaggcggaacggaggacggcatgtacacggagctgtggaacctctgcgccggcccgctggtcacggtgcccagggtcggggacaaggtgtactacttcccgcagggccatatcgagcaggtggaggcgtcgaccaaccaggtggctgagcagcacatgcaattttacgatctcccgtggaagatcctgtgtgaggtcatgaacgttgaattgaaggctgagccagacaatgatgaggtttatgcccagctcactctgctacctgaatcaaagccagaggagaatggctctagtgaggagatgcctgcttcacctcctgctgcacttgcaaggccacgcgtgcactccttctgcaagacattgacagcctctgataccagcactcatggtggattctcggtgctgcggcgccatgcagatgagtgtcttccgccactggatatgacccgtcaacctccaacacaagagcttgtagccaaggacctgcatggtgtggaatggcgctttcgccacatattcagaggtcaaccacgaaggcatcttttgcagagtggctggagtgtttttgttagtgccaaacgtcttgttgctggcgatgccttcatctttctaagaggtgatagtggggagcttcgtgtaggagtcaggcgtgccatgaggcagcaagcaaatgttccgtcttcagtaatatcaagccacagcatgcatcttggtgttcttgctacagcatggcatgctgttaacactgggaccatgtttactgtctactacaagcctaggacaagtccagctgagtttgttgttccctgtgatcgctatatggaatcactgaaacgaaattaccctatagggatgagatttaaaatgaggtttgaaggtgaagaggctccagaacaaaggttcactgggaccattgttggaaatgtggatcctgatcaagctggatgggctgaatctaaatggcgttacctcaaggtgaggtgggatgaagcttcctccattccacgtcctgaaagggtttctccctggcaaatagaacctgcagtcagccctccccctatcaacccacttccagtgcacagacccaagagacctcgctctaatgctgtagcttctctgcccgagtcttcagctccaacaaaagaagctgctccaaaggtcacattagagactcaacaacatgccctgcaaaggcccttgcagacccaggataatgtggccccgaaaagtgtttttggtgataacagtgaattggactctgctcataagtcctccctgcgaccgtcaggttttgatctggacaagagcaccattggcatgcagaggaagctgggttcagatatttggatgcgaatgaacagacctgatggttacagtgaaatgttatcgggatatcaaccacctaatgaaggtgcacggaattcgcagggtttctgttctttacctgatcagattgccgctggacgtcctaatttctggcacactgtaaacgctcattaccaagaccagcaaggcaatcacaatctgttccctggttcatggtccatgatgccttcaagtactggctttgggatgaacagacagagctatccaatgatccaggaagtcggtgggatgtctcagagttgtacaaacaccaagtttgggaatggagtttatgctgcactacctggccgaggcattgatcgatacccatctggatggtttgggcacacgacacccggtggtcgcgtggacgatgcccagccacgcgtgattaagcctcaacctttggtccttgctcacggcgaagctctgaaaatgaagggcaactcgtgcaagctttttggaatccatctcgacagcccagccaaatctgaacctttgaagtctccgccaagcgttgccacaccggcagctgagaagtggatggcagacggaatcgacgcagacaaaagccctgagccgcacaagacgccaaagcaactcggtgctacacaggtggatcctgtcccagagagatgcccacaagcttcaaggggcacacagtgcaaatcacaaggcgggtcgactaggagctgcaagaaggtccacaagcaaggaatggcgctgggcaggtccgtggaccttaccaagttcaacggctacacggagctggtggcggagctggacgagatgttcgacttcaacggcgagctgaaaggctgtagcaaggagtggatggtcgtgtacaccgactacgaaggcgacatgatgctggtcggggacgacccctggaacatggtgcacaagatcttcgtgtacacgagggaggaggtccagcgcatgaacccgggcgccctgaactcgaggccggaggacagcggcctcgccaattcgacggagaggggctccgcatctactgctgctgctagagaggcacccggctaccagtccgcctcgtcgcttaactccgacaactgctgatgccttggcagctagctggtaattgcgatcaacttggatagcagctggacctagtcctgatggttataataataataataataattctgaacgagttctccgctgttcttttggcaggtcgtcccaagtagtagagaacaaggcaaatgtatccatagatctccttgtagcggagcttaatgcctttttttcccctttctaatatgcattggatgagcccgtagcgcaccgtagtagtatctaaagctggtgttctgagttggttggaccttcctgcagttttggtttctccttctgatgtggcaagttttagctggtcgcacctacctaatgtatgcttagcaaacgaagtcccactaagcgctgtacataactgcccctccctgcatcaactctaatatatcatctgcttaatcgtcacccctgggcccccgtgctggttgctcaagatcccagctgcttgttgtggcgcttggtttggttcgttgtcggccgtggctcatgtttgtt

SEQ ID NO: 42764 - DNA, 3427 bp, Zea Mays
ttcgtcccctcacgtccggcccaagcccagcccgcccgcctagtgaaataattgcgcccctcccctcctcgcggtcgcctcactccctttcctccccacggtaacctcaccgccggcttcaagccgagcaaaagacacgcacccgcgaccgcgaccgcgacgagcgaagtgagagaggggaaggcgaggagaccactgcaccagcaccaccaccaccgtgccgcgagcgaagtgacgtcgcgttcacttccctcataaaatctcgccccccactctctctctacccgagcccagcagtaatttttttttggggaaggtgaagcgagaggagcaggaggagagaaaggggaacgaggccggccgcgaatcggaggggaattcggggggcggggctcggtccggccggaaattcgcgcgattcgggcgcgggcgccgcggatgtgaagatctggtgctcggcgggatgacttcttcggcggcggccgcggctgctgccgcccaggtggcgggaggaggtggaggcggcgagggagatgccgccgctgcggcgcgaggcggaggcggaacggaggacggcatgtacacggagctgtggaacctctgcgccggcccgctggtcacggtgcccagggtcggggacaaggtgtactacttcccgcagggccatatcgagcaggtggaggcgtcgaccaaccaggtggctgagcagcacatgcaattttacgatctcccgtggaagatcctgtgtgaggtcatgaacgttgaattgaaggctgagccagacaatgatgaggtttatgcccagctcactctgctacctgaatcaaagcagccagaggagaatggctctagtgaggagatgcctgcttcacctcctgctgcacttgcaaggccacgcgtgcactccttctgcaagacattgacagcctctgataccagcactcatggtggattctcggtgctgcggcgccatgcagatgagtgtcttccgccactggatatgacccgtcaacctccaacacaagagcttgtagccaaggacctgcatggtgtggaatggcgctttcgccacatattcagaggtcaaccacgaaggcatcttttgcagagtggctggagtgtttttgttagtgccaaacgtcttgttgctggcgatgccttcatctttctaagaggtgatagtggggagcttcgtgtaggagtcaggcgtgccatgaggcagcaagcaaatgttccgtcttcagtaatatcaagccacagcatgcatcttggtgttcttgctacagcatggcatgctgttaacactgggaccatgtttactgtctactacaagcctaggacaagtccagctgagtttgttgttccctgtgatcgctatatggaatcactgaaacgaaattaccctatagggatgagatttaaaatgaggtttgaaggtgaagaggctccagaacaaaggttcactgggaccattgttggaaatgtggatcctgatcaagctggatgggctgaatctaaatggcgttacctcaaggtgaggtgggatgaagcttcctccattccacgtcctgaaagggtttctccctggcaaatagaacctgcagtcagccctccccctatcaacccacttccagtgcacagacccaagagacctcgctctaatgctgtagcttctctgcccgagtcttcagctccaacaaaagaagctgctccaaaggtcacattagagactcaacaacatgccctgcaaaggcccttgcagacccaggataatgtggccccgaaaagtgtttttggtgataacagtgaattggactctgctcataagtcctccctgcgaccgtcaggttttgatctggacaagagcaccattggcatgcagaggaagctgggttcagatatttggatgcgaatgaacagacctgatggttacagtgaaatgttatcgggatatcaaccacctaatgaaggtgcacggaattcgcagggtttctgttctttacctgatcagattgccgctggacgtcctaatttctggcacactgtaaacgctcattaccaagaccagcaaggcaatcacaatctgttccctggttcatggtccatgatgccttcaagtactggctttgggatgaacagacagagctatccaatgatccaggaagtcggtgggatgtctcagagttgtacaaacaccaagtttgggaatggagtttatgctgcactacctggccgaggcattgatcgatacccatctggatggtttgggcacacgacacccggtggtcgcgtggacgatgcccagccacgcgtgattaagcctcaacctttggtccttgctcacggcgaagctctgaaaatgaagggcaactcgtgcaagctttttggaatccatctcgacagcccagccaaatctgaacctttgaagtctccgccaagcgttgccacaccggcagctgagaagtggatggcagacggaatcgacgcagacaaaagccctgagccgcacaagacgccaaagcaactcggtgctacacaggtggatcctgtcccagagagatgcccacaagcttcaaggggcacacagtgcaaatcacaaggcgggtcgactaggagctgcaagaaggtccacaagcaaggaatggcgctgggcaggtccgtggaccttaccaagttcaacggctacacggagctggtggcggagctggacgagatgttcgacttcaacggcgagctgaaaggctgtagcaaggagtggatggtcgtgtacaccgactacgaaggcgacatgatgctggtcggggacgacccctggaatgagttctgcagcatggtgcacaagatcttcgtgtacacgagggaggaggtccagcgcatgaacccgggcgccctgaactcgaggccggaggacagcggcctcgccaattcgacggagaggggctccgcatctactgctgctgctagagaggcacccggctaccagtccgcctcgtcgcttaactccgacaactgctgatgccttggcagctagctggtcgtcccaagtagtagagaacaaggcaaatgtatccatagatctccttgtagcggagcttaatgcctttttttcccctttctaatatgcattggatgagcccgtagcgcaccgtagtagtatctaaagctggtgttctgagttggttggaccttcctgcagttttggtttctccttctgatgtggcaagttttagctggtcgcacctacctaatgtatgcttagcaaacgaagtcccactaagcgctgtacataactgcccctccctgcatcaactctaatatatcatctgcttaatcgtcacccctgggcccccgtgctggttgctcaagatcccagctgcttgttgtggcgcttggtttggttcgttgtcggccgtggctcatgtttgtt

SEQ ID NO: 42765 - DNA, 3428 bp, Zea Mays
gaaccccttcgtcccctcacgtccggcccaagcccagcccgcccgcctagtgaaataattgcgcccctcccctcctcgcggtcgcctcactccctttcctccccacggtaacctcaccgccggcttcaagccgagcaaaagacacgcacccgcgaccgcgaccgcgacgagcgaagtgagagaggggaaggcgaggagaccactgcaccagcaccaccaccaccgtgccgcgagcgaagtgacgtcgcgttcacttccctcataaaatctcgccccccactctctctctacccgagcccagcagtaatttttttttggggaaggtgaagcgagaggagcaggaggagagaaaggggaacgaggccggccgcgaatcggaggggaattcggggggcggggctcggtccggccggaaattcgcgcgattcgggcgcgggcgccgcggatgtgaagatctggtgctcggcgggatgacttcttcggcggcggccgcggctgctgccgcccaggtggcgggaggaggtggaggcggcgagggagatgccgccgctgcggcgcgaggcggaacggaggacggcatgtacacggagctgtggaacctctgcgccggcccgctggtcacggtgcccagggtcggggacaaggtgtactacttcccgcagggccatatcgagcaggtggaggcgtcgaccaaccaggtggctgagcagcacatgcaattttacgatctcccgtggaagatcctgtgtgaggtcatgaacgttgaattgaaggctgagccagacaatgatgaggtttatgcccagctcactctgctacctgaatcaaagcagccagaggagaatggctctagtgaggagatgcctgcttcacctcctgctgcacttgcaaggccacgcgtgcactccttctgcaagacattgacagcctctgataccagcactcatggtggattctcggtgctgcggcgccatgcagatgagtgtcttccgccactggatatgacccgtcaacctccaacacaagagcttgtagccaaggacctgcatggtgtggaatggcgctttcgccacatattcagaggtcaaccacgaaggcatcttttgcagagtggctggagtgtttttgttagtgccaaacgtcttgttgctggcgatgccttcatctttctaagaggtgatagtggggagcttcgtgtaggagtcaggcgtgccatgaggcagcaagcaaatgttccgtcttcagtaatatcaagccacagcatgcatcttggtgttcttgctacagcatggcatgctgttaacactgggaccatgtttactgtctactacaagcctaggacaagtccagctgagtttgttgttccctgtgatcgctatatggaatcactgaaacgaaattaccctatagggatgagatttaaaatgaggtttgaaggtgaagaggctccagaacaaaggttcactgggaccattgttggaaatgtggatcctgatcaagctggatgggctgaatctaaatggcgttacctcaaggtgaggtgggatgaagcttcctccattccacgtcctgaaagggtttctccctggcaaatagaacctgcagtcagccctccccctatcaacccacttccagtgcacagacccaagagacctcgctctaatgctgtagcttctctgcccgagtcttcagctccaacaaaagaagctgctccaaaggtcacattagagactcaacaacatgccctgcaaaggcccttgcagacccaggataatgtggccccgaaaagtgtttttggtgataacagtgaattggactctgctcataagtcctccctgcgaccgtcaggttttgatctggacaagagcaccattggcatgcagaggaagctgggttcagatatttggatgcgaatgaacagacctgatggttacagtgaaatgttatcgggatatcaaccacctaatgaaggtgcacggaattcgcagggtttctgttctttacctgatcagattgccgctggacgtcctaatttctggcacactgtaaacgctcattaccaagaccagcaaggcaatcacaatctgttccctggttcatggtccatgatgccttcaagtactggctttgggatgaacagacagagctatccaatgatccaggaagtcggtgggatgtctcagagttgtacaaacaccaagtttgggaatggagtttatgctgcactacctggccgaggcattgatcgatacccatctggatggtttgggcacacgacacccggtggtcgcgtggacgatgcccagccacgcgtgattaagcctcaacctttggtccttgctcacggcgaagctctgaaaatgaagggcaactcgtgcaagctttttggaatccatctcgacagcccagccaaatctgaacctttgaagtctccgccaagcgttgccacaccggcagctgagaagtggatggcagacggaatcgacgcagacaaaagccctgagccgcacaagacgccaaagcaactcggtgctacacaggtggatcctgtcccagagagatgcccacaagcttcaaggggcacacagtgcaaatcacaaggcgggtcgactaggagctgcaagaaggtccacaagcaaggaatggcgctgggcaggtccgtggaccttaccaagttcaacggctacacggagctggtggcggagctggacgagatgttcgacttcaacggcgagctgaaaggctgtagcaaggagtggatggtcgtgtacaccgactacgaaggcgacatgatgctggtcggggacgacccctggaatgagttctgcagcatggtgcacaagatcttcgtgtacacgagggaggaggtccagcgcatgaacccgggcgccctgaactcgaggccggaggacagcggcctcgccaattcgacggagaggggctccgcatctactgctgctgctagagaggcacccggctaccagtccgcctcgtcgcttaactccgacaactgctgatgccttggcagctagctggtcgtcccaagtagtagagaacaaggcaaatgtatccatagatctccttgtagcggagcttaatgcctttttttcccctttctaatatgcattggatgagcccgtagcgcaccgtagtagtatctaaagctggtgttctgagttggttggaccttcctgcagttttggtttctccttctgatgtggcaagttttagctggtcgcacctacctaatgtatgcttagcaaacgaagtcccactaagcgctgtacataactgcccctccctgcatcaactctaatatatcatctgcttaatcgtcacccctgggcccccgtgctggttgctcaagatcccagctgcttgttgtggcgcttggtttggttcgttgtcggccgtggctcatgtttgtt

SEQ ID NO: 42766 - DNA, 3426 bp, Zea Mays
cgaaccccttcgtcccctcacgtccggcccaagcccagcccgcccgcctagtgaaataattgcgcccctcccctcctcgcggtcgcctcactccctttcctccccacggtaacctcaccgccggcttcaagccgagcaaaagacacgcacccgcgaccgcgaccgcgacgagcgaagtgagagaggggaaggcgaggagaccactgcaccagcaccaccaccaccgtgccgcgagcgaagtgacgtcgcgttcacttccctcataaaatctcgccccccactctctctctacccgagcccagcagtaatttttttttggggaaggtgaagcgagaggagcaggaggagagaaaggggaacgaggccggccgcgaatcggaggggaattcggggggcggggctcggtccggccggaaattcgcgcgattcgggcgcgggcgccgcggatgtgaagatctggtgctcggcgggatgacttcttcggcggcggccgcggctgctgccgcccaggtggcgggaggaggtggaggcggcgagggagatgccgccgctgcggcgcgaggcggaacggaggacggcatgtacacggagctgtggaacctctgcgccggcccgctggtcacggtgcccagggtcggggacaaggtgtactacttcccgcagggccatatcgagcaggtggaggcgtcgaccaaccaggtggctgagcagcacatgcaattttacgatctcccgtggaagatcctgtgtgaggtcatgaacgttgaattgaaggctgagccagacaatgatgaggtttatgcccagctcactctgctacctgaatcaaagccagaggagaatggctctagtgaggagatgcctgcttcacctcctgctgcacttgcaaggccacgcgtgcactccttctgcaagacattgacagcctctgataccagcactcatggtggattctcggtgctgcggcgccatgcagatgagtgtcttccgccactggatatgacccgtcaacctccaacacaagagcttgtagccaaggacctgcatggtgtggaatggcgctttcgccacatattcagaggtcaaccacgaaggcatcttttgcagagtggctggagtgtttttgttagtgccaaacgtcttgttgctggcgatgccttcatctttctaagaggtgatagtggggagcttcgtgtaggagtcaggcgtgccatgaggcagcaagcaaatgttccgtcttcagtaatatcaagccacagcatgcatcttggtgttcttgctacagcatggcatgctgttaacactgggaccatgtttactgtctactacaagcctaggacaagtccagctgagtttgttgttccctgtgatcgctatatggaatcactgaaacgaaattaccctatagggatgagatttaaaatgaggtttgaaggtgaagaggctccagaacaaaggttcactgggaccattgttggaaatgtggatcctgatcaagctggatgggctgaatctaaatggcgttacctcaaggtgaggtgggatgaagcttcctccattccacgtcctgaaagggtttctccctggcaaatagaacctgcagtcagccctccccctatcaacccacttccagtgcacagacccaagagacctcgctctaatgctgtagcttctctgcccgagtcttcagctccaacaaaagaagctgctccaaaggtcacattagagactcaacaacatgccctgcaaaggcccttgcagacccaggataatgtggccccgaaaagtgtttttggtgataacagtgaattggactctgctcataagtcctccctgcgaccgtcaggttttgatctggacaagagcaccattggcatgcagaggaagctgggttcagatatttggatgcgaatgaacagacctgatggttacagtgaaatgttatcgggatatcaaccacctaatgaaggtgcacggaattcgcagggtttctgttctttacctgatcagattgccgctggacgtcctaatttctggcacactgtaaacgctcattaccaagaccagcaaggcaatcacaatctgttccctggttcatggtccatgatgccttcaagtactggctttgggatgaacagacagagctatccaatgatccaggaagtcggtgggatgtctcagagttgtacaaacaccaagtttgggaatggagtttatgctgcactacctggccgaggcattgatcgatacccatctggatggtttgggcacacgacacccggtggtcgcgtggacgatgcccagccacgcgtgattaagcctcaacctttggtccttgctcacggcgaagctctgaaaatgaagggcaactcgtgcaagctttttggaatccatctcgacagcccagccaaatctgaacctttgaagtctccgccaagcgttgccacaccggcagctgagaagtggatggcagacggaatcgacgcagacaaaagccctgagccgcacaagacgccaaagcaactcggtgctacacaggtggatcctgtcccagagagatgcccacaagcttcaaggggcacacagtgcaaatcacaaggcgggtcgactaggagctgcaagaaggtccacaagcaaggaatggcgctgggcaggtccgtggaccttaccaagttcaacggctacacggagctggtggcggagctggacgagatgttcgacttcaacggcgagctgaaaggctgtagcaaggagtggatggtcgtgtacaccgactacgaaggcgacatgatgctggtcggggacgacccctggaatgagttctgcagcatggtgcacaagatcttcgtgtacacgagggaggaggtccagcgcatgaacccgggcgccctgaactcgaggccggaggacagcggcctcgccaattcgacggagaggggctccgcatctactgctgctgctagagaggcacccggctaccagtccgcctcgtcgcttaactccgacaactgctgatgccttggcagctagctggtcgtcccaagtagtagagaacaaggcaaatgtatccatagatctccttgtagcggagcttaatgcctttttttcccctttctaatatgcattggatgagcccgtagcgcaccgtagtagtatctaaagctggtgttctgagttggttggaccttcctgcagttttggtttctccttctgatgtggcaagttttagctggtcgcacctacctaatgtatgcttagcaaacgaagtcccactaagcgctgtacataactgcccctccctgcatcaactctaatatatcatctgcttaatcgtcacccctgggcccccgtgctggttgctcaagatcccagctgcttgttgtggcgcttggtttggttcgttgtcggccgtggctcatgtttgtt

SEQ ID NO: 42767 - DNA, 1315 bp, Zea Mays
agcagttctagtggcttcatccctttagaaatatcagtttggatccatttaagtctgcacacactagaattcttatctgttggtttactgtctacagaaagggacaaatcagatatttggctgctagaagtgaccaagttcagtttttcttgccgtgaccaactttggaataggatgaagattgggatggtgtgctggcaagggtattcagattggtgcatccctgaaatatcacctgtgcaaatatcctgtacagtgcacctcatccttaccccctcttttcttttgcccatggataatctccaccctgcgtagctaggctctatgtgttggcgtggatttactggaggaagccacgactgcatttagagttcatagctgtccttgctgcaagttcaagcatccaacccctgtgatcttttccctgcctatataaagagcaactggggagggaaaggtagaaacccaaccagtgatccttagttcaccatcaaccatgttgagcagccatgattagtagtactacacccccaaatcataccctagacacacccaagttccatcgatcaaggcaccaaacttatttgatgaccaccccggcaacacctcggcttcacgtggccagacgactgtgaaaacgaagaagagagtgaagtgactgaagagaagacaccagcacctttggaatctcaggcagggacttggctctacttcgacatctgcgggtccgagcctgactcacctactaacgaaggcaagccccggtgcatgcaaccctttccttgtgtttttaaataattttcgcacactttaagtctaatgaaatgtgcattaggttcataggagttgcttggaaccctttgatgcattgctttccttgatatccatacctttatagatacttcagtgaagtatcaaaatatgatttacaaaaatgcttagccttgctcagatcttgtggatagaggttgtccttagcctagctcgagaaaggatgacttctacctgcaagaatattttcatttggagcaatggtgggatcttactgtaaagttccctatgatgctcttctcatcctaaggaacagaaacaatcctaaggatgggaatacttaaattgagacttgggttaggaacaggtgatgttctacccaggttgattaaggattgaacgtgtatgtaggcgtgctgatcgaggaccctttaactggtcacatgcctcgtcatgggtaagccttgcctcgggaagactaaggccaaaataagataacacgaaatgggcgtggagcggtggcgagagtagcgtgtaccctccg

SEQ ID NO: 42768 - DNA, 4555 bp, Zea Mays
caaacagtgtgatgttgtgtgttgttagagtttagtttaaggacttggcttaagctagacaagagtaggtcaactcttgagcaagtaacaaattgacttggaaacttcaagtgctaaaggcaagtcctagagtttatggcaaccttgttttcaaaggtagagcaagtggaagaaacacttgaagaaaatgaagaacatgtgaaacactaaaactagcccaaaagaggaattcaaaatctagaagtaatttgacaaaagtccatatatcaaagttgtggagcttgaaaaagtgaatgaatttcttatttggagattcccatgttgtgtgaagaaaattggagtaaatcatcaaagttcagttttgagctcagattggaattgctgaaaatagtagcaactaggcagttttggtcctttataacttctgatctataaacattttgaaggtagtcattgtaaaaaaattataaagctatgtgaggagtgtgactttgattgagtaacctagccttaaatctatatggaatttggagaagaactggtctaaagtagagctgctggaaagtgtggggttcagacttaataaaatacagtctgaatttcagtattttgtgcaaactttgggttgtggtagagtggaatccaaaagggtttagctaagggtcactatatagaaattgtagaggaactattgaagtacagaatttgttaagcaactttgccttaaaagtatatgctaccagcagaaaaggtggtccaaagaagtgttgacagactcatggaatttcagatagtgaatagtgaagtgagtggagtttcagtgttgagtatgctgtttggagctcatttgtggctaaaccatagaactttggactatggtgtttatagagaagttgaagtccatatgatggtgaacaagttttattaagtgagtttgacatgaccccatgcaaaatttggagtaaagcttgcctaaaaatggactgttagtgtattggtgacttagtggttcagagatgaaactctgaaaaacagccaatgatgctctgtttggagctcagttgtgattaatatatatggttttagaccaagagttgtatatcaaaatggaagaccatatataggagaacaaatttctttaagtgagtttggtttggtgctacacagaaaaaggagtaaaagtggctcaaaattggactgtcaggctggttccaactgctttgggttcagtctctgaaacctgaatttcagtataggatgcttaatttggagctattttgtgatcaatatgagtagttttagactatagtttctatagcaaagttggataccagatatagatggacaagtttcatgcaaggagatggtcctgttgttatgtaaagattgagagataatggagctgtaacgtcctctgtcagaaatagtgagggctgttcagttaagctgagaccgagtgtttgactgtttctgctataatttggaacaccacaacttcaattctgagtagtttcagctttggagtgttgtaccaaagtggaagacctatggttggagaataaggcttgttaagggagatgggtctgttgtcatatggaattgtgagtaaaatgctctctaatatgccttgtcagacttaaagggttgcatttgagttcagctctctgaagaagagtttcagagtgtgtgcttggctttggaaccttatagtttgtgatccatgtgtttctagcagtggaatgttgtagtgggttgaagagctatagtcaatgagcaagtttcctatgattaaattaaggtgttgctacagggaaaatgtaagggaatgaccttgaaaggcccctgtcagtccagctaagcaacagtaattcgtttaggactgaagacagtttctgaagaagattatctcctctccctgctggtttctttggatgtttgggtagggataaggtcgaagtccagagccagggatctagtggcctcagatctactaaaaaatatccaaattttgacctattttgtgagcagtgaatgagagggggtcctcatctaatgaatctttaatggggtatgctggacagcagcagttctagtggcttcatccctttagaaatatcagtttggatccatttaagtctgcacacactagaattcttatctgttggtttactgtctacagaaagggacaaatcagatatttggctgctagaagtgaccaagttcagtttttcttgccgtgaccaactttggaataggatgaagattgggatggtgtgctggcaagggtattcagattggtgcatccctgaaatatcacctgtgcaaatatcctgtacagtgcacctcatccttaccccctcttttcttttgcccatggataatctccaccctgcgtagctaggctctatgtgttggcgtggatttactggaggaagccacgactgcatttagagttcatagctgtccttgctgcaagttcaagcatccaacccctgtgatcttttccctgcctatataaagagcaactggggagggaaaggtagaaacccaaccagtgatccttagttcaccatcaaccatgttgagcagccatgattagtagtactacacccccaaatcataccctagacacacccaagttccatcgatcaaggcaccaaacttatttgatgaccaccccggcaccaaacttatttgatgaccaccccggcaacacctcggcttcacgtggccagacgactgtggtatgtcttaacccccacaagctgatgttctagcatccccgtaccttggtgaagctcaccgagaagtccgtttggtccttacggtcttggtttggtcggaacacgggcttgacaccgcgtgaactgtcctggtgatgacccactcaaagttcagttggcccaggggcaattcttgtgagcgtcgtgtttcccgcaccctactcgtgctccatgtgccctcaatttgaaacatcctgtgccggagccatttgggtgaacgtcgcggtactgggctcccgccttgaacgtggtcatggcactctgtaagttagtgagtcaaatccatgcctatagatgctcggggtaggttaggatttggtctggtcgctatccaacggctgcccgggctctcctccgccgttgtgtcgcggtgggaatgcgtccgcgccgccggcgacgtcagggactcacgttgtaaagacgagaaacctagaaggggccagaagtaaaatgtcagtgactcgcagagttcagttgaggacttcgttcctaatattaactctggcaaggacttttatgcaaaacaggctgcgctgccgcgggcgcgcccctgtaatctgcttaaactgggccggttgggcacaatttggcccaatactattgaacgtttttctttttctttttctaagaaagttgagaaatccataaagaattcaagaaaaatgataaaaataccaaaccaattttaatgggcttctaatttcctatagaatttaataaaaatagtttcatgatttttagtccaaataggaaattatagagtatttaaatcatccaaaaaccatgtttctggatttttagagattatataataaatccaaaattcactaaatttttagggtaatctctcaacaatattttgagaccttgggtagagtttgatatgatttggacattgtttgatacttataacccaaaccctacccctgccctttgaactcctttactgactccggaaaccctaagttctcggagttccgtgaaggaaagttgtattcaaaacttagttaataaacctttattatctatgcactctcataagcattacatggcattcattcttatatatatacctatatggttatatttagaaaacgaagaagagagtgaagtgactgaagagaagacaccagcacctttggaatctcaggcagggacttggctctacttcgacatctgcgggtccgagcctgactcacctactaacgaaggcaagccccggtgcatgcaaccctttccttgtgtttttaaataattttcgcacactttaagtctaatgaaatgtgcattaggttcataggagttgcttggaaccctttgatgcattgctttccttgatatccatacctttatagatacttcagtgaagtatcaaaatatgatttacaaaaatgcttagccttgctcagatcttgtggatagaggttgtccttagcctagctcgagaaaggatgacttctacctgcaagaatattttcatttggagcaatggtgggatcttactgtaaagttccctatgatgctcttctcatcctaaggaacagaaacaatcctaaggatgggaatacttaaattgagacttgggttaggaacaggtgatgttctacccaggttgattaaggattgaacgtgtatgtaggcgtgctgatcgaggaccctttaactggtcacatgcctcgtcatgggtaagccttgcctcgggaagactaaggccaaaataagataacacgaaatgggcgtggagcggtggcgagagtagcgtgtaccctccg

SEQ ID NO: 42769 - DNA, 6260 bp, Zea Mays
caaacagtgtgatgttgtgtgttgttagagtttagtttaaggacttggcttaagctagacaagagtaggtcaactcttgagcaagtaacaaattgacttggaaacttcaagtgctaaaggcaagtcctagagtttatggcaaccttgttttcaaaggtagagcaagtggaagaaacacttgaagaaaatgaagaacatgtgaaacactaaaactagcccaaaagaggaattcaaaatctagaagtaatttgacaaaagtccatatatcaaagttgtggagcttgaaaaagtgaatgaatttcttatttggagattcccatgttgtgtgaagaaaattggagtaaatcatcaaagttcagttttgagctcagattggaattgctgaaaatagtagcaactaggcagttttggtcctttataacttctgatctataaacattttgaaggtagtcattgtaaaaaaattataaagctatgtgaggagtgtgactttgattgagtaacctagccttaaatctatatggaatttggagaagaactggtctaaagtagagctgctggaaagtgtggggttcagacttaataaaatacagtctgaatttcagtattttgtgcaaactttgggttgtggtagagtggaatccaaaagggtttagctaagggtcactatatagaaattgtagaggaactattgaagtacagaatttgttaagcaactttgccttaaaagtatatgctaccagcagaaaaggtggtccaaagaagtgttgacagactcatggaatttcagatagtgaatagtgaagtgagtggagtttcagtgttgagtatgctgtttggagctcatttgtggctaaaccatagaactttggactatggtgtttatagagaagttgaagtccatatgatggtgaacaagttttattaagtgagtttgacatgaccccatgcaaaatttggagtaaagcttgcctaaaaatggactgttagtgtattggtgacttagtggttcagagatgaaactctgaaaaacagccaatgatgctctgtttggagctcagttgtgattaatatatatggttttagaccaagagttgtatatcaaaatggaagaccatatataggagaacaaatttctttaagtgagtttggtttggtgctacacagaaaaaggagtaaaagtggctcaaaattggactgtcaggctggttccaactgctttgggttcagtctctgaaacctgaatttcagtataggatgcttaatttggagctattttgtgatcaatatgagtagttttagactatagtttctatagcaaagttggataccagatatagatggacaagtttcatgcaaggagatggtcctgttgttatgtaaagattgagagataatggagctgtaacgtcctctgtcagaaatagtgagggctgttcagttaagctgagaccgagtgtttgactgtttctgctataatttggaacaccacaacttcaattctgagtagtttcagctttggagtgttgtaccaaagtggaagacctatggttggagaataaggcttgttaagggagatgggtctgttgtcatatggaattgtgagtaaaatgctctctaatatgccttgtcagacttaaagggttgcatttgagttcagctctctgaagaagagtttcagagtgtgtgcttggctttggaaccttatagtttgtgatccatgtgtttctagcagtggaatgttgtagtgggttgaagagctatagtcaatgagcaagtttcctatgattaaattaaggtgttgctacagggaaaatgtaagggaatgaccttgaaaggcccctgtcagtccagctaagcaacagtaattcgtttaggactgaagacagtttctgaagaagattatctcctctccctgctggtttctttggatgtttgggtagggataaggtcgaagtccagagccagggatctagtggcctcagatctactaaaaaatatccaaattttgacctattttgtgagcagtgaatgagagggggtcctcatctaatgaatctttaatggggtatgctggacagcagcagttctagtggcttcatccctttagaaatatcagtttggatccatttaagtctgcacacactagaattcttatctgttggtttactgtctacagaaagggacaaatcagatatttggctgctagaagtgaccaagttcagtttttcttgccgtgaccaactttggaataggatgaagattgggatggtgtgctggcaagggtattcagattggtgcatccctgaaatatcacctgtgcaaatatcctgtacagtgcacctcatccttaccccctcttttcttttgcccatggataatctccaccctgcgtagctaggctctatgtgttggcgtggatttactggaggaagccacgactgcatttagagttcatagctgtccttgctgcaagttcaagcatccaacccctgtgatcttttccctgcctatataaagagcaactggggagggaaaggtagaaacccaaccagtgatccttagttcaccatcaaccatgttgagcagccatgattagtagtactacacccccaaatcataccctagacacacccaagttccatcgatcaaggcaccaaacttatttgatgaccaccccggcaacacctcggcttcacgtggccagacgactgtggtatgtcttaacccccacaagctgatgttctagcatccccgtaccttggtgaagctcaccgagaagtccgtttggtccttacggtcttggtttggtcggaacacgggcttgacaccgcgtgaactgtccaggtgatgacccactcaaagttcagttggcccaggggcaattcttgtgagcgtcgtgtttcccgcaccctactcgtgctccatgtgccctcaatttgaaacatcctgtgccggagccatttgggtgaacgtcgcggtactgggctcccgccttgaacgtggtcatggcactctgtaagttagtgagtcaaatccatgcctatagatgctcggggtaggttaggatttggtctggtcgctatccaacggctgcccgggctctcctccgccgttgtgtcgcggtgggaatgcgtccgcgccgccggcgacgttagggactcacgttgtaaagacgagaaacctagaaggggccagaagtaaaatgtcagtgactcgcagagttcagttgaggacttcgttcctaatattaactctggcaaggacttttatgcaaaacaggctgcgctgccgcgggcgcgcccctgtaatctgcttaaactgggccggttgggcacaatttggcccaatactattgaacgtttttctttttctttttctaagaaagttgagaaatccataaagaattcaagaaaaatgataaaaataccaaaccaattttaatgggcttctaatttcctatagaatttaataaaaatagtttcatgatttttagtccaaataggaaattatagagtatttaaatcatccaaaaaccatgtttctgaatttttagagattatataataaatccaaaattcactaaatttttagggtaatctctcaacaatattatgagaccttgggtagagtttgatatgatttggacattgtttgatacttataacccaaaccctacccctgccctttgaactcctttactgactccggaaaccctaagttctcggagttccgtgaaggaaagttgtattcaaaacttagttaataaacctttattatctatgcactctcataagcattacatggcattcattcttatatatatacctatatggttatatttagaaaacgaagaagagagtgaagtgactgaagagaagacaccaccacctttggaatctcaggcagggacttggctctacttcgacatctgcgggtccgagcctgactcacctactaacgaaggcaagccccggtgcatgcaaccctttccttgtgtttttaaataattttcgcacactttaagtctaatgaaatgtgcattaggttcataggagttgcttggaaccctttgatgcattgctttccttgatatccatacctttatagatacttcagtgaagtatcaaaatatgatttacaaaaatgcttagccttgctcagatcttgtggatagaggttgtccttagcctagctcgagaaaggatgacttctacctgcaagaatattttcatttggagcaatggtgggatcttactgtaaagttccctatgatgctcttctcatcctaaggaacagaaacaatcctaaggatgggaatacttaaattgagacttgggttaggaacaggtgatgttctacccaggttgattaaggattgaacgtgtatgtaggcgtgctgatcgaggaccctttaactggtcacatgcctcgtcatgggtaagccttgcctcgggaagactaaggccagaataagataacacgaaatgggcgtggagcggtggcgagagtagcgtgtaccctccgtggcaagaggctggacggtggtgtatctgtgctctcggtttgcgtgaacctgatctggtcttaagaaccccggtggcgggttgacatatgcaagggttaagtgctacatatgtcgtgtgattggagatcctcagctgagtataatcgattcagatcgccgtaccttcgcggttatgaagacttggtcacttccctacaacctaagtcaggatgtgaacattatgaataaaaatgatgttgtattgatgagatggtgaaattagactagatgcaaatagagtcaattaatacttaatatggtgttaaaatattgaaagtaaggactcactttagtaagctatttctgcaaaagtatctaagttgatttttgctaaagcctctccttgattcctaattatccagcatacccttgagagtcttttccttagtcgggtaagacttggtgagtaattccatactcagggtttatccctccgttgtttttaggtgaggaagcgacaaatttttgttgcttttgctccaaggtggtgtcaaatgaagaaaaacaagagtgaagatgcgggaggacgtggtcctccataagaacctttgtttgatagttatcgggaggagtttttgcctcccctggtatgtgtaataatactaccctgcactcgttttataactctggtctgtaataaataacttgatcttactttctaaataaatgtaagtttatataattgcttccgcatttctatatctccgatgttctgtaatgtctgcaagacgggtgaaacgctcttgggaaaggtgagaaaagaagataccgaacttgtcaagtgattcaggaacatctacagggttgtctgatgtctgttggacaaggacaactgtaggtgggcctaattacttgggaggttccgtcacagctggtatcgaagcgaagcccatctctgcagatattatgagacatcttcaaaaagaattttctaaagacttatctacaaaatttcttcccttcttacctaagtgtttctgaagagtttattttaaagaccagataggaagagtgtaatgcatagaaggttgaatcaactaaggttgattctgtaattatacatgcatcatgctaagaactatgctaataaaagatttcccccttagagaaatgttgtcgcacactattcttagaggacaaccatggtatgagtagtagtgcgtattccagaacgtgctagaaaaccatcttggccacattggatgttccattctaaaggaatgactccttgggaaggagctcaggtaactgccttagaggtgttgaacaacatcgtggttaagtaaaacaaaacacctcccctaccttgtaagagaaattaggaaataagtccgtgacacgtttcctttttcattactaagcctagacttttaaatctcgggacgagatttctttttaggggggaaggttgtaacacctctggtgttacgtaaactaaaactctgacatgtcatcataagcatctgtattaatgtgcttgttacacttagaatgcattcactaggttaattttttttcaaacagtgtgatgttgtgtgttgttagagtttagtttaaggacttggcttaagctagacaagagtaggtcaactcttgagcaagtaacaaattgacttggaaacttcaagtgctaaaggcaagtcctagagtttatggcaaccttgttttcaaaggcagagcaagtggaagaaac

SEQ ID NO: 42770 - DNA, 1589 bp, Zea Mays
agccgtgaagctacacaatccatgcggcggcatatggcgcccatcaaggagcaaaaacacacgacaagcgcagaacagcaggtgatgctggatgccgagctccagctgtggaaccacaccttcggctacgtcaagtccatggcgctcaaggccgcgatcgacctcggcatacccgaggccatccaccagcacggcggcacggccaccctcccacaaatagtcaccagggtcaagctccacccgtccaagacaccatgcctgcggcgcctcatgcgcgtgctcaccctcaccggcgtcttcggcgcgcaggagccgcacgatgacgacggcggctgtgacgacgagctcgtctacacgctcacgccggcgtcccgtctcctcgtcggctcaccggggcagaacgtgggccctttcctgaccctgatgctcggccccatcttcgtgtcgtccttcctcgacctccgcgggtggttccagcacgagacgccggacccgtcccccttcaagatgacgcacgggcgggacatatgggagctggccgcccacgacgccgccttcggcaggctcttcgacgccggcatggtcgctgacagcagcttcatcatggacgtcgtggtcagggagtgcggcggcgtctttgaggggatcagctccctcgtcgacgtcgccggcgggctcggtggcgccacacagaccatcgcgaaggcgttcccgaacctggagtgcagcgtgctggatctcccaaacgtcgtcgccagcgctcccgctgataccgccgtgaagtatgtccccggtgacatgttcgagagcgttccggcggcagacgctgtcttcctcaagtggattatgcatgactggggtgatgccgactgtgtcaagatactgaagaactgcaagaaggccataccggctcaaggaggcaaggtgataatactggatatcgtggttggagcagggtcgtcatgcgaccggaagaatgtggagacgcaatgcttgtttgatctcttcatcatgtttatcaacggtgccgaacgagatgagcgacagtggaagaagatcatctttgaagccggctttacatcttacaagatcatacctgtcctgggcattagatccataattgaaatctgcctatagaagctaatataattaaggatgaaaacgggtcaggttcgggttgagttgagcaaaattctacccgggatggcatccttaaagtctatataaacccacccacgatcgtacccacgagtgcaattctaaacccgcacctgaacccgtcgggtttgaggatgatggtactggtggccatgatgttgacccagggcatgcagaagatggggcgcgcgccatgaagagcatgaatgcaggcctaggtctgccatgcacagcagctagaacacctccatcacttgagttaatgtccggtgatcatgcctgtgtaggcgtacatgttagttaacaacatggtcatgagcgtagttgtagtttattggccaaatggctaatgatacaaggaagcaaagctatttttaacataactcacctttatgtagagaaaaatacaaaatataaaacttcgaaaaatc

SEQ ID NO: 42771 - DNA, 1743 bp, Zea Mays
gctacgaccatatcccagcccatttcggcctgctactcccgaacttccatatctctcctctgctctcactctcctcccacccactccagaaaacctcacaaaaaccctcgctccccacaacccgccgccgcccacgccgccgcctgtaccagcggcgtcaagatgagtcggcaccctgaagtgaagtgggctcagaggatcgacaaggtttacatcactgtacagttacctgatgccaaggacgctaaggtcaatttggaaccagatggtgtcttcacattctctggcagtgctggtacaaacttatatgaattgaaactagatctgaatgacaaagtaaacgttgaggctagcaaaataagtgtgggtgtcaggtccatattctgtattgtagaaaaagctgaggccaaatggtggaagaaacttgttcgagatgatcaaagggcacctcactttgtgaaagttgattgggacaaatgggttgacgaagatgatgatggtatgctatgtacttgtattttttgatactactaaaggaatataatttgtgtatcagatacagaaactggtacatgcgcttgacctcatgtcagtacacaaagatttggtttaagtgctcaacattcccaagtttaatgagcaacaacgaaccatgatcttagcaaaccacagatgcagcaagaactatgttacttgataaatgtacactgtggagtagtggattatttcttgtaactgtttctacttgaaaaatatgtcatgagcaacacctctgccttagattatacccaaacacaacctaatagacataagatcagtgtgcccagcttcctggagattgcacctaagatgatagccatcctagcttcaggaaaacattttgtatattcgatgtacagacttaatactgcaacattatcatagatgtacgacaagacaacaacaataacaacaaagcttttgtcccaagcaagttggagtaggctagagttgaaacccaacagaaaccacaagtcaaggtttaggcactagaaaatattttgtttgacactatacatgaagattgctgattacattgggcatggacatgtaaaaattattatgttcatctatctcttcttttaggtgctgatgtcaacttggatgggatggacttctcgaattttggcggtatgggtggtatgggtggcatgggtgatatggctggcttgggtggtcttggtggaatgggtggtatgggaatggatgattttgaggatgatagtgatgaagaagaagtatcgaaacctcaagctgccggacatgctgctgaggccgagaagactgagtcggcggaagccaagactgagtcggctcagagcagttgaagatgcttccgacatgatctaaactagttgtatcgtcaagttaattctgctgaatcggtggacaaacttctacgttgtggcactggccgatcccagtgacttgccctaaaatttacgttctgtctttacatgggcatcctagtgttgtgctcatcacattattgatattgtttctgtgatgcttcctttggtcgacaatcatgtgctggagtttgtttactggattgcttttcttctgtggtttttggctttatacctgtatggaaagctggagccgcaaatggagaaatagggaacgacgtgtatttttgttctttgggggtacttgtgcacatttgtttggttccttaccgtataatactctaaattttaagct

SEQ ID NO: 42772 - DNA, 787 bp, Zea Mays
atctcggtcgcaggctcggaacagaagcgcgcgacttccggacggatcctgccctatccatccgatgagctcgtgcccagccttcttcctcccggcatataaaaccgggtcctcctctggaccaaccaccccatgggcgccattgcctccgatggaatcgccagcaggagctatggggcagggacatccgccgccgccgtggcaccatggtcattgcgattcgctagcgtctgattgagggtcgtggcctagtgatcttcgcaaaggcacgcggatggttatcatgccctcaccatgcggttctggggccgaagcggtgaggaattgtcaagacgcacccctccatggtcgaaggtcgcttcggcaggaactttgcagaaaataggagaagcaagagaacgagaatcgttggtgcaaatacttgttgcttttggtgggctaagacagtgcacctaacaattcaaaggcgatccacctcaagggcaacagtctcactatgacatgatctttaaggataatcacgacgtgccttcgatggtggatcctatactaactaggaccatatatatgatatagatcaccgtgttatgttttcatgtgcgctcgctcgacaatgtagttgccaatgaagggacagtcaaacacatgcatgccattgagatggcttcttaggtaggatcttttgtgcatgatatgcaacaagatcaacctccaatacagtgagtcaagactagagtacaatctggtatttccaaacctaacgcttgtactaatggaaccatcaaat

SEQ ID NO: 42773 - DNA, 2030 bp, Zea Mays
atctcggtcgcaggctcggaacagaagcgcgcgacttccggacggatcctgccctatccatccgatgagctcgtgcccagccttcttcctcccggcatataaaaccgggtcctcctctggaccaaccaccccatgggcgccattgcctccgatggaatcgccagcaggagctatggggcagggacatccgccgccgccgtggcaccatggtcattgcgattcgctagcgtctgattgagggtcgtggcctagtgatcttcgcaaaggcacgcggatggttatcatgccctcaccatgcggttctggggccgaagcggtgaggaattgtcaagacgcacccctccatggtcgaaggtcgcttcggcaggaactttggtgagcttcttgaccctttggttcacttgctggtccgctctgcatagcacaaaccgtagggggaaagtggagctctggtgctcgatttgagggggcaccgcctcgcggcttcggtcgtggctctggtccgcacctcgccgggatctagcccaagctgccagcggcctctcgcgttgttcgttgctcccagcacgctgcctcgcgccctcgccgcaactatctcctactccattgaagcttgagcgttgtcgccgtggggcttgggtaagtgtcgccgcagtcgtgctccaggctggggtatggatcgccgccccactcgccggtgagctcgtcgccatgaaaactgagatggatcgccatcgcggttctgcctcacgccgtgggcggggcccgtgcggcaacactgtgttccgtgtgatctggctcggcgcagcgcagttgtgctccggccatgtcccgacggcacctgaatcgtgccatgaagctgcacaaggttgtcgcggagtccctggtggtcggctaggtgtggctggtctcctcctacgaactcacgcgccgggcgcgatcactcgtccatccatgggctctggcgccgccgtaggttcgcaccgcaccttggccgagggccaccccagcttcacccactggtaagccacatcgaccctgatcctttgggttcctgccttgcgttgcaccgacctcgggtgtgaatagggtagtcgagcgcggtggcgggatcaagccgtcgtgttcgccgcggcggagctacgggagccgcccggagtcgtcctggaagaaagaaaatgctctgggaccgttgctgcaaccatctgtggccgggatatgtccagaaaagggtaaacatcgaaccgttggatcgattgcggagggcacagattagatctaggcatataacccttcgggccgtcgatcgttgattcgatggctgcgatcgcattctggttcggtggtaagaaaatttaatcgtggcccttgatgcaggatccaacggccagacttaaccgataccctttcgacctgcgcgttttgcaaaagagacctcttatttaactataaacaacccgtagtccacactgttggagttctgtgtctttgtgtcttttgcgcagaaccccctaggtttcttttaaatagttgccgcagtccaaataactcaaaattctattaaattaaatacagaacttcttttaatgcaaaataatgtcccaaacttcggaaattcataacttgatgaattttgctccaaaatgattcattccagtggcattaattttgtttaagtattgtttattacttagtacctttgtctaaccatgaaacttgatttaaaattattcacatgaataactctattctaggtattaaataacttcagaaattcctaacttaataaccgtagctccgaatttagtggttcttgtttatacgatctcgtagcagcgcgtagaatattattatgcagttgttcttatgtttgatgtaatgttgattttgcctataccatgtttgttgtattgctacgactagcgtgaggttacgagtcacctgaagatcatcctggtacctggaatctcaagtcctaggcaagttgtgcccttgatcacttctttttacccactcatgttctaattaat

SEQ ID NO: 42774 - DNA, 810 bp, Zea Mays
tttttctggaaactctagaatcgctgaaaaaacattcgaagtatcagaggaaaatgtttgatcaagctgtcaagctagttcgtcctggtggggtgattgtttattcaacgtgtactataaatccaggggagaatgaggctttggtgagatatgcattggatacctacaaatttctttcactagtatcacagtacccgaaagttggagggcctggtattgttggttcgtgcgagctgttcaacaagacatatactgaggaatggttgagagaggatgaagctgaccttgttcagaggtttgatccgtcatcatcagtggataccattggtttcttcatcgcgaaatttgatgttggagagaaagatgaataaacaaacgtgactgaaattccaatgtttggcattcacaacttacgctagggatatcagcattgaattttctgcaatcagatggctcacgtatacccatggagtggaatgcagcgtgccccctgaaattttgtttgccagtgtttgatattttcttttgttcgaagaacattgttcattatggtgaaatgatggggcaaattagattcaagctcctgtagtcccgtttccaagaaaaaagttaccgggtacccgtatccgtccgggtgtaccgggtattttctgggtattggtcctcccattccgtcctgtatctagggagcatttaaccgggtagcaccagcaaaattgtcctgatttaatattcgatatttggtttggctatccggcccgttttcatccctaggtgaatagataatctggaaaaatcatagcttaaaac

SEQ ID NO: 42775 - DNA, 1057 bp, Zea Mays
atcatcctttgtcatatccaaaggtgatggatattctgaagttggcttctgagatggacttgagttgtattaaagcttataaacttgatgctctcaaatctgtacggaaaactgatgaagcaagaagccttggcatggctgataatcacagtgaagcaattgaaacaccaacagaggacccttgccatgccacagtaggtgggagatctaccagtgtagacgaagacagctcaacaacaacagtggtgttttctggaaactctagaatcgctgaaaaaacattcgaagtatcagaggaaaatgtttgatcaagctgtcaagctagttcgtcctggtggggtgattgtttattcaacgtgtactataaatccaggggagaatgaggctttggtgagatatgcattggatacctacaaatttctttcactagtatcacagtacccgaaagttggagggcctggtattgttggttcgtgcgagctgttcaacaagacatatactgaggaatggttgagagaggatgaagctgaccttgttcagaggtttgatccgtcatcatcagtggataccattggtttcttcatcgcgaaatttgatgttggagagaaagatgaataaacaaacgtgactgaaattccaatgtttggcattcacaacttacgctagggatatcagcattgaattttctgcaatcagatggctcacgtatacccatggagtggaatgcagcgtgccccctgaaattttgtttgccagtgtttgatattttcttttgttcgaagaacattgttcattatggtgaaatgatggggcaaattagattcaagctcctgtagtcccgtttccaagaaaaaagttaccgggtacccgtatccgtccgggtgtaccgggtattttctgggtattggtcctcccattccgtcctgtatctagggagcatttaaccgggtagcaccagcaaaattgtcctgatttaatattcgatatttggtttggctatccggcccgttttcatccctaggtgaatagataatctggaaaaatcatagcttaaaac

SEQ ID NO: 42776 - DNA, 1183 bp, Zea Mays
cacaatacctatggactaatcatcctttgtcatatccaaaggtgatggatattctgaagttggcttctgagatggacttgagttgtattaaagcttataaacttgatgctctcaaatctgtacggaaaactgatgaagcaagaagccttggcatggctgataatcacagtgaagcaattgaaacaccaacagaggacccttgccatgccacagtaggtgggagatctaccagtgtagacgaagacagctcaacaacaacagtggtgttttctgataacaaaaacctaaattccaaaagatacattagcaaggcagaactcaggaagaatttaaggcagatgaagaatggacctggaagaaataattgctctggtggtagagttgaaaagtcaaaaggattttgtcctaacagctttgatcgtgtcctccttgatgctccatgttctgcgcttggcttgagacctcggctctttgctggtgaggtgtactataaatccaggggagaatgaggctttggtgagatatgcattggatacctacaaatttctttcactagtatcacagtacccgaaagttggagggcctggtattgttggttcgtgcgagctgttcaacaagacatatactgaggaatggttgagagaggatgaagctgaccttgttcagaggtttgatccgtcatcatcagtggataccattggtttcttcatcgcgaaatttgatgttggagagaaagatgaataaacaaacgtgactgaaattccaatgtttggcattcacaacttacgctagggatatcagcattgaattttctgcaatcagatggctcacgtatacccatggagtggaatgcagcgtgccccctgaaattttgtttgccagtgtttgatattttcttttgttcgaagaacattgttcattatggtgaaatgatggggcaaattagattcaagctcctgtagtcccgtttccaagaaaaaagttaccgggtacccgtatccgtccgggtgtaccgggtattttctgggtattggtcctcccattccgtcctgtatctagggagcatttaaccgggtagcaccagcaaaattgtcctgatttaatattcgatatttggtttggctatccggcccgttttcatccctaggtgaatagataatctggaaaaatcatagcttaaaac

SEQ ID NO: 42777 - DNA, 1291 bp, Zea Mays
cacaatacctatggactaatcatcctttgtcatatccaaagactacaggtgatggatattctgaagttggcttctgagatggacttgagttgtattaaagcttataaacttgatgctctcaaatctgtacggaaaactgatgaagcaagaagccttggcatggctgataatcacagtgaagcaattgaaacaccaacagaggacccttgccatgccacagtaggtgggagatctaccagtgtagacgaagacagctcaacaacaacagtggtgttttctgataacaaaaacctaaattccaaaagatacattagcaaggcagaactcaggaagaatttaaggcagatgaagaatggacctggaagaaataattgctctggtggtagagttgaaaagtcaaaaggattttgtcctaacagctttgatcgtgtcctccttgatgctccatgttctgcgcttggcttgagacctcggctctttgctggtgaggaaactctagaatcgctgaaaaaacattcgaagtatcagaggaaaatgtttgatcaagctgtcaagctagttcgtcctggtggggtgattgtttattcaacgtgtactataaatccaggggagaatgaggctttggtgagatatgcattggatacctacaaatttctttcactagtatcacagtacccgaaagttggagggcctggtattgttggttcgtgcgagctgttcaacaagacatatactgaggaatggttgagagaggatgaagctgaccttgttcagaggtttgatccgtcatcatcagtggataccattggtttcttcatcgcgaaatttgatgttggagagaaagatgaataaacaaacgtgactgaaattccaatgtttggcattcacaacttacgctagggatatcagcattgaattttctgcaatcagatggctcacgtatacccatggagtggaatgcagcgtgccccctgaaattttgtttgccagtgtttgatattttcttttgttcgaagaacattgttcattatggtgaaatgatggggcaaattagattcaagctcctgtagtcccgtttccaagaaaaaagttaccgggtacccgtatccgtccgggtgtaccgggtattttctgggtattggtcctcccattccgtcctgtatctagggagcatttaaccgggtagcaccagcaaaattgtcctgatttaatattcgatatttggtttggctatccggcccgttttcatccctaggtgaatagataatctggaaaaatcatagcttaaaac

SEQ ID NO: 42778 - DNA, 1315 bp, Zea Mays
ctatatataatctccacaatacctatggactaatcatcctttgtcatatccaaaggtgatggatattctgaagttggcttctgagatggacttgagttgtattaaagcttataaacttgatgctctcaaatctgtacggaaaactgatgaagcaagaagccttggcatggctgataatcacagtgaagcaattgaaacaccaacagaggacccttgccatgccacagtaggtgggagatctaccagtgtagacgaagacagctcaacaacaacagtggtgttttctgataacaaaaacctaaattccaaaagatacattagcaaggcagaactcaggaagaatttaaggcagatgaagaatggacctggaagaaataattgctctggtggtagagttgaaaagtcaaaaggattttgtcctaacagctttgatcgtgtcctccttgatgctccatgttctgcgcttggcttgagacctcggctctttgctggtgagacccattattatgacaggaaactctagaatcgctgaaaaaacattcgaagtatcagaggaaaatgtttgatcaagctgtcaagctagttcgtcctggtggggtgattgtttattcaacgtgtactataaatccaggggagaatgaggctttggtgagatatgcattggatacctacaaatttctttcactagtatcacagtacccgaaagttggagggcctggtattgttggttcgtgcgagctgttcaacaagacatatactgaggaatggttgagagaggatgaagctgaccttgttcagaggtttgatccgtcatcatcagtggataccattggtttcttcatcgcgaaatttgatgttggagagaaagatgaataaacaaacgtgactgaaattccaatgtttggcattcacaacttacgctagggatatcagcattgaattttctgcaatcagatggctcacgtatacccatggagtggaatgcagcgtgccccctgaaattttgtttgccagtgtttgatattttcttttgttcgaagaacattgttcattatggtgaaatgatggggcaaattagattcaagctcctgtagtcccgtttccaagaaaaaagttaccgggtacccgtatccgtccgggtgtaccgggtattttctgggtattggtcctcccattccgtcctgtatctagggagcatttaaccgggtagcaccagcaaaattgtcctgatttaatattcgatatttggtttggctatccggcccgttttcatccctaggtgaatagataatctggaaaaatcatagcttaaaac

SEQ ID NO: 42779 - DNA, 1310 bp, Zea Mays
ctatggcctgctggcctctatatataatctccacaatacctatggactaatcatcctttgtcatatccaaaggtgatggatattctgaagttggcttctgagatggacttgagttgtattaaagcttataaacttgatgctctcaaatctgtacggaaaactgatgaagcaagaagccttggcatggctgataatcacagtgaagcaattgaaacaccaacagaggacccttgccatgccacagtaggtgggagatctaccagtgtagacgaagacagctcaacaacaacagtggtgttttctgataacaaaaacctaaattccaaaagatacattagcaaggcagaactcaggaagaatttaaggcagatgaagaatggacctggaagaaataattgctctggtggtagagttgaaaagtcaaaaggattttgtcctaacagctttgatcgtgtcctccttgatgctccatgttctgcgcttggcttgagacctcggctctttgctggaaactctagaatcgctgaaaaaacattcgaagtatcagaggaaaatgtttgatcaagctgtcaagctagttcgtcctggtggggtgattgtttattcaacgtgtactataaatccaggggagaatgaggctttggtgagatatgcattggatacctacaaatttctttcactagtatcacagtacccgaaagttggagggcctggtattgttggttcgtgcgagctgttcaacaagacatatactgaggaatggttgagagaggatgaagctgaccttgttcagaggtttgatccgtcatcatcagtggataccattggtttcttcatcgcgaaatttgatgttggagagaaagatgaataaacaaacgtgactgaaattccaatgtttggcattcacaacttacgctagggatatcagcattgaattttctgcaatcagatggctcacgtatacccatggagtggaatgcagcgtgccccctgaaattttgtttgccagtgtttgatattttcttttgttcgaagaacattgttcattatggtgaaatgatggggcaaattagattcaagctcctgtagtcccgtttccaagaaaaaagttaccgggtacccgtatccgtccgggtgtaccgggtattttctgggtattggtcctcccattccgtcctgtatctagggagcatttaaccgggtagcaccagcaaaattgtcctgatttaatattcgatatttggtttggctatccggcccgttttcatccctaggtgaatagataatctggaaaaatcatagcttaaaac

SEQ ID NO: 42780 - DNA, 1127 bp, Zea Mays
attgctatggcctgctggcctctatatataatctccacaatacctatggactaatcatcctttgtcatatccaaaggtgatggatattctgaagttggcttctgagatggacttgagttgtattaaagcttataaacttgatgctctcaaatctgtacggaaaactgatgaagcaagaagccttggcatggctgataatcacagtgaagcaattgaaacaccaacagaggacccttgccatgccacagtaggtgggagatctaccagtgtagacgaagacagctcaacaacaacagtggtgttttctgacccattattatgacaggaaactctagaatcgctgaaaaaacattcgaagtatcagaggaaaatgtttgatcaagctgtcaagctagttcgtcctggtggggtgattgtttattcaacgtgtactataaatccaggggagaatgaggctttggtgagatatgcattggatacctacaaatttctttcactagtatcacagtacccgaaagttggagggcctggtattgttggttcgtgcgagctgttcaacaagacatatactgaggaatggttgagagaggatgaagctgaccttgttcagaggtttgatccgtcatcatcagtggataccattggtttcttcatcgcgaaatttgatgttggagagaaagatgaataaacaaacgtgactgaaattccaatgtttggcattcacaacttacgctagggatatcagcattgaattttctgcaatcagatggctcacgtatacccatggagtggaatgcagcgtgccccctgaaattttgtttgccagtgtttgatattttcttttgttcgaagaacattgttcattatggtgaaatgatggggcaaattagattcaagctcctgtagtcccgtttccaagaaaaaagttaccgggtacccgtatccgtccgggtgtaccgggtattttctgggtattggtcctcccattccgtcctgtatctagggagcatttaaccgggtagcaccagcaaaattgtcctgatttaatattcgatatttggtttggctatccggcccgttttcatccctaggtgaatagataatctggaaaaatcatagcttaaaac

SEQ ID NO: 42781 - DNA, 2549 bp, Zea Mays
actcggctcttgccgccgcctctgttctcgattctcccgcctcgtgctcgccgttccgcgcttcttccctacccagtcctacatcacctccccgtccgcctttggcccgcaaccggcggccctcgccgctgatggactcccactcccccacctcggcggcaccgccggcagctgctgaaacggcgcggtacacatacagcccgaggctgcggtggcagccggaagtggaggagtacttcaacacggcgtacggccgcgaccactttgcccgcatctctgaggccctggcgcatccttcttgttattcttgtatccgtgtcaatactctgaagtcttccactgatgctgtcatgcataaactgctggatttagtatgcaaaaatgagctctctgctgtaatcaatggattggaggttgttgaactgaatggtggagaccaatcacaagaagggtgctctctggtccacaagtgcccctatgcgggccttgaaaatgttttgtttgttcagggatcaggaccacatgtgctgcattatggtagccaaccagatcaagctgttaaggaagtagttgtaagtcgaaaatgtgcagagtcagttcttcggggtgcccaggtgtatgttcctggtgttttagcatgtagttcacatgttgaaaagggtgataaggttgcagtgtcagtcgctattgagcagcctgtcaaggaagatggctgggctgtgggcataacacgaggaaccgttttacaaggattgcaatcagatgcacattatgaagaaaggaagggtctgtacattggtcaaggaactgctgcaatgtcaagatctgcaatatttcgtgttcctcatgggattgcagtagagatgactgagagggtatacaagctcccatctttcaatgatgtgcttgaaggggaaatatttcttcagaatttaccaagtgttgtgacggctcgtgtccttgatccccagtcaggagagcgaatactagatatgtgcgctgctcctggaggaaaaacaacagcaattgctatccttatgagggacgaaggagaagttgttgcccttgatagatctcacaataagaatctcaattggctgatttcttcaccaaagcgcaaacaagagctcaacatcattttcacttgatcaaactcaatgcttcgtatcctccatttccaccttgagtttgagggtggggggggggggtttaaggcccatcgcccgtcctattgctatggcctgctggcctctatatataatctccacaatacctatggactaatcatcctttgtcatatccaaaggtgatggatattctgaagttggcttctgagatggacttgagttgtattaaagcttataaacttgatgctctcaaatctgtacggaaaactgatgaagcaagaagccttggcatggctgataatcacagtgaagcaattgaaacaccaacagaggacccttgccatgccacagtaggtgggagatctaccagtgtagacgaagacagctcaacaacaacagtggtgttttctgataacaaaaacctaaattccaaaagatacattagcaaggcagaactcaggaagaatttaaggcagatgaagaatggacctggaagaaataattgctctggtggtagagttgaaaagtcaaaaggattttgtcctaacagctttgatcgtgtcctccttgatgctccatgttctgcgcttggcttgagacctcggctctttgctggtgaggaaactctagaatcgctgaaaaaacattcgaagtatcagaggaaaatgtttgatcaagctgtcaagctagttcgtcctggtggggtgattgtttattcaacgtgtactataaatccaggggagaatgaggctttggtgagatatgcattggatacctacaaatttctttcactagtatcacagtacccgaaagttggagggcctggtattgttggttcgtgcgagctgttcaacaagacatatactgaggaatggttgagagaggatgaagctgaccttgttcagaggtttgatccgtcatcatcagtggataccattggtttcttcatcgcgaaatttgatgttggagagaaagatgaataaacaaacgtgactgaaattccaatgtttggcattcacaacttacgctagggatatcagcattgaattttctgcaatcagatggctcacgtatacccatggagtggaatgcagcgtgccccctgaaattttgtttgccagtgtttgatattttcttttgttcgaagaacattgttcattatggtgaaatgatggggcaaattagattcaagctcctgtagtcccgtttccaagaaaaaagttaccgggtacccgtatccgtccgggtgtaccgggtattttctgggtattggtcctcccattccgtcctgtatctagggagcatttaaccgggtagcaccagcaaaattgtcctgatttaatattcgatatttggtttggctatccggcccgttttcatccctaggtgaatagataatctggaaaaatcatagcttaaaac

SEQ ID NO: 42782 - DNA, 2357 bp, Zea Mays
ctgtaaaacacataacccatagtttgcttgctccactcggctcttgccgccgcctctgttctcgattctcccgcctcgtgctcgccgttccgcgcttcttccctacccagtcctacatcacctccccgtccgcctttggcccgcaaccggcggccctcgccgctgatggactcccactcccccacctcggcggcaccgccggcagctgctgaaacggcgcggtacacatacagcccgaggctgcggtggcagccggaagtggaggagtacttcaacacggcgtacggccgcgaccactttgcccgcatctctgaggccctggcgcatccttcttgttattcttgtatccgtgtcaatactctgaagtcttccactgatgctgtcatgcataaactgctggatttagtatgcaaaaatgagctctctgctgtaatcaatggattggaggttgttgaactgaatggtggagaccaatcacaagaagggtgctctctggtccacaagtgcccctatgcgggccttgaaaatgttttgtttgttcagggatcaggaccacatgtgctgcattatggtagccaaccagatcaagctgttaaggaagtagttgtaagtcgaaaatgtgcagagtcagttcttcggggtgcccaggtgtatgttcctggtgttttagcatgtagttcacatgttgaaaagggtgataaggttgcagtgtcagtcgctattgagcagcctgtcaaggaagatggctgggctgtgggcataacacgaggaaccgttttacaaggattgcaatcagatgcacattatgaagaaaggaagggtctgtacattggtcaaggaactgctgcaatgtcaagatctgcaatatttcgtgttcctcatgggattgcagtagagatgactgagagggtatacaagctcccatctttcaatgatgtgcttgaaggggaaatatttcttcagaatttaccaagtgttgtgacggctcgtgtccttgatccccagtcaggagagcgaatactagatatgtgcgctgctcctggaggaaaaacaacagcaattgctatccttatgagggacgaaggagaagttgttgcccttgatagatctcacaataaggtgatggatattctgaagttggcttctgagatggacttgagttgtattaaagcttataaacttgatgctctcaaatctgtacggaaaactgatgaagcaagaagccttggcatggctgataatcacagtgaagcaattgaaacaccaacagaggacccttgccatgccacagtaggtgggagatctaccagtgtagacgaagacagctcaacaacaacagtggtgttttctgataacaaaaacctaaattccaaaagatacattagcaaggcagaactcaggaagaatttaaggcagatgaagaatggacctggaagaaataattgctctggtggtagagttgaaaagtcaaaaggattttgtcctaacagctttgatcgtgtcctccttgatgctccatgttctgcgcttggcttgagacctcggctctttgctggaaactctagaatcgctgaaaaaacattcgaagtatcagaggaaaatgtttgatcaagctgtcaagctagttcgtcctggtggggtgattgtttattcaacgtgtactataaatccaggggagaatgaggctttggtgagatatgcattggatacctacaaatttctttcactagtatcacagtacccgaaagttggagggcctggtattgttggttcgtgcgagctgttcaacaagacatatactgaggaatggttgagagaggatgaagctgaccttgttcagaggtttgatccgtcatcatcagtggataccattggtttcttcatcgcgaaatttgatgttggagagaaagatgaataaacaaacgtgactgaaattccaatgtttggcattcacaacttacgctagggatatcagcattgaattttctgcaatcagatggctcacgtatacccatggagtggaatgcagcgtgccccctgaaattttgtttgccagtgtttgatattttcttttgttcgaagaacattgttcattatggtgaaatgatggggcaaattagattcaagctcctgtagtcccgtttccaagaaaaaagttaccgggtacccgtatccgtccgggtgtaccgggtattttctgggtattggtcctcccattccgtcctgtatctagggagcatttaaccgggtagcaccagcaaaattgtcctgatttaatattcgatatttggtttggctatccggcccgttttcatccctaggtgaatagataatctggaaaaatcatagcttaaaac

SEQ ID NO: 42783 - DNA, 1117 bp, Zea Mays
ctccactcggctcttgccgccgcctctgttctcgattctcccgcctcgtgctcgccgttccgcgcttcttccctacccagtcctacatcacctccccgtccgcctttggcccgcaaccggcggccctcgccgctgatggactcccactcccccacctcggcggcaccgccggcagctgctgaaacggcgcggtacacatacagcccgaggctgcggtggcagccggaagtggaggagtacttcaacacggcgtacggccgcgaccactttgcccgcatctctgaggccctggcgcatccttcttgttattcttgtatccgtgtcaatactctgaagtcttccactgatgctgtcatgcataaactgctggatttagtatgcaaaaatgagctctctgctgtaatcaatggattggaggttgttgaactgaatggtggagaccaatcacaagaagggtgctctctggtccacaagtgcccctatgcgggccttgaaaatgttttgtttgttcagggatcaggaccacatgtgctgcattatggtagccaaccagatcaagctgttaaggaagtagttgtaagtcgaaaatgtgcagagtcagttcttcggggtgcccaggtgtatgttcctggtgttttagcatgtagttcacatgttgaaaagggtgataaggttgcagtgtcagtcgctattgagcagcctgtcaaggaagatggctgggctgtgggcataacacgaggaaccgttttacaaggattgcaatcagatgcacattatgaagaaaggaagggtctgtacattggtcaaggaactgctgcaatgtcaagatctgcaatatttcgtgttcctcatgggattgcagtagagatgactgagaggatgtgcttgaaggggaaatatttcttcagaatttaccaagtgttgtgacggctcgtgtccttgatccccagtcaggagagcgaatactagatatgtgcgctgctcctggaggaaaaacaacagcaattgctatccttatgagggacgaaggagaagttgttgcccttgatagatctcacaataagatcgttatggttttccacgggctgctacagtaattgttgaaccatctacttat

SEQ ID NO: 42784 - DNA, 1146 bp, Zea Mays
cttgctccactcggctcttgccgccgcctctgttctcgattctcccgcctcgtgctcgccgttccgcgcttcttccctacccagtcctacatcacctccccgtccgcctttggcccgcaaccggcggccctcgccgctgatggactcccactcccccacctcggcggcaccgccggcagctgctgaaacggcgcggtacacatacagcccgaggctgcggtggcagccggaagtggaggagtacttcaacacggcgtacggccgcgaccactttgcccgcatctctgaggccctggcgcatccttcttgttattcttgtatccgtgtcaatactctgaagtcttccactgatgctgtcatgcataaactgctggatttagtatgcaaaaatgagctctctgctgtaatcaatggattggaggttgttgaactgaatggtggagaccaatcacaagaagggtgctctctggtccacaagtgcccctatgcgggccttgaaaatgttttgtttgttcagggatcaggaccacatgtgctgcattatggtagccaaccagatcaagctgttaaggaagtagttgtaagtcgaaaatgtgcagagtcagttcttcggggtgcccaggtgtatgttcctggtgttttagcatgtagttcacatgttgaaaagggtgataaggttgcagtgtcagtcgctattgagcagcctgtcaaggaagatggctgggctgtgggcataacacgaggaaccgttttacaaggattgcaatcagatgcacattatgaagaaaggaagggtctgtacattggtcaaggaactgctgcaatgtcaagatctgcaatatttcgtgttcctcatgggattgcagtagagatgactgagagggtatacaagctcccatctttcaatgatgtgcttgaaggggaaatatttcttcagaatttaccaagtgttgtgacggctcgtgtccttgatccccagtcaggagagcgaatactagatatgtgcgctgctcctggaggaaaaacaacagcaattgctatccttatgagggacgaaggagaagttgttgcccttgatagatctcacaataagatcgttatggttttccacgggctgctacagtaattgttgaaccatctacttat

SEQ ID NO: 42785 - DNA, 1124 bp, Zea Mays
actcggctcttgccgccgcctctgttctcgattctcccgcctcgtgctcgccgttccgcgcttcttccctacccagtcctacatcacctccccgtccgcctttggcccgcaaccggcggccctcgccgctgatggactcccactcccccacctcggcggcaccgccggcagctgctgaaacggcgcggtacacatacagcccgaggctgcggtggcagccggaagtggaggagtacttcaacacggcgtacggccgcgaccactttgcccgcatctctgaggccctggcgcatccttcttgttattcttgtatccgtgtcaatactctgaagtcttccactgatgctgtcatgcataaactgctggatttagtatgcaaaaatgagctctctgctgtaatcaatggattggaggttgttgaactgaatggtggagaccaatcacaagaagggtgctctctggtccacaagtgcccctatgcgggccttgaaaatgttttgtttgttcagggatcaggaccacatgtgctgcattatggtagccaaccagatcaagctgttaaggaagtagttgtaagtcgaaaatgtgcagagtcagttcttcggggtgcccaggtgtatgttcctggtgttttagcatgtagttcacatgttgaaaagggtgataaggttgcagtgtcagtcgctattgagcagcctgtcaaggaagatggctgggctgtgggcataacacgaggaaccgttttacaaggattgcaatcagatgcacattatgaagaaaggaagggtctgtacattggtcaaggaactgctgcaatgtcaagatctgcaatatttcgtgttcctcatgggattgcagtagagatgactgagagggtatacaagctcccatctttcaatgatgtgcttgaaggggaaatatttcttcagaatttaccaagtgttgtgacggctcgtgtccttgatccccagtcaggagagcgaatactagatatgtgcgctgctcctggaggaaaaacaacagcaattgctatccttatgagggacgaaggagaagttgttgcccttgatagatctcacaataaggatattgtcttcgtgaccgtggaaacattgaacctccag

SEQ ID NO: 42786 - DNA, 410 bp, Zea Mays
cttccattttattgtttagttcgccactgtgtccttgtatgtcttgtgctacttttgtgctactttcattatattcatacatatgcatcttgcacctcatataggaccgagagatgatgatcgagcagtgatgtggtgccacccacaagatgccgttggtggacgacctgaagaatggacataatcagtggatgctcgccaagcgagtgccacccagcaaacactgtctaagtgttaaattaaaggcaagccccggttttatgcataacctgttctatatgctattttaccgcacttaatgtttgtaggattgtactgtgcacttaagtgtaggagttgattgaaaccctagttgcatgaactcaggattcctttttgagatggatactagtatgctaggtcgagtagct

SEQ ID NO: 42787 - DNA, 1343 bp, Zea Mays
acgtcctgtctcacctgtcatacgcggttacgtccccttcgccccccgtttgggctccagaagcttccccttccgtctccatatcttcttcttggtccgccgtctccactccgcgttccctggctccctgcgttgcgtcttgggggagagagagaagtgggagacccgcgagaggctgccgtgtagggactagggaccgtagagtaagcgacagcgaaggagggagagggggatggccgggatcgggccgatcaggcaggactgggagccggtggttgtgcggaagaaggcacccaccgccgctgccaagaaggatgagaaggccgtcaacgccgcgcgccgctccggcgcggagatcgagaccatgaagaagttcaacgctggtatgaacaaggcggcgtccagcggcacatccctcaacaccaagcgcctcgacgacgacacagagaacctcgccctgtgggtgcttgcttcacaatggttattccctatgcttttatctatgatgctggtgttggagctataaagacgttactggccaggacaaggtgcaatattttgatgatcaccttgttatgcctgtaccatgtagtccaatgctaatgaccatggtctcattttagtcgcaaggatataaaaatttactacagattagatttggtttttctacaaggatttcaaaattgtcgaactattgaacctgaacatgagttgagtcatgcagaagattgccctaagctttctgcatgatatccttttcatgatagtaataacttgggctctcctcacttatgctagatgagcgagttccaagtgacctgaagaaaaatctcatgcaagcaaggctcgataagaagttgacccaggcacagcttgctcagatgatcaatgagaagccacaggtgatccaggagtatgagtcaggcaaggcaattcccaaccagcagatcattggcaagctcgagagggccctgggaacgaagctgcgtggcaagaaataaccaggagcatcatagcgaagacaaggcaaactgtctgcttattatttgctatgtttggtatctcaagtcatgcggactgtttgtgttggtacaagagtgaattaactgtgttctcctgaatgcttgctgcttgtcatatgagtatatgatctagctctaaaaaaattgtgatgaagatgtcaactgatatgacaacctcataaccagcgtgatcaagatgatgctcattactgcagtttggcactgacctctgtcaccggtaatatttttctactagtacatttagcctcatatgttgacgagcgtcgcatagcatagcagttatgaagctcaaattactga

SEQ ID NO: 42788 - DNA, 1577 bp, Zea Mays
ctaatcattccccaagagccatcatagctcctcatcgccgtgagcaagagagagagagatggtccatgtcgctgttctggatctacggagccttggagcttctgtggaggggtcgttgggtctgcagagacgtaaggacggtgttcgtgtccagcggggtgtgactgctagcgggtggtcgacaatttcttgtcggccttgtagtgtcaccgtggaacctgggagtgccatggaccgaagtcccttctttatcatacttggtgagatctgttccctatagttcgtagtattatctgcattgtgtatcatctatttgcgaggggttcggctcactgaaaagcctgggcgcctagcgctggctatggcaccgccgtgacgtcgctcgcgccaccgtacggagccatcgggctagggaagatgaccctccgaccgttcgatcaggtttgggcggtggagattagacagtcaagtattgttctgtgaggatgggtcagggccgtcgatcagtgatctggccgttctgactagatcacgggttaataaaatccggggcatcgattcaagatgagatggatctggttacgtaacgtttcgttaaagttttgatctaatctatgtcatagatttgtaatctgatggccagggtacactgataccccttcggcctcgttaatttgctaaagagactctacatttcattttattcaacccgtagtccacgtcagtttaaagaacattgaaactacacccctcgttttttataaagtacaccctgaacctctaggaaatccaatccacagcaaaatctcttaattttataaataaaatccaaaaagacaattttaagtataaaagtaattccataaatttagaaaatccttatctttcacgttataacgccgatttaacccattccaaaggtgttagcttcgtattaatattacctacatgttaaccacatttgttttagtattttcaaaaataataatatttgtttattagattgacttttctaatctatgtttgactaaaggatgatttagttataacctgaaataaaatttaataaagttagtaatatatgttctcacatgatttatattaatcaacatggaatatagttttattgtttaaacacctaagaattttagaaaatcgtatcttttcaaccgtaactctgtttttagtggttctcgaacctacgatctcgtagaggcacgtaggatattcttacgctgtttgttcatatgctttggtgtaatgttactatatccattattttcttgaatgtatgtattgctacgagtagaggcgaagtgacgaggaatcagaagcccaacttttgggtcaacatctagacaacaggttattgcaagtataaggcaagttctgcccttgatcactattctttacccaataatgttcttgttaatcaatgtgacatgctcaggtttattttatggggcctaataggttaccctagttttgtttaccccacaccttgcaaacaaatgaactattgggtagacttgctattgctctacctggttttgggattaatattatatttgaattag

SEQ ID NO: 42789 - DNA, 498 bp, Zea Mays
gttctcctttgccggactctagggtacttatatccatactccacggtcatctcgctcatctaatcattccccaagagccatcatagctcctcatcgccgtgagcaagagagagagagatggtccatgtcgctgttctggatctacggagccttggagcttctgtggaggggtcgttgggtctgcagagacgtaaggacggtgttcgtgtccagcggggtgtgactgctagcgggtggtcgacaatttcttgtcggccttgtagtgtcaccgtggaacctgggagtgccatggaccgaagtcccttctttatcatacttgaggcgaagtgacgaggaatcagaagcccaacttttgggtcaacatctagacaacaggttattgcaagtataaggcaagttctgcccttgatcactattctttacccaataatgttcttgttaatcaatgtgacatgctcaggtttattttatggggcctaataggttaccctagttttg

SEQ ID NO: 42790 - DNA, 1577 bp, Zea Mays
ccgaagttgacatgggaagagatactaaacgaagacttaaaaggatgatgagcatcaacaagagcatccaccagagacacaagggtgattagcaagtacctgggcacgaagaggctcaaagtcatcacgtggacgagtcaagaagtcatttgtgcgacgaaactcaaggtacttctctaagcaccgaggaggttttgtattgagtgcacaagaaactgttaaggaacacttcactagccatgtctgatgtttgtgatgagaaaccacatccagaggtttctgctgatcctatatgttcaaggaactgcatttatggggatgatgactgggttatagtcaagaaacagcgtatcaccatattaattcctccacaaccacctgttgctgcaaatcctcaatcaaatatgcccacaataagttctaagcagtcttgcataactaggagcaagagagactgggatgctgccagaaaaaagcaccccgagaagtttgcagccaagaaatatttggactcccctccagtgcatggcagtataatccatgaggatgttccatttatgacaggtgataaatcacaacacggttctgctatccctgttgcaaaatcagaatggactaaagacccggatcatgctgttcgagaattgtttcatcaagaaactgggaaggcgacaagtttctttcgaaacatcgttcagccaaggacgccacttgtgtcttcacctgttgcggataagataattcgagcccagcttcttgagaaacaggttgctgggtttggcgggctgaggaattggcttttcggttgtggtcttggatggtttgtcaacatactggacagtgaaaagctggggacgtatcagcttgcctctcttactatggaacagctgaaagatatgggtcttgttgctgtaggtccacggaggaaactgatccacgctatcgacagtttatgcggcccgcaccatgctgagatgctttcttgatcccttgcattttagttagctagaaggaaaattattacaggaaggatgtctgaagtggtctctggttgtagccaactcggtgactgaagtccatacatttcttttatggatagcatttcaatcatggccgcaactgaagtgccagagcgttttggaagtagaaaatgcgcaaagttttggaagtgaagctagcagtgaaagttttggaagtagaaaacgtacaactgctagagttcttccttctatgaaacacgttttcagattattacctccaagcacatctgactacaaaaaagactgtaccttgtaatcctgcagatatgcttctctctaagttgcacatacgttattatgaatgtgttggctgtagaaaacgtacaactgctagagtgttctttgaaacacgtttttagttattacctacaagcacatctgactacaaaaaagaatacattgtaatcttgcagatatgcttctctctaagttgcagatacgcaacacgaagaatatgggagcaatataaaggcaaacaaacaagctctcttaacatctataacaagttaaacaaaaaggttaccacaaaaaaaaaga

SEQ ID NO: 42791 - DNA, 1516 bp, Zea Mays
cgaagacttaaaaggatgatgagcatcaacaagagcatccaccagagacacaagggtgattagcaagtacctgggcacgaagaggctcaaagtcatcacgtggacgagtcaagaagtcatttgtgcgacgaaactcaaggttagtcttctgagtgggatagaactcacatgtgctaggagacatatgtggaccaaagtatcaagttgacgcctgacaatagacatccgactgtagaactcatcaactatagaatcaccctaacataaggactactgacgaataccatcaagataagtagagtgactcaagataagtagagtgaccagtacgctcctagcgattttaagaagggtccacatttgatgagaactgtcacactgaataacctctgcagcaaagcggtcctccatactagcagtgagaatagaaccagctcgagcatcctcatccagccatatccaatatgcactatactgagcctcatatgatgccagctgatcaccataatatgcaagcagctgctccttagcctcaggagttaccttatctgatatcacagattgggctggagccttaggacgatgcgggtagagaagttcgccagtaagaaaatcacatagacgaagaccacacatatgccaccgcatgtgagaaacccaaacacgatagttagtgccatcaaagatgagcagacaacgtgtaatggtacacccccgttcggcgcagacgaagagcaacaatcgatgacgagagcgcagaggaataagcggtgcaagcagcagtttttttactattctcctaacaggtcagagcagaggaaccggcgggtgttcctaacagagcaaagcagaggaagagaaaaatggtcagtccggcggctggaagaccggtgagcatgcagaatgtgggcgagcaggccggtcgggtggggtgctgcgcgccaggtggacggatgaccgacaggaagaccgcacgtgccaggcaggcggacggctggcgggtgagaagaactgcgtggggtggatgtgctgcaccgcgacaagtggctgctctgcagcatggcgagcggctgctgttcagcgcctacagatgcgccctgcagcacaagccggtgtcgattggcggcagacagaacaaagtgtgtaggaaagattagagagaagagaaaaaataatcctaaaatctaccttggattaccataataccatgttatgaatagcacatgaggccctaaggccagtatatatacacggcatgatagtaaatatgcactaaacctcttatacaatggggaagtatagtaaaacataaatatacatctaacactgataacattgtaacatacttacatctgtgaactgagttttaatgcattgattttaccattgcaagcaatggaacgctatggtagtaagagagctaacaatatgccacacatggatttgatggctatgaataatgaacagttgactgattagatatatatagacttaattatttgaaaactgaagaaac

SEQ ID NO: 42792 - DNA, 1446 bp, Zea Mays
cacaaattgaccgccattgtgcaaaccagaaccccttcgccattttcaccaactccctccgatcccggccatggcgggggaggactgccgctccggcgcggaaatggacgcgctcgtacgacgcttgaagctccaccggccgtccccatccccctacgaccccgatccggccgcggcccccgtccccgccaccgccggcgacggcgagctgttccggccgcggagagctgccgtgcttgtctgcctcttccggggagacggcggcgagctccgcgtcatcctcactaagcgctcgtcctccctctccacccactccgccgccagccgccatcgcgcgctccagctatcgcgcccagacgcagacgccatcgcgcgctccaggcctccagccgccatcgcgcccaaacgcagagtcgcagacgccatcgcgccaggagccgccagccgccagacgccgtcggtcgccctccaggctccaggtatgccgccgggccccctcctccctccgccctccaggacccaggtatgccgtcggccgccctccagatccagtgtgataaactgcttagtatatgggaagcaggtcaatgtctactgtgtgttcataaactgcttagtataaccagtgtgataatcaccaccactcctaatcccttggttgctgatgttcatattgaataatcaccaccactcctaatcccttggctgctgatgttcataatcccactcatattgaataatcaccaccactcttaatcccttggctgctgatgttcataaactgcttagtataaccagtgtgataactgaataatcagcaccattctcctaatccttagttcttcattggttaaatggttacttttatttgcatttgtagatgcataccaaaaagaggaataggttggagcacaaaaggttgaatgacttggtatatgtttcatacaacaaaaagatggctgataggtttcaaaaaatacgtgaggaaggaaaaaactttgatcctttgattttagaagactttgattgggacaatgaatgggttgatccattagctaattcttctcatgttagcaatgctcttggagatggtttcaatttatcgtgggaccaagttgatgaagctattggtgcatctgcacatctcagaggtcgtaattttcctaggagagctgctggtgggtgtgtgagaaggaatgaagaccttgaggaagaggagactaatttagcaaatgaagatgacgaggatgaggaatatattcttgatgatcttgatgtggaagatgaaattgaaggaagcaatagtggaaacgatggtgatgatcaaggcgtggatgctcatggtcttaatattgatgagttcggtgatggttactaatcatgcatgaaagttgtaacttgtgttgtgtgtttgaacttgtgttgttgaacttgatctgtttcttt

SEQ ID NO: 42793 - DNA, 1361 bp, Zea Mays
gagctgttggggctccgggtgatgcggcatggatagataccaaagggtagagaagcctcggaatgacacaccaatcagccagaatgagattaggattactactcaggggaggatgaggaactatatcagctatgggatgtcgctgcttgagcgcccctcccccgcgcccgcattgtccagcgaaacaagcacatgcaagcacgtgaagcccaactctgcatgtccgacacatgcagcttgcatgaaaatggacacgatgagattagtatcaaggccatgggacaggccataaataagacagttatggttgttgaattgattaagagaagggttggaggtcttcatcagaacagtgccactgaatctgttgatatcacagacacatgggaacctttggaagaaggccttctcccactagagacaactcgccatgtgtcgatgatcactgtgacgttatcaaagaagcctctggatacatcatctccaggataccaaccacctatcccagctgaagaagtgaaacctgcttttgactatgaccatgaagattcgtatcctactggccgtggaagaggacgtggtggtgggagaagaggcaggggaagaggtatgagcaatggtccctctccacccgcttatggttacaatgaagagtggggtgaggaaggagattactataatagagggcgtgggagaggaaggtcacgtggacgaggcagagtgcgtggtggctacagttatggctatggtgcgagaggcgggtactatgaagagcaagacgaatactatgatgatcctgaagaatatgcccctccaggccgtcgtgggcgtggcagaggaagaagggggatgccttggcgtggccgtggagtctactactagacgatgcgatgcgatgcgatgcgatgcgacatgccaaacgggtgtgctgaagctagcaatggcgtgcttggttggttatctgttctatggagttccgacccagactagaattacccagcagggtccttccaggtgctgtgcctgtgcaactcgtctgggcaagttttgtggctcgctcgtggttttgtagctaggttaagcgagtgaagtttaatcactcggtagcagtgttttcccccttcggacggcatgcatgttgtttattttgctgctaatctacctaccttccaattttgtatggatggtgatggatactggatgcatcagtttcatatttttttttctcctggtaaatctgtagtttttataaagacggttacactgatacctgatgacaagatgaggcaggaagtttgttatgctgcagaataagagcagcatgaaaaaaaatgaatacagctatcgttgttagtgtacta

SEQ ID NO: 42794 - DNA, 1333 bp, Zea Mays
cttccctccgctcccattcacggcgtcgttgtcacgggagctgttggggctccgggtgatgcggcatggatagataccaaagggtagagaagcctcggaatgacacaccaatcagccagaatgagattaggattactactcaggggaggatgaggaactatatcagctatgggatgtcgctgcttgaggaaaatggacacgatgagattagtatcaaggccatgggacaggccataaataagacagttatggttgttgaattgattaagagaagggttggaggtcttcatcagaacagtgccactgaatctgttgatatcacagacacatgggaacctttggaagaaggccttctcccactagagacaactcgccatgtgtcgatgatcactgtgacgttatcaaagaagcctctggatacatcatctccaggataccaaccacctatcccagctgaagaagtgaaacctgcttttgactatgaccatgaagattcgtatcctactggccgtggaagaggacgtggtggtgggagaagaggcaggggaagaggtatgagcaatggtccctctccacccgcttatggttacaatgaagagtggggtgaggaaggagattactataatagagggcgtgggagaggaaggtcacgtggacgaggcagagtgcgtggtggctactatggaggcgggaggcgtggtggctacagttatggctatggtgcgagaggcgggtactatgaagagcaagacgaatactatgatgatcctgaagaatatgcccctccaggccgtcgtgggcgtggcagaggaagaagggggatgccttggcgtggccgtggagtctactactagacgatgcgatgcgatgcgatgcgatgcgacatgccaaacgggtgtgctgaagctagcaatggcgtgcttggttggttatctgttctatggagttccgacccagactagaattacccagcagggtccttccaggtgctgtgcctgtgcaactcgtctgggcaagttttgtggctcgctcgtggttttgtagctaggttaagcgagtgaagtttaatcactcggtagcagtgttttcccccttcggacggcatgcatgttgtttattttgctgctaatctacctaccttccaattttgtatggatggtgatggatactggatgcatcagtttcatatttttttttctcctggtaaatctgtagtttttataaagacggttacactgatacctgatgacaagatgaggcaggaagtttgttatgctgcagaataagagcagcatgaaaaaaaatgaatacagctatcgttgttagtgtacta

SEQ ID NO: 42795 - DNA, 1302 bp, Zea Mays
gttggggatacgggttccgtcgtcgccaccgggcatggatagataccaaagggtagagaagcctcggaatgacacaccaatcagccagaatgagattaggattactactcaggggaggatgaggaactatatcagctatgggatgtcgctgcttgaggaaaatggacacgatgagattagtatcaaggccatgggacaggccataaataagacagttatggttgttgaattgattaagagaagggttggaggtcttcatcagaacagtgccactgaatctgttgatatcacagacacatgggaacctttggaagaaggccttctcccactagagacaactcgccatgtgtcgatgatcactgtgacgttatcaaagaagcctctggatacatcatctccaggataccaaccacctatcccagctgaagaagtgaaacctgcttttgactatgaccatgaagattcgtatcctactggccgtggaagaggacgtggtggtgggagaagaggcaggggaagaggtatgagcaatggtccctctccacccgcttatggttacaatgaagagtggggtgaggaaggagattactataatagagggcgtgggagaggaaggtcacgtggacgaggcagagtgcgtggtggctactatggaggcgggaggcgtggtggctacagttatggctatggtgcgagaggcgggtactatgaagagcaagacgaatactatgatgatcctgaagaatatgcccctccaggccgtcgtgggcgtggcagaggaagaagggggatgccttggcgtggccgtggagtctactactagacgatgcgatgcgatgcgatgcgatgcgacatgccaaacgggtgtgctgaagctagcaatggcgtgcttggttggttatctgttctatggagttccgacccagactagaattacccagcagggtccttccaggtgctgtgcctgtgcaactcgtctgggcaagttttgtggctcgctcgtggttttgtagctaggttaagcgagtgaagtttaatcactcggtagcagtgttttcccccttcggacggcatgcatgttgtttattttgctgctaatctacctaccttccaattttgtatggatggtgatggatactggatgcatcagtttcatatttttttttctcctggtaaatctgtagtttttataaagacggttacactgatacctgatgacaagatgaggcaggaagtttgttatgctgcagaataagagcagcatgaaaaaaaatgaatacagctatcgttgttagtgtacta

SEQ ID NO: 42796 - DNA, 1333 bp, Zea Mays
cacacacctccctttcttcctcctccgccccgtctcgattcgtcgagggttcgttggattcgggcatggatagataccaaagggtagagaagcctcggaatgacacaccaatcagccagaatgagattaggattactactcaggggaggatgaggaactatatcagctatgggatgtcgctgcttgaggaaaatggacacgatgagattagtatcaaggccatgggacaggccataaataagacagttatggttgttgaattgattaagagaagggttggaggtcttcatcagaacagtgccactgaatctgttgatatcacagacacatgggaacctttggaagaaggccttctcccactagagacaactcgccatgtgtcgatgatcactgtgacgttatcaaagaagcctctggatacatcatctccaggataccaaccacctatcccagctgaagaagtgaaacctgcttttgactatgaccatgaagattcgtatcctactggccgtggaagaggacgtggtggtgggagaagaggcaggggaagaggtatgagcaatggtccctctccacccgcttatggttacaatgaagagtggggtgaggaaggagattactataatagagggcgtgggagaggaaggtcacgtggacgaggcagagtgcgtggtggctactatggaggcgggaggcgtggtggctacagttatggctatggtgcgagaggcgggtactatgaagagcaagacgaatactatgatgatcctgaagaatatgcccctccaggccgtcgtgggcgtggcagaggaagaagggggatgccttggcgtggccgtggagtctactactagacgatgcgatgcgatgcgatgcgatgcgacatgccaaacgggtgtgctgaagctagcaatggcgtgcttggttggttatctgttctatggagttccgacccagactagaattacccagcagggtccttccaggtgctgtgcctgtgcaactcgtctgggcaagttttgtggctcgctcgtggttttgtagctaggttaagcgagtgaagtttaatcactcggtagcagtgttttcccccttcggacggcatgcatgttgtttattttgctgctaatctacctaccttccaattttgtatggatggtgatggatactggatgcatcagtttcatatttttttttctcctggtaaatctgtagtttttataaagacggttacactgatacctgatgacaagatgaggcaggaagtttgttatgctgcagaataagagcagcatgaaaaaaaatgaatacagctatcgttgttagtgtacta

SEQ ID NO: 42797 - DNA, 1311 bp, Zea Mays
ctgaaaccgcccccacgtccccctccccgcaccgcagagccagtcagaacagtaacaccggagcggcagctgcagtggccgaggccggagcacgcaaggcatggatagataccaaagggtagagaagcctcggaatgacacaccaatcagccagaatgagattaggattactactcaggggaggatgaggaactatatcagctatgggatgtcgctgcttgaggaaaatggacacgatgagattagtatcaaggccatgggacaggccataaataagacagttatggttgttgaattgattaagagaagggttggaggtcttcatcagaacagtgccactgaatctgttgatatcacagacacatgggaacctttggaagaaggccttctcccactagagacaactcgccatgtgtcgatgatcactgtgacgttatcaaagaagcctctggatacatcatctccaggataccaaccacctatcccagctgaagaagtgaaacctgcttttgactatgaccatgaagattcgtatcctactggccgtggaagaggacgtggtggtgggagaagaggcaggggaagaggtatgagcaatggtccctctccacccgcttatggttacaatgaagagtggggtgaggaaggagattactataatagagggcgtgggagaggaaggtcacgtggacgaggcagagtgcgtggtggctactatggagagcaagacgaatactatgatgatcctgaagaatatgcccctccaggccgtcgtgggcgtggcagaggaagaagggggatgccttggcgtggccgtggagtctactactagacgatgcgatgcgatgcgatgcgatgcgacatgccaaacgggtgtgctgaagctagcaatggcgtgcttggttggttatctgttctatggagttccgacccagactagaattacccagcagggtccttccaggtgctgtgcctgtgcaactcgtctgggcaagttttgtggctcgctcgtggttttgtagctaggttaagcgagtgaagtttaatcactcggtagcagtgttttcccccttcggacggcatgcatgttgtttattttgctgctaatctacctaccttccaattttgtatggatggtgatggatactggatgcatcagtttcatatttttttttctcctggtaaatctgtagtttttataaagacggttacactgatacctgatgacaagatgaggcaggaagtttgttatgctgcagaataagagcagcatgaaaaaaaatgaatacagctatcgttgttagtgtacta

SEQ ID NO: 42798 - DNA, 1398 bp, Zea Mays
ccagtttgcgaggacgatgcgggcgcacgcagcggcatcgcaggacgcagcaaagccctgaaaccgcccccacgtccccctccccgcaccgcagagccagtcagaacagtaacaccggagcggcagctgcagtggccgaggccggagcacgcaaggcatggatagataccaaagggtagagaagcctcggaatgacacaccaatcagccagaatgagattaggattactactcaggggaggatgaggaactatatcagctatgggatgtcgctgcttgaggaaaatggacacgatgagattagtatcaaggccatgggacaggccataaataagacagttatggttgttgaattgattaagagaagggttggaggtcttcatcagaacagtgccactgaatctgttgatatcacagacacatgggaacctttggaagaaggccttctcccactagagacaactcgccatgtgtcgatgatcactgtgacgttatcaaagaagcctctggatacatcatctccaggataccaaccacctatcccagctgaagaagtgaaacctgcttttgactatgaccatgaagattcgtatcctactggccgtggaagaggacgtggtggtgggagaagaggcaggggaagaggtatgagcaatggtccctctccacccgcttatggttacaatgaagagtggggtgaggaaggagattactataatagagggcgtgggagaggaaggtcacgtggacgaggcagagtgcgtggtggctacagttatggctatggtgcgagaggcgggtactatgaagagcaagacgaatactatgatgatcctgaagaatatgcccctccaggccgtcgtgggcgtggcagaggaagaagggggatgccttggcgtggccgtggagtctactactagacgatgcgatgcgatgcgatgcgatgcgacatgccaaacgggtgtgctgaagctagcaatggcgtgcttggttggttatctgttctatggagttccgacccagactagaattacccagcagggtccttccaggtgctgtgcctgtgcaactcgtctgggcaagttttgtggctcgctcgtggttttgtagctaggttaagcgagtgaagtttaatcactcggtagcagtgttttcccccttcggacggcatgcatgttgtttattttgctgctaatctacctaccttccaattttgtatggatggtgatggatactggatgcatcagtttcatatttttttttctcctggtaaatctgtagtttttataaagacggttacactgatacctgatgacaagatgaggcaggaagtttgttatgctgcagaataagagcagcatgaaaaaaaatgaatacagctatcgttgttagtgtacta

SEQ ID NO: 42799 - DNA, 1304 bp, Zea Mays
cggcccagtttgcgaggacgatgcgggcgcacgcagcggcatcgcaggacgcagcaaagccctgaaaccgcccccacgtccccctccccgcaccgcagagccagtcagaacagtaacaccggagcggcagctgcagtggccgaggccggagcacgcaaggaaaatggacacgatgagattagtatcaaggccatgggacaggccataaataagacagttatggttgttgaattgattaagagaagggttggaggtcttcatcagaacagtgccactgaatctgttgatatcacagacacatgggaacctttggaagaaggccttctcccactagagacaactcgccatgtgtcgatgatcactgtgacgttatcaaagaagcctctggatacatcatctccaggataccaaccacctatcccagctgaagaagtgaaacctgcttttgactatgaccatgaagattcgtatcctactggccgtggaagaggacgtggtggtgggagaagaggcaggggaagaggtatgagcaatggtccctctccacccgcttatggttacaatgaagagtggggtgaggaaggagattactataatagagggcgtgggagaggaaggtcacgtggacgaggcagagtgcgtggtggctactatggaggcgggaggcgtggtggctacagttatggctatggtgcgagaggcgggtactatgaagagcaagacgaatactatgatgatcctgaagaatatgcccctccaggccgtcgtgggcgtggcagaggaagaagggggatgccttggcgtggccgtggagtctactactagacgatgcgatgcgatgcgatgcgatgcgacatgccaaacgggtgtgctgaagctagcaatggcgtgcttggttggttatctgttctatggagttccgacccagactagaattacccagcagggtccttccaggtgctgtgcctgtgcaactcgtctgggcaagttttgtggctcgctcgtggttttgtagctaggttaagcgagtgaagtttaatcactcggtagcagtgttttcccccttcggacggcatgcatgttgtttattttgctgctaatctacctaccttccaattttgtatggatggtgatggatactggatgcatcagtttcatatttttttttctcctggtaaatctgtagtttttataaagacggttacactgatacctgatgacaagatgaggcaggaagtttgttatgctgcagaataagagcagcatgaaaaaaaatgaatacagctatcgttgttagtgtacta

SEQ ID NO: 42800 - DNA, 1566 bp, Zea Mays
ggataaccccgatcccgttgcttcgcgccagcacgccacgcggcccggcccagtttgcgaggacgatgcgggcgcacgcagcggcatcgcaggacgcagcaaagccctgaaaccgcccccacgtccccctccccgcaccgcagagccagtcagaacagtaacaccggagcggcagctgcagtggccgaggccggagcacgcaaggcatggatagataccaaagggtagagaagcctcggaatgacacaccaatcagccagaatgagattaggattactactcaggggaggatgaggaactatatcagctatgggatgtcgctgcttgagcgcccctcccccgcgcccgcattgtccagcgaaacaagcacatgcaagcacgtgaagcccaactctgcatgtccgacacatgcagcttgcatgaaaatggacacgatgagattagtatcaaggccatgggacaggccataaataagacagttatggttgttgaattgattaagagaagggttggaggtcttcatcagaacagtgccactgaatctgttgatatcacagacacatgggaacctttggaagaaggccttctcccactagagacaactcgccatgtgtcgatgatcactgtgacgttatcaaagaagcctctggatacatcatctccaggataccaaccacctatcccagctgaagaagtgaaacctgcttttgactatgaccatgaagattcgtatcctactggccgtggaagaggacgtggtggtgggagaagaggcaggggaagaggtatgagcaatggtccctctccacccgcttatggttacaatgaagagtggggtgaggaaggagattactataatagagggcgtgggagaggaaggtcacgtggacgaggcagagtgcgtggtggctactatggaggcgggaggcgtggtggctacagttatggctatggtgcgagaggcgggtactatgaagagcaagacgaatactatgatgatcctgaagaatatgcccctccaggccgtcgtgggcgtggcagaggaagaagggggatgccttggcgtggccgtggagtctactactagacgatgcgatgcgatgcgatgcgatgcgacatgccaaacgggtgtgctgaagctagcaatggcgtgcttggttggttatctgttctatggagttccgacccagactagaattacccagcagggtccttccaggtgctgtgcctgtgcaactcgtctgggcaagttttgtggctcgctcgtggttttgtagctaggttaagcgagtgaagtttaatcactcggtagcagtgttttcccccttcggacggcatgcatgttgtttattttgctgctaatctacctaccttccaattttgtatggatggtgatggatactggatgcatcagtttcatatttttttttctcctggtaaatctgtagtttttataaagacggttacactgatacctgatgacaagatgaggcaggaagtttgttatgctgcagaataagagcagcatgaaaaaaaatgaatacagctatcgttgttagtgtacta

SEQ ID NO: 42801 - DNA, 1111 bp, Zea Mays
tggctggcctaccaccgtaccgtgcccccccgtctcactcacaatccagatcccgagatccatcgtctcatcatctccatccccaaatccgcaattcgtcgttctctctatctcctccttccgaaccctcgccctcccagcccccaaaccccaatctgtctcttccgctaggtttagcgtaattccatggccggcgccggtatccacccgttccagcagtggccacccacggcggccgcgccgcccccgccgggggccgcggcctcggtcgccgtccctcctccaccccccgtccccggcgcgcctggcaccgttggcccggacgaggtccgcactatcttcatcacggggctccctgcagacgtcaaggaaagggagctgcacaacctgctgcgctggctcccgggattcgaggcgtcccagatcaacttcaagggcgaccagcccatgggcttcgcgctcttctccaccgcgcaccaggccatcgccgcaaagactgcgctccaggatatggtgttcgatgctgagaccaaggtggcgctgcacaccgagatggccaagaagaacctcttcgttaagagatgtgtgggaattgatgcaaatgctgtggatcaaagtaaacggttgcgaacaggtggagattatactcattctccttatgctcctccatttcatccacctccaccagctgtttccatgtggggaaccccaggttatatcacagcgccacctccttacaatccatatgctgcgtatccagtcccccctgtagcgatgacttcacctgctcctgttacaggaccaactgcctatgctcctgtgcagaacacaaaggataatcctccctgcaatacccttttcattggtaatctcggtgatactgtagtcgaagaggaattgcgaagtctcttcagtgtgcaacctggattcaagcaaatgaaagtgttacgtcaagataggaacactgtttgctttattgaatttgaggatgtgaatgctgctacatctgtgcaccaaactctgcagggtgctgttattcctagttctggtcgtggtggaatgcgaattcaattttcaaagaatccctttgggcgaaggaaggattcagcgg

SEQ ID NO: 42802 - DNA, 1817 bp, Zea Mays
acaatccagatcccgagatccatcgtctcatcatctccatccccaaatccgcaattcgtcgttctctctatctcctccttccgaaccctcgccctcccagcccccaaaccccaatctgtctcttccgctaggtttagcgtaattccatggccggcgccggtatccacccgttccagcagtggccacccacggcggccgcgccgcccccgccgggggccgcggcctcggtcgccgtccctcctccaccccccgtccccggcgcgcctggcaccgttggcccggacgaggtccgcactatcttcatcacggggctccctgcagacgtcaaggaaagggagctgcacaacctgctgcgctggctcccgggattcgaggcgtcccagatcaacttcaagggcgaccagcccatgggcttcgcgctcttctccaccgcgcaccaggccatcgccgcaaagactgcgctccaggatatggtgttcgatgctgagaccaaggtggcgctgcacaccgagatggccaagaagaacctcttcgttaagagatgtgtgggaattgatgcaaatgctgtggatcaaagtaaacggttgcgaacaggtggagattatactcattctccttatgctcctccatttcatccacctccaccagctgtttccatgtggggaaccccaggttatatcacagcgccacctccttacaatccatatgctgcgtatccagtcccccctgtagcgatgacttcacctgctcctgttacaggaccaactgcctatgctcctgtgcaggataatcctccctgcaatacccttttcattggtaatctcggtgatactgtagtcgaagaggaattgcgaagtctcttcagtgtgcaacctggattcaagcaaatgaaagtgttacgtcaagataggaacactgtttgctttattgaatttgaggatgtgaatgctgctacatctgtgcaccaaactctgcagggtgctgttattcctagttctggtcgtggtggaatgcgaattcaattttcaaagaatccctttgggcgaaggaaggattcagctgctggccttgcgagcgttctaaatggggctcctgcaaattgattgcagcctgaggggatgtatcttgaactttagcatgccatcatggatttcatactaccacatcttatttatgatctgcatacttctgctgaatgcacgctctctcacgtggcatcatcatcttcatttggtggagtatctgggacatgatcatcatctatcatctttattaggctgagaggctaacagggatagtaaaattgcaaaaaagtcgcaagctgtttcattcttttactacagtggtggaacaccgaagcgttgctacggtcccttttggaaagccttcttgttcttttcttacagtggaacgccttggttcttttgctgcagtggaacaccttcattcttttgctgcaggtgaatgccaaggcgtggctatgtactttttggttagagaaccttagtgatgctaaaatataagctaactgaagcttagtgatgttgatgagatgtaaggaacttatggatctgctgaggtggtttctagcttgactaggcaaccctttcggtttttatcctgccttgtaataccaaggcatggttgtggcccttttgtttagagaaccttagtgatgctggtatgtaagccaacttaatcttagtgatgttgatgagataaacaatggatccgatgaggtggtttatagcttgacgagttctttgattagatgatgagagctgagaagtttcattgacttatgcatcagatgattg

SEQ ID NO: 42803 - DNA, 2206 bp, Zea Mays
cacaatccagatcccgagatccatcgtctcatcatctccatccccaaatccgcaattcgtcgttctctctatctcctccttccgaaccctcgccctcccagcccccaaaccccaatctgtctcttccgctaggtttagcgtaattccatggccggcgccggtatccacccgttccagcagtggccacccacggcggccgcgccgcccccgccgggggccgcggcctcggtcgccgtccctcctccaccccccgtccccggcgcgcctggcaccgttggcccggacgaggtccgcactatcttcatcacggggctccctgcagacgtcaaggaaagggagctgcacaacctgctgcgctggctcccgggattcgaggcgtcccagatcaacttcaagggcgaccagcccatgggcttcgcgctcttctccaccgcgcaccaggccatcgccgcaaagactgcgctccaggatatggtgttcgatgctgagaccaaggtggcgctgcacaccgagatggccaagaagaacctcttcgttaagagattaaacggttgcgaacaggtggagattatactcattctccttatgctcctccatttcatccacctccaccagctgtttccatgtggggaaccccaggttatatcacagcgccacctccttacaatccatatgctgcgtatccagtcccccctgtagcgatgacttcacctgctcctgttacaggaccaactgcctatgctcctgtgcaggataatcctccctgcaatacccttttcattggtaatctcggtgatactgtagtcgaagaggaattgcgaagtctcttcagtgtgcaacctggattcaagcaaatgaaagtgttacgtcaagataggaacactgtttgctttattgaatttgaggatgtgaatgctgctacatctgtgcaccaaactctgcagggtgctgttattcctagttctggtcgtggtggaatgcgaattcaattttcaaagaatccctttgggcgaaggaaggattcagctgctggccttgcgagcgttctaaatggggctcctgcaaattgattgcagcctgaggggatgtatcttgaactttagcatgccatcatggatttcatactaccacatcttatttatgatctgcatacttctgctgaatgcacgctctctcacgtggcatcatcatcttcatttggtggagtatctgggacatgatcatcatctatcatctttattaggtggagtttcaggggcatgatcatcatctggctgacattgcattgtcaccaaaacatgctggtgttacttttttttacattatctttgtagcttgtgaaggccatcctagtcttctagatgtgcatttggcgtttgtcatgaacattacactttgtagtattcgtattatgtatttccctttgtgcagttgcaacgttgtgttttcattataatagttgatgtggtttcgctggtttactaacaattctgaaatcttggatgattcattccatcatgtcatggcattttgacgaggaaattttgtagacatggcatggcaatatggcatacttcattccatgcatgctggagcattgccatcatccccacgaagcatgtaatcacaacgttgattggtttgttcttaaatgttttcatccaggctgagaggctaacagggatagtaaaattgcaaaaaagtcgcaagctgtttcattcttttactacagtggtggaacaccgaagcgttgctacggtcccttttggaaagccttcttgttcttttcttacagtggaacgccttggttcttttgctgcagtggaacaccttcattcttttgctgcaggtgaatgccaaggcgtggctatgtactttttggttagagaaccttagtgatgctaaaatataagctaactgaagcttagtgatgttgatgagatgtaaggaacttatggatctgctgaggtggtttctagcttgactaggcaaccctttcggtttttatcctgccttgtaataccaaggcatggttgtggcccttttgtttagagaaccttagtgatgctggtatgtaagccaacttaatcttagtgatgttgatgagataaacaatggatccgatgaggtggtttatagcttgacgagttctttgattagatgatgagagctgagaagtttcattgacttatgcatcagatgattg

SEQ ID NO: 42804 - DNA, 989 bp, Zea Mays
ataaattatcataataataattatctatattaactgactatacaagagtgtcgtataaaattatcataaaaactaaacaccttgtatacaggaaaaacgataaacaaaagagtaaaaaaccaaaaaacaaaaacaaagtaccatcgcccttccggttttctccccagcccccgccccggtcgcggagccgtcgttctcgtctttcggtactcgcgcgcgccagctcacttctctacttcccttccccagatctacctccattcttccctcaaaatcacagatctctctcggccccgtgcccagcgctccgaaaccctagcgccgccgcgggtgccaggccgcgagcgtcgccatgggcatcgtgtttacgcggctcttctcgtcggtcttcggtaaccgcgaggctcgcatcctcgtcctcggcctggacaatgctggcaagaccaccatactctatagactgcaaatgggagaggtcgtctccacgatcccgacaattggattcaacgttgagacggtgcagtacaacaacatcaagttccaagtatgggatcttggtggtcaaacaagcatcaggccatactggcggtgctactttccaaacacccaggctatcatatatgttgttgattcaagcgatacagataggcttgtaacagcaaaagaagaattccatgccatccttgaggaggatgaacttaaaggtgcagttgtccttgtgtatgcaaataagcaggatcttccaggtgcactcgatgatgctgccattacagagtcattagaactacacaaaattaagagccgccaatgggcgattttcaaaacatctgcaataaagggagaggggctcttcgaaggtttggactggctcagtaacacgctcaaatctggaagcagctaaggagcctccgcctcgtcatgaatcatttgctggatggaaaaagatttgccggtaggcccgggcgtccactccaggctggccttagcac

SEQ ID NO: 42805 - DNA, 945 bp, Zea Mays
agactggtgacttggttggtgctgaatgctggtggatccaaactcccaaaaatgctcgagtttgggtttggcagtccagctccagcagtgactgaaagagcagtgtgctactgctagctagcatgtgagcggctgcgagttctcttcgttgctgccgcagcgacttcttggtgtgcgtgtgtgtgcgtgcgtgttttaaaaagaagaaaaaaagaaaagaatccaagctttggtcatgcttggtcgtggtgatgggcggcttttccggcccatgcatccatgtccacgaccctaccatgttcgcatgtttcagttcatctcccttgccgcggacacgaaaagctagctgggtcagaaacaaaggagcggggggaaaagaaaagcagctggctctggctgtgggctcgctggtccatccatgtcgtcgactcgtcgtccagtccatgagagtgatgctacataggatagggagtagtactgctactgctgctgctgctgctagagagtagagagagagggtgtcctgcctgcgtacacatagcatacgtaccgcgagctcgacggcggcgaaggccagcagcgtgcgcaggcagccggcgtaggagtcggagaggaagccgccgaggggcgagaggatgaagacggtgccgacgaagttggtcaccacgttggccgcctgcggcagcgggaagtgcagctccccgaacacgaaggtgatgaggttgctccccaccgccgccagcgccatcgtctgcgacgcctggaacactgcaatgcgcacaacaaccagacgccttcttaatctgttgctgtatatacacggcattgcccgggcgccggcgcggcgtcggcctgggtcttgcccttcgacttgttgggggtctggtgactggtgctacgagcagagtagcagtaataatccgtccccagggagggagggaggga

SEQ ID NO: 42806 - DNA, 1206 bp, Zea Mays
cagcgatgacagtaaagatgagactggttttgtacagcgatgtacgataaccggtgctttagcctgacgtgtgtcgtctcttccgcttctgtgatattcggcaagacaatagcattctttctacccacagaaatgttgttgcagttcttcataggtctccaatggacaggggagaggtcggcgtcagacctctgtgcctccagcaaggcgcctatttgatcatgtgaagccatacaagaaattcaatcaccactaaatggtactgactccctcagttcttttttattagccctattttgtttaaaagtaaactaacaaacaataaatatttgagaaataagatagtatatattttagactgtcccctgcagttgatccatatactcactctaaatacctgtactgttggtagagtagattttaaatatagagatggggatagataagctggacattatgctcgcgtgcaactagccaaaactgttgcagcagcatcatccgcgactgcagcagaagcaacagggaagctgtggttccaattccatccagcctgactgcaccaacactcgttattacgtcacagctgaaaatatatgatttctttctctctctctctctctctctgcattctcatttcgaaagaagaggcattattgttgctcagttgtcttttgaaaaaagagaagaagctattgttcaaattaattgtgagtcaagattctactatcacatgtctacttttagctaactgcttccatttgtatcgttcctagtttctaaatggggagatagaggatgaggtttaagagggagattttctttaattacttgtggctctgttagctctgtggcaaagtacgcatttttttttcgtatacaggagaggtaagtcatcaaactctagcctttgaatccaaacaagccagtttctgtttagcttttacaatttcacaagctacaaacaagtttccacaatctagtgcaccaaacacactctaaaacacctatgcatagcaacaacaccaaaaaaaacaaacactatgcccaagtagtcgtttgtgtgaatagttcagggatgagaatgcgatgcggcacgattgacatcttaagcctatcatcgtggcaaccttgtgtgcatgctaatattattatctacggctcttgtatatataggaggccttgttatataaatataatatatgcttt

SEQ ID NO: 42807 - DNA, 2324 bp, Zea Mays
cttgctgaaaatgaaaatcaggctaaactcctgaatgtgcgggatcaccttgatgcattgagttcacatacttctgcccatgtgtaccctgccagtggaccggctgtaccaagtaatcaaactaatgctgctacagaaccatccgaagatgtccagatgagggagaacataaccacgccaaatggcagtgctgtcactgtggatccaaatgcatcaacacatgccgataggctgacaaaaatcaagggtatactgtcaggagagacatctattcagttgacgctgcagttcctatacagccataataggtctgatcttcaaattttgaagactataaagcaagctgtggaaatgaggaacagtgtctgccacagtgcaacaatatgctccaatgcaatcatgcatgcagggacaacagttgataccttcctcagagaaaacttggaatggctaggtagggcaaccaactgggccaagttcagtgccactgctggactaggcgtcattcataggggccatcttcaacaaggccgcgcattgatggccccctacctaccacagaatggtgctggtggcagtggtagcccatactcggaaggaggtgccctctatgctcttggtttgattcatgccaaccatggtgaaggaatcaaagagtttcttcgtgagagtcttcgcaacaccacttctgaggtggtccagcatggtgcttgtctgggactcgggcttgcagcattaggtacatcagacgaggaaatatgcgaggacataaagaacattctttacacggatagtgctgtggctggtgaagcagctggtattggcttgggtttgctcatggttggcacggccagtgagaaggccacagagatgcttgcctatgctcatgatacacagcatgagaaaattatcaggggcttgtcacttggaattgcattgacggtgtatggcagggaagaagaagctgacaccttgatcgagcaaatgacgagagaccaagatcccatacttcgttacggcggtatgtatgcattggctctagcatacagagggactgcaaataacaaagccatccaccagcttctgcattttgctgtgtcggatgtgagcgatgatgtgcgaaggactgcagtgttggctcttggctttgtcctgtacaatgagcctgaacagacacccagaattgtgtccctactatcagaatcatacaatccacatgtccgttacggggcagccctggccgtcggaatctcctgtgccggatcaggattaagcgaagccatctccctactggagcctctgacatcagacgtcgtcgacttcgtgcgccagggtgctctcattgccatggcaatggtgatgatccagaccaatgaatcttacgatccacgcgtcggagcattcaggcgccagttggaaaagataatccttgacaagcacgaggacaccatgagcaaaatgggcgccatactggcttccggcattctcgacgccggcggcaggaacgtcggcatcaggctcaagtcgaggtcaaagcatgacaggctcactgccgttgtcggactagctgttttcacccagttctggtactggtacccgctgacctacttcataagcctcgccttctctccgacggccctcatcggcctcaactccgacctgaaagtgccgacgtttgagttcctgtcgaacgccaagccgtccctgttcgattaccccaagccagcgactcagcagactgcagccgcatctgtcaaggtgccggcggccatcttgtcgacatatgctaagtccaaggctagggcaaagaaggacgcagagagcaaggctgccccctcgggattcgtcctcctgcaggacctcaagcccacggaggccgaggagctcgccctaactgacgcgccgtcaaccgccgccgccacgaccaacgccctggcatccagcgccagcgagccggctgccatggctgtcgacgatgagccccagccgcccccggccttcgagtacacatcgtaagggtgatggtcctcggatcaggatgcatgggttggccggttgggttgtctgtagcaacttcgtgttgttggatggcggactcgggcgtatcgctaattcatttttttaactccatataatacctttcctcaagcatttgtcgcgtgaagaaaatatcttgctacctgagttttctgctgaatttgcagcaaatcaggaagccatgtcaagaataataaattcgaacctttgtccccatattgtccatatattatgaaaaaaaaagagggaacaagttcgaatccaatggacgtcaatagagtttgggg

SEQ ID NO: 42808 - DNA, 3832 bp, Zea Mays
ctgcctcgcctttgttgatcttttccccttccagtctcccacattcccctcccccggccctcgccatcctctcccgctaaccccaccccgtcgccccggcctcctcggtccagcggcgagcgggtccgtccggtcccgacgccgcaccacatcaccgcctgctcccacggccgtcctcactcgacctcgatcggaacccccggatcggaggtaccttcgcgcgcggctccgctccgacctcgtcctccatcggttggcatcggaagcggcggcggcggcgggttcccagccagctttcgaaaggttttattccgtgattgcaggcaatcaatcgtcaggctttttgggagctgtgttggggggaccggggggaagagtgaagttactgcagaggctaacatttaggttgtcgagtgatggcgcaaggcgccaatttccctggtttcattggcgccgtgggtggccatgatggcggtgtgaactttggcgggaacttctgtgacatggccttctaccagaagctaggggagggctccaacatgtcggttgacagcctcaacagcatgcagaccagcatgcatggcggatccatcaccatgtctgtggacaacaacagcagtgttggctctaacagtgactcccgcactggcatgcttggacatcctggtctcaaagggcctgtcattgtgggcagctactcggttgggcacagcatcttccggcccgggcgggtgtcccatgctttgagtgaggatgcactggcacatgctctgatggacaataagtttccaactgagacactcaaggattatgaggagtggactattgatctggggaagctgcaccttgggatgccctttgcacaaggtgcctttgggaagctctacaggggaacatataatgggatggatgttgctattaagcttttggagcgacctgaggctgaccctgagaaagctcaactgttagagcagcagtttgtccaagaagttatgatgcttgcaacactgaggcacccgaatattgtcaagttcattggtgcatgcaggaagccattggtttggtgtattgtgacagagtatgcaaagggtggatctcttaagaatttcttgagcaggaggcagaacaggtctgttccactgaagttggcagtcaagcaggcattggatgttgcacgcggcatggcctatgtccatggccttgggttcattcacagagatcttaagtcggacaacctcctgatttctggtgataagtccattaagattgccgactttggtgtggctaggattgaagtcaagactgaggggatgacacctgaaactggaacataccgttggatggctccgcaagttgatattgttgagatcctttaccggcatcacctttctcgtcaaggtccaccatgtcctctttgttctcatagttgagaagtggtggtacaagcaaaggcgaaggggttgcagagtaagaagaggtggatcattatgggacgaaggaagctttggtcccattaggttccatgaatgggcccaacaatgatcatggtccctgccatggtggcgacgacgacaatggccggagagaagccgaacggaatatgaacaagatgtgtgaatcaatggcaacttcaatttcttttgcaatcaaacatgatctagaattttcatgtgattattattctgtaatttctttggcaaccaaacacaataattggtaatggggagccttatggtgcatttggcaactgatgggtagggcatgcatctaatcacaaataacaatgtggatgtatccatcttctatttggtaagagaagtgactagtgggacctagttccatagaccctattctatgtaacactaagggtagatatatcaccttgcgccgtatatctgcttatgtttgtgtcaccatcaccctatcagctcatggccacaaccttgtgcccttctgtattaacaatggttgccattggcaaaacatgcatctacatggaagctttcgcgagtgagaggaacaatttgctgccattgcgcctgcactcgatcttgcactaatgacgctcgctcacacaacgtcggtgaaagtctctgggagcacgagctaggctcattgcctcgtgagacaatgataggctttccgtatcctcatttagcaaggtaattgtggttaatttaacctaaatagatggtaaaaccacatgtcgtttgtgccctaacagtccctcccactgccacaaaataaacgagagatttcaaactatgtatttctaaactcctattcccccaaccataccattagggcttatgcattttttgtctatactcggttactttgttgggctagtaggtttgacgagtcatgagtgcacctcaaatgttctatcctcccttgttgtattccttgtagttgtagcttgattagtttttagatggccatgcaaaatgagcaagatgataccagatcctcttctaatcattgatatgttagtgattagacgtcaaaaaatagcacttgcgaatcaacataataacatggcctagagagggctagaggcaagctagatgcttaattttcatcgggagttgattaggcattgggctgcaatgactttgagcgtcaaagtttttctctttcccaatcttgaagtcaattgtgttttagacattgggctgtaattgttagtggtgatgcttcactgccatttccaagtaatctttctcccaaaatgaagagatgtgctctccagatttgtactcatcgataaatcatggctagtcattgtctaatcatgataggacaagtatacaactagtcgacgccaaagcgatgtggcttaactttccaacttgaaaacaaaccaaggtgctttgccacactcttgatggagcaagaagtcattatgtaatattgactatttcattctttctttgcaagatttcaaaagaggaatccctcatctaatccttgatgagtagcaataatatttctgtagaaagggagccaacttggctccttgttcctggaaagcttgctaggaaccaacaaggataccaaatatgttgatatccaaatatcttcagtatatcaaaactcggccggtgggggaaagaccgccccacactatttcactaagaaaagatcaacgggagcctgatcgagaaaagctagcaccctcatacatggtgatgttgccccctatggttcgggccttgacccgtgctttggggcctaacccacacgaccagccccttacatgagggcccgtctaccataggtcggtccacccatgccaaccaaggaaaccagcgagtgacttgttttaacctcgacctgaaattcacttccatgaagagtcaaacctaggacctaaggagtgctactcagaccacttaaccaactcagctagaggccctttcgcatctttagtatatcaaaatagttgaaggttaaccttggagttatttgtttcatatcttctatctattttgtcaataggaacattattcactccaattttgaatcaatatccaaacgagatccctgttacaaacctgagaattgatagataattacccagtccctaaggactattatatacatatagatagtgggccaggcctaatgggccttaacacccctcctcaaactcaaggtggaaatggaggatctgaagctttgagtttgatcaagtgaaattgatgttgtgctcttgtttgtgctttggtgaagaaatctgccaactgagattttgagggcacatatttaagatcaatagtcttctgctaacaatgagatcgagtaaaagatgcatcgacaccaatgtgtt

SEQ ID NO: 42809 - DNA, 683 bp, Zea Mays
atatgtttgatcttcgatatgtgccttcaaagcgttagttgattgattccttcgtgaagttcatttctgggcgccaacattcaaatggggcatcagcattgccaacatagccgactttgctaaaccacctgaaaagatatcttaccctcagcaagttgctgttgcatgcactggactcatttggtcaaggtacagcttggttatcacaccgagaaactggaaccttttcagtgttaacgttgcaatggcgggtacaggcctgtatcagctttcacggaagatcaggcaagattacttatccgatgagaaagatgctgcttcacaactggaagcatagataatgacaacaggcaaagaataacggattggaaagcctgcatcctaggagtctactcttgattttttttttctgggcaagcaaagaataacggatgggtcatgtttgttttcctgttattctgaaatcgtgagcaggctaatgtgaaaatcttccgccaaaaaagaaaaccaatgaagtgatgttttgagcattttttttgtgggaacaagtcatgaaagtacatggtttatctgttgttcttttgttccttcaaccgctttatttgggaaaacgctaaattgttgccaagctgattgaccataatccagcctttgctcgattcattggtaaaaatctaaaaaaa

SEQ ID NO: 42810 - DNA, 818 bp, Zea Mays
ggttgttcctctgagcgacggcgatcgagccttaatcttagctcctgctgggctgcgcctgcgcaggctgagggggaccacagaagcattagctgggtgaacccactcaaagggggcagggaattgtgtgctagtttgaatggctgctacaaagcttcaggccctttggaaccacccggctggccccaaaaccattcatttctgggcgccaacattcaaatggggcatcagcattgccaacatagccgactttgctaaaccacctgaaaagatatcttaccctcagcaagttgctgttgcatgcactggactcatttggtcaaggtacagcttggttatcacaccgagaaactggaaccttttcagtgttaacgttgcaatggcgggtacaggcctgtatcagctttcacggaagatcaggcaagattacttatccgatgagaaagatgctgcttcacaactggaagcatagataatgacaacaggcaaagaataacggattggaaagcctgcatcctaggagtctactcttgattttttttttctgggcaagcaaagaataacggatgggtcatgtttgttttcctgttattctgaaatcgtgagcaggctaatgtgaaaatcttccgccaaaaaagaaaaccaatgaagtgatgttttgagcattttttttgtgggaacaagtcatgaaagtacatggtttatctgttgttcttttgttccttcaaccgctttatttgggaaaacgctaaattgttgccaagctgattgaccataatccagcctttgctcgattcattggtaaaaatctaaaaaaa

SEQ ID NO: 42811 - DNA, 825 bp, Zea Mays
aaactgttccgtcacatacccgccgccgccgggatccatctctcgtccgtccttcaccccatccaacggctgatgcgtaaggaggagtcaccaacacgcaacacggaaggaaaaaaggaaaagattcagacggacggggcaccactgcctgtcgccctcaagaacccccaccatccccaccgccagcagatcgattcgcgaaagagacgaccgccgccgcatcggaccgtgcccgagccccccttctcctcgctgactcggctcccctcctccgccgtcgccggaggcgaagcaagtggggaccacagaagcattagctgggtgaacccactcaaagggggcagggaattgtgtgctagtttgaatggctgctacaaagcttcaggccctttggaaccacccggctggccccaaaaccattcatttctgggcgccaacattcaaatggggcatcagcattgccaacatagccgactttgctaaaccacctgaaaagatatcttaccctcagcaagttgctgttgcatgcactggactcatttggtcaaggtacagcttggttatcacaccggtaagccattagtcagtttgtggtacttgtccattggttctattgttgtccactgaaacatacaaggtggtatggttgtatttgatctcactggaaatttactggaacttctattaatcttctgattctgaccttgttttttttctaagagtaaatttcactgccggtcctttaacttgccccatgtccttatccaggttctgatacttttaaatagcatatttagctctttaaacgagtcctaagtcctcatc

SEQ ID NO: 42812 - DNA, 915 bp, Zea Mays
tttgcttctttcgaccatgctttatagtgatgccatagtccagaatggcgctaccagcattgttggccagtgtgttattcagcttgccaaagtacatggaatccacaccatcaacattataagggacaggcctgggtcagaggaagcaaaaaacaaactcaaacaacttggtgcagatgaggtgttcacagaaactcagctagacatgaagaatgtcaagagcttgctgggtgctttgccagagcctgcattaggatttaactgtgttggaggaaatgctgcttctctaatactcaagcttttgaagcaaggaggcaccatggtgacatatggtggaatgtccaagagacctgtcactgtccctacttcatatttcatttttaaggatctatccctacgagggttctggctccagaagtggctgaactcagacaaaacagaagactgcagaagaatgattgactacctcttgggccttgtgcatgaaggcaaactcaaatacgagatggagtccatttctttcggcgagttcagcttggctctggagaaggccctgggcaaacatggaagccagccgaagcaagttatcaagttctgagaccagggcgggttagaggatctgagagcatgcgattgccatcgatctgtatgaatgatgaatccaacagttagctatgtcaagtgccagagttttaaatacaaataaagtaaaggcagcaatgtttaatggaattgtgaaatcagcagcttagctatatttgagcgctgtgttgattttgcaatgaaatcagcagcttagctatatgtcaagtaaagggtgcgtcaatttctattgcatctacagtgttattcttttgcagccacagctggtcagctgcagagcgcatcgtaaattctggacatgtcaattctttt

SEQ ID NO: 42813 - DNA, 1693 bp, Zea Mays
cgtcatccgcggcgcacgcctccgtccccgccccccagcccgtcgtcgtctctctccaactccatcgtcacccgcgccgcctacgcctgctgcgtcccggatagccccgcggcgccgtccgaccacgaatccggaatcccctcctcgctcgccctcctgcttgatcccgccgcggccgcctcagccgccactcctccctgtccctctagggctgccctgccgctccctcgtatcgcgcaatcggaggcctctccttccgccctccaattttatcgcagcaggcagatggcgccgcagtcccggttgctgccgccgctgttgcaggttcttcgccgctgccgcgcatcgcgctcccacttctctaccgccccctctcttgtctcgccaccatccaaggccgtggtctacgacgagcatggcctgcccgagcaggtgctgaggctggtggacgtaccaccggcggagatcggtgaccgcgacgtctgcgtcaggatgatggctgcccccatcaacccctcggacatcaaccgcatcgagggcgtctaccccgtcaggcccccgctccccgccgccgtcggaggctacgagggcgtgggccaggtccacgccctcggccctgctgtcaccgcccggctgtcaccgggcgactgggtcataccgtccccgccatcgttcgggacctggcagacgtacattaccaagcatgagaacgtctggcacaaggtccgcagcgatgtacccatggagtacgctgccactatcaccgtcaacccattgaccgcacttaggatgctccaagactttgtgatgccatagtccagaatggcgctaccagcattgttggccagtgtgttattcagcttgccaaagtacatggaatccacaccatcaacattataagggacaggcctgggtcagaggaagcaaaaaacaaactcaaacaacttggtgcagatgaggtgttcacagaaactcagctagacatgaagaatgtcaagagcttgctgggtgctttgccagagcctgcattaggatttaactgtgttggaggaaatgctgcttctctaatactcaagcttttgaagcaaggaggcaccatggtgacatatggtggaatgtccaagagacctgtcactgtccctacttcatatttcatttttaaggatctatccctacgagggttctggctccagaagtggctgaactcagacaaaacagaagactgcagaagaatgattgactacctcttgggccttgtgcatgaaggcaaactcaaatacgagatggagtccatttctttcggcgagttcagcttggctctggagaaggccctgggcaaacatggaagccagccgaagcaagttatcaagttctgagaccagggcgggttagaggatctgagagcatgcgattgccatcgatctgtatgaatgatgaatccaacagttagctatgtcaagtgccagagttttaaatacaaataaagtaaaggcagcaatgtttaatggaattgtgaaatcagcagcttagctatatttgagcgctgtgttgattttgcaatgaaatcagcagcttagctatatgtcaagtaaagggtgcgtcaatttctattgcatctacagtgttattcttttgcagccacagctggtcagctgcagagcgcatcgtaaattctggacatgtcaattctttt

SEQ ID NO: 42814 - DNA, 1054 bp, Zea Mays
cgtcatccgcggcgcacgcctccgtccccgccccccagcccgtcgtcgtctctctccaactccatcgtcacccgcgccgcctacgcctgctgcgtcccggatagccccgcggcgccgtccgaccacgaatccggaatcccctcctcgctcgccctcctgcttgatcccgccgcggccgcctcagccgccactcctccctgtccctctagggctgccctgccgctccctcgtatcgcgcaatcggaggcctctccttccgccctccaatgcctgggtcagaggaagcaaaaaacaaactcaaacaacttggtgcagatgaggtgttcacagaaactcagctagacatgaagaatgtcaagagcttgctgggtgctttgccagagcctgcattaggatttaactgtgttggaggaaatgctgcttctctaatactcaagcttttgaagcaaggaggcaccatggtgacatatggtggaatgtccaagagacctgtcactgtccctacttcatatttcatttttaaggatctatccctacgagggttctggctccagaagtggctgaactcagacaaaacagaagactgcagaagaatgattgactacctcttgggccttgtgcatgaaggcaaactcaaatacgagatggagtccatttctttcggcgagttcagcttggctctggagaaggccctgggcaaacatggaagccagccgaagcaagttatcaagttctgagaccagggcgggttagaggatctgagagcatgcgattgccatcgatctgtatgaatgatgaatccaacagttagctatgtcaagtgccagagttttaaatacaaataaagtaaaggcagcaatgtttaatggaattgtgaaatcagcagcttagctatatttgagcgctgtgttgattttgcaatgaaatcagcagcttagctatatgtcaagtaaagggtgcgtcaatttctattgcatctacagtgttattcttttgcagccacagctggtcagctgcagagcgcatcgtaaattctggacatgtcaattctttt

SEQ ID NO: 42815 - DNA, 954 bp, Zea Mays
cgtcatccgcggcgcacgcctccgtccccgccccccagcccgtcgtcgtctctctccaactccatcgtcacccgcgccgcctacgcctgctgcgtcccggatagccccgcggcgccgtccgaccacgaatccggaatcccctcctcgctcgccctcctgcttgatcccgccgcggccgcctcagccgccactcctccctgtccctctagggctgccctgccgctccctcgtatcgcgcaatcggaggcctctccttccgccctccaatggtgctttgccagagcctgcattaggatttaactgtgttggaggaaatgctgcttctctaatactcaagcttttgaagcaaggaggcaccatggtgacatatggtggaatgtccaagagacctgtcactgtccctacttcatatttcatttttaaggatctatccctacgagggttctggctccagaagtggctgaactcagacaaaacagaagactgcagaagaatgattgactacctcttgggccttgtgcatgaaggcaaactcaaatacgagatggagtccatttctttcggcgagttcagcttggctctggagaaggccctgggcaaacatggaagccagccgaagcaagttatcaagttctgagaccagggcgggttagaggatctgagagcatgcgattgccatcgatctgtatgaatgatgaatccaacagttagctatgtcaagtgccagagttttaaatacaaataaagtaaaggcagcaatgtttaatggaattgtgaaatcagcagcttagctatatttgagcgctgtgttgattttgcaatgaaatcagcagcttagctatatgtcaagtaaagggtgcgtcaatttctattgcatctacagtgttattcttttgcagccacagctggtcagctgcagagcgcatcgtaaattctggacatgtcaattctttt

SEQ ID NO: 42816 - DNA, 1683 bp, Zea Mays
cgtcatccgcggcgcacgcctccgtccccgccccccagcccgtcgtcgtctctctccaactccatcgtcacccgcgccgcctacgcctgctgcgtcccggatagccccgcggcgccgtccgaccacgaatccggaatcccctcctcgctcgccctcctgcttgatcccgccgcggccgcctcagccgccactcctccctgtccctctagggctgccctgccgctccctcgtatcgcgcaatcggaggcctctccttccgccctccaatcaggcagatggcgccgcagtcccggttgctgccgccgctgttgcaggttcttcgccgctgccgcgcatcgcgctcccacttctctaccgccccctctcttgtctcgccaccatccaaggccgtggtctacgacgagcatggcctgcccgagcaggtgctgaggctggtggacgtaccaccggcggagatcggtgaccgcgacgtctgcgtcaggatgatggctgcccccatcaacccctcggacatcaaccgcatcgagggcgtctaccccgtcaggcccccgctccccgccgccgtcggaggctacgagggcgtgggccaggtccacgccctcggccctgctgtcaccgcccggctgtcaccgggcgactgggtcataccgtccccgccatcgttcgggacctggcagacgtacattaccaagcatgagaacgtctggcacaaggtccgcagcgatgtacccatggagtacgctgccactatcaccgtcaacccattgaccgcacttaggatgctccaagactttgtgatgccatagtccagaatggcgctaccagcattgttggccagtgtgttattcagcttgccaaagtacatggaatccacaccatcaacattataagggacaggcctgggtcagaggaagcaaaaaacaaactcaaacaacttggtgcagatgaggtgttcacagaaactcagctagacatgaagaatgtcaagagcttgctgggtgctttgccagagcctgcattaggatttaactgtgttggaggaaatgctgcttctctaatactcaagcttttgaagcaaggaggcaccatggtgacatatggtggaatgtccaagagacctgtcactgtccctacttcatatttcatttttaaggatctatccctacgagggttctggctccagaagtggctgaactcagacaaaacagaagactgcagaagaatgattgactacctcttgggccttgtgcatgaaggcaaactcaaatacgagatggagtccatttctttcggcgagttcagcttggctctggagaaggccctgggcaaacatggaagccagccgaagcaagttatcaagttctgagaccagggcgggttagaggatctgagagcatgcgattgccatcgatctgtatgaatgatgaatccaacagttagctatgtcaagtgccagagttttaaatacaaataaagtaaaggcagcaatgtttaatggaattgtgaaatcagcagcttagctatatttgagcgctgtgttgattttgcaatgaaatcagcagcttagctatatgtcaagtaaagggtgcgtcaatttctattgcatctacagtgttattcttttgcagccacagctggtcagctgcagagcgcatcgtaaattctggacatgtcaattctttt

SEQ ID NO: 42817 - DNA, 1663 bp, Zea Mays
cgtcatccgcggcgcacgcctccgtccccgccccccagcccgtcgtcgtctctctccaactccatcgtcacccgcgccgcctacgcctgctgcgtcccggatagccccgcggcgccgtccgaccacgaatccggaatcccctcctcgctcgccctcctgcttgatcccgccgcggccgcctcagccgccactcctccctgtccctctagggctgccctgccgctccctcgtatcgcgcaatcggaggcctctccttccgccctccaattttatcgcagcaggcagatggcgccgcagtcccggttgctgccgccgctgttgcaggttcttcgccgctgccgcgcatcgcgctcccacttctctaccgccccctctcttgtctcgccaccatccaaggccgtggtctacgacgagcatggcctgcccgagcaggtgctgaggctggtggacgtaccaccggcggagatcggtgaccgcgacgtctgcgtcaggatgatggctgcccccatcaacccctcggacatcaaccgcatcgagggcgtctaccccgtcaggcccccgctccccgccgccgtcggaggctacgagggcgtgggccaggtccacgccctcggccctgctgtcaccgcccggctgtcaccgggcgactgggtcataccgtccccgccatcgttcgggacctggcagacgtacattaccaagcatgagaacgtctggcacaaggtccgcagcgatgtacccatggagtacgctgccactatcaccgtcaacccattgaccgcacttaggatgctccaagactttgtgatgccatagtccagaatggcgctaccagcattgttggccagtgtgttattcagcttgccaaagtacatggaatccacaccatcaacattataagggacaggcctgggtcagaggaagcaaaaaacaaactcaaacaacttggtgcagatgaggtgttcacagaaactcagctagacatgaagaatgtcaagagcttgctgggtgctttgccagagcctgcattaggatttaactgtgttggaggaaatgctgcttctctaatactcaagcttttgaagcaaggaggcaccatggtgacatatggtggaatgtccaagagacctgtcactgtccctacttcatatttcatttttaagaagtggctgaactcagacaaaacagaagactgcagaagaatgattgactacctcttgggccttgtgcatgaaggcaaactcaaatacgagatggagtccatttctttcggcgagttcagcttggctctggagaaggccctgggcaaacatggaagccagccgaagcaagttatcaagttctgagaccagggcgggttagaggatctgagagcatgcgattgccatcgatctgtatgaatgatgaatccaacagttagctatgtcaagtgccagagttttaaatacaaataaagtaaaggcagcaatgtttaatggaattgtgaaatcagcagcttagctatatttgagcgctgtgttgattttgcaatgaaatcagcagcttagctatatgtcaagtaaagggtgcgtcaatttctattgcatctacagtgttattcttttgcagccacagctggtcagctgcagagcgcatcgtaaattctggacatgtcaattctttt

SEQ ID NO: 42818 - DNA, 1184 bp, Zea Mays
taaatggattgcatcggctagagctgacgtcatccgcggcgcacgcctccgtccccgccccccagcccgtcgtcgtctctctccaactccatcgtcacccgcgccgcctacgcctgctgcgtcccggatagccccgcggcgccgtccgaccacgaatccggaatcccctcctcgctcgccctcctgcttgatcccgccgcggccgcctcagccgccactcctccctgtccctctagggctgccctgccgctccctcgtatcgcgcaatcggaggcctctccttccgccctccaatgtgatgccatagtccagaatggcgctaccagcattgttggccagtgtgttattcagcttgccaaagtacatggaatccacaccatcaacattataagggacaggcctgggtcagaggaagcaaaaaacaaactcaaacaacttggtgcagatgaggtgttcacagaaactcagctagacatgaagaatgtcaagagcttgctgggtgctttgccagagcctgcattaggatttaactgtgttggaggaaatgctgcttctctaatactcaagcttttgaagcaaggaggcaccatggtgacatatggtggaatgtccaagagacctgtcactgtccctacttcatatttcatttttaaggatctatccctacgagggttctggctccagaagtggctgaactcagacaaaacagaagactgcagaagaatgattgactacctcttgggccttgtgcatgaaggcaaactcaaatacgagatggagtccatttctttcggcgagttcagcttggctctggagaaggccctgggcaaacatggaagccagccgaagcaagttatcaagttctgagaccagggcgggttagaggatctgagagcatgcgattgccatcgatctgtatgaatgatgaatccaacagttagctatgtcaagtgccagagttttaaatacaaataaagtaaaggcagcaatgtttaatggaattgtgaaatcagcagcttagctatatttgagcgctgtgttgattttgcaatgaaatcagcagcttagctatatgtcaagtaaagggtgcgtcaatttctattgcatctacagtgttattcttttgcagccacagctggtcagctgcagagcgcatcgtaaattctggacatgtcaattctttt

SEQ ID NO: 42819 - DNA, 2217 bp, Zea Mays
gaaaaaaactgtccctgcctctgtactcgagtgggcgcagtgaataccctctctcggtccctccaaccgcgctcgtcttatcctcaactcgtcacccacttcccgccatctgccgtccctgcactgcgcttataccctgcaggcaacagcagcgatggcggcgagggtaccggcggccgatctcaaccagcacctctcctcgccgttcatcgcacggcgctgccacggcccaggtgaagccgccctcgaggcgcctctcagcgtacgcatcaaatccagaacgccgcggcgacgcgcggaatccacgaccacgaggatcctctgcaggggcgcagaggcgcagccgggctctggaggagggaggaggagggagccgctgcggcgcggggccgtcagcgcgcgcctcccggtgccggaccacatacgccggccgccctacgtcggcacggccgccgtcccggaggtgtgccccgaccggcaggtgcacgacggcgagagcatcatgcggatgctggacgcctgcgagctcgccgctcgggtgctgcaccatgccggggcgatggtcaagccctcggtgacgacggacgagatcgacagggctgtgcaccagatgatcgttgacgccggcgcctacccctcccctctcggatacggcgggttccccaagagcgtgtgcacgtcggtgaacgagtgcacctgccacggcatccccgactcacgcgagctacaggatggcgacattatcaacatcgacgttactgtctacttaaacggataccatggggacacctcgaggacgtacctgtgcggagaagtcgacgacgcaactaagcagctcgtgaaggtcactgaagagtgcatgatgcgcggcatatcagcctgcaggcacggcgccagtttcaaggaaatcggccagagaataagtgagcacgcggagaagtacggatacggcatcgaccccttcgtggggcacggcgttgggaggatgttccactgcgagcccatcatatggcatacctcctcctggacggcagcaatcacatcaccatctcggccggcggcagcgccaggttgaggtccagccgcaggcccacgggcggcgccgcgtcgaacactacagacgacgacgacgaggacagcgacgatgacccagagtagctctgctgctcctcgctcttgggcggcaagaagtgcagcagcgccggcgtcacggcggccgccgccgccgggtccgcgaacagctggtacggctctgcggccgccgccgcagccggcagcgccaggctgaggtccagcgacggggccgccagcggcagggagcacgacgacgccgacgccgacgccgacgacgactcgtacaccacggcgctcccgctcccgctcgccgctggagcctccgccaacgcctccgccgtcggctccggggcggggtagttggtggcggcgccgggcccgcggagcttgcgcgcggcggcgtcgtacgcccgcgccgcctgctccggcgtgtcgaaggtgcccagccacacgcgcgccttccgcaccgggtcgcggatctccgccgcgtaccggccccacggccgcttccgcacgccgcgcagcctcggctgctccgccgccgccgccgccgacactggtctcttgggcgccatggacggaccgaccagcaacacaactgcctctgccttgcttgctttctctcgctgctgcttgtctgccgaggagcttcggaggatggatggacgggtgggaatgggaatgccgctgccgctggcgaggcgcgggaatatatatacacagacgggacaggaccaagggagggcggcggacggtgacaggcagggtgaggtggagtgtgggaggaggagagcagacgcacggaaggtgaggtctgatctgtctgtggaccgggcttgggcgtacgtgggggcagtgggggcccggggcgccgcccccaaccaagcgcgtttcggcggccgtttcttcgtttcttgtgcgtcggcgcgtgaggcgcgtgagctaccgtgtctgctccgccgctggttcgctcggatccgtctcgtggctcacgtgggacgcgcccgcgtacttcgttgcccgcccacgcccagccgtcggatccgtgattgatgcttcatgatccgtgctgtgctgttgtctgaaaggttgaggtcgccgcaggttcgtctccaagtccagtggcggatatttataaataac

SEQ ID NO: 42820 - DNA, 1623 bp, Zea Mays
gaaaaaaactgtccctgcctctgtactcgagtgggcgcagtgaataccctctctcggtccctccaaccgcgctcgtcttatcctcaactcgtcacccacttcccgccatctgccgtccctgcactgcgcttataccctgcaggcaacagcagcgatggcggcgagggtaccggcggccgatctcaaccagcacctctcctcgccgttcatcgcacggcgctgccacggcccaggtgaagccgccctcgaggcgcctctcagcgtacgcatcaaatccagaacgccgcggcgacgcgcggaatccacgaccacgaggatcctctgcaggggcgcagaggcgcagccgggctctggaggagggaggaggagggagccgctgcggcgcggggccgtcagcgcgcgcctcccggtgccggaccacatacgccggccgccctacgtcggcacggccgccgtcccggaggtgtgccccgaccggcaggtgcacgacggcgagagcatcatgcggatgctggacgcctgcgagctcgccgctcgggtgctgcaccatgccggggcgatggtcaagccctcggtgacgacggacgagatcgacagggctgtgcaccagatgatcgttgacgccggcgcctacccctcccctctcggatacggcgggttccccaagagcgtgtgcacgtcggtgaacgagtgcacctgccacggcatccccgactcacgcgagctacaggtatatatgtaattgctgaacctgcttgatttttgagctgaacggttctgcttcctcccaatggccttgcaggatggcgacattatcaacatcgacgttactgtctacttaaacggataccatggggacacctcgaggacgtacctgtgcggagaagtcgacgacgcaactaagcagctcgtgaaggtcactgaagagtgcatgatgcgcggcatatcagcctgcaggcacggcgccagtttcaaggaaatcggccagagaataaggtctcggtctctcgatcttatcgaacatacaagcgtttcttttttaaaaaaaaagcagcttatttcagtcaatagaacttgattgttaagaacgccgacagatcgcaccgcgcggattgttttccattgctgtgaactggctctgctttggttgttttgttccagtgagcacgcggagaagtacggatacggcatcgaccccttcgtggggcacggcgttgggaggatgttccactgcgagcccatcatatggcatacctacgattacgagcccgggttcatggtcgcaggccagacattcaccgtagggaatggtcacgtgctgagaacccgtgcgatgcagagccgacgctgtcgatggggagcacgcagtgcgtggtgtgggacgacgggtggacggccgtggcggcggacggcagcctcagcgcgcagttcgagcacaccgtgctggtcaccggcgacggcgcggaggtcctgaccgggttcccgtagctgcctgcacgcatcacgtgagcggtgagcctgggtgggccactgcgtcggcgagggacggaactgcaggagcaggcatgcagctatgcgcacgctgacaattttattaaaaatctatgttggacggttgccgta

SEQ ID NO: 42821 - DNA, 2847 bp, Zea Mays
catagcgcaccaccacgggccacggcaatacggcatcatctccaaactcccgaggggggaccatcaccgctgctgagcacgcccgccgcctgcccttcctcctcccacccgtgccgcagctttcgattcctgcccgcctcattgctacctggtcgggccgcggaattaatgtcgcgcggaggaaatccgagcaggtaaacaagtctagctgaagtgacgattgccagcattgttcgaccgtgcggcttctgtttggctggaaccgtgatggatccagaaaaacaaaatgagatgagcctgatcgacaagagagaactagtatacgaagttgcaagatggcctcaaggtgccatggagattcttcggtgctggacccgcagggaacttcttgagcttatttgtgttgagttgggcaaagagaggaagtataccaatgtcccaaaagctaagatgattgcttacctattgaaattagtttcacggaatagtggaaagaatggacaactcaagaatgataatccgaatgttatgttattagggcaggataacaaagatgaaatacaaatgaaggaatctgatgaacaatcacgaccactcaaaactgcaaactctgactcatcaataagcagagaggcttgtgccggtagttcagtggtgtgcagcaatgttgcatgccaagccacaccaaatgcaggagataaatattgcaaacgttgctcttgctgcatttgcaataaatacgatgataacaaagaccctagtttgtggttggtttgcagctctgataatccatacagtggttgttcatgtggtgtctcttgtcacctaaactgtgctctaaagaataaaagggctggcattgtcaagaatgggtgcaacaagttagactgtagtttctactgtgttagttgtgggaaaatcaactggctaatgaggtgtttgcagaaacaacttgcaattgctagggaggcaagaagagttgatgtgctttgtgagcggttgtcattgagccataaaataatacaagggtctgaacgttacaaggaaatagcgagcataatcagctcagctgtgaaaacacttgaaatagaagttggtagtgcattggatcaggtctctgtgatcacggggcgtggcatcgtgaaccggcttacttgtggtgctgaagttcagaagctttgttcaagtacattagaaattgtagactctaaagtggataacatcttggagttcgagtccaataatagtccaaaactcctaggtcctcagccccaaatcctttttcatgagatcactccattttctgtggttattgtgttgaactatcagcatgacatcggtaaggagcagattgatggttccaaaatttggcaccgaagtgccagggtttgcaactattcatcagagcccacatgccacatactgaggccaaacactaggagcctggtttctggtctgagcccttcaactgaatacttcttcaaggttttgccttttagcagcacacatgggtttactgagtgggagacaaaatgcagcacacgcagcctggaccatggcagcagccagtgctcaactcagaactctgagagcatgtgcctcaaagacgattcaatgcagcatcacaaaaaggatttgaatgtgcagaatcaccagagaaccattcaatatgattcacctaagggttctacaaattcaagtgagaacaatttatcatgtgatcggtattccaagcgggctaaggttgcaaggctagatggtgcaagcgacaacgatgaaagccagttgccgccaacttctgaagttttaccatttgcaagctccaactcttctccttccgaagctccaagtaaacctgacttgcttattggcaccccagattcggcctccaagaactatgtggagcagcagtacgagtactgcgtgagggtggtcaggtggctggagcatgaagggcacatggacaatgacttccgtgtaaagttcctcacttggttcagcctgaaggcaacaacacaggacaggcgaatcgtgggcgcctttgtagatgttctcatcggtgatcctgcaagcttggttggccaactggttgatgcattcaaggatgccatctgtatcaaggagaagccctctcaagcacaacagaaagatgcatgctgcaaggtttggcactagaaaccttcataactgttctccatcgctgtgtgacgtaagtttttctggtgactgaaggatgaaatattgaagttatcacctagcaggttgcatctgaattgtgtcgagacagacattgggcacttgagataaacttttaaggttataaaagacgataaaatgctgtagatgcttcattcggcattcaggtccatctgatctctcatttatttattccaattcagtcgatacgcggactattgatccatgaaggcaatcgtggtggaaccatgtgctgatgagacatggttcatggaccggttgagtttaggtttcaactagtgaagtagttggagtttgttagcagacaagcaattgtatgcatgtggaatgctatcttggatctgcaagctaactaatcatatcatgactttggtagatgtttattgttattagttgatagttgactcattcttttcgtgtgacgtgtttgaagtgccggaagtagcagttcatgtacagtcttggagccttagaccgtgtccagcagtctattcgtagcttacctaaaatattgtttttgcattgcctaaaatattgtttttgcaatgttctgtactgtagacttgtagactgtattgttcacatagtagagtaggtatgaggatgtgtaagctgttagaaatagcctta

SEQ ID NO: 42822 - DNA, 2101 bp, Zea Mays
catagcgcaccaccacgggccacggcaatacggcatcatctccaaactcccgaggggggaccatcaccgctgctgagcacgcccgccgcctgcccttcctcctcccacccgtgccgcagctttcgattcctgcccgcctcattgctacctggtcgggccgcggaattaatgtcgcgcggaggaaatccggtgtttgcagaaacaacttgcaattgctagggaggcaagaagagttgatgtgctttgtgagcggttgtcattgagccataaaataatacaagggtctgaacgttacaaggaaatagcgagcataatcagctcagctgtgaaaacacttgaaatagaagttggtagtgcattggatcaggtctctgtgatcacggggcgtggcatcgtgaaccggcttacttgtggtgctgaagttcagaagctttgttcaagtacattagaaattgtagactctaaagtggataacatcttggagttcgagtccaataatagtccaaaactcctaggtcctcagccccaaatcctttttcatgagatcactccattttctgtggttattgtgttgaactatcagcatgacatcggtaaggagcagattgatggttccaaaatttggcaccgaagtgccagggtttgcaactattcatcagagcccacatgccacatactgaggccaaacactaggagcctggtttctggtctgagcccttcaactgaatacttcttcaaggttttgccttttagcagcacacatgggtttactgagtgggagacaaaatgcagcacacgcagcctggaccatggcagcagccagtgctcaactcagaactctgagagcatgtgcctcaaagacgattcaatgcagcatcacaaaaaggatttgaatgtgcagaatcaccagagaaccattcaatatgattcacctaagggttctacaaattcaagtgagaacaatttatcatgtgatcggtattccaagcgggctaaggttgcaaggctagatggtgcaagcgacaacgatgaaagccagttgccgccaacttctgaagttttaccatttgcaagctccaactcttctccttccgaagctccaagtaaacctgacttgcttattggcaccccagattcggcctccaagaactatgtggagcagcagtacgagtactgcgtgagggtggtcaggtggctggagcatgaagggcacatggacaatgacttccgtgtaaagttcctcacttggttcagcctgaaggcaacaacacaggacaggcgaatcgtgggcgcctttgtagatgttctcatcggtgatcctgcaagcttggttggccaactggttgatgcattcaaggatgccatctgtatcaaggagaagccctctcaagcacaacagaaagatgcatgctgcaaggtttggcactagaaaccttcataactgttctccatcgctgtgtgacgtaagtttttctggtgactgaaggatgaaatattgaagttatcacctagcaggttgcatctgaattgtgtcgagacagacattgggcacttgagataaacttttaaggttataaaagacgataaaatgctgtagatgcttcattcggcattcaggtccatctgatctctcatttatttattccaattcagtcgatacgcggactattgatccatgaaggcaatcgtggtggaaccatgtgctgatgagacatggttcatggaccggttgagtttaggtttcaactagtgaagtagttggagtttgttagcagacaagcaattgtatgcatgtggaatgctatcttggatctgcaagctaactaatcatatcatgactttggtagatgtttattgttattagttgatagttgactcattcttttcgtgtgacgtgtttgaagtgccggaagtagcagttcatgtacagtcttggagccttagaccgtgtccagcagtctattcgtagcttacctaaaatattgtttttgcattgcctaaaatattgtttttgcaatgttctgtactgtagacttgtagactgtattgttcacatagtagagtaggtatgaggatgtgtaagctgttagaaatagcctta

SEQ ID NO: 42823 - DNA, 3108 bp, Zea Mays
ctcaaaagcatagcgcaccaccacgggccacggcaatacggcatcatctccaaactcccgaggggggaccatcaccgctgctgagcacgcccgccgcctgcccttcctcctcccacccgtgccgcagctttcgattcctgcccgcctcattgctacctggtcgggccgcggaattaatgtcgcgcggaggaaatccggaaccgtgatggatccagaaaaacaaaatgagatgagcctgatcgacaagagagaactagtatacgaagttgcaagatggcctcaaggtgccatggagattcttcggtgctggacccgcagggaacttcttgagcttatttgtgttgagttgggcaaagagaggaagtataccaatgtcccaaaagctaagatgattgcttacctattgaaattagtttcacggaatagtggaaagaatggacaactcaagaatgataatccgaatgttatgttattagggcaggataacaaagatgaaatacaaatgaaggaatctgatgaacaatcacgaccactcaaaactgcaaactctgactcatcaataagcagagaggcttgtgccggtagttcagtggtgtgcagcaatgttgcatgccaagccacaccaaatgcaggagataaatattgcaaacgttgctcttgctgcatttgcaataaatacgatgataacaaagaccctagtttgtggttggtttgcagctctgataatccatacagtggttgttcatgtggtgtctcttgtcacctaaactgtgctctaaagaataaaagggctggcattgtcaagaatgggtgcaacaagttagactgtagtttctactgtgttagttgtgggaaaatcaactggctaatgaggtatccttctgactgttttagttcattaattaacatgccatgggaaaattatcacctctgtttgttagcataattcttatttaggtctgaccatctagaactagtaccacgatctgtattatcggagcgatacttttgtcttttggtagttgttatcataacaaaaaaagtatgcttttttgttcctttaccaagcaccaacaaattttagtacagggaaaaggaacttgagattttttaaatgctataaatattatggtcagatatgcttcttgtgcgtattgaaacttcacatatatatatttacctgttagctactgcaggtgtttgcagaaacaacttgcaattgctagggaggcaagaagagttgatgtgctttgtgagcggttgtcattgagccataaaataatacaagggtctgaacgttacaaggaaatagcgagcataatcagctcagctgtgaaaacacttgaaatagaagttggtagtgcattggatcaggtctctgtgatcacggggcgtggcatcgtgaaccggcttacttgtggtgctgaagttcagaagctttgttcaagtacattagaaattgtagactctaaagtggataacatcttggagttcgagtccaataatagtccaaaactcctaggtcctcagccccaaatcctttttcatgagatcactccattttctgtggttattgtgttgaactatcagcatgacatcggtaaggagcagattgatggttccaaaatttggcaccgaagtgccagggtttgcaactattcatcagagcccacatgccacatactgaggccaaacactaggagcctggtttctggtctgagcccttcaactgaatacttcttcaaggttttgccttttagcagcacacatgggtttactgagtgggagacaaaatgcagcacacgcagcctggaccatggcagcagccagtgctcaactcagaactctgagagcatgtgcctcaaagacgattcaatgcagcatcacaaaaaggatttgaatgtgcagaatcaccagagaaccattcaatatgattcacctaagggttctacaaattcaagtgagaacaatttatcatgtgatcggtattccaagcgggctaaggttgcaaggctagatggtgcaagcgacaacgatgaaagccagttgccgccaacttctgaagttttaccatttgcaagctccaactcttctccttccgaagctccaagtaaacctgacttgcttattggcaccccagattcggcctccaagaactatgtggagcagcagtacgagtactgcgtgagggtggtcaggtggctggagcatgaagggcacatggacaatgacttccgtgtaaagttcctcacttggttcagcctgaaggcaacaacacaggacaggcgaatcgtgggcgcctttgtagatgttctcatcggtgatcctgcaagcttggttggccaactggttgatgcattcaaggatgccatctgtatcaaggagaagccctctcaagcacaacagaaagatgcatgctgcaaggtttggcactagaaaccttcataactgttctccatcgctgtgtgacgtaagtttttctggtgactgaaggatgaaatattgaagttatcacctagcaggttgcatctgaattgtgtcgagacagacattgggcacttgagataaacttttaaggttataaaagacgataaaatgctgtagatgcttcattcggcattcaggtccatctgatctctcatttatttattccaattcagtcgatacgcggactattgatccatgaaggcaatcgtggtggaaccatgtgctgatgagacatggttcatggaccggttgagtttaggtttcaactagtgaagtagttggagtttgttagcagacaagcaattgtatgcatgtggaatgctatcttggatctgcaagctaactaatcatatcatgactttggtagatgtttattgttattagttgatagttgactcattcttttcgtgtgacgtgtttgaagtgccggaagtagcagttcatgtacagtcttggagccttagaccgtgtccagcagtctattcgtagcttacctaaaatattgtttttgcattgcctaaaatattgtttttgcaatgttctgtactgtagacttgtagactgtattgttcacatagtagagtaggtatgaggatgtgtaagctgttagaaatagcctta

SEQ ID NO: 42824 - DNA, 2799 bp, Zea Mays
ccctcccctcgtgtctcaaaagcatagcgcaccaccacgggccacggcaatacggcatcatctccaaactcccgaggggggaccatcaccgctgctgagcacgcccgccgcctgcccttcctcctcccacccgtgccgcagctttcgattcctgcccgcctcattgctacctggtcgggccgcggaattaatgtcgcgcggaggaaatccggaaccgtgatggatccagaaaaacaaaatgagatgagcctgatcgacaagagagaactagtatacgaagttgcaagatggcctcaaggtgccatggagattcttcggtgctggacccgcagggaacttcttgagcttatttgtgttgagttgggcaaagagaggaagtataccaatgtcccaaaagctaagatgattgcttacctattgaaattagtttcacggaatagtggaaagaatggacaactcaagaatgataatccgaatgttatgttattagggcaggataacaaagatgaaatacaaatgaaggaatctgatgaacaatcacgaccactcaaaactgcaaactctgactcatcaataagcagagaggcttgtgccggtagttcagtggtgtgcagcaatgttgcatgccaagccacaccaaatgcaggagataaatattgcaaacgttgctcttgctgcatttgcaataaatacgatgataacaaagaccctagtttgtggttggtttgcagctctgataatccatacagtggttgttcatgtggtgtctcttgtcacctaaactgtgctctaaagaataaaagggctggcattgtcaagaatgggtgcaacaagttagactgtagtttctactgtgttagttgtgggaaaatcaactggctaatgaggtgtttgcagaaacaacttgcaattgctagggaggcaagaagagttgatgtgctttgtgagcggttgtcattgagccataaaataatacaagggtctgaacgttacaaggaaatagcgagcataatcagctcagctgtgaaaacacttgaaatagaagttggtagtgcattggatcaggtctctgtgatcacggggcgtggcatcgtgaaccggcttacttgtggtgctgaagttcagaagctttgttcaagtacattagaaattgtagactctaaagtggataacatcttggagttcgagtccaataatagtccaaaactcctaggtcctcagccccaaatcctttttcatgagatcactccattttctgtggttattgtgttgaactatcagcatgacatcggtaaggagcagattgatggttccaaaatttggcaccgaagtgccagggtttgcaactattcatcagagcccacatgccacatactgaggccaaacactaggagcctggtttctggtctgagcccttcaactgaatacttcttcaaggttttgccttttagcagcacacatgggtttactgagtgggagacaaaatgcagcacacgcagcctggaccatggcagcagccagtgctcaactcagaactctgagagcatgtgcctcaaagacgattcaatgcagcatcacaaaaaggatttgaatgtgcagaatcaccagagaaccattcaatatgattcacctaagggttctacaaattcaagtgagaacaatttatcatgtgatcggtattccaagcgggctaaggttgcaaggctagatggtgcaagcgacaacgatgaaagccagttgccgccaacttctgaagttttaccatttgcaagctccaactcttctccttccgaagctccaagtaaacctgacttgcttattggcaccccagattcggcctccaagaactatgtggagcagcagtacgagtactgcgtgagggtggtcaggtggctggagcatgaagggcacatggacaatgacttccgtgtaaagttcctcacttggttcagcctgaaggcaacaacacaggacaggcgaatcgtgggcgcctttgtagatgttctcatcggtgatcctgcaagcttggttggccaactggttgatgcattcaaggatgccatctgtatcaaggagaagccctctcaagcacaacagaaagatgcatgctgcaaggtttggcactagaaaccttcataactgttctccatcgctgtgtgacgtaagtttttctggtgactgaaggatgaaatattgaagttatcacctagcaggttgcatctgaattgtgtcgagacagacattgggcacttgagataaacttttaaggttataaaagacgataaaatgctgtagatgcttcattcggcattcaggtccatctgatctctcatttatttattccaattcagtcgatacgcggactattgatccatgaaggcaatcgtggtggaaccatgtgctgatgagacatggttcatggaccggttgagtttaggtttcaactagtgaagtagttggagtttgttagcagacaagcaattgtatgcatgtggaatgctatcttggatctgcaagctaactaatcatatcatgactttggtagatgtttattgttattagttgatagttgactcattcttttcgtgtgacgtgtttgaagtgccggaagtagcagttcatgtacagtcttggagccttagaccgtgtccagcagtctattcgtagcttacctaaaatattgtttttgcattgcctaaaatattgtttttgcaatgttctgtactgtagacttgtagactgtattgttcacatagtagagtaggtatgaggatgtgtaagctgttagaaatagcctta

SEQ ID NO: 42825 - DNA, 3556 bp, Zea Mays
cccacgcccccctcccctcgtgtctcaaaagcatagcgcaccaccacgggccacggcaatacggcatcatctccaaactcccgaggggggaccatcaccgctgctgagcacgcccgccgcctgcccttcctcctcccacccgtgccgcagctttcgattcctgcccgcctcattgctacctggtcgggccgcggaattaatgtcgcgcggaggaaatccggtaagctccggcccgattttcaactctcccctccctcatcctcgattggggttgagaaattgaatcaaaccccccacacccacccacccaaaaaagtcgcccttcctcggacgagatccccccaatcagttcttattgtggccgatagattgattgcctcacttgccttccgctcgcttttggggtgctaacctaatcggtgaccctccttgtgtgctcggattgggttctcgttctcatcagcattgacctcagcggctttcttttggacaatgctgctgttttactgcttgtttctaccatctacggccgtgtaggtgtgtccgacacgccacaaaaacttttcgttatgttcagcaggtaaacaagtctagctgaagtgacgattgccagcattgttcgaccgtgcggcttctgtttggctggaaccgtgatggatccagaaaaacaaaatgagatgagcctgatcgacaagagagaactagtatacgaagttgcaagatggcctcaaggtgccatggagattcttcggtgctggacccgcagggaacttcttgagcttatttgtgttgagttgggcaaagagaggaagtataccaatgtcccaaaagctaagatgattgcttacctattgaaattagtttcacggaatagtggaaagaatggacaactcaagaatgataatccgaatgttatgttattagggcaggataacaaagatgaaatacaaatgaaggaatctgatgaacaatcacgaccactcaaaactgcaaactctgactcatcaataagcagagaggcttgtgccggtagttcagtggtgtgcagcaatgttgcatgccaagccacaccaaatgcaggagataaatattgcaaacgttgctcttgctgcatttgcaataaatacgatgataacaaagaccctagtttgtggttggtttgcagctctgataatccatacagtggttgttcatgtggtgtctcttgtcacctaaactgtgctctaaagaataaaagggctggcattgtcaagaatgggtgcaacaagttagactgtagtttctactgtgttagttgtgggaaaatcaactggctaatgaggtatccttctgactgttttagttcattaattaacatgccatgggaaaattatcacctctgtttgttagcataattcttatttaggtctgaccatctagaactagtaccacgatctgtattatcggagcgatacttttgtcttttggtagttgttatcataacaaaaaaagtatgcttttttgttcctttaccaagcaccaacaaattttagtacagggaaaaggaacttgagattttttaaatgctataaatattatggtcagatatgcttcttgtgcgtattgaaacttcacatatatatatttacctgttagctactgcaggtgtttgcagaaacaacttgcaattgctagggaggcaagaagagttgatgtgctttgtgagcggttgtcattgagccataaaataatacaagggtctgaacgttacaaggaaatagcgagcataatcagctcagctgtgaaaacacttgaaatagaagttggtagtgcattggatcaggtctctgtgatcacggggcgtggcatcgtgaaccggcttacttgtggtgctgaagttcagaagctttgttcaagtacattagaaattgtagactctaaagtggataacatcttggagttcgagtccaataatagtccaaaactcctaggtcctcagccccaaatcctttttcatgagatcactccattttctgtggttattgtgttgaactatcagcatgacatcggtaaggagcagattgatggttccaaaatttggcaccgaagtgccagggtttgcaactattcatcagagcccacatgccacatactgaggccaaacactaggagcctggtttctggtctgagcccttcaactgaatacttcttcaaggttttgccttttagcagcacacatgggtttactgagtgggagacaaaatgcagcacacgcagcctggaccatggcagcagccagtgctcaactcagaactctgagagcatgtgcctcaaagacgattcaatgcagcatcacaaaaaggatttgaatgtgcagaatcaccagagaaccattcaatatgattcacctaagggttctacaaattcaagtgagaacaatttatcatgtgatcggtattccaagcgggctaaggttgcaaggctagatggtgcaagcgacaacgatgaaagccagttgccgccaacttctgaagttttaccatttgcaagctccaactcttctccttccgaagctccaagtaaacctgacttgcttattggcaccccagattcggcctccaagaactatgtggagcagcagtacgagtactgcgtgagggtggtcaggtggctggagcatgaagggcacatggacaatgacttccgtgtaaagttcctcacttggttcagcctgaaggcaacaacacaggacaggcgaatcgtgggcgcctttgtagatgttctcatcggtgatcctgcaagcttggttggccaactggttgatgcattcaaggatgccatctgtatcaaggagaagccctctcaagcacaacagaaagatgcatgctgcaaggtttggcactagaaaccttcataactgttctccatcgctgtgtgacgtaagtttttctggtgactgaaggatgaaatattgaagttatcacctagcaggttgcatctgaattgtgtcgagacagacattgggcacttgagataaacttttaaggttataaaagacgataaaatgctgtagatgcttcattcggcattcaggtccatctgatctctcatttatttattccaattcagtcgatacgcggactattgatccatgaaggcaatcgtggtggaaccatgtgctgatgagacatggttcatggaccggttgagtttaggtttcaactagtgaagtagttggagtttgttagcagacaagcaattgtatgcatgtggaatgctatcttggatctgcaagctaactaatcatatcatgactttggtagatgtttattgttattagttgatagttgactcattcttttcgtgtgacgtgtttgaagtgccggaagtagcagttcatgtacagtcttggagccttagaccgtgtccagcagtctattcgtagcttacctaaaatattgtttttgcattgcctaaaatattgtttttgcaatgttctgtactgtagacttgtagactgtattgttcacatagtagagtaggtatgaggatgtgtaagctgttagaaatagcctta

SEQ ID NO: 42826 - DNA, 3320 bp, Zea Mays
cccacgcccccctcccctcgtgtctcaaaagcatagcgcaccaccacgggccacggcaatacggcatcatctccaaactcccgaggggggaccatcaccgctgctgagcacgcccgccgcctgcccttcctcctcccacccgtgccgcagctttcgattcctgcccgcctcattgctacctggtcgggccgcggaattaatgtcgcgcggaggaaatccggtaagctccggcccgattttcaactctcccctccctcatcctcgattggggttgagaaattgaatcaaaccccccacacccacccacccaaaaaagtcgcccttcctcggacgagatccccccaatcagttcttattgtggccgatagattgattgcctcacttgccttccgctcgcttttggggtgctaacctaatcggtgaccctccttgtgtgctcggattgggttctcgttctcatcagcattgacctcagcggctttcttttggacaatgctgctgttttactgcttgtttctaccatctacggccgtgtaggtgtgtccgacacgccacaaaaacttttcgttatgttcagcaggtaaacaagtctagctgaagtgacgattgccagcattgttcgaccgtgcggcttctgtttggctggaaccgtgatggatccagaaaaacaaaatgagatgagcctgatcgacaagagagaactagtatacgaagttgcaagatggcctcaaggtgccatggagattcttcggtgctggacccgcagggaacttcttgagcttatttgtgttgagttgggcaaagagaggaagtataccaatgtcccaaaagctaagatgattgcttacctattgaaattagtttcacggaatagtggaaagaatggacaactcaagaatgataatccgaatgttatgttattagggcaggataacaaagatgaaatacaaatgaaggaatctgatgaacaatcacgaccactcaaaactgcaaactctgactcatcaataagcagagaggcttgtgccggtagttcagtggtgtgcagcaatgttgcatgccaagccacaccaaatgcaggagataaatattgcaaacgttgctcttgctgcatttgcaataaatacgatgataacaaagaccctagtttgtggttggtttgcagctctgataatccatacagtggttgttcatgtggtgtctcttgtcacctaaactgtgctctaaagaataaaagggctggcattgtcaagaatgggtgcaacaagttagactgtagtttctactgtgttagttgtgggaaaatcaactggctaatgaggtatccttctgactgttttagttcattaattaacatgccatgggaaaattatcacctctgtttgttagcataattcttatttaggtctgaccatctagaactagtaccacgatctgtattatcggagcgatacttttgtcttttggtagttgttatcataacaaaaaaagtatgcttttttgttcctttaccaagcaccaacaaattttagtacagggaaaaggaacttgagattttttaaatgctataaatattatggtcagatatgcttcttgtgcgtattgaaacttcacatatatatatttacctgttagctactgcaggtgtttgcagaaacaacttgcaattgctagggaggcaagaagagttgatgtgctttgtgagcggttgtcattgagccataaaataatacaagggtctgaacgttacaaggaaatagcgagcataatcagctcagctgtgaaaacacttgaaatagaagttggtagtgcattggatcaggtctctgtgatcacggggcgtggcatcgtgaaccggcttacttgtggtgctgaagttcagaagctttgttcaagtacattagaaattgtagactctaaagtggataacatcttggagttcgagtccaataatagtccaaaactcctaggtcctcagccccaaatcctttttcatgagatcactccattttctgtggttattgtgttgaactatcagcatgacatcggtaaggagcagattgatggttccaaaatttggcaccgaagtgccagggtttgcaactattcatcagagcccacatgccacatactgaggccaaacactaggagcctggtttctggtctgagcccttcaactgaatacttcttcaaggttttgccttttagcagcacacatgggtttactgagtgggagacaaaatgcagcacacgcagcctggaccatggcagcagccagtgctcaactcagaactctgagagcatgtgcctcaaagacgattcaatgcagcatcacaaaaaggatttgaatgtgcagaatcaccagagaaccattcaatatgattcacctaagggttctacaaattcaagtgagaacaatttatcatgtgatcggtattccaagcgggctaaggttgcaaggctagatggtgcaagcgacaacgatgaaagccagttgccgccaacttctgaagttttaccatttgcaagctccaactcttctccttccgaagctccaagtaaacctgacttgcttattggcaccccagattcggcctccaagaactatgtggagcagcagtacgagtactgcgtgagggtggtcaggtggctggagcatgaagggcacatggacaatgacttccgtgtaaagttcctcacttggttcagcctgaaggcaacaacacaggacaggcgaatcgtgggcgcctttgtagatgttctcatcggtgatcctgcaagcttggttggccaactggttgatgcattcaaggatgccatctgtatcaaggagaagccctctcaagcacaacagaaagatgcatgctgcaagtcgatacgcggactattgatccatgaaggcaatcgtggtggaaccatgtgctgatgagacatggttcatggaccggttgagtttaggtttcaactagtgaagtagttggagtttgttagcagacaagcaattgtatgcatgtggaatgctatcttggatctgcaagctaactaatcatatcatgactttggtagatgtttattgttattagttgatagttgactcattcttttcgtgtgacgtgtttgaagtgccggaagtagcagttcatgtacagtcttggagccttagaccgtgtccagcagtctattcgtagcttacctaaaatattgtttttgcattgcctaaaatattgtttttgcaatgttctgtactgtagacttgtagactgtattgttcacatagtagagtaggtatgaggatgtgtaagctgttagaaatagcctta

SEQ ID NO: 42827 - DNA, 2878 bp, Zea Mays
ctcccacgcccccctcccctcgtgtctcaaaagcatagcgcaccaccacgggccacggcaatacggcatcatctccaaactcccgaggggggaccatcaccgctgctgagcacgcccgccgcctgcccttcctcctcccacccgtgccgcagctttcgattcctgcccgcctcattgctacctggtcgggccgcggaattaatgtcgcgcggaggaaatccgcaggtaaacaagtctagctgaagtgacgattgccagcattgttcgaccgtgcggcttctgtttggctggaaccgtgatggatccagaaaaacaaaatgagatgagcctgatcgacaagagagaactagtatacgaagttgcaagatggcctcaaggtgccatggagattcttcggtgctggacccgcagggaacttcttgagcttatttgtgttgagttgggcaaagagaggaagtataccaatgtcccaaaagctaagatgattgcttacctattgaaattagtttcacggaatagtggaaagaatggacaactcaagaatgataatccgaatgttatgttattagggcaggataacaaagatgaaatacaaatgaaggaatctgatgaacaatcacgaccactcaaaactgcaaactctgactcatcaataagcagagaggcttgtgccggtagttcagtggtgtgcagcaatgttgcatgccaagccacaccaaatgcaggagataaatattgcaaacgttgctcttgctgcatttgcaataaatacgatgataacaaagaccctagtttgtggttggtttgcagctctgataatccatacagtggttgttcatgtggtgtctcttgtcacctaaactgtgctctaaagaataaaagggctggcattgtcaagaatgggtgcaacaagttagactgtagtttctactgtgttagttgtgggaaaatcaactggctaatgaggtgtttgcagaaacaacttgcaattgctagggaggcaagaagagttgatgtgctttgtgagcggttgtcattgagccataaaataatacaagggtctgaacgttacaaggaaatagcgagcataatcagctcagctgtgaaaacacttgaaatagaagttggtagtgcattggatcaggtctctgtgatcacggggcgtggcatcgtgaaccggcttacttgtggtgctgaagttcagaagctttgttcaagtacattagaaattgtagactctaaagtggataacatcttggagttcgagtccaataatagtccaaaactcctaggtcctcagccccaaatcctttttcatgagatcactccattttctgtggttattgtgttgaactatcagcatgacatcggtaaggagcagattgatggttccaaaatttggcaccgaagtgccagggtttgcaactattcatcagagcccacatgccacatactgaggccaaacactaggagcctggtttctggtctgagcccttcaactgaatacttcttcaaggttttgccttttagcagcacacatgggtttactgagtgggagacaaaatgcagcacacgcagcctggaccatggcagcagccagtgctcaactcagaactctgagagcatgtgcctcaaagacgattcaatgcagcatcacaaaaaggatttgaatgtgcagaatcaccagagaaccattcaatatgattcacctaagggttctacaaattcaagtgagaacaatttatcatgtgatcggtattccaagcgggctaaggttgcaaggctagatggtgcaagcgacaacgatgaaagccagttgccgccaacttctgaagttttaccatttgcaagctccaactcttctccttccgaagctccaagtaaacctgacttgcttattggcaccccagattcggcctccaagaactatgtggagcagcagtacgagtactgcgtgagggtggtcaggtggctggagcatgaagggcacatggacaatgacttccgtgtaaagttcctcacttggttcagcctgaaggcaacaacacaggacaggcgaatcgtgggcgcctttgtagatgttctcatcggtgatcctgcaagcttggttggccaactggttgatgcattcaaggatgccatctgtatcaaggagaagccctctcaagcacaacagaaagatgcatgctgcaaggtttggcactagaaaccttcataactgttctccatcgctgtgtgacgtaagtttttctggtgactgaaggatgaaatattgaagttatcacctagcaggttgcatctgaattgtgtcgagacagacattgggcacttgagataaacttttaaggttataaaagacgataaaatgctgtagatgcttcattcggcattcaggtccatctgatctctcatttatttattccaattcagtcgatacgcggactattgatccatgaaggcaatcgtggtggaaccatgtgctgatgagacatggttcatggaccggttgagtttaggtttcaactagtgaagtagttggagtttgttagcagacaagcaattgtatgcatgtggaatgctatcttggatctgcaagctaactaatcatatcatgactttggtagatgtttattgttattagttgatagttgactcattcttttcgtgtgacgtgtttgaagtgccggaagtagcagttcatgtacagtcttggagccttagaccgtgtccagcagtctattcgtagcttacctaaaatattgtttttgcattgcctaaaatattgtttttgcaatgttctgtactgtagacttgtagactgtattgttcacatagtagagtaggtatgaggatgtgtaagctgttagaaatagcctta

SEQ ID NO: 42828 - DNA, 3137 bp, Zea Mays
ctcccacgcccccctcccctcgtgtctcaaaagcatagcgcaccaccacgggccacggcaatacggcatcatctccaaactcccgaggggggaccatcaccgctgctgagcacgcccgccgcctgcccttcctcctcccacccgtgccgcagctttcgattcctgcccgcctcattgctacctggtcgggccgcggaattaatgtcgcgcggaggaaatccggtaagctccggcccgattttcaactctcccctccctcatcctcgattggggttgagaaattgaatcaaaccccccacacccacccacccaaaaaagtcgcccttcctcggacgagatccccccaatcagttcttattgtggccgatagattgattgcctcacttgccttccgctcgcttttggggtgctaacctaatcggtgaccctccttgtgtgctcggattgggttctcgttctcatcagcattgacctcagcggctttcttttggacaatgctgctgttttactgcttgtttctaccatctacggccgtgtaggtgtgtccgacacgccacaaaaacttttcgttatgttcagcaggtaaacaagtctagctgaagtgacgattgccagcattgttcgaccgtgcggcttctgtttggctggaaccgtgatggatccagaaaaacaaaatgagatgagcctgatcgacaagagagaactagtatacgaagttgcaagatggcctcaaggtgccatggagattcttcggtgctggacccgcagggaacttcttgagcttatttgtgttgagttgggcaaagagaggaagtataccaatgtcccaaaagctaagatgattgcttacctattgaaattagtttcacggaatagtggaaagaatggacaactcaagaatgataatccgaatgttatgttattagggcaggataacaaagatgaaatacaaatgaaggaatctgatgaacaatcacgaccactcaaaactgcaaactctgactcatcaataagcagagaggcttgtgccggtagttcagtggtgtgcagcaatgttgcatgccaagccacaccaaatgcaggagataaatattgcaaacgttgctcttgctgcatttgcaataaatacgatgataacaaagaccctagtttgtggttggtttgcagctctgataatccatacagtggttgttcatgtggtgtctcttgtcacctaaactgtgctctaaagaataaaagggctggcattgtcaagaatgggtgcaacaagttagactgtagtttctactgtgttagttgtgggaaaatcaactggctaatgaggtgtttgcagaaacaacttgcaattgctagggaggcaagaagagttgatgtgctttgtgagcggttgtcattgagccataaaataatacaagggtctgaacgttacaaggaaatagcgagcataatcagctcagctgtgaaaacacttgaaatagaagttggtagtgcattggatcaggtctctgtgatcacggggcgtggcatcgtgaaccggcttacttgtggtgctgaagttcagaagctttgttcaagtacattagaaattgtagactctaaagtggataacatcttggagttcgagtccaataatagtccaaaactcctaggtcctcagccccaaatcctttttcatgagatcactccattttctgtggttattgtgttgaactatcagcatgacatcggtaaggagcagattgatggttccaaaatttggcaccgaagtgccagggtttgcaactattcatcagagcccacatgccacatactgaggccaaacactaggagcctggtttctggtctgagcccttcaactgaatacttcttcaaggttttgccttttagcagcacacatgggtttactgagtgggagacaaaatgcagcacacgcagcctggaccatggcagcagccagtgctcaactcagaactctgagagcatgtgcctcaaagacgattcaatgcagcatcacaaaaaggatttgaatgtgcagaatcaccagagaaccattcaatatgattcacctaagggttctacaaattcaagtgagaacaatttatcatgtgatcggtattccaagcgggctaaggttgcaaggctagatggtgcaagcgacaacgatgaaagccagttgccgccaacttctgaagttttaccatttgcaagctccaactcttctccttccgaagctccaagtaaacctgacttgcttattggcaccccagattcggcctccaagaactatgtggagcagcagtacgagtactgcgtgagggtggtcaggtggctggagcatgaagggcacatggacaatgacttccgtgtaaagttcctcacttggttcagcctgaaggcaacaacacaggacaggcgaatcgtgggcgcctttgtagatgttctcatcggtgatcctgcaagcttggttggccaactggttgatgcattcaaggatgccatctgtatcaaggagaagccctctcaagcacaacagaaagatgcatgctgcaaggttgcatctgaattgtgtcgagacagacattgggcacttgagataaacttttaaggttataaaagacgataaaatgctgtagatgcttcattcggcattcaggtccatctgatctctcatttatttattccaattcagtcgatacgcggactattgatccatgaaggcaatcgtggtggaaccatgtgctgatgagacatggttcatggaccggttgagtttaggtttcaactagtgaagtagttggagtttgttagcagacaagcaattgtatgcatgtggaatgctatcttggatctgcaagctaactaatcatatcatgactttggtagatgtttattgttattagttgatagttgactcattcttttcgtgtgacgtgtttgaagtgccggaagtagcagttcatgtacagtcttggagccttagaccgtgtccagcagtctattcgtagcttacctaaaatattgtttttgcattgcctaaaatattgtttttgcaatgttctgtactgtagacttgtagactgtattgttcacatagtagagtaggtatgaggatgtgtaagctgttagaaatagcctta

SEQ ID NO: 42829 - DNA, 2875 bp, Zea Mays
ctcccacgcccccctcccctcgtgtctcaaaagcatagcgcaccaccacgggccacggcaatacggcatcatctccaaactcccgaggggggaccatcaccgctgctgagcacgcccgccgcctgcccttcctcctcccacccgtgccgcagctttcgattcctgcccgcctcattgctacctggtcgggccgcggaattaatgtcgcgcggaggaaatccggtaaacaagtctagctgaagtgacgattgccagcattgttcgaccgtgcggcttctgtttggctggaaccgtgatggatccagaaaaacaaaatgagatgagcctgatcgacaagagagaactagtatacgaagttgcaagatggcctcaaggtgccatggagattcttcggtgctggacccgcagggaacttcttgagcttatttgtgttgagttgggcaaagagaggaagtataccaatgtcccaaaagctaagatgattgcttacctattgaaattagtttcacggaatagtggaaagaatggacaactcaagaatgataatccgaatgttatgttattagggcaggataacaaagatgaaatacaaatgaaggaatctgatgaacaatcacgaccactcaaaactgcaaactctgactcatcaataagcagagaggcttgtgccggtagttcagtggtgtgcagcaatgttgcatgccaagccacaccaaatgcaggagataaatattgcaaacgttgctcttgctgcatttgcaataaatacgatgataacaaagaccctagtttgtggttggtttgcagctctgataatccatacagtggttgttcatgtggtgtctcttgtcacctaaactgtgctctaaagaataaaagggctggcattgtcaagaatgggtgcaacaagttagactgtagtttctactgtgttagttgtgggaaaatcaactggctaatgaggtgtttgcagaaacaacttgcaattgctagggaggcaagaagagttgatgtgctttgtgagcggttgtcattgagccataaaataatacaagggtctgaacgttacaaggaaatagcgagcataatcagctcagctgtgaaaacacttgaaatagaagttggtagtgcattggatcaggtctctgtgatcacggggcgtggcatcgtgaaccggcttacttgtggtgctgaagttcagaagctttgttcaagtacattagaaattgtagactctaaagtggataacatcttggagttcgagtccaataatagtccaaaactcctaggtcctcagccccaaatcctttttcatgagatcactccattttctgtggttattgtgttgaactatcagcatgacatcggtaaggagcagattgatggttccaaaatttggcaccgaagtgccagggtttgcaactattcatcagagcccacatgccacatactgaggccaaacactaggagcctggtttctggtctgagcccttcaactgaatacttcttcaaggttttgccttttagcagcacacatgggtttactgagtgggagacaaaatgcagcacacgcagcctggaccatggcagcagccagtgctcaactcagaactctgagagcatgtgcctcaaagacgattcaatgcagcatcacaaaaaggatttgaatgtgcagaatcaccagagaaccattcaatatgattcacctaagggttctacaaattcaagtgagaacaatttatcatgtgatcggtattccaagcgggctaaggttgcaaggctagatggtgcaagcgacaacgatgaaagccagttgccgccaacttctgaagttttaccatttgcaagctccaactcttctccttccgaagctccaagtaaacctgacttgcttattggcaccccagattcggcctccaagaactatgtggagcagcagtacgagtactgcgtgagggtggtcaggtggctggagcatgaagggcacatggacaatgacttccgtgtaaagttcctcacttggttcagcctgaaggcaacaacacaggacaggcgaatcgtgggcgcctttgtagatgttctcatcggtgatcctgcaagcttggttggccaactggttgatgcattcaaggatgccatctgtatcaaggagaagccctctcaagcacaacagaaagatgcatgctgcaaggtttggcactagaaaccttcataactgttctccatcgctgtgtgacgtaagtttttctggtgactgaaggatgaaatattgaagttatcacctagcaggttgcatctgaattgtgtcgagacagacattgggcacttgagataaacttttaaggttataaaagacgataaaatgctgtagatgcttcattcggcattcaggtccatctgatctctcatttatttattccaattcagtcgatacgcggactattgatccatgaaggcaatcgtggtggaaccatgtgctgatgagacatggttcatggaccggttgagtttaggtttcaactagtgaagtagttggagtttgttagcagacaagcaattgtatgcatgtggaatgctatcttggatctgcaagctaactaatcatatcatgactttggtagatgtttattgttattagttgatagttgactcattcttttcgtgtgacgtgtttgaagtgccggaagtagcagttcatgtacagtcttggagccttagaccgtgtccagcagtctattcgtagcttacctaaaatattgtttttgcattgcctaaaatattgtttttgcaatgttctgtactgtagacttgtagactgtattgttcacatagtagagtaggtatgaggatgtgtaagctgttagaaatagcctta

SEQ ID NO: 42830 - DNA, 281 bp, Zea Mays
catagcgcaccaccacgggccacggcaatacggcatcatctccaaactcccgaggggggaccatcaccgctgctgagcacgcccgccgcctgcccttcctcctcccacccgtgccgcagctttcgattcctgcccgcctcattgctacctggtcgggccgcggaattaatgtcgcgcggaggaaatccgcaggtaaacaagtctagctgaagtgacgattgccagcattgttcgaccgtgcggcttctgtttggctggttagttgccagacctgttctgtg

SEQ ID NO: 42831 - DNA, 1971 bp, Zea Mays
ctttcttctcggcgtcctcgcagtttcgcgtttacccaaaatacccctaccttaaaccctccgcctccgccgccatgcgccgcctcctccaaaccctccgcccgctccaagccctacccctcaaccccgctcccggtatccccacccctctccgcctcctctctaccgcctcgtcggccgcgtcctcggactctgactccgccgcttcccccgccgtggccccgccccccgctgccgatgccgactttgacagcgccgactacgacctcccgacccctggtcccgccccctccagaaaaatcaacaaccccgccgccgcgctgaggaaggtccggttcgacccctccctccgcgcgcgcgccgacgaggcgctctttggtaaggggctgggcgcggcagccgttgatgaggaggatgaggaccgctcacgggacgtggcgctcgcgctgctcgatgcggcgctggaggcgcctgacgaggatgaagaggatctcggggaggtcagggaagaagaccagatgtcgctttccgttggcattgtcggcgcgcccaatgccggcaagtcctcgctcacaaataccatggttgggacaaaagtggctgcagtctcccgcaagacaaatactacgactcatgaaattttgggggtgctaacaaaagggaacacacagatatgcttttttgacaccccagggctcatgttagggcaccatggatttccttatagggatgtcacagttcgtgtggagagtgcctggagctcaattaacctctatgatttactaatagtcatgttcgatgtcaataggcatcttaatctgccagattcacgagttataaagttaattaaacgtttgggtacggaggtgaacccaaaccagaggcgtatattgtgcatgaataaggttgacttggtggaagacaagaaggacctacttaaagttgcaaaagaatttgaagatcttcctggatatgaaaggtacttcatggtatctgggctaaaaggcaagggagtgaaagaccttgtacagtatttgatggagcaggcagtaagaagaccttgggatgaggagccaactgtaatgactgaagaggtaatgaaaaccataacgttggaggttgtgcgcgagaagatgctgcatcacatccaccaagaaatcccctatgtaattgagcatcgtctgatgggctggaaggagctaaaagatggttctcttagggtggagcagcacttcattgcacctaagcaaagccagcgtcagattcttgttggtaaaaatggttctaagatagggagaatcggtattgaagctaatgaagagctaaggtccatattcaagagagatgtccatctaattctccaagttagagttgcgaaaaagagaagtgcctgaacagacagatgcagtgttgtcacaatgtattcaggagacatggttggtaagtggtgcttgggcgcatcagttcgggtgactgctttgacagaactttggatctatgatcaaatggaggtgccgagctataacctagcgtgtggagccttgatttctgaataaaagatataccgggagcaatccacacgccagtggtgacaaggaaacggcttgctgaatagcgagctgctcgtgtgctggcgaatctggggtctgtgatactgatatgcagatacgaatgcgctggacaccgttttgcctactctctgattcgaaaagtagtccctctccttctcaggtctcagcctgtattttctataggttctttagacagtgttgtaacgacaggatgatcgagcatgtcggcgttgaagtttgctgctgatcttccgcggtgttttgaacagcggaaatttaaggatgaaatccggtggaaaatttacacgatggaaaatttccccgggacgtgcgcgtgctgtactgctgatacagaaatgctccctatatctatatttatcatcgtctatatttatcatca

SEQ ID NO: 42832 - DNA, 1918 bp, Zea Mays
ctttcttctcggcgtcctcgcagtttcgcgtttacccaaaatacccctaccttaaaccctccgcctccgccgccatgcgccgcctcctccaaaccctccgcccgctccaagccctacccctcaaccccgctcccggtatccccacccctctccgcctcctctctaccgcctcgtcggccgcgtcctcggactctgactccgccgcttcccccgccgtggccccgccccccgctgccgatgccgactttgacagcgccgactacgacctcccgacccctggtcccgccccctccagaaaaatcaacaaccccgccgccgcgctgaggaaggtccggttcgacccctccctccgcgcgcgcgccgacgaggcgctctttggtaaggggctgggcgcggcagccgttgatgaggaggatgaggaccgctcacgggacgtggcgctcgcgctgctcgatgcggcgctggaggcgcctgacgaggatgaagaggatctcggggaggtcagggaagaagaccagatgtcgctttccgttggcattgtcggcgcgcccaatgccggcaagtcctcgctcacaaataccatggttgggacaaaagtggctgcagtctcccgcaagacaaatactacgactcatgaaattttgggggtgctaacaaaagggaacacacagataggatgtcacagttcgtgtggagagtgcctggagctcaattaacctctatgatttactaatagtcatgttcgatgtcaataggcatcttaatctgccagattcacgagttataaagttaattaaacgtttgggtacggaggtgaacccaaaccagaggcgtatattgtgcatgaataaggttgacttggtggaagacaagaaggacctacttaaagttgcaaaagaatttgaagatcttcctggatatgaaaggtacttcatggtatctgggctaaaaggcaagggagtgaaagaccttgtacagtatttgatggagcaggcagtaagaagaccttgggatgaggagccaactgtaatgactgaagaggtaatgaaaaccataacgttggaggttgtgcgcgagaagatgctgcatcacatccaccaagaaatcccctatgtaattgagcatcgtctgatgggctggaaggagctaaaagatggttctcttagggtggagcagcacttcattgcacctaagcaaagccagcgtcagattcttgttggtaaaaatggttctaagatagggagaatcggtattgaagctaatgaagagctaaggtccatattcaagagagatgtccatctaattctccaagttagagttgcgaaaaagagaagtgcctgaacagacagatgcagtgttgtcacaatgtattcaggagacatggttggtaagtggtgcttgggcgcatcagttcgggtgactgctttgacagaactttggatctatgatcaaatggaggtgccgagctataacctagcgtgtggagccttgatttctgaataaaagatataccgggagcaatccacacgccagtggtgacaaggaaacggcttgctgaatagcgagctgctcgtgtgctggcgaatctggggtctgtgatactgatatgcagatacgaatgcgctggacaccgttttgcctactctctgattcgaaaagtagtccctctccttctcaggtctcagcctgtattttctataggttctttagacagtgttgtaacgacaggatgatcgagcatgtcggcgttgaagtttgctgctgatcttccgcggtgttttgaacagcggaaatttaaggatgaaatccggtggaaaatttacacgatggaaaatttccccgggacgtgcgcgtgctgtactgctgatacagaaatgctccctatatctatatttatcatcgtctatatttatcatca

SEQ ID NO: 42833 - DNA, 1913 bp, Zea Mays
ctttcttctcggcgtcctcgcagtttcgcgtttacccaaaatacccctaccttaaaccctccgcctccgccgccatgcgccgcctcctccaaaccctccgcccgctccaagccctacccctcaaccccgctcccggtatccccacccctctccgcctcctctctaccgcctcgtcggccgcgtcctcggactctgactccgccgcttcccccgccgtggccccgccccccgctgccgatgccgactttgacagcgccgactacgacctcccgacccctggtcccgccccctccagaaaaatcaacaaccccgccgccgcgctgaggaaggtccggttcgacccctccctccgcgcgcgcgccgacgaggcgctctttggtaaggggctgggcgcggcagccgttgatgaggaggatgaggaccgctcacgggacgtggcgctcgcgctgctcgatgcggcgctggaggcgcctgacgaggatgaagaggatctcggggaggtcagggaagaagaccagatgtcgctttccgttggcattgtcggcgcgcccaatgccggcaagtcctcgctcacaaataccatggttgggacaaaagtggctgcagtctcccgcaagacaaatactacgactcatgaaattttgggggtgctaacaaaagggaacacacagataggatgtcacagttcgtgtggagagtgcctggagctcaattaacctctatgatttactaatagtcatgttcgatgtcaataggcatcttaatctgccagattcacgagttataaagttaattaaacgtttgggtacggaggtgaacccaaaccagaggcgtatattgtgcatgaataaggttgacttggtggaagacaagaaggacctacttaaagttgcaaaagaatttgaagatcttcctggatatgaaaggtacttcatggtatctgggctaaaaggcaagggagtgaaagaccttgtacagtatttgatggagcaggcagtaagaagaccttgggatgaggagccaactgtaatgactgaagaggtaatgaaaaccataacgttggaggttgtgcgcgagaagatgctgcatcacatccaccaagaaatcccctatgtaattgagcatcgtctgatgggctggaaggagctaaaagatggttctcttagggtggagcagcacttcattgcacctaagcaaagccagcgtcagattcttgttggtaaaaatggttctaagatagggagaatcggtattgaagctaatgaagagctaaggtccatattcaagagagatgtccatctaattctccaagttagagttgcgaaaaagagaagtgcctgaacagacagatgttgtcacaatgtattcaggagacatggttggtaagtggtgcttgggcgcatcagttcgggtgactgctttgacagaactttggatctatgatcaaatggaggtgccgagctataacctagcgtgtggagccttgatttctgaataaaagatataccgggagcaatccacacgccagtggtgacaaggaaacggcttgctgaatagcgagctgctcgtgtgctggcgaatctggggtctgtgatactgatatgcagatacgaatgcgctggacaccgttttgcctactctctgattcgaaaagtagtccctctccttctcaggtctcagcctgtattttctataggttctttagacagtgttgtaacgacaggatgatcgagcatgtcggcgttgaagtttgctgctgatcttccgcggtgttttgaacagcggaaatttaaggatgaaatccggtggaaaatttacacgatggaaaatttccccgggacgtgcgcgtgctgtactgctgatacagaaatgctccctatatctatatttatcatcgtctatatttatcatca

SEQ ID NO: 42834 - DNA, 1994 bp, Zea Mays
ctttcttctcggcgtcctcgcagtttcgcgtttacccaaaatacccctaccttaaaccctccgcctccgccgccatgcgccgcctcctccaaaccctccgcccgctccaagccctacccctcaaccccgctcccggtatccccacccctctccgcctcctctctaccgcctcgtcggccgcgtcctcggactctgactccgccgcttcccccgccgtggccccgccccccgctgccgatgccgactttgacagcgccgactacgacctcccgacccctggtcccgccccctccagaaaaatcaacaaccccgccgccgcgctgaggaaggtccggttcgacccctccctccgcgcgcgcgccgacgaggcgctctttggtaaggggctgggcgcggcagccgttgatgaggaggatgaggaccgctcacgggacgtggcgctcgcgctgctcgatgcggcgctggaggcgcctgacgaggatgaagaggatctcggggaggtcagggaagaagaccagatgtcgctttccgttggcattgtcggcgcgcccaatgccggcaagtcctcgctcacaaataccatggttgggacaaaagtggctgcagtctcccgcaagacaaatactacgactcatgaaattttgggggtgctaacaaaagggaacacacagataggctcatgttagggcaccatggatttccttatagggatgtcacagttcgtgtggagagtgcctggagctcaattaacctctatgatttactaatagtcatgttcgatgtcaataggcatcttaatctgccagattcacgagttataaagttaattaaacgtttgggtacggaggtgaacccaaaccagaggcgtatattgtgcatgaataaggttgacttggtggaagacaagaaggacctacttaaagttgcaaaagaatttgaagatcttcctggatatgaaaggtacttcatggtatctgggctaaaaggcaagggagtgaaagaccttgtacagtatttgatggagcaggcagtaagaagaccttgggatgaggagccaactgtaatgactgaagaggtaatgaaaaccataacgttggaggttgtgcgcgagaagatgctgcatcacatccaccaagaaatcccctatgtaattgagcatcgtctgatgggctggaaggagctaaaagatggttctcttagggtggagcagcacttcattgcacctaagcaaagccagcgtcagattcttgttggtaaaaatggttctaagatagggagaatcggtattgaagctaatgaagagctaaggtccatattcaagagagatgtccatctaattctccaagttagagttgcgaaaaagagaagtgcctgaacagacagattttagtgcctgtatagaccgcaactgatctgagaactgcagtgcagtgttgtcacaatgtattcaggagacatggttggtaagtggtgcttgggcgcatcagttcgggtgactgctttgacagaactttggatctatgatcaaatggaggtgccgagctataacctagcgtgtggagccttgatttctgaataaaagatataccgggagcaatccacacgccagtggtgacaaggaaacggcttgctgaatagcgagctgctcgtgtgctggcgaatctggggtctgtgatactgatatgcagatacgaatgcgctggacaccgttttgcctactctctgattcgaaaagtagtccctctccttctcaggtctcagcctgtattttctataggttctttagacagtgttgtaacgacaggatgatcgagcatgtcggcgttgaagtttgctgctgatcttccgcggtgttttgaacagcggaaatttaaggatgaaatccggtggaaaatttacacgatggaaaatttccccgggacgtgcgcgtgctgtactgctgatacagaaatgctccctatatctatatttatcatcgtctatatttatcatca

SEQ ID NO: 42835 - DNA, 1999 bp, Zea Mays
ctttcttctcggcgtcctcgcagtttcgcgtttacccaaaatacccctaccttaaaccctccgcctccgccgccatgcgccgcctcctccaaaccctccgcccgctccaagccctacccctcaaccccgctcccggtatccccacccctctccgcctcctctctaccgcctcgtcggccgcgtcctcggactctgactccgccgcttcccccgccgtggccccgccccccgctgccgatgccgactttgacagcgccgactacgacctcccgacccctggtcccgccccctccagaaaaatcaacaaccccgccgccgcgctgaggaaggtccggttcgacccctccctccgcgcgcgcgccgacgaggcgctctttggtaaggggctgggcgcggcagccgttgatgaggaggatgaggaccgctcacgggacgtggcgctcgcgctgctcgatgcggcgctggaggcgcctgacgaggatgaagaggatctcggggaggtcagggaagaagaccagatgtcgctttccgttggcattgtcggcgcgcccaatgccggcaagtcctcgctcacaaataccatggttgggacaaaagtggctgcagtctcccgcaagacaaatactacgactcatgaaattttgggggtgctaacaaaagggaacacacagataggatgtcacagttcgtgtggagagtgcctggagctcaattaacctctatgatttactaatagtcatgttcgatgtcaataggcatcttaatctgccagattcacgagttataaagttaattaaacgtttgggtacggaggtgaacccaaaccagaggcgtatattgtgcatgaataaggttgacttggtggaagacaagaaggacctacttaaagttgcaaaagaatttgaagatcttcctggatatgaaaggtacttcatggtatctgggctaaaaggcaagggagtgaaagaccttgtacagtatttgatggagcaggcagtaagaagaccttgggatgaggagccaactgtaatgactgaagaggtaatgaaaaccataacgttggaggttgtgcgcgagaagatgctgcatcacatccaccaagaaatcccctatgtaattgagcatcgtctgatgggctggaaggagctaaaagatggttctcttagggtggagcagcacttcattgcacctaagcaaagccagcgtcagattcttgttggtaaaaatggttctaagatagggagaatcggtattgaagctaatgaagagctaaggtccatattcaagagagatgtccatctaattctccaagttagagttgcgaaaaagagaagtgcctgaacagacagattgattcgtctgaaggaataaatatattgttttctgcagttttagtgcctgtatagaccgcaactgatctgagaactgcagtgcagtgttgtcacaatgtattcaggagacatggttggtaagtggtgcttgggcgcatcagttcgggtgactgctttgacagaactttggatctatgatcaaatggaggtgccgagctataacctagcgtgtggagccttgatttctgaataaaagatataccgggagcaatccacacgccagtggtgacaaggaaacggcttgctgaatagcgagctgctcgtgtgctggcgaatctggggtctgtgatactgatatgcagatacgaatgcgctggacaccgttttgcctactctctgattcgaaaagtagtccctctccttctcaggtctcagcctgtattttctataggttctttagacagtgttgtaacgacaggatgatcgagcatgtcggcgttgaagtttgctgctgatcttccgcggtgttttgaacagcggaaatttaaggatgaaatccggtggaaaatttacacgatggaaaatttccccgggacgtgcgcgtgctgtactgctgatacagaaatgctccctatatctatatttatcatcgtctatatttatcatca

SEQ ID NO: 42836 - DNA, 1602 bp, Zea Mays
aacctgatccgtttttttccaaacaatcacgacaaaaggtccacggcaacaccaacacttgctgccagttggagagcgtgcccacacacccagatcggacggtgcacactgctcagggcccaccacgcttcaaagcggcgttgccggagtgtgagctcaccatgtcaccacactcgcggccgcggagctttatatagctcagcgcgcgcgcggcgccgactccctccctccgtcactcaccgcaccggccctctctcccacgccaggcgcacgtgcgcgcacgccatggacgccacgcgagttcgggttcctcttcccccgtctctgccggcgtggctcgctgtgctactgctcctcgttcaggtgacgcccggggtcggcgcggcggcagcggcgggcgtggggtgcgattgtggcggcggcgaggcggcggcgatcaaggaggaggacgcgcgcggggcgctgcggctgaagctcgtcgcggtggcgtccatcctggcgtcgggcgcggcgggggtgctggtcccgctgctgggccgctccgcctcggcgctgcgccccgacggggacgtcttcttcgccgtcaaggcgttcgccgcgggggtcatcctcgccaccggcatggtgcacatcctgcccgcggccttcgacgcgctcgcgcccccctgcggcggcggcgccagggccggcgggttcccctacgcgggactcgtcgccatgtgctctgccatggccaccatgatggtcgactccgccgccgcgggctactaccagcgcgcgcacatccgcaaggcgcgccccgtcgacgacgacgccgtcgacggaggccagggccgcgcggcgcccgcggacgaggagggcgccgccgccgagcccgcgggccacgtgcacgcgcacacgcacgcccacggagggcacggccacgccggtgcctcgcctcaggatgcctccgccgtcgccgtgtccatcaggcacagggtgatctctcaggttctggagctgggaatcctggtgcactcggtgatcatcggcgtgtccctgggcgcctccctgcggccgtccaccatcaggcccctcgtcggagccctcagcttccaccagttcttcgagggcattggccttggcggctgcattgttcaggcagagttcaaggcgagggcggccgtggtcatggcggccttcttctcgctcaccgctcccgcgggcatcgcgctgggcatcgccatcgcttccggctacagcaggcacggcgccaccgccctggtcgtggagggcgtcttcaacgcggccgccgcagggatcctggtgtacatgtccctggtcgatctcctcgccgcggacttcagcaacccgaggctgcagacgaacgccaagctccagctggcggcgtacgtcgccctgttcctcggcgcggggctcatgtcgttgctcgccaaatgggcgtagaacagaacagattcgctacccgtcagttttttttttctgccgaatcaccgtcagcgagaatttcggtgcgcagaggaagcgaggaaagaaggcccggatgtgatgtatgtcggcgctcgcgacaggcacgacgcagaagaaagcagggtaacgatg

SEQ ID NO: 42837 - DNA, 1770 bp, Zea Mays
gtgagcaccttcccagcttccgtcaacagcggttcacaagagagagagagagagaaatctggtgaaacttcccaataatctggcatgctaatgattaaaacattccaacttcaacggagacaggatagatatgacgagctactttgatttggcaccaaccattccgaacgcccacttggggcacctcctcgacaagaacacacgccatgccatgaagaaaaaacaaacaaacaacctgtccttttccctgagcacaatccgtcgatacctactatgaaacttcaactgataagaaaaaatgtgtcatctgtctaataataagatgctctgataaatgacagtagtagttgttagcagtcaaaaccgattgattaggttgattgaaacactactctgaataccaacgaagtaaaagtatagtaacactagtcctcgttctgtaccgtcgaaaagctcgtgttcttgggcttatcgattggaaccaggaatccaatcagtgctagtgaacgaaagagacaaatcagcgcgtagctctcgcagcagtacccacaggccttccgtgtcgtctccatcggagaaagggggcgtcgtccctgccgttggtgctaaaggcaagagaatcctgctgcagacaagcggaacggaacaatgccttgttgccttccttctcccccagcctcacaatggagccgccccccctcccctttgcagattcttcgagcaacatggcaggatcattcattattcgaatcagtaaccgtaagggcaattctgtggtggttggtgcaggttctggagctgggaatcctggtgcactcggtgatcatcggcgtgtccctgggcgcctccctgcggccgtccaccatcaggcccctcgtcggagccctcagcttccaccagttcttcgagggcattggccttggcggctgcattgttcaggcagagttcaaggcgagggcggccgtggtcatggcggccttcttctcgctcaccgctcccgcgggcatcgcgctgggcatcgccatcgcttccggctacagcaggcacggcgccaccgccctggtcgtggagggcgtcttcaacgcggccgccgcagggatcctggtgtacatgtccctggtcgatctcctcgccgcggacttcagcaacccgaggctgcagacgaacgccaagctccagctggcggcgtacgtcgccctgttcctcggcgcggggctcatgtcgttgctcgccaaatgggcgtagaacagaacagattcgctacccgtcagttttttttttctgccgaatcaccgtcagcgagaatttcggtgcgcagaggaagcgaggaaagaaggcccggatgtgatgtattttctacgcagagaacacatttaatgacttcacaaaagaagcagacttcgtttctcagagggaaggggaagaaaacgaggatggaaaccaccgacggggctcaacgctattttggtcgtttccatgctcttttcacaataaatctcttgccacattatcaaaaagctgatatggcagtctaataaattctataaaaaccatatgagctggagagcgttgggagtgctctaaccgagttctagggggatgaggcggcggagtagtttggccttcaacgatctttggggctaaataatagctgtacatacaaagggtcgattttttttaggggaacgggcgaacggcaatgcacatgtctgttatcccggatcctccttttttgcatgaaatttcttcatattcccctgaaagaaggcg

SEQ ID NO: 42838 - DNA, 1967 bp, Zea Mays
aacctgatccgtttttttccaaacaatcacgacaaaaggtccacggcaacaccaacacttgctgccagttggagagcgtgcccacacacccagatcggacggtgcacactgctcagggcccaccacgcttcaaagcggcgttgccggagtgtgagctcaccatgtcaccacactcgcggccgcggagctttatatagctcagcgcgcgcgcggcgccgactccctccctccgtcactcaccgcaccggccctctctcccacgccaggcgcacgtgcgcgcacgccatggacgccacgcgagttcgggttcctcttcccccgtctctgccggcgtggctcgctgtgctactgctcctcgttcaggtgacgcccggggtcggcgcggcggcagcggcgggcgtggggtgcgattgtggcggcggcgaggcggcggcgatcaaggaggaggacgcgcgcggggcgctgcggctgaagctcgtcgcggtggcgtccatcctggcgtcgggcgcggcgggggtgctggtcccgctgctgggccgctccgcctcggcgctgcgccccgacggggacgtcttcttcgccgtcaaggcgttcgccgcgggggtcatcctcgccaccggcatggtgcacatcctgcccgcggccttcgacgcgctcgcgcccccctgcggcggcggcgccagggccggcgggttcccctacgcgggactcgtcgccatgtgctctgccatggccaccatgatggtcgactccgccgccgcgggctactaccagcgcgcgcacatccgcaaggcgcgccccgtcgacgacgacgccgtcgacggaggccagggccgcgcggcgcccgcggacgaggagggcgccgccgccgagcccgcgggccacgtgcacgcgcacacgcacgcccacggagggcacggccacgccggtgcctcgcctcaggatgcctccgccgtcgccgtgtccatcaggcacagggtgatctctcaggttctggagctgggaatcctggtgcactcggtgatcatcggcgtgtccctgggcgcctccctgcggccgtccaccatcaggcccctcgtcggagccctcagcttccaccagttcttcgagggcattggccttggcggctgcattgttcaggcagagttcaaggcgagggcggccgtggtcatggcggccttcttctcgctcaccgctcccgcgggcatcgcgctgggcatcgccatcgcttccggctacagcaggcacggcgccaccgccctggtcgtggagggcgtcttcaacgcggccgccgcagggatcctggtgtacatgtccctggtcgatctcctcgccgcggacttcagcaacccgaggctgcagacgaacgccaagctccagctggcggcgtacgtcgccctgttcctcggcgcggggctcatgtcgttgctcgccaaatgggcgtagaacagaacagattcgctacccgtcagttttttttttctgccgaatcaccgtcagcgagaatttcggtgcgcagaggaagcgaggaaagaaggcccggatgtgattttctacgcagagaacacatttaatgacttcacaaaagaagcagacttcgtttctcagagggaaggggaagaaaacgaggatggaaaccaccgacggggctcaacgctattttggtcgtttccatgctcttttcacaataaatctcttgccacattatcaaaaagctgatatggcagtctaataaattctataaaaaccatatgagctggagagcgttgggagtgctctaaccgagttctagggggatgaggcggcggagtagtttggccttcaacgatctttggggctaaataatagctgtacatacaaagggtcgattttttttaggggaacgggcgaacggcaatgcacatgtctgttatcccggatcctccttttttgcatgaaatttcttcatattcccctgaaagaaggcg

SEQ ID NO: 42839 - DNA, 3667 bp, Zea Mays
caaacttttgtgagaaaattgacgctgtagaaaattttatgatcacaaacattgaaagcacacgacagcctcaaccactcgtacggcaacaaatggtcgttgtgaattgaagtagcttggaagagcagtgttatgcacagcgatgggagacaatgtcctaaaactcagggtgggcttctcagggtaaactgcattatggattctggcaacagttcatgctctagaacacgaagtgggcttctaagattaaagggcttactggattccagtggtgtttcgagttctagaactcgaagtggccttttaaggataaagagctttgtggattccagtgatggttcatgttcgaggtcacaaagtgaccatgtaagatgtagccctcctattgtcgaggctataataaatgacgaagcagtcttgaaggagtctcctgatggattgatgaaaaaagagatacctgttaggactcaaaatgagtttgttagacagaactctgctgacaaggctgtaaccaaggacgattcaggcatgcggacgcttcccaatgggagtttgagtgaagatatgccttctagaacacggagtgggctggtcaggagaagccctactgttaagactttaagcaaggatcaatcagtcattaatgggctggctgatgggtcactgaaagaagacatgcctcttggaacacggagtggccttgtcagaggaacccttgctgccaagactcctgatggatggatgaagaatgacaaggctgctggaacacggagtggtcttggtggtggaagattggtagccaagactgtaagcaaggacaaaagggctgttgagggtttgcctgatggatggcgaaaagaatacaggccaaggaagaatggttcatttctggatgtgtactacattgatccagtcagtggatatgaatttcgctcttttaaggatgtgcaccgttatcttgaaactggagatattagacagtgcgccgtgagaccaaagaagagtaccatctgcgaagttcatataatagaaagtcaaactcatgcaagtgcatcaccacaacacacgaggcctggtactgcggataagggtattcagtgtgaaatattaacttcggatggtatcatggtaccattgggggaactgattgctccatataatggaaatgatactgaacatactgtgttaccagagcctgagaacttgaaagcaattcaagggtctgacaacaagcttgagacttcggaacacgtgagtgttcaaccggtttctgcacgtaatggttcaaggcaaaccaaatctgttaaaaggaaagaacgaaatgcagaggtcaaatccaagaagcgcaaaaccagttctgctgtgactgctgttcgagcgtcgccccgcttagctgcattgaaggttcagcttgaagtgagcatcaaacatgaagatgccatggttagcataaatcatgtggaccaggtacagactatagaagagagcgccattgatcaggcacacaaaagccaatcgggctctgttgatgagatacatggtaatctggaaagcactttcagtcagttacagttgagccaagcagacactgctaatggaatgcaggctatgcaggaaaacactaccattcattcacaaccaagccaattggatactctgaatcctacacacagaagccaggagaatagtggcaatcagttacaatcggtgctcacagattcttcgattccaaaacgaaccacacaggaatgcactatagacgagccaagccagccaggcataaatcatatacacacagatcaggagttcactgggaatcaatttcggtcgaacctaccagatgacactgttatttcattaagggatattgaagaatgcacagcccactcaaagccaagcaataccgacagtactggacaaattcaggccaatgaggaaaacactgccaatcaagtacagtcgagcctaacagacacagttattccagtaccggttattcaggaatatgctactggttattcacagctgagcaaagctaacacctcaaataaaaaacaggccaatcaggaatacatagctgatcaagtacaatcgagcctaacagacactgtcattccagtacaagttattaaggaatacacaactggttatccacatattaataaagctgacatttcaaatcaaatgcaggccaatcaagaaaacactgatgatcacttatatttaagtcaagtaggctgtgtcactcaaatgcagataattgaggaaaatttgcccaagcaacctcagctgagccaatcaggcactgggggtagaatacaaattgatctggaaagcactaccaatcacttgctaccaaactatgatgaaaattctatgttgcaatgtggtttatcttgggctcctgaacagaacagcggagcccttagtacagatttctggaaaaatgttgaaactcaggcttcatcggtttccatgccaataaatggagcacctgttgcaagctttccagcaaatgttagattccacaatgcagcagcagcagcagaacctgctttaccgccacaggttgctccagctgaagcaggttctgatcagtcggggttggcctttcaatctgttttcggaaacatctggtcggatccttgcatcgagtttgcttttaagacccttacaggtgacattcctgttctggacgacacaacggctgtcacagactactttccggagcaacaagacttgaataaaggcccagcaccaaaccgtgcaggttctgttgataattccagaaaccacacacaagtcgatgtgaaccttccaccacctgctctggatgatttctacaatggcaattggttccctccccaatgaattcagtatgggaggaaacaaatgcaataacattttgtacctgtgaaaaacaaatcagagaaggctaatggccagattacaaagcaatggtcgtgcgctaatgatttctacaatgacagttggttccctcccccaatgaattccgtgtagggaggggaaaaatgcaatgacatttttttagctgcggaaaggcaaatcagagaaggctagcggccaaatcccaaagaatcaatcgtgcactctgaactgaatgtgtcatcccggaggacacattttgtaaaaaaaaaaaaacagtagctttatagccttattagactgttaaaacacactcgactgatctggttccatcaacaaggcttcacggagactgtcgagtacctgatctgggtcatgttttccatagtttgcttctgtgcagttgcctaataagcccattcgttgtaaactagctagttctaacttaagaaagctccctcagggcctatgcatgggtctctgattattgtgcagatgaactgttgttctggacattttgaacatgcaaatgtggaagcgtcactgtcagttgaattatgtttcagccgaattgagaagcgctaatccgctgtttgtgtagagtttgctgaatgttgatgcttgtgcttggttacttggatcagtgttttttagggggctcggcttgcagtaacgatgcaccttgttatatatccagaaaaccttggttgtcactgttttactttcatcacttacaacttgacgtatctcgttttgctatattttaagcatttgttttttt

SEQ ID NO: 42840 - DNA, 3612 bp, Zea Mays
ctccctttctctctgcagtctgcacgccaaaaaaaaaaaagtcttcagccatctcgacggctcgtcggctcgaccacttcgcctccccaccccgccggaaccctaaccccagccgcgagagctccacccgccgcgccgtgccgatgggacggtcgttgtgaattgaagtagcttggaagagcagtgttatgcacagcgatgggagacaatgtcctaaaactcagggtgggcttctcagggtaaactgcattatggattctggcaacagttcatgctctagaacacgaagtgggcttctaagattaaagggcttactggattccagtggtgtttcgagttctagaactcgaagtggccttttaaggataaagagctttgtggattccagtgatggttcatgttcgaggtcacaaagtgaccatgtaagatgtagccctcctattgtcgaggctataataaatgacgaagcagtcttgaaggagtctcctgatggattgatgaaaaaagagatacctgttaggactcaaaatgagtttgttagacagaactctgctgacaaggctgtaaccaaggacgattcaggcatgcggacgcttcccaatgggagtttgagtgaagatatgccttctagaacacggagtgggctggtcaggagaagccctactgttaagactcctgatggatggatgaagaatgacaaggctgctggaacacggagtggtcttggtggtggaagattggtagccaagactgtaagcaaggacaaaagggctgttgagggtttgcctgatggatggcgaaaagaatacaggccaaggaagaatggttcatttctggatgtgtactacattgatccagtcagtggatatgaatttcgctcttttaaggatgtgcaccgttatcttgaaactggagatattagacagtgcgccgtgagaccaaagaagagtaccatctgcgaagttcatataatagaaagtcaaactcatgcaagtgcatcaccacaacacacgaggcctggtactgcggataagggtattcagtgtgaaatattaacttcggatggtatcatggtaccattgggggaactgattgctccatataatggaaatgatactgaacatactgtgttaccagagcctgagaacttgaaagcaattcaagggtctgacaacaagcttgagacttcggaacacgtgagtgttcaaccggtttctgcacgtaatggttcaaggcaaaccaaatctgttaaaaggaaagaacgaaatgcagaggtcaaatccaagaagcgcaaaaccagttctgctgtgactgctgttcgagcgtcgccccgcttagctgcattgaaggttcagcttgaagtgagcatcaaacatgaagatgccatggttagcataaatcatgtggaccaggtacagactatagaagagagcgccattgatcaggcacacaaaagccaatcgggctctgttgatgagatacatggtaatctggaaagcactttcagtcagttacagttgagccaagcagacactgctaatggaatgcaggctatgcaggaaaacactaccattcattcacaaccaagccaattggatactctgaatcctacacacagaagccaggagaatagtggcaatcagttacaatcggtgctcacagattcttcgattccaaaacgaaccacacaggaatgcactatagacgagccaagccagccaggcataaatcatatacacacagatcaggagttcactgggaatcaatttcggtcgaacctaccagatgacactgttatttcattaagggatattgaagaatgcacagcccactcaaagccaagcaataccgacagtactggacaaattcaggccaatgaggaaaacactgccaatcaagtacagtcgagcctaacagacacagttattccagtaccggttattcaggaatatgctactggttattcacagctgagcaaagctaacacctcaaataaaaaacaggccaatcaggaatacatagctgatcaagtacaatcgagcctaacagacactgtcattccagtacaagttattaaggaatacacaactggttatccacatattaataaagctgacatttcaaatcaaatgcaggccaatcaagaaaacactgatgatcacttatatttaagtcaagtaggctgtgtcactcaaatgcagataattgaggaaaatttgcccaagcaacctcagctgagccaatcaggcactgggggtagaatacaaattgatctggaaagcactaccaatcacttgctaccaaactatgatgaaaattctatgttgcaatgtggtttatcttgggctcctgaacagaacagcggagcccttagtacagatttctggaaaaatgttgaaactcaggcttcatcggtttccatgccaataaatggagcacctgttgcaagctttccagcaaatgttagattccacaatgcagcagcagcagcagaacctgctttaccgccacaggttgctccagctgaagcaggttctgatcagtcggggttggcctttcaatctgttttcggaaacatctggtcggatccttgcatcgagtttgcttttaagacccttacaggtgacattcctgttctggacgacacaacggctgtcacagactactttccggagcaacaagacttgaataaaggcccagcaccaaaccgtgcaggttctgttgataattccagaaaccacacacaagtcgatgtgaaccttccaccacctgctctggatgatttctacaatggcaattggttccctccccaatgaattcagtatgggaggaaacaaatgcaataacattttgtacctgtgaaaaacaaatcagagaaggctaatggccagattacaaagcaatggtcgtgcgctaatgatttctacaatgacagttggttccctcccccaatgaattccgtgtagggaggggaaaaatgcaatgacatttttttagctgcggaaaggcaaatcagagaaggctagcggccaaatcccaaagaatcaatcgtgcactctgaactgaatgtgtcatcccggaggacacattttgtaaaaaaaaaaaaacagtagctttatagccttattagactgttaaaacacactcgactgatctggttccatcaacaaggcttcacggagactgtcgagtacctgatctgggtcatgttttccatagtttgcttctgtgcagttgcctaataagcccattcgttgtaaactagctagttctaacttaagaaagctccctcagggcctatgcatgggtctctgattattgtgcagatgaactgttgttctggacattttgaacatgcaaatgtggaagcgtcactgtcagttgaattatgtttcagccgaattgagaagcgctaatccgctgtttgtgtagagtttgctgaatgttgatgcttgtgcttggttacttggatcagtgttttttagggggctcggcttgcagtaacgatgcaccttgttatatatccagaaaaccttggttgtcactgttttactttcatcacttacaacttgacgtatctcgttttgctatattttaagcatttgttttttt

SEQ ID NO: 42841 - DNA, 3754 bp, Zea Mays
gtccagcgtccccctcccccgtctctctccctttctctctgcagtctgcacgccaaaaaaaaaaaagtcttcagccatctcgacggctcgtcggctcgaccacttcgcctccccaccccgccggaaccctaaccccagccgcgagagctccacccgccgcgccgtgccgatgggacggtcgttgtgaattgaagtagcttggaagagcagtgttatgcacagcgatgggagacaatgtcctaaaactcagggtgggcttctcagggtaaactgcattatggattctggcaacagttcatgctctagaacacgaagtgggcttctaagattaaagggcttactggattccagtggtgtttcgagttctagaactcgaagtggccttttaaggataaagagctttgtggattccagtgatggttcatgttcgaggtcacaaagtgaccatgtaagatgtagccctcctattgtcgaggctataataaatgacgaagcagtcttgaaggagtctcctgatggattgatgaaaaaagagatacctgttaggactcaaaatgagtttgttagacagaactctgctgacaaggcatgcggacgcttcccaatgggagtttgagtgaagatatgccttctagaacacggagtgggctggtcaggagaagccctactgttaagactttaagcaaggatcaatcagtcattaatgggctggctgatgggtcactgaaagaagacatgcctcttggaacacggagtggccttgtcagaggaacccttgctgccaaggcatggatatttgtagatccaatcaagactcctgatggatggatgaagaatgacaaggctgctggaacacggagtggtcttggtggtggaagattggtagccaagactgtaagcaaggacaaaagggctgttgagggtttgcctgatggatggcgaaaagaatacaggccaaggaagaatggttcatttctggatgtgtactacattgatccagtcagtggatatgaatttcgctcttttaaggatgtgcaccgttatcttgaaactggagatattagacagtgcgccgtgagaccaaagaagagtaccatctgcgaagttcatataatagaaagtcaaactcatgcaagtgcatcaccacaacacacgaggcctggtactgcggataagggtattcagtgtgaaatattaacttcggatggtatcatggtaccattgggggaactgattgctccatataatggaaatgatactgaacatactgtgttaccagagcctgagaacttgaaagcaattcaagggtctgacaacaagcttgagacttcggaacacgtgagtgttcaaccggtttctgcacgtaatggttcaaggcaaaccaaatctgttaaaaggaaagaacgaaatgcagaggtcaaatccaagaagcgcaaaaccagttctgctgtgactgctgttcgagcgtcgccccgcttagctgcattgaaggttcagcttgaagtgagcatcaaacatgaagatgccatggttagcataaatcatgtggaccaggtacagactatagaagagagcgccattgatcaggcacacaaaagccaatcgggctctgttgatgagatacatggtaatctggaaagcactttcagtcagttacagttgagccaagcagacactgctaatggaatgcaggctatgcaggaaaacactaccattcattcacaaccaagccaattggatactctgaatcctacacacagaagccaggagaatagtggcaatcagttacaatcggtgctcacagattcttcgattccaaaacgaaccacacaggaatgcactatagacgagccaagccagccaggcataaatcatatacacacagatcaggagttcactgggaatcaatttcggtcgaacctaccagatgacactgttatttcattaagggatattgaagaatgcacagcccactcaaagccaagcaataccgacagtactggacaaattcaggccaatgaggaaaacactgccaatcaagtacagtcgagcctaacagacacagttattccagtaccggttattcaggaatatgctactggttattcacagctgagcaaagctaacacctcaaataaaaaacaggccaatcaggaatacatagctgatcaagtacaatcgagcctaacagacactgtcattccagtacaagttattaaggaatacacaactggttatccacatattaataaagctgacatttcaaatcaaatgcaggccaatcaagaaaacactgatgatcacttatatttaagtcaagtaggctgtgtcactcaaatgcagataattgaggaaaatttgcccaagcaacctcagctgagccaatcaggcactgggggtagaatacaaattgatctggaaagcactaccaatcacttgctaccaaactatgatgaaaattctatgttgcaatgtggtttatcttgggctcctgaacagaacagcggagcccttagtacagatttctggaaaaatgttgaaactcaggcttcatcggtttccatgccaataaatggagcacctgttgcaagctttccagcaaatgttagattccacaatgcagcagcagcagcagaacctgctttaccgccacaggttgctccagctgaagcaggttctgatcagtcggggttggcctttcaatctgttttcggaaacatctggtcggatccttgcatcgagtttgcttttaagacccttacaggtgacattcctgttctggacgacacaacggctgtcacagactactttccggagcaacaagacttgaataaaggcccagcaccaaaccgtgcaggttctgttgataattccagaaaccacacacaagtcgatgtgaaccttccaccacctgctctggatgatttctacaatggcaattggttccctccccaatgaattcagtatgggaggaaacaaatgcaataacattttgtacctgtgaaaaacaaatcagagaaggctaatggccagattacaaagcaatggtcgtgcgctaatgatttctacaatgacagttggttccctcccccaatgaattccgtgtagggaggggaaaaatgcaatgacatttttttagctgcggaaaggcaaatcagagaaggctagcggccaaatcccaaagaatcaatcgtgcactctgaactgaatgtgtcatcccggaggacacattttgtaaaaaaaaaaaaacagtagctttatagccttattagactgttaaaacacactcgactgatctggttccatcaacaaggcttcacggagactgtcgagtacctgatctgggtcatgttttccatagtttgcttctgtgcagttgcctaataagcccattcgttgtaaactagctagttctaacttaagaaagctccctcagggcctatgcatgggtctctgattattgtgcagatgaactgttgttctggacattttgaacatgcaaatgtggaagcgtcactgtcagttgaattatgtttcagccgaattgagaagcgctaatccgctgtttgtgtagagtttgctgaatgttgatgcttgtgcttggttacttggatcagtgttttttagggggctcggcttgcagtaacgatgcaccttgttatatatccagaaaaccttggttgtcactgttttactttcatcacttacaacttgacgtatctcgttttgctatattttaagcatttgttttttt

SEQ ID NO: 42842 - DNA, 3848 bp, Zea Mays
ggtgctttaagtatagtatagatataacatatgctgttttggtaaagtggaggaaaggcgagtagaggcggctgacgaggtgacgcgtgcgtgcgtggcgtccagcgtccccctcccccgtctctctccctttctctctgcagtctgcacgccaaaaaaaaaaaagtcttcagccatctcgacggctcgtcggctcgaccacttcgcctccccaccccgccggaaccctaaccccagccgcgagagctccacccgccgcgccgtgccgatgggacggtcgttgtgaattgaagtagcttggaagagcagtgttatgcacagcgatgggagacaatgtcctaaaactcagggtgggcttctcagggtaaactgcattatggattctggcaacagttcatgctctagaacacgaagtgggcttctaagattaaagggcttactggattccagtggtgtttcgagttctagaactcgaagtggccttttaaggataaagagctttgtggattccagtgatggttcatgttcgaggtcacaaagtgaccatgtaagatgtagccctcctattgtcgaggctataataaatgacgaagcagtcttgaaggagtctcctgatggattgatgaaaaaagagatacctgttaggactcaaaatgagtttgttagacagaactctgctgacaaggctgtaaccaaggacgattcaggcatgcggacgcttcccaatgggagtttgagtgaagatatgccttctagaacacggagtgggctggtcaggagaagccctactgttaagactttaagcaaggatcaatcagtcattaatgggctggctgatgggtcactgaaagaagacatgcctcttggaacacggagtggccttgtcagaggaacccttgctgccaagactcctgatggatggatgaagaatgacaaggctgctggaacacggagtggtcttggtggtggaagattggtagccaagactgtaagcaaggacaaaagggctgttgagggtttgcctgatggatggcgaaaagaatacaggccaaggaagaatggttcatttctggatgtgtactacattgatccagtcagtggatatgaatttcgctcttttaaggatgtgcaccgttatcttgaaactggagatattagacagtgcgccgtgagaccaaagaagagtaccatctgcgaagttcatataatagaaagtcaaactcatgcaagtgcatcaccacaacacacgaggcctggtactgcggataagggtattcagtgtgaaatattaacttcggatggtatcatggtaccattgggggaactgattgctccatataatggaaatgatactgaacatactgtgttaccagagcctgagaacttgaaagcaattcaagggtctgacaacaagcttgagacttcggaacacgtgagtgttcaaccggtttctgcacgtaatggttcaaggcaaaccaaatctgttaaaaggaaagaacgaaatgcagaggtcaaatccaagaagcgcaaaaccagttctgctgtgactgctgttcgagcgtcgccccgcttagctgcattgaaggttcagcttgaagtgagcatcaaacatgaagatgccatggttagcataaatcatgtggaccaggtacagactatagaagagagcgccattgatcaggcacacaaaagccaatcgggctctgttgatgagatacatggtaatctggaaagcactttcagtcagttacagttgagccaagcagacactgctaatggaatgcaggctatgcaggaaaacactaccattcattcacaaccaagccaattggatactctgaatcctacacacagaagccaggagaatagtggcaatcagttacaatcggtgctcacagattcttcgattccaaaacgaaccacacaggaatgcactatagacgagccaagccagccaggcataaatcatatacacacagatcaggagttcactgggaatcaatttcggtcgaacctaccagatgacactgttatttcattaagggatattgaagaatgcacagcccactcaaagccaagcaataccgacagtactggacaaattcaggccaatgaggaaaacactgccaatcaagtacagtcgagcctaacagacacagttattccagtaccggttattcaggaatatgctactggttattcacagctgagcaaagctaacacctcaaataaaaaacaggccaatcaggaatacatagctgatcaagtacaatcgagcctaacagacactgtcattccagtacaagttattaaggaatacacaactggttatccacatattaataaagctgacatttcaaatcaaatgcaggccaatcaagaaaacactgatgatcacttatatttaagtcaagtaggctgtgtcactcaaatgcagataattgaggaaaatttgcccaagcaacctcagctgagccaatcaggcactgggggtagaatacaaattgatctggaaagcactaccaatcacttgctaccaaactatgatgaaaattctatgttgcaatgtggtttatcttgggctcctgaacagaacagcggagcccttagtacagatttctggaaaaatgttgaaactcaggcttcatcggtttccatgccaataaatggagcacctgttgcaagctttccagcaaatgttagattccacaatgcagcagcagcagcagaacctgctttaccgccacaggttgctccagctgaagcaggttctgatcagtcggggttggcctttcaatctgttttcggaaacatctggtcggatccttgcatcgagtttgcttttaagacccttacaggtgacattcctgttctggacgacacaacggctgtcacagactactttccggagcaacaagacttgaataaaggcccagcaccaaaccgtgcaggttctgttgataattccagaaaccacacacaagtcgatgtgaaccttccaccacctgctctggatgatttctacaatggcaattggttccctccccaatgaattcagtatgggaggaaacaaatgcaataacattttgtacctgtgaaaaacaaatcagagaaggctaatggccagattacaaagcaatggtcgtgcgctaatgatttctacaatgacagttggttccctcccccaatgaattccgtgtagggaggggaaaaatgcaatgacatttttttagctgcggaaaggcaaatcagagaaggctagcggccaaatcccaaagaatcaatcgtgcactctgaactgaatgtgtcatcccggaggacacattttgtaaaaaaaaaaaaacagtagctttatagccttattagactgttaaaacacactcgactgatctggttccatcaacaaggcttcacggagactgtcgagtacctgatctgggtcatgttttccatagtttgcttctgtgcagttgcctaataagcccattcgttgtaaactagctagttctaacttaagaaagctccctcagggcctatgcatgggtctctgattattgtgcagatgaactgttgttctggacattttgaacatgcaaatgtggaagcgtcactgtcagttgaattatgtttcagccgaattgagaagcgctaatccgctgtttgtgtagagtttgctgaatgttgatgcttgtgcttggttacttggatcagtgttttttagggggctcggcttgcagtaacgatgcaccttgttatatatccagaaaaccttggttgtcactgttttactttcatcacttacaacttgacgtatctcgttttgctatattttaagcatttgttttttt

SEQ ID NO: 42843 - DNA, 1029 bp, Zea Mays
ctaaaatattcactacatgtacactatctactattatatgtattagtaatgcatactatgaaaaatggaatacactttattacctgatttagcaccgcataagatacacgcaaagattcaagtacatgtatctagaaagtggcttttccgaggtgctactgatagtggaccactacaacatgttgatatggttttgtctgatcgagagggtaatgctatttatgctgaaatccctggaaatttagctgaacaaaaagcaacaaatattgaagaaggaggagtttatgatatcagcagattcagagtgtgcgcagcaaaaactgttttcaaaatagtggatggggacaaaatgatccaattcacatttcataccatagttaaacgtgccacaagccctccaacaacatttccattatatgtttatcggctaacatcatttgatctaattgagcctcatgttcaaactacaaataactttgttgatgttcttggtgtcataactgaaattcatgaactgacacctgtgcatgtccgaagtcaactaacaccaacagtgacaaggaccattatcatagaagatctcagtgcaaacaagagtaatatcaatagcccagaaaaagatgatggcgataaggaaaccgcacagcttgatacaatacccaataacaaaggaaaaggaccagcagatacaattgaatcgccacctaaaaggttcaaataagggacgatacgcatcggaaaagaaatggacatcaaatcctccgagaactaaagtttcactcagatcttcgtcgaccttttgagttgcacaatgtctattttgcaacatatgtataattatatatgatgacctactcagctctttgaaaacaatttatgtaaatataacagcctaattctacgtagtggacaaaaatgttgactctgattatagctcaggtaactctatttcatataaacactagatgcgttccatataaattacgctatttcgtagcaattactaacgtttaaaatcaacaataacct

SEQ ID NO: 42844 - DNA, 2621 bp, Zea Mays
ggtaaggtcatcgtactaggaggtgatcctagacagatattacctgtgatagaaggtggcaatcgtgcacaaaatataaatgctgctataaccaattcgccactttggaattcagtatcagtcctacatcttacacaaaacatgagacttcgttcaacggatttaacagatagcgaaaaaactgaacttgcagattttagtgcatggatcttaaatattggcaacgacaatataccagctatacaaaaaccaggagaaatggagcccacatggatacaaattccttttgaattcctcttactgccccaagaagatcatatttcagctttaattgcaacaatgtatccagaaataacagaaagttataatgatccaacctatctacagcaacgggctgtcttaacaccaacaaatgagatagctgatttaattaacgaacatgtggttgaccttattcccggaacgcacaaacaatatttaagttgtgaccggattgcatcacagtcaaatacaggtgggacattagatcttttatatccagttgaatttctaaattcaataaatagtaacaactttccgcaacataaactgctgcttaaagaaggagtaccgattatattgcttcgaaatctaaatcaatctgaaggtttatgcaatgacacaagacttatcataactgctctaggagacatggttttggaagctcagattttaactggtacacatgctggaaagaaagttctcattcccagaatatgtctggtgcttaaaacaaacaaaaatccatttgtactcgaaagaaggcaatatcctataaaaatatgttatgctatgacaatcaacaaaagtcaaggacaaacactctcacaggtttacacattttaattgaagacgaagatggtcgatcaagcaatgagacaaggaacatagtttacaaggaaatattcaatcgcatacctatgaatgtcgatgctacaacttcatagtaccctaaaatattcactacatgtacactatctactattatatgtattagtaatgcatactatgaaaaatggaatacactttattacctgatttagcaccgcataagatacacgcaaagattcaagtacatgtatctagaaagtggcttttccgaggtgctactgatagtggaccactacaacatgttgatatggttttgtctgatcgagagggtaatgctatttatgctgaaatccctggaaatttagctgaacaaaaagcaacaaatattgaagaaggaggagtttatgatatcagcagattcagagtgtgcgcagcaaaaactgttttcaaaatagtggatggggacaaaatgatccaattcacatttcataccatagttaaacgtgccacaagccctccaacaacatttccattatatgtttatcggctaacatcatttgatctaattgagcctcatgttcaaactacaaataactttgttgatgttcttggtgtcataactgaaattcatgaactgacacctgtgcatgtccgaagtcaactaacaccaacagtgacaaggaccattatcatagaagatctcaggaaacatgatttgaatgtactgtcacaatagcagaaataccagctgaacacaaatggtggtttccatcttgcacaaaatgcaataaagcaacaatccctcacactgcaggttatcactgtgaatcatgcaattgggatggatacaaatttaaatacaagctcaaattcctggcatctgatgaaacaaatattgcagaaatgttttgttttgacactgtagcaagacacatcgttggtaaatcctgtgagattgttttacgaagtgtcactgaacagtctcctatcccacctgatctagcacaaatcatatctctgaaatttacattcagagtcacaattgacaatcaatctcttttccaacaaaccaatcgcccaaacgtgttccgcattaattctattgttgctgcacatgggagacaacgttctttaccaatgcaaataggaaattccgatcaacaaggaccatcaacacctcaaaacaaatcaaaaccgatgttattggaagactctccatctacagctttggaaaaattatctactacaactcctacaactgtagtaaggaagcttctatattccgaaactgacaacatgccgaaagctgcaaacaagagtaatatcaatagcccagaaaaagatgatggcgataaggaaaccgcacagcttgatacaatacccaataacaaaggaaaaggaccagcagatacaattgaatcgccacctaaaaggttcaaataagggacgatacgcatcggaaaagaaatggacatcaaatcctccgagaactaaagtttcactcagatcttcgtcgaccttttgagttgcacaatgtctattttgcaacatatgtataattatatatgatgacctactcagctctttgaaaacaatttatgtaaatataacagcctaattctacgtagtggacaaaaatgttgactctgattatagctcaggtaactctatttcatataaacactagatgcgttccatataaattacgctatttcgtagcaattactaacgtttaaaatcaacaataacct

SEQ ID NO: 42845 - DNA, 1800 bp, Zea Mays
gtcctatcaaacatatttggattcttctttttatctggatatggaggcactggaaagactttcctttggaatgcgatcataacacacttacgagcacaaaaaaggatagtcttaacggttgcatcttctggggttgcctccttgctccttccaggtggtcgcacaacacattcaaggttcagaataccttgcgaactagacgaaacatcaacttgcgacattaaaagagaaaaatggaatacactttattacctgatttagcaccgcataagatacacgcaaagattcaagtacatgtatctagaaagtggcttttccgaggtgctactgatagtggaccactacaacatgttgatatggttttgtctgatcgagagggtaatgctatttatgctgaaatccctggaaatttagctgaacaaaaagcaacaaatattgaagaaggaggagtttatgatatcagcagattcagagtgtgcgcagcaaaaactgttttcaaaatagtggatggggacaaaatgatccaattcacatttcataccatagttaaacgtgccacaagccctccaacaacatttccattatatgtttatcggctaacatcatttgatctaattgagcctcatgttcaaactacaaataactttgttgatgttcttggtgtcataactgaaattcatgaactgacacctgtgcatgtccgaagtcaactaacaccaacagtgacaaggaccattatcatagaagatctcaggaaacatgatttgaatgtactgtcacaatagcagaaataccagctgaacacaaatggtggtttccatcttgcacaaaatgcaataaagcaacaatccctcacactgcaggttatcactgtgaatcatgcaattgggatggatacaaatttaaatacaagctcaaattcctggcatctgatgaaacaaatattgcagaaatgttttgttttgacactgtagcaagacacatcgttggtaaatcctgtgagattgttttacgaagtgtcactgaacagtctcctatcccacctgatctagcacaaatcatatctctgaaatttacattcagagtcacaattgacaatcaatctcttttccaacaaaccaatcgcccaaacgtgttccgcattaattctattgttgctgcacatgggagacaacgttctttaccaatgcaaataggaaattccgatcaacaaggaccatcaacacctcaaaacaaatcaaaaccgatgttattggaagactctccatctacagctttggaaaaattatctactacaactcctacaactgtagtaaggaagcttctatattccgaaactgacaacatgccgaaagctgcaaacaagagtaatatcaatagcccagaaaaagatgatggcgataaggaaaccgcacagcttgatacaatacccaataacaaaggaaaaggaccagcagatacaattgaatcgccacctaaaaggttcaaataagggacgatacgcatcggaaaagaaatggacatcaaatcctccgagaactaaagtttcactcagatcttcgtcgaccttttgagttgcacaatgtctattttgcaacatatgtataattatatatgatgacctactcagctctttgaaaacaatttatgtaaatataacagcctaattctacgtagtggacaaaaatgttgactctgattatagctcaggtaactctatttcatataaacactagatgcgttccatataaattacgctatttcgtagcaattactaacgtttaaaatcaacaataacct

SEQ ID NO: 42846 - DNA, 1141 bp, Zea Mays
ccagaccttaccgatacgcatacatctgtaccagcaagcgctacagaagcacggagagcccggagaatgttgattaatcagaacagacttgctaaaagaggcctattgtcgacaataccagcgttgtcgcaatatgcttacttctctgatgagtacatacaatcattaaaagaaaaatggaatacactttattacctgatttagcaccgcataagatacacgcaaagattcaagtacatgtatctagaaagtggcttttccgaggtgctactgatagtggaccactacaacatgttgatatggttttgtctgatcgagagggtaatgctatttatgctgaaatccctggaaatttagctgaacaaaaagcaacaaatattgaagaaggaggagtttatgatatcagcagattcagagtgtgcgcagcaaaaactgttttcaaaatagtggatggggacaaaatgatccaattcacatttcataccatagttaaacgtgccacaagccctccaacaacatttccattatatgtttatcggctaacatcatttgatctaattgagcctcatgttcaaactacaaataactttgttgatgttcttggtgtcataactgaaattcatgaactgacacctgtgcatgtccgaagtcaactaacaccaacagtgacaaggaccattatcatagaagatctcagtgcaaacaagagtaatatcaatagcccagaaaaagatgatggcgataaggaaaccgcacagcttgatacaatacccaataacaaaggaaaaggaccagcagatacaattgaatcgccacctaaaaggttcaaataagggacgatacgcatcggaaaagaaatggacatcaaatcctccgagaactaaagtttcactcagatcttcgtcgaccttttgagttgcacaatgtctattttgcaacatatgtataattatatatgatgacctactcagctctttgaaaacaatttatgtaaatataacagcctaattctacgtagtggacaaaaatgttgactctgattatagctcaggtaactctatttcatataaacactagatgcgttccatataaattacgctatttcgtagcaattactaacgtttaaaatcaacaataacct

SEQ ID NO: 42847 - DNA, 1123 bp, Zea Mays
agaaaaatggaatacactttattacctgatttagcaccgcataagatacacgcaaagattcaagtacatgtatctagaaagtggcttttccgaggtgctactgatagtggaccactacaacatgttgatatggttttgtctgatcgagagggtaatgctatttatgctgaaatccctggaaatttagctgaacaaaaagcaacaaatattgaagaaggaggagtttatgatatcagcagattcagagtgtgcgcagcaaaaactgttttcaaaatagtggatggggacaaaatgatccaattcacatttcataccatagttaaacgtgccacaagccctccaacaacatttccattatatgtttatcggctaacatcatttgatctaattgagcctcatgttcaaactacaaataactttgttgatgttcttggtgtcataactgaaattcatgaactgacacctgtgcatgtccgaagtcaactaacaccaacagtgacaaggaccattatcatagaagatctcaggaaacatgatttgaatgtactgtcacaatagcagaaataccagctgaacacaaatggtggtttccatcttgcacaaaatgcaataaagcaacaatccctcacactgcaggttatcactgtgaatcatgcaattgggatggatacaaatttaatgcaaacaagagtaatatcaatagcccagaaaaagatgatggcgataaggaaaccgcacagcttgatacaatacccaataacaaaggaaaaggaccagcagatacaattgaatcgccacctaaaaggttcaaataagggacgatacgcatcggaaaagaaatggacatcaaatcctccgagaactaaagtttcactcagatcttcgtcgaccttttgagttgcacaatgtctattttgcaacatatgtataattatatatgatgacctactcagctctttgaaaacaatttatgtaaatataacagcctaattctacgtagtggacaaaaatgttgactctgattatagctcaggtaactctatttcatataaacactagatgcgttccatataaattacgctatttcgtagcaattactaacgtttaaaatcaacaataacct

SEQ ID NO: 42848 - DNA, 1450 bp, Zea Mays
agcgtcttaaaactagaagaatgcaattgcctcgagtcacaactacaagattgacaacttagtgattggatttttggtggtgattttggtgccgcactgcaaattaagagagaaatttcggttcccaagcagcccacagattctattgattgcgggtgtctttcagcatctgagggtttctaccagtccaggttacgcacaagcttcaaattatcgcaaaattcctcttacatatctgcatctcataccgaaccaggtctcataccggaccaggttaataatttgaagtaaaaaaaaagtcacgagtatctaaactaaataatgaatccctcatcgacatccgcgacaaccagcaacaacaaaccaatgaggaaaagacaacgtgaccttaccgatacgcatacatctgtaccagcaagcgctacagaagcacggagagcccggagaatgttgattaatcagaacagacttgctaaaagagaaaaatggaatacactttattacctgatttagcaccgcataagatacacgcaaagattcaagtacatgtatctagaaagtggcttttccgaggtgctactgatagtggaccactacaacatgttgatatggttttgtctgatcgagagggtaatgctatttatgctgaaatccctggaaatttagctgaacaaaaagcaacaaatattgaagaaggaggagtttatgatatcagcagattcagagtgtgcgcagcaaaaactgttttcaaaatagtggatggggacaaaatgatccaattcacatttcataccatagttaaacgtgccacaagccctccaacaacatttccattatatgtttatcggctaacatcatttgatctaattgagcctcatgttcaaactacaaataactttgttgatgttcttggtgtcataactgaaattcatgaactgacacctgtgcatgtccgaagtcaactaacaccaacagtgacaaggaccattatcatagaagatctcagtgcaaacaagagtaatatcaatagcccagaaaaagatgatggcgataaggaaaccgcacagcttgatacaatacccaataacaaaggaaaaggaccagcagatacaattgaatcgccacctaaaaggttcaaataagggacgatacgcatcggaaaagaaatggacatcaaatcctccgagaactaaagtttcactcagatcttcgtcgaccttttgagttgcacaatgtctattttgcaacatatgtataattatatatgatgacctactcagctctttgaaaacaatttatgtaaatataacagcctaattctacgtagtggacaaaaatgttgactctgattatagctcaggtaactctatttcatataaacactagatgcgttccatataaattacgctatttcgtagcaattactaacgtttaaaatcaacaataacct

SEQ ID NO: 42849 - DNA, 1653 bp, Zea Mays
attcaaatcccttgatgatgagattattactagaagattccagcgtcttaaaactagaagaatgcaattgcctcgagtcacaactacaagattgacaacttagtgattggatttttggtggtgattttggtgccgcactgcaaattaagagagaaatttcggttcccaagcagcccacagattctattgattgcgggtgtctttcagcatctgagggtttctaccagtccaggttacgcacaagcttcaaattatcgcaaaattcctcttacatatctgcatctcataccgaaccaggtctcataccggaccagaaaaatggaatacactttattacctgatttagcaccgcataagatacacgcaaagattcaagtacatgtatctagaaagtggcttttccgaggtgctactgatagtggaccactacaacatgttgatatggttttgtctgatcgagagggtaatgctatttatgctgaaatccctggaaatttagctgaacaaaaagcaacaaatattgaagaaggaggagtttatgatatcagcagattcagagtgtgcgcagcaaaaactgttttcaaaatagtggatggggacaaaatgatccaattcacatttcataccatagttaaacgtgccacaagccctccaacaacatttccattatatgtttatcggctaacatcatttgatctaattgagcctcatgttcaaactacaaataactttgttgatgttcttggtgtcataactgaaattcatgaactgacacctgtgcatgtccgaagtcaactaacaccaacagtgacaaggaccattatcatagaagatctcagcaacaaaacaatgaagatcactttatgggcagatcaggcgataatgttcaatcttcatgacgtgtacgatacaaatacaaataaactgattcttgtgctattcgtcgggtgcttatcaaaaattttcaaaggtgtctacctaagtggtggtcctgcctgtagatggtacttcaatccaacaattccagaggcagaaccttatcttaccaggaaattccgatcaacaaggaccatcaacacctcaaaacaaatcaaaaccgatgttattggaagactctccatctacagctttggaaaaattatctactacaactcctacaactgtagtaaggaagcttctatattccgaaactgacaacatgccgaaagctgcaaacaagagtaatatcaatagcccagaaaaagatgatggcgataaggaaaccgcacagcttgatacaatacccaataacaaaggaaaaggaccagcagatacaattgaatcgccacctaaaaggttcaaataagggacgatacgcatcggaaaagaaatggacatcaaatcctccgagaactaaagtttcactcagatcttcgtcgaccttttgagttgcacaatgtctattttgcaacatatgtataattatatatgatgacctactcagctctttgaaaacaatttatgtaaatataacagcctaattctacgtagtggacaaaaatgttgactctgattatagctcaggtaactctatttcatataaacactagatgcgttccatataaattacgctatttcgtagcaattactaacgtttaaaatcaacaataacct

SEQ ID NO: 42850 - DNA, 1945 bp, Zea Mays
taacaaaattgaagatgattggatgaatgatttgatggtttgctatacggagaaagagatattcaaatcccttgatgatgagattattactagaagattccagcgtcttaaaactagaagaatgcaattgcctcgagtcacaactacaagattgacaacttagtgattggatttttggtggtgattttggtgccgcactgcaaattaagagagaaatttcggttcccaagcagcccacagattctattgattgcgggtgtctttcagcatctgagggtttctaccagtccaggttacgcacaagcttcaaattatcgcaaaattcctcttacatatctgcatctcataccgaaccaggtctcataccggaccagaaaaatggaatacactttattacctgatttagcaccgcataagatacacgcaaagattcaagtacatgtatctagaaagtggcttttccgaggtgctactgatagtggaccactacaacatgttgatatggttttgtctgatcgagagggtaatgctatttatgctgaaatccctggaaatttagctgaacaaaaagcaacaaatattgaagaaggaggagtttatgatatcagcagattcagagtgtgcgcagcaaaaactgttttcaaaatagtggatggggacaaaatgatccaattcacatttcataccatagttaaacgtgccacaagccctccaacaacatttccattatatgtttatcggctaacatcatttgatctaattgagcctcatgttcaaactacaaataactttgttgatgttcttggtgtcataactgaaattcatgaactgacacctgtgcatgtccgaagtcaactaacaccaacagtgacaaggaccattatcatagaagatctcaggaaacatgatttgaatgtactgtcacaatagcagaaataccagctgaacacaaatggtggtttccatcttgcacaaaatgcaataaagcaacaatccctcacactgcaggttatcactgtgaatcatgcaattgggatggatacaaatttaaatacaagctcaaattcctggcatctgatgaaacaaatattgcagaaatgttttgttttgacactgtagcaagacacatcgttggtaaatcctgtgagattgttttacgaagtgtcactgaacagtctcctatcccacctgatctagcacaaatcatatctctgaaatttacattcagagtcacaattgacaatcaatctcttttccaacaaaccaatcgcccaaacgtgttccgcattaattctattgttgctgcacatgggagacaacgttctttaccaatgcaaataggaaattccgatcaacaaggaccatcaacacctcaaaacaaatcaaaaccgatgttattggaagactctccatctacagctttggaaaaattatctactacaactcctacaactgtagtaaggaagcttctatattccgaaactgacaacatgccgaaagctgcaaacaagagtaatatcaatagcccagaaaaagatgatggcgataaggaaaccgcacagcttgatacaatacccaataacaaaggaaaaggaccagcagatacaattgaatcgccacctaaaaggttcaaataagggacgatacgcatcggaaaagaaatggacatcaaatcctccgagaactaaagtttcactcagatcttcgtcgaccttttgagttgcacaatgtctattttgcaacatatgtataattatatatgatgacctactcagctctttgaaaacaatttatgtaaatataacagcctaattctacgtagtggacaaaaatgttgactctgattatagctcaggtaactctatttcatataaacactagatgcgttccatataaattacgctatttcgtagcaattactaacgtttaaaatcaacaataacct

SEQ ID NO: 42851 - DNA, 2335 bp, Zea Mays
atgtgggactcagtattgcatgttcttaccattgtgcatgaagatggtcgtgtaccaacacaggcagcggggttgattgaaaaaatggagagcttcaaatttgttttcattttaaaattgatgttgaaaatgcttgcaatcacaaatgagctctctcaaaccttgcaaaggaagaatgccaacattgttcatgctatggagttacttgatgttgtgaaaacccgaatggctacaatgaggacagatagtggttgggagtcattctttcaaagcgtgaaagaattatgtgctcaaaagggtattcctgtggtagatatggatgaagaagtgcctattagaggtcgttcaaggcgagatggcttcacaatcacaaaccttcactactaccgcaccgagatattctttgttgttcttgataaaatcaacactgagttatgccatcgctttaatgaagtttctagcgagttgcttgtttgcttttcttgcctcgatccaaagaacttattttgcagttttgatatagagaaacttgttcgacttggtactctatatgataaggatttttcagttattgaatgtgcaatgttaagagagcaacttgagacatacattgtccacgtgcgaaggcatgccgcttttgattggatttttggtggtgattttggtgccgcactgcaaattaagagagaaatttcggttcccaagcagcccacagattctattgattgcgggtgtctttcagcatctgagggtttctaccagtccaggttacgcacaagcttcaaattatcgcaaaattcctcttacatatctgcatctcataccgaaccaggtctcataccggaccagaaaaatggaatacactttattacctgatttagcaccgcataagatacacgcaaagattcaagtacatgtatctagaaagtggcttttccgaggtgctactgatagtggaccactacaacatgttgatatggttttgtctgatcgagagggtaatgctatttatgctgaaatccctggaaatttagctgaacaaaaagcaacaaatattgaagaaggaggagtttatgatatcagcagattcagagtgtgcgcagcaaaaactgttttcaaaatagtggatggggacaaaatgatccaattcacatttcataccatagttaaacgtgccacaagccctccaacaacatttccattatatgtttatcggctaacatcatttgatctaattgagcctcatgttcaaactacaaataactttgttgatgttcttggtgtcataactgaaattcatgaactgacacctgtgcatgtccgaagtcaactaacaccaacagtgacaaggaccattatcatagaagatctcaggtgtctacctaagtggtggtcctgcctgtagatggtacttcaatccaacaattccagaggcagaaccttatcttaccagtctacaaaaagaattgtgttacagcttccccaaaatttacaacatcctccagcgatggaaacgaagccaattgtcgaacataaatccctctatgaacttcttacagttaacccatatgatttcccggaaacatgatttgaatgtactgtcacaatagcagaaataccagctgaacacaaatggtggtttccatcttgcacaaaatgcaataaagcaacaatccctcacactgcaggttatcactgtgaatcatgcaattgggatggatacaaatttaagaaattccgatcaacaaggaccatcaacacctcaaaacaaatcaaaaccgatgttattggaagactctccatctacagctttggaaaaattatctactacaactcctacaactgtagtaaggaagcttctatattccgaaactgacaacatgccgaaagctgcaaacaagagtaatatcaatagcccagaaaaagatgatggcgataaggaaaccgcacagcttgatacaatacccaataacaaaggaaaaggaccagcagatacaattgaatcgccacctaaaaggttcaaataagggacgatacgcatcggaaaagaaatggacatcaaatcctccgagaactaaagtttcactcagatcttcgtcgaccttttgagttgcacaatgtctattttgcaacatatgtataattatatatgatgacctactcagctctttgaaaacaatttatgtaaatataacagcctaattctacgtagtggacaaaaatgttgactctgattatagctcaggtaactctatttcatataaacactagatgcgttccatataaattacgctatttcgtagcaattactaacgtttaaaatcaacaataacct

SEQ ID NO: 42852 - DNA, 1818 bp, Zea Mays
atgtgggactcagtattgcatgttcttaccattgtgcatgaagatggtcgtgtaccaacacaggcagcggggttgattgaaaaaatggagagcttcaaatttgttttcattttaaaattgatgttgaaaatgcttgcaatcacaaatgagctctctcaaaccttgcaaaggaagaatgccaacattgttcatgctatggagttacttgatgttgtgaaaacccgaatggctacaatgaggacagatagtggttgggagtcattctttcaaagcgtgaaagaattatgtgctcaaaagggtattcctgtggtagatatggatgaagaagtgcctattagaggtcgttcaaggcgagatggcttcacaatcacaaaccttcactactaccgcaccgagatattctttgttgttcttgataaaatcaacactgagttatgccatcgctttaatgaagtttctagcgagttgcttgtttgcttttcttgcctcgatccaaagaacttattttgcagttttgatatagagaaacttgttcgacttggtactctatatgataaggatttttcagttattgaatgtgcaatgttaagagagcaacttgagacatacattgtccacgtgcgaaggcatgccgcttttgattggatttttggtggtgattttggtgccgcactgcaaattaagagagaaatttcggttcccaagcagcccacagattctattgattgcgggtgtctttcagcatctgagggtttctaccagtccaggttacgcacaagcttcaaattatcgcaaaattcctcttacatatctgcatctcataccgaaccaggtctcataccggaccagaaaaatggaatacactttattacctgatttagcaccgcataagatacacgcaaagattcaagtacatgtatctagaaagtggcttttccgaggtgctactgatagtggaccactacaacatgttgatatggttttgtctgatcgagagggtaatgctatttatgctgaaatccctggaaatttagctgaacaaaaagcaacaaatattgaagaaggaggagtttatgatatcagcagattcagagtgtgcgcagcaaaaactgttttcaaaatagtggatggggacaaaatgatccaattcacatttcataccatagttaaacgtgccacaagccctccaacaacatttccattatatgtttatcggctaacatcatttgatctaattgagcctcatgttcaaactacaaataactttgttgatgttcttggtgtcataactgaaattcatgaactgacacctgtgcatgtccgaagtcaactaacaccaacagtgacaaggaccattatcatagaagatctcagtgcaaacaagagtaatatcaatagcccagaaaaagatgatggcgataaggaaaccgcacagcttgatacaatacccaataacaaaggaaaaggaccagcagatacaattgaatcgccacctaaaaggttcaaataagggacgatacgcatcggaaaagaaatggacatcaaatcctccgagaactaaagtttcactcagatcttcgtcgaccttttgagttgcacaatgtctattttgcaacatatgtataattatatatgatgacctactcagctctttgaaaacaatttatgtaaatataacagcctaattctacgtagtggacaaaaatgttgactctgattatagctcaggtaactctatttcatataaacactagatgcgttccatataaattacgctatttcgtagcaattactaacgtttaaaatcaacaataacct

SEQ ID NO: 42853 - DNA, 1293 bp, Zea Mays
atgtgggactcagtattgcatgttcttaccattgtgcatgaagatggtcgtgtaccaacacaggcagcggggttgattgaaaaaatggagagcttcaaatttgttttcattttaaaattgatgttgaaaatgcttgcaatcacaaatgagctctctcaaaccttgcaaaggaagaatgccaacattgttcatgctatggagttacttgatgttgtgaaaacccgaatggctacaatgaggacagatagtggttgggagtcattctttcaaagcgtgaaagaattatgtgctcaaaagggtattcctgtggtagatatggatgaagaagtgcctattagaggtcgttcaaggcgagatggcttcacaatcacaaaccttcactactaccgcaccgagatattctttgttgttcttgataaaatcaacactgagttatgccatcgctttaatgaagtttctagcgagttgcttgtttgcttttcttgcctcgatccaaagaacttattttgcagttttgatatagagaaacttgttcgacttggtactctatatgataaggatttttcagttattgaatgtgcaatgttaagagagcaacttgagacatacattgtccacgtgcgaaggcatgccgcttttgattggatttttggtggtgattttggtgccgcactgcaaattaagagagaaatttcggttcccaagcagcccacagattctattgattgcgggtgtctttcagcatctgagggtttctaccagtccaggttacgcacaagcttcaaattatcgcaaaattcctcttacatatctgcatctcataccgaaccaggtctcataccggaccagtgcaaacaagagtaatatcaatagcccagaaaaagatgatggcgataaggaaaccgcacagcttgatacaatacccaataacaaaggaaaaggaccagcagatacaattgaatcgccacctaaaaggttcaaataagggacgatacgcatcggaaaagaaatggacatcaaatcctccgagaactaaagtttcactcagatcttcgtcgaccttttgagttgcacaatgtctattttgcaacatatgtataattatatatgatgacctactcagctctttgaaaacaatttatgtaaatataacagcctaattctacgtagtggacaaaaatgttgactctgattatagctcaggtaactctatttcatataaacactagatgcgttccatataaattacgctatttcgtagcaattactaacgtttaaaatcaacaataacct

SEQ ID NO: 42854 - DNA, 2756 bp, Zea Mays
atgtgggactcagtattgcatgttcttaccattgtgcatgaagatggtcgtgtaccaacacaggcagcggggttgattgaaaaaatggagagcttcaaatttgttttcattttaaaattgatgttgaaaatgcttgcaatcacaaatgagctctctcaaaccttgcaaaggaagaatgccaacattgttcatgctatggagttacttgatgttgtgaaaacccgaatggctacaatgaggacagatagtggttgggagtcattctttcaaagcgtgaaagaattatgtgctcaaaagggtattcctgtggtagatatggatgaagaagtgcctattagaggtcgttcaaggcgagatggcttcacaatcacaaaccttcactactaccgcaccgagatattctttgttgttcttgataaaatcaacactgagttatgccatcgctttaatgaagtttctagcgagttgcttgtttgcttttcttgcctcgatccaaagaacttattttgcagttttgatatagagaaacttgttcgacttggtactctatatgataaggatttttcagttattgaatgtgcaatgttaagagagcaacttgagacatacattgtccacgtgcgaaggcatgccgcttttgattggatttttggtggtgattttggtgccgcactgcaaattaagagagaaatttcggttcccaagcagcccacagattctattgattgcgggtgtctttcagcatctgagggtttctaccagtccaggttacgcacaagcttcaaattatcgcaaaattcctcttacatatctgcatctcataccgaaccaggtctcataccggaccagaaaaatggaatacactttattacctgatttagcaccgcataagatacacgcaaagattcaagtacatgtatctagaaagtggcttttccgaggtgctactgatagtggaccactacaacatgttgatatggttttgtctgatcgagagggtaatgctatttatgctgaaatccctggaaatttagctgaacaaaaagcaacaaatattgaagaaggaggagtttatgatatcagcagattcagagtgtgcgcagcaaaaactgttttcaaaatagtggatggggacaaaatgatccaattcacatttcataccatagttaaacgtgccacaagccctccaacaacatttccattatatgtttatcggctaacatcatttgatctaattgagcctcatgttcaaactacaaataactttgttgatgttcttggtgtcataactgaaattcatgaactgacacctgtgcatgtccgaagtcaactaacaccaacagtgacaaggaccattatcatagaagatctcagcaacaaaacaatgaagatcactttatgggcagatcaggcgataatgttcaatcttcatgacgtgtacgatacaaatacaaataaactgattcttgtgctattcgtcgggtgcttatcaaaaattttcaaaggtgtctacctaagtggtggtcctgcctgtagatggtacttcaatccaacaattccagaggcagaaccttatcttaccagtctacaaaaagaattgtgttacagcttccccaaaatttacaacatcctccagcgatggaaacgaagccaattgtcgaacataaatccctctatgaacttcttacagttaacccatatgatttcccggaaacatgatttgaatgtactgtcacaatagcagaaataccagctgaacacaaatggtggtttccatcttgcacaaaatgcaataaagcaacaatccctcacactgcaggttatcactgtgaatcatgcaattgggatggatacaaatttaaatacaagctcaaattcctggcatctgatgaaacaaatattgcagaaatgttttgttttgacactgtagcaagacacatcgttggtaaatcctgtgagattgttttacgaagtgtcactgaacagtctcctatcccacctgatctagcacaaatcatatctctgaaatttacattcagagtcacaattgacaatcaatctcttttccaacaaaccaatcgcccaaacgtgttccgcattaattctattgttgctgcacatgggagacaacgttctttaccaatgcaaataggaaattccgatcaacaaggaccatcaacacctcaaaacaaatcaaaaccgatgttattggaagactctccatctacagctttggaaaaattatctactacaactcctacaactgtagtaaggaagcttctatattccgaaactgacaacatgccgaaagctgcaaacaagagtaatatcaatagcccagaaaaagatgatggcgataaggaaaccgcacagcttgatacaatacccaataacaaaggaaaaggaccagcagatacaattgaatcgccacctaaaaggttcaaataagggacgatacgcatcggaaaagaaatggacatcaaatcctccgagaactaaagtttcactcagatcttcgtcgaccttttgagttgcacaatgtctattttgcaacatatgtataattatatatgatgacctactcagctctttgaaaacaatttatgtaaatataacagcctaattctacgtagtggacaaaaatgttgactctgattatagctcaggtaactctatttcatataaacactagatgcgttccatataaattacgctatttcgtagcaattactaacgtttaaaatcaacaataacct

SEQ ID NO: 42855 - DNA, 1454 bp, Zea Mays
tggattatctatatccaagataagtgggcaaggatatgatggagcatcgaatatgcgagcaagtgttgagagaatattttcggcaatgaacatcattaagagagaattgcgtaacaaaattgaagatgattggatgaatgatttgatggtttgctatacggagaaagagatattcaaatcccttgatgatgagattattactagaagattccagcgtcttaaaactagaagaatgcaattgcctcgagtcacaactacaagattgacaacttagtgattggatttttggtggtgattttggtgccgcactgcaaattaagagagaaatttcggttcccaagcagcccacagattctattgattgcgggtgtctttcagcatctgagggtttctaccagtccaggttacgcacaagcttcaaattatcgcaaaattcctcttacatatctgcatctcataccgaaccaggtctcataccggaccagaaaaatggaatacactttattacctgatttagcaccgcataagatacacgcaaagattcaagtacatgtatctagaaagtggcttttccgaggtgctactgatagtggaccactacaacatgttgatatggttttgtctgatcgagagggtaatgctatttatgctgaaatccctggaaatttagctgaacaaaaagcaacaaatattgaagaaggaggagtttatgatatcagcagattcagagtgtgcgcagcaaaaactgttttcaaaatagtggatggggacaaaatgatccaattcacatttcataccatagttaaacgtgccacaagccctccaacaacatttccattatatgtttatcggctaacatcatttgatctaattgagcctcatgttcaaactacaaataactttgttgatgttcttggtgtcataactgaaattcatgaactgacacctgtgcatgtccgaagtcaactaacaccaacagtgacaaggaccattatcatagaagatctcagtgcaaacaagagtaatatcaatagcccagaaaaagatgatggcgataaggaaaccgcacagcttgatacaatacccaataacaaaggaaaaggaccagcagatacaattgaatcgccacctaaaaggttcaaataagggacgatacgcatcggaaaagaaatggacatcaaatcctccgagaactaaagtttcactcagatcttcgtcgaccttttgagttgcacaatgtctattttgcaacatatgtataattatatatgatgacctactcagctctttgaaaacaatttatgtaaatataacagcctaattctacgtagtggacaaaaatgttgactctgattatagctcaggtaactctatttcatataaacactagatgcgttccatataaattacgctatttcgtagcaattactaacgtttaaaatcaacaataacct

SEQ ID NO: 42856 - DNA, 1129 bp, Zea Mays
cgacgctctcaccattcacgaacggcgactgcggatcgatcgtgcgtcgtctcctgcgccggcctctcttccagtcaggttacgcacaagcttcaaattatcgcaaaattcctcttacatatctgcatctcataccgaaccaggtctcataccggaccagaaaaatggaatacactttattacctgatttagcaccgcataagatacacgcaaagattcaagtacatgtatctagaaagtggcttttccgaggtgctactgatagtggaccactacaacatgttgatatggttttgtctgatcgagagggtaatgctatttatgctgaaatccctggaaatttagctgaacaaaaagcaacaaatattgaagaaggaggagtttatgatatcagcagattcagagtgtgcgcagcaaaaactgttttcaaaatagtggatggggacaaaatgatccaattcacatttcataccatagttaaacgtgccacaagccctccaacaacatttccattatatgtttatcggctaacatcatttgatctaattgagcctcatgttcaaactacaaataactttgttgatgttcttggtgtcataactgaaattcatgaactgacacctgtgcatgtccgaagtcaactaacaccaacagtgacaaggaccattatcatagaagatctcagtgcaaacaagagtaatatcaatagcccagaaaaagatgatggcgataaggaaaccgcacagcttgatacaatacccaataacaaaggaaaaggaccagcagatacaattgaatcgccacctaaaaggttcaaataagggacgatacgcatcggaaaagaaatggacatcaaatcctccgagaactaaagtttcactcagatcttcgtcgaccttttgagttgcacaatgtctattttgcaacatatgtataattatatatgatgacctactcagctctttgaaaacaatttatgtaaatataacagcctaattctacgtagtggacaaaaatgttgactctgattatagctcaggtaactctatttcatataaacactagatgcgttccatataaattacgctatttcgtagcaattactaacgtttaaaatcaacaataacct

SEQ ID NO: 42857 - DNA, 906 bp, Zea Mays
gatgagattattactagaagattccagcgtcttaaaactagaagaatgcaattgcctcgagtcacaactacaagattgacaacttagtgattggatttttggtggtgattttggtgccgcactgcaaattaagagagaaatttcggttcccaagcagcccacagattctattgattgcgggtgtctttcagcatctgagggtttctaccagtccaggttacgcacaagcttcaaattatcgcaaaattcctcttacatatctgcatctcataccgaaccaggtctcataccggaccagaaaaatggaatacactttattacctgatttagcaccgcataagatacacgcaaagattcaagtacatgtatctagaaagtggcttttccgaggtgctactgatagtggaccactacaacatgttgatatggttttgtctgatcgagagggtaatgctatttatgctgaaatccctggaaatttagctgaacaaaaagcaacaaatattgaagaaggaggagtttatgatatcagcagattcagagtgtgcgcagcaaaaactgttttcaaaatagtggatggggacaaaatgatccaattcacatttcataccatagttaaacgtgccacaagccctccaacaacatttccattatatgtttatcggctaacatcatttgatctaattgagcctcatgttcaaactacaaataactttgttgatgttcttggtgtcataactgaaattcatgaactgacacctgtgcatgtccgaagtcaactaacaccaacagtgacaaggaccattatcatagaagatctcaggtgtctacctaagtggtggtcctgcctgtagatggtacttcaatccaacaattccagaggcagaaccttatcttaccagccag

SEQ ID NO: 42858 - DNA, 1457 bp, Zea Mays
atgtgggactcagtattgcatgttcttaccattgtgcatgaagatggtcgtgtaccaacacaggcagcggggttgattgaaaaaatggagagcttcaaatttgttttcattttaaaattgatgttgaaaatgcttgcaatcacaaatgagctctctcaaaccttgcaaaggaagaatgccaacattgttcatgctatggagttacttgatgttgtgaaaacccgaatggctacaatgaggacagatagtggttgggagtcattctttcaaagcgtgaaagaattatgtgctcaaaagggtattcctgtggtagatatggatgaagaagtgcctattagaggtcgttcaaggcgagatggcttcacaatcacaaaccttcactactaccgcaccgagatattctttgttgttcttgataaaatcaacactgagttatgccatcgctttaatgaagtttctagcgagttgcttgtttgcttttcttgcctcgatccaaagaacttattttgcagttttgatatagagaaacttgttcgacttggtactctatatgataaggatttttcagttattgaatgtgcaatgttaagagagcaacttgagacatacattgtccacgtgcgaaggcatgccgcttttgattggatttttggtggtgattttggtgccgcactgcaaattaagagagaaatttcggttcccaagcagcccacagattctattgattgcgggtgtctttcagcatctgagggtttctaccagtccaggttacgcacaagcttcaaattatcgcaaaattcctcttacatatctgcatctcataccgaaccaggtctcataccggaccagaaaaatggaatacactttattacctgatttagcaccgcataagatacacgcaaagattcaagtacatgtatctagaaagtggcttttccgaggtgctactgatagtggaccactacaacatgttgatatggttttgtctgatcgagagggtaatgctatttatgctgaaatccctggaaatttagctgaacaaaaagcaacaaatattgaagaaggaggagtttatgatatcagcagattcagagtgtgcgcagcaaaaactgttttcaaaatagtggatggggacaaaatgatccaattcacatttcataccatagttaaacgtgccacaagccctccaacaacatttccattatatgtttatcggctaacatcatttgatctaattgagcctcatgttcaaactacaaataactttgttgatgttcttggtgtcataactgaaattcatgaactgacacctgtgcatgtccgaagtcaactaacaccaacagtgacaaggaccattatcatagaagatctcaggtgtctacctaagtggtggtcctgcctgtagatggtacttcaatccaacaattccagaggcagaaccttatcttaccagccag

SEQ ID NO: 42859 - DNA, 746 bp, Zea Mays
tcatcaaaacataaaaatggaatacactttattacctgatttagcaccgcataagatacacgcaaagattcaagtacatgtatctagaaagtggcttttccgaggtgctactgatagtggaccactacaacatgttgatatggttttgtctgatcgagagggtaatgctatttatgctgaaatccctggaaatttagctgaacaaaaagcaacaaatattgaagaaggaggagtttatgatatcagcagattcagagtgtgcgcagcaaaaactgttttcaaaatagtggatggggacaaaatgatccaattcacatttcataccatagttaaacgtgccacaagccctccaacaacatttccattatatgtttatcggctaacatcatttgatctaattgagcctcatgttcaaactacaaataactttgttgatgttcttggtgtcataactgaaattcatgaactgacacctgtgcatgtccgaagtcaactaacaccaacagtgacaaggaccattatcatagaagatctcagcaacaaaacaatgaagatcactttatgggcagatcaggcgataatgttcaatcttcatgacgtgtacgatacaaatacaaataaactgattcttgtgctattcgtcgggtgcttatcaaaaattttcaaaggtgtctacctaagtggtggtcctgcctgtagatggtacttcaatccaacaattccagaggcagaaccttatcttacca

SEQ ID NO: 42860 - DNA, 853 bp, Zea Mays
ttaaaactagaagaatgcaattgcctcgagtcacaactacaagattgacaacttagtgattggatttttggtggtgattttggtgccgcactgcaaattaagagagaaatttcggttcccaagcagcccacagattctattgattgcgggtgtctttcagcatctgagggtttctaccagtccaggttacgcacaagcttcaaattatcgcaaaattcctcttacatatctgcatctcataccgaaccagaaaaatggaatacactttattacctgatttagcaccgcataagatacacgcaaagattcaagtacatgtatctagaaagtggcttttccgaggtgctactgatagtggaccactacaacatgttgatatggttttgtctgatcgagagggtaatgctatttatgctgaaatccctggaaatttagctgaacaaaaagcaacaaatattgaagaaggaggagtttatgatatcagcagattcagagtgtgcgcagcaaaaactgttttcaaaatagtggatggggacaaaatgatccaattcacatttcataccatagttaaacgtgccacaagccctccaacaacatttccattatatgtttatcggctaacatcatttgatctaattgagcctcatgttcaaactacaaataactttgttgatgttcttggtgtcataactgaaattcatgaactgacacctgtgcatgtccgaagtcaactaacaccaacagtgacaaggaccattatcatagaagatctcaggtgtctacctaagtggtggtcctgcctgtagatggtacttcaatccaacaattccagaggcagaaccttatcttacca

SEQ ID NO: 42861 - DNA, 2085 bp, Zea Mays
atgtgggactcagtattgcatgttcttaccattgtgcatgaagatggtcgtgtaccaacacaggcagcggggttgattgaaaaaatggagagcttcaaatttgttttcattttaaaattgatgttgaaaatgcttgcaatcacaaatgagctctctcaaaccttgcaaaggaagaatgccaacattgttcatgctatggagttacttgatgttgtgaaaacccgaatggctacaatgaggacagatagtggttgggagtcattctttcaaagcgtgaaagaattatgtgctcaaaagggtattcctgtggtagatatggatgaagaagtgcctattagaggtcgttcaaggcgagatggcttcacaatcacaaaccttcactactaccgcaccgagatattctttgttgttcttgataaaatcaacactgagttatgccatcgctttaatgaagtttctagcgagttgcttgtttgcttttcttgcctcgatccaaagaacttattttgcagttttgatatagagaaacttgttcgacttggtactctatatgataaggatttttcagttattgaatgtgcaatgttaagagagcaacttgagacatacattgtccacgtgcgaaggcatgccgcttttgattggatttttggtggtgattttggtgccgcactgcaaattaagagagaaatttcggttcccaagcagcccacagattctattgattgcgggtgtctttcagcatctgagggtttctaccagtccaggttacgcacaagcttcaaattatcgcaaaattcctcttacatatctgcatctcataccgaaccaggtctcataccggaccagtgctctacacaattgaattccaaaaacgaggcctacctcactcgcatatcatattttgggtatcaaatggcacttcggagcctacatccaactttattgattctttcatcagtgctgagattccagatccaagcatcgaccctttagggtactgtttggtggcagaacatatgatccacggtccatgcggagcattaaatccaaattctcaatgtatgaaaaataacagatgctcgaagaattatccaaaggagttccatgaagaaactaacctggacgaacaaggatttgctacatacagacgacggaacaatgaccgctacgtcattaaagggggtcacaagttggataataggtgggtagttccatataatgacactctattaaagacttatcaagctcatatcaatgttgaatggtgcaacaaaactgtttttgtcaaatacctcttcaaatacgtaacaaaaggaccaaactataacaaagtttatttacaaagaataagaaatggtgaggataccccttatgatgaagaaactaatgcgagaaatgaagtgaaagaatatttggacactcgctatctatgcaacaaggattcctgttggcgtgtgcttggatatgacatccatagacattatcctgcagtagaacgaatgcctgtgcatttaccaaatgaaaattacataacctataatgcagcaagcaacatatcacgaatattgtctgaaggttttgttcgaaagacaatgctcaccgagtggttttatgttaattcaacatgtgaatcagcacgggatctaacatatattgaatttccaactaaatggtgatgggaagacaaaacaagaagctagaaaccaagacatgcaaaggaagggaaaataggtcgtatatattatgtacatccatctacaggagaaagatactatttacgaatgcttcttatgatcgttaaaggtgctacaagctacgaggatttgagaagatataacaacatattacatcccacatttaaggaagcatgtagagcacgaggtcttcttaacgatgacaatgagtggtacaatgcctttgacgaagctgtcagatgggccacttccgagcagttgcgacatctatttgtcaccatgcttctttattgtgaggttggagatgagtatgcatttttcgagaaagtatggaaacaactaacagatgatattcaatatagaatgagaaaaacattgaatcttcctt

SEQ ID NO: 42862 - DNA, 1900 bp, Zea Mays
gcctttgtggcctcctcaacggggagtaggtttgcaagaaccgaacctcggtaaaacaaatctccgtgtctcatttgcttattcgcttgggatttgttttgcgccctctcttgcggactcatttattgttactaacgctaaccccggcttgtagttgtgtttatatttgtaaatttcagtttcgccctattcaccccccctctaggcgactatcaacactcatatatccagtctaacatatatatagaaatagaaattcagcaaccgaaaacttatagaattagacaaactaacagacgaaaccaataaactttcaagtatcagttagttacttcgtttaagaaaacagattccagtggtaagcaacatttttttcatttcacatatattgcccagggttcactgcacacacaaatgttatgtgtataagcatgcagagttcaggcatctaacaacattataaatccattattttctgtttctgaacaaacatggtcttcagttaaatagcaaattccatgcctttgctatttatgagtgccaacaataagataaatgttagtataacaaataatcttaatataaagcatacaaacatgtaaaaaccacatatcattcgtttcagcaacaaggtgaggttcattagtgctaaactgtaaaaacgctaatataaacaaagtagcttgattccttaactacctaaattgttttttagtttcagatagtgtcttcagtgccatggcgccgctacgccagggagcaagtcggtccgccatggctgggtggggcatgtaccacggactaaagcataaaccaacgcaaatccaatgattgtaaaacagcagtttcgatggtgagaagtttgcaacacagattcagttaacatgagagttcagagagtaacttcagcgctcagtttcaaacatagataaaatatcagctgactatcagccgaccctccaaatctaaacgcacaaattttggttctcaaattctattaggggacctttttatttgggtaaatatggggagtatttagtaaatgaaattctgtatggatgtgtcctctagcatctggtacaaatgcaagttgacaacatttcatacatggcaccaagaatctaccagaatcagataacagcatgatgcattcatgtccgtatctgaccacataaaaatgcagcccctttcattcattgtgactataaatgtgttagttcgtacccagaggcggatctacagtgtgggcaatgtgggccatggccccacatcaaattttgtaatattcataataccatataggattagattagagggagcaggagtctcagcctctcaggtccatttcgttccagcgtccagccggacagccggtcacggcccatgccccattgggccattcgttgttcacccaggaggccagaaaatctcagctctttcgtcacgtcttctgtcggccgcctgccgccgccggccgcctgcatcccaccgcgcccgcggcatcgccgatcgcgacatcgccccacaccacaggacacagccacacaggtaaacatcccctgcccagtgcggcggtgccccttcttctttctcccgctctcccactcggccactccgccagagcagctgcaccgctgcgcgctgcaggctgctactactgctactctggtgcgtgtaagatgttcgacgaaatgcaccagcgcatagaatttcagttaataactggtcaattgttgcgtgttatcaaatattgtttctataatttttcagagcaaatgagaaggtttttccagccactttcaagaggctctaacactggtgctaataataatgtgaataacacaccaactgttggagggacgttcaatccggatgacatagttgcagatcccgctttaag

SEQ ID NO: 42863 - DNA, 1672 bp, Zea Mays
gcctttgtggcctcctcaacggggagtaggtttgcaagaaccgaacctcggtaaaacaaatctccgtgtctcatttgcttattcgcttgggatttgttttgcgccctctcttgcggactcatttattgttactaacgctaaccccggcttgtagttgtgtttatatttgtaaatttcagtttcgccctattcaccccccctctaggcgactatcaacactcatatatccagtctaacatatatatagaaatagaaattcagcaaccgaaaacttatagaattagacaaactaacagacgaaaccaataaactttcaagtatcagttagttacttcgtttaagaaaacagattccagtggtaagcaacatttttttcatttcacatatattgcccagggttcactgcacacacaaatgttatgtgtataagcatgcagagttcaggcatctaacaacattataaatccattattttctgtttctgaacaaacatggtcttcagttaaatagcaaattccatgcctttgctatttatgagtgccaacaataagataaatgttagtataacaaataatcttaatataaagcatacaaacatgtaaaaaccacatatcattcgtttcagcaacaaggtgaggttcattagtgctaaactgtaaaaacgctaatataaacaaagtagcttgattccttaactacctaaattgttttttagtttcagatagtgtcttcagtgccatggcgccgctacgccagggagcaagtcggtccgccatggctgggtggggcatgtaccacggactaaagcataaaccaacgcaaatccaatgattgtaaaacagcagtttcgatggtgagaagtttgcaacacagattcagttaacatgagagttcagagagtaacttcagcgctcagtttcaaacatagataaaatatcagctgactatcagccgaccctccaaatctaaacgcacaaattttggttctcaaattctattaggggacctttttatttgggtaaatatggggagtatttagtaaatgaaattctgtatggatgtgtcctctagcatctggtacaaatgcaagttgacaacatttcatacatggcaccaagaatctaccagaatcagataacagcatgatgcattcatgtccgtatctgaccacataaaaatgcagcccctttcattcattgtgactataaatgtgttagttcgtacccagaggcggatctacagtgtgggcaatgtgggccatggccccacatcaaattttgtaatattcataataccatataggattagattagagggagcaggagtctcagcctctcaggtccatttcgttccagcgtccagccggacagccggtcacggcccatgccccattgggccattcgttgttcacccaggaggccagaaaatctcagctctttcgtcacgtcttctgtcggccgcctgccgccgccggccgcctgcatcccaccgcgcccgcggcatcgccgatcgcgacatcgccccacaccacaggacacagccacacagagcaaatgagaaggtttttccagccactttcaagaggctctaacactggtgctaataataatgtgaataacacaccaactgttggagggacgttcaatccggatgacatagttgcagatcccgc

SEQ ID NO: 42864 - DNA, 823 bp, Zea Mays
cttccatttccaaaggacgacgctctcaccattcacgaacggcgactgcggatcgatcgtgcgtcgtctcctgcgccggcctctcttccagtcagcgcgcggtgtcctgtgtcggacgcgctcccacggcaacgcctaccccctccccctgcgctcaacggagcactcaggtatgccatccttctcaacaccagtccgaaactcagagattggcagctcgcacacatccatagctttcgaggaaataaatttttagcttccgaggaaataaaagaaaacaaaggggaagatgatatatgtaagctcgcacacattcatagcttcatagcagggagcaaagcaacgctacacataatgtagttatatatcctagaagaagaaaaaaacttcaatctgatatgcacatccatatatccagtctaacagatatatgtcattcaacatgcagaaacatgtagatatatacaaactagcagatgaaaacgataaactttcaagtatccagttgcttcgttttagaaaatagattccaatgataatcaacattttttcatcatttcacatatatagtccaggattcactgcatactaaactgcgattgtctcagacatcctaaaaaagcttcagtctgatatgcacacttgaaagggaattaggcttacacctggttcctaaataattttggtggttgaattgcccaacacaaatattggactgactagtttgctctagtgtataagttatacaggtgcaaaaggttcacatctagccaataaaaagatcaagtgttggattcaataaaggagcaaaggggcaaccgag

SEQ ID NO: 42865 - DNA, 237 bp, Zea Mays
cttacttcttcgacttcattgggagtcatgatcagcgggggtgacagcatgatgctgtccccagccaccctgatgagcatcccacgcttctcgcactccgcgccaaatatcgaaccaacacctggagttaccagtcgtaataaaatcaatatactgtcaccattaatcaactcggcaaggtttcttcaaactctggggatagtgacgaattttgcctcgacatgctacgctaattca

SEQ ID NO: 42866 - DNA, 576 bp, Zea Mays
gatcctccatcacaaaaaatcccctcccattccccaccccaccctagcgcgaggccgtagtacgaatccagcggcggagtacgtccacacgaaatccagagagaggggataaggttccggggccagccaaagccatatcgtggtgcagccactggcgcgccgccacgtggggcggcggtggtcacacctgcgctccgtcccggcattatcgccagggcttggcgccacagctagtatattggctagcttttggctcggcagctaacgacctgcagccaaccatctaccagcgactcagcgagcgagagcagcacacactgcacgcagctagctaggagcagcagcagcggcggcgatggcggcctccatgatctcctcgtcagctctggcggtggcgcctcagggcctgccgcccctcggccgccgcgcctcctccttcgccgtcgtctgctccaagaagaagatcaagaccgacaagccctacgggattgggggtggcctgaccgtcgacgtcgacgccaacgggagaaagggcaagatcgatcgatggagctgaaattacgtggtggggatgcg

SEQ ID NO: 42867 - DNA, 450 bp, Zea Mays
ctcaaatgaattccgactcggactccgattctgacggggacgatgccagcgccccgcactaggtgtggctgttgttgctgttttatctgactgtactgtaggattagcgatgagtaggtgactgaaaaggttccatttgatgaggcgttttgaagaacggtatagagaagcctgtagggaactcttgttcatgcaatgcaagtggttgtgttcgtctgtgtatgtgtgggtgcagcatttaggttgtcggtacttgggtgatgggtaggtggtagatgcttgggtagattgggaggcttctgtaaagaggggaatataagctggaacaaagaggaaaagtagcaatgccggccggggcatttcttcatgacgtctgctgctttctttgtactactactctctttgttctaaagtataatttattctttttttgggggtggggggagtcaa

SEQ ID NO: 42868 - DNA, 784 bp, Zea Mays
cgcagatgcaaaatggggagacggggtttaagcaaataatagtcgaggaaggagaggttctcctcactacacctcggctcgctggagccgataaggctgccgcgccctccctctctcctgcggtgctcccatggaatcggcggcgattgggtcgcagtccccgctctccttcccctccaacctctgcgaatcaaaagtatcctctggtttaccaatatacaatgtgaagatcaagggcaatcataggcttgacgtggtgtgccgtgggatgtttctacaagaaagtttatgcaaaggaaaaagaaagaagttttcaaggacgctgatgacgaggccgagcagatgaattggaggagaatgatgagagagatagaggaggcgggatcagctgtacgtacccattctgaagacccagcgaagcgggaaagagccacttccaagggatgctattcttgggactcttgtgcggttcaaacaattgaaaaaatgggatattgtcagtgagattcttgaatggctcagaacacagcattggtggaacttcagtgagatggacttcttgatgcttgtgacagcttatgggaagttgggggattttagcagggcagaaagggtcctcaagtacatgaaaaaaaaggttaacagccatgcgtcatgtcaaaactggtctgatggaggcgtatggaagagggaccgaattttttgtattttagcccttaaacagaagtaaaatcacgtttagacctaaaaaaattttaaatgcagttttggacccttagctcgg

SEQ ID NO: 42869 - DNA, 662 bp, Zea Mays
  misc_feature (1)..(1): n is a, c, g, or t
ntgtgttgtgtagcagcttaacatgatccggcacagttcgtaccgactccagcaactaaaaggaggcaagctgaggctaaccgcatcagggagaagtaccccgatagaattcctgtcattgttgagaaggccgagaggagtgacatcccagacatcgacaagaaaaagtaccttgtccccgccgacctcacagtgggacagtttgtgtacgtggtgcggaagcgcatcaagctcagcgccgagaaggcgatcttcatcttcgtgaagaacaccctcccaccaacagctgccctgatgtctgccatctacgaggagaacaaggacgaggacgggttcctctacatgacctacagcggcgagaacacctttgggctgctatgagtggcgccgcgccgccgtggatcgacgtcggacaatgcccctcctcctgtaaatacttaaaaaaaaaataggcgtctcaagaatccgtgtacataataatctggcatgtcttgcatcaaaagcaactcgttgcgtccactgtctgttgaaactattgaagcgtactaaacatttaagcaactcgttgcgtccactgtcagctctgggttgcttcagaagttctgtcacctgctgcgtcctccgtgagcttgtcgatgtggcaaagtaacacagggtgcctg

SEQ ID NO: 42870 - DNA, 785 bp, Zea Mays
tccttccttccacaagagagacaaacctagctcgcggattgccggatggaccctcagcagccagaaccagtcagctacctgtgcggagattgtggagctgagaacacgctgaagccgacagatgtgatccagtgccgtgagtggggctaccgcatcctctacaagaagcggacccatcgaaaaaggaggcaagctgaggctaaccgcatcagggagaagtaccccgatagaattcctgtcattgttgagaaggccgagaggagtgacatcccagacatcgacaagaaaaagtaccttgtccccgccgacctcacagtgggacagtttgtgtacgtggtgcggaagcgcatcaagctcagcgccgagaaggcgatcttcatcttcgtgaagaacaccctcccaccaacagctgccctgatgtctgccatctacgaggagaacaaggacgaggacgggttcctctacatgacctacagcggcgagaacacctttgggctgctatgagtggcgccgcgccgccgtggatcgacgtcggacaatgcccctcctcctgtaaatacttaaaaaaaaaataggcgtctcaagaatccgtgtacataataatctggcatgtcttgcatcaaaagcaactcgttgcgtccactgtctgttgaaactattgaagcgtactaaacatttaagcaactcgttgcgtccactgtcagctctgggttgcttcagaagttctgtcacctgctgcgtcctccgtgagcttgtcgatgtggcaaagtaacacagggtgcctg

SEQ ID NO: 42871 - DNA, 205 bp, Zea Mays
ccttgactccttccttccacaagagagacaaacctagctcgcggattgccggatggaccctcagcagccagaaccagtcagctacctgtgcggagattgtggagctgagaacacgctgaagccgacagatgtgatccagtgccgtgagtggggctaccgcatcctctacaagaagcggacccatcgaagtgtgactggttagggg

SEQ ID NO: 42872 - DNA, 1790 bp, Zea Mays
gcataaggcatgataccttctgtgaggatctctcctggctatgcagccttctctggctccagcctacgcttaaaattacattcaattccatccatctctagtctcaaaccctccaaatatgtggtctcctcgctgaaaccactctacctagcaccgctagatggtccacacacttctgagcttaagtcttggagacaaccacttgagttccgttgtgctgcttctgctgccgatgacaaggagtcaaagactcaggtggtgccagttcagttggaaggcgcacagaggttaaagatctccatctatttcgcgacctggtgggcgcttaatgtgatatttaacatttacaacaagaaggttctcaatgctttcccttacccctggctcacctccacactctcccttgcctgcggctctgcgatgatgcttttctcgtgggccactcgtcttgttgaggcccccaagaccgacctagacttctggaaagttcttttcccggttgctgtggcacatacaattggccatgttgctgcgacagtgagcatgtctaaggtggcagtgtcattcacacacataattaaaagtgcagaacctgcattcactgttttggtgtcaaagttcctccttggggagacgtttccagttccagtctatctttctcttcttccaatcattggtggttgtgctctagctgctgtcacagagctgaactttaatatggttggatttatgggtgctatgatatccaaccttgcatttgttttccgcaacatcttctcgaagaggggcatgaaggggaagttcgtcagtggcatgaattactatgcttgcctgtcaataatgtcgctggtcatactgactccatttgctatagctatggaaggtcctcagatgtgggctgctggttggcaaaaggctgttgcagaagttggacccaatgttgtctggtggatcgctgcacagagcgtgttctatcacttatataaccaggtgtcctacatgtctctcgatcagatctctccattgacgtttagcattggcaatacaatgaaacgtatatcagtgattgtttcatctataattatcttccacacgcctgtccgccctgtcaatgcactgggagctgccattgccatccttggcacattcctgtactctcaggcaaaggcgtgaggctaaagctttggccaaaggatcggagccagtagcaggcactggatccagttttgcttgttggagtggcatgtagatataaggttcggttttcgtgagagagagggtaataatggatcagtggctctgctgttccgttcttgtttgttgaccagattgaaatgcacaggccgtgacatgaaccgtcgtcaagtgtacctgaataacaccgtaacgaaattcaccgatgctgtttctttatggtattttagcagagctaagctgcgagccatgaccatgaccatgagcgcttgaacctccctacctttctggcgtttgagcatcatcagaagttagcttgaacaagcaagagtgaagatttcgaaggcttgaagaatgttctctgcatcagtgtacaaatatattgcagggctagtacaacaaagtagaatgtgatgttatgtttagctgcattgtgattgctttgccagtttacatgtaacaactaaaaagatagctgggacgtaaaataatactacctttgttctcggatatttgtcacccgttagtttatttttgaagtaaaccgtgtcaaataaaaaagagaaagagaacggaagatgcgtggaaggtttgca

SEQ ID NO: 42873 - DNA, 1717 bp, Zea Mays
atggcgctccgtcgctgcaatgccgccgcgcaacgtcgccaggcttcaccgacgccgaatccgaggtatgtggcctcctcagttgttcatcgtggtccgcttgtcgtgctaagcctttcgggtggtggttggtgcgcgggggcgtcggagcatgaaggcatgataccttctgtgaggatctctcctggctatgcagccttctctggctccagcctacgcttaaaattacattcaattccatccatctctagtctcaaaccctccaaatatgtggtctcctcgctgaaaccactctacctagcaccgctagatggtccacacacttctgagcttaagtcttggagacaaccacttgagttccgttgtgctgcttctgctgccgatgacaaggagtcaaagactcaggtggtgccagttcagttggaaggcgcacagaggttaaagatctccatctatttcgcgacctggtgggcgcttaatgtgatatttaacatttacaacaagaaggttctcaatgctttcccttacccctggctcacctccacactctcccttgcctgcggctctgcgatgatgcttttctcgtgggccactcgtcttgttgaggcccccaagaccgacctagacttctggaaagttcttttcccggttgctgtggcacatacaattggccatgttgctgcgacagtgagcatgtctaaggtggcagtgtcattcacacacataattaaaagtgcagaacctgcattcactgttttggtgtcaaagttcctccttggggagacgtttccagttccagtctatctttctcttcttccaatcattggtggttgtgctctagctgctgtcacagagctgaactttaatatggttggtggatcgctgcacagagcgtgttctatcacttatataaccaggtgtcctacatgtctctcgatcagatctctccattgacgtttagcattggcaatacaatgaaacgtatatcagtgattgtttcatctataattatcttccacacgcctgtccgccctgtcaatgcactgggagctgccattgccatccttggcacattcctgtactctcaggcaaaggcgtgaggctaaagctttggccaaaggatcggagccagtagcaggcactggatccagttttgcttgttggagtggcatgtagatataaggttcggttttcgtgagagagagggtaataatggatcagtggctctgctgttccgttcttgtttgttgaccagattgaaatgcacaggccgtgacatgaaccgtcgtcaagtgtacctgaataacaccgtaacgaaattcaccgatgctgtttctttatggtattttagcagagctaagctgcgagccatgaccatgaccatgagcgcttgaacctccctacctttctggcgtttgagcatcatcagaagttagcttgaacaagcaagagtgaagatttcgaaggcttgaagaatgttctctgcatcagtgtacaaatatattgcagggctagtacaacaaagtagaatgtgatgttatgtttagctgcattgtgattgctttgccagtttacatgtaacaactaaaaagatagctgggacgtaaaataatactacctttgttctcggatatttgtcacccgttagtttatttttgaagtaaaccgtgtcaaataaaaaagagaaagagaacggaagatgcgtggaaggtttgca

SEQ ID NO: 42874 - DNA, 3280 bp, Zea Mays
cagctagctcgcaataactccttcctccccacctccacattctcccatccgccctgctttcccctccaaccatgccgtcttcttcctccccgagatctcgccatgcctgctctcccgcctcctgctagctagcctagcctagccagctgcgtgcgtgcgtgcgtgatcgtttcctgcatgcgatatcaccaacgcttcgctggaagaaggcgtcgtcacagacagggatcgaagaataaaagttgatcgatggtagagagcaagagctagctagggtttgggagctgaggctaggaccgaacgtacgtacgtgctgccattgttcatgacgccggcaaggcgcgtgccgccggcggcgatgatcggccggaatggcttcgcgtttgggtcctcgtcggcgctgtctttaagccagccatcagctgcagcaagcgttccagcagcagctcttcgatcagatcccgaccaccaccacagtggacgatagcagcgacaacctcatccatggccgctctgacacgctggtagatgagttcgagagcaagtcctgcagcgagaatcccgacggaacctctggtgacgatggcctggaggaagaccccaatcagcggccgaacaagaagaagcgataccaccgccacacccagcaccagatccaagagatggaggcgttcttcaaggagtgcccgcacccggacgacaagcagcggaaggagctgagccgggagctcggcctcgagccgctgcaggtcaagttttggttccagaacaagcgcacacagatgaaggcaagcaagctctactgcacacacaccgttcctgattccgtgacgtacgttgctgctgataatgcaaaccaacgtgattactgcagaaccagcacgagcggcacgagaacgcgcagctgcgcgcggagaacgacaagctgcgagccgagaacatgcggtacaaggaggcgctgggcacggcctcgtgccccagctgcggcggcccggctgccctcggcgagatgtccttcgacgagcaccacctccgcctcgagaacgctcgcctccgtgacgagatcgaccggatctcgggcatcgccgccaagcacgtgggaaagcccatggtgtccttccccgtgctctccagcccgctcgccgccgccgccgccgccgcccggtccccactcgacctcgccggcgcctacggcgtccagtcagctgctgcgggcctcggcgccgaccacgtgctgttcggcgccggtgccggcgatctgctgaggagcgtgtcggccgggcagctcgacgcggacaagcccatgatcgtggagctggccgtcgcggccatggacgagctcctccggatggcgcggcctgacgcgctgctgtggggtggcggcgcgtcggcaggggcgcagcagcagcagctggacgaggaggagtacgtccggacgttccccgctgggctcgggccgaggcagtacgggctccgtccggaggcgtctcgggacagcgccgtcgtgatcatgacctgcgacagcctcatcgagatactcatggacgcgaaccgattcgcggcagtgttctcgagcatcgtgtcgagggcttccacgcacgaggtgctgtcaactggtgtggcagggagctacaatggtgcattacaagtgatgtcgatggagtttcaggtgccgtcgccgctggtgccgacgcgcgagagctacttcgtgaggtactgcaagaacaacccggacgggacatgggccgtcgtcgacgtctcgctcgacagcctccgccctagcccggtcatcaaatgccggcgcaggccgtcaggttgcctcatccaagagatgcccaatggctactcaaaggtgacctgggtggagcatgttgaggtcgacgacagatcagtgcacaacctctacaggcctttggtcaattcaggcctcgcgtttggcgcgaagaggtgggttggcacactggaccggcagtgcgagcggctcgccagcgccatggccagcaacatccccaacggcgacctcggtgtgatcacaagcatagaggggaggaagagcatgctgaagctggcggagaggatggtggcgagcttctgcggcggcgtgacggcgtctgcggcgcaccagtggacgacgctgtcgggaagcggcgcggaggacgtccgtgttatgaccaggaagagcgtggacgacccgggcaggccgccgggcatcgtcctcaatgctgccacctccttctggctgcccgtcccacccaagagggtcttcgatttcctccgcgatgagacctctcgcagcgagtgggacatcctctcgaacggtggtgctgtccaagaaatggctcacattgccaacggccgggaccatggcaactgtgtctccctccttcgtgtcaatagtgcaaactcgaaccagagcaacatgctgatcctccaggagagctgcaccgacgcctcgggctcgtacgtggtgtacgcgccggtggacgtggtggcgatgaacgtggtgctcaacggcggcgacccggactacgtggccctgctgccgtcgggcttcgccatcctccccgacggaccaccgccggccggtgcggctccgtcccacggagagggcttggacactggcggcggcgggtccctcctgacggtggcgttccagatcttggtggactccgtccccaccgccaagctctccctcggctccgtagccaccgtgaacagcctcatcgcctgcaccgtcgagcgcatcaaggccgccgtctgtgcggaagccggcaacccgcagtagccatccatgcgatatagagggagaagggggacatgcagcaaggttttgtggaaatgttagtggggagtcaagaacgcacctcagactctccttgccgtgtggtgctcatactgaaaggaaaaagaaggcgtcaccactatgcaaggggggatggttcgggtattgacttcgccgtccaatcaaactactacagaaaggacgtacgggtgctgtggagaagatggatcgatgctgtttctagggtttacttcctcattgttcgtggtgctgccgtagttcaggctaaggtgcctgtgcctgctcgcagtcgtagctagagaacacagagatttgttgcctctgatctttcctttttggatttgcaaagatttgtagatcagtcatttcgtaaaccgatgcgccttggctaaaacgcgcccgttcgttgttgttcgatcgtagctgccttttgctattcataaaacgatgcaatttcaaccactgagtttcttctag

SEQ ID NO: 42875 - DNA, 3033 bp, Zea Mays
cagctagctcgcaataactccttcctccccacctccacattctcccatccgccctgctttcccctccaaccatgccgtcttcttcctccccgagatctcgccatgcctgctctcccgcctcctgctagctagcctagcctagccagctgcgtgcgtgcgtgcgtgatcgtttcctgcatgcgatatcaccaacgcttcgctggaagaaggcgtcgtcacagacagggatcgaaggctgacctcctagacagccatcagctgcagcaagcgttccagcagcagctcttcgatcagatcccgaccaccaccacagtggacgatagcagcgacaacctcatccatggccgctctgacacgctggtagatgagttcgagagcaagtcctgcagcgagaatcccgacggaacctctggtgacgatggcctggaggaagaccccaatcagcggccgaacaagaagaagcgataccaccgccacacccagcaccagatccaagagatggaggcgttcttcaaggagtgcccgcacccggacgacaagcagcggaaggagctgagccgggagctcggcctcgagccgctgcaggtcaagttttggttccagaacaagcgcacacagatgaagaaccagcacgagcggcacgagaacgcgcagctgcgcgcggagaacgacaagctgcgagccgagaacatgcggtacaaggaggcgctgggcacggcctcgtgccccagctgcggcggcccggctgccctcggcgagatgtccttcgacgagcaccacctccgcctcgagaacgctcgcctccgtgacgagatcgaccggatctcgggcatcgccgccaagcacgtgggaaagcccatggtgtccttccccgtgctctccagcccgctcgccgccgccgccgccgccgcccggtccccactcgacctcgccggcgcctacggcgtccagtcagctgctgcgggcctcggcgccgaccacgtgctgttcggcgccggtgccggcgatctgctgaggagcgtgtcggccgggcagctcgacgcggacaagcccatgatcgtggagctggccgtcgcggccatggacgagctcctccggatggcgcggcctgacgcgctgctgtggggtggcggcgcgtcggcaggggcgcagcagcagcagctggacgaggaggagtacgtccggacgttccccgctgggctcgggccgaggcagtacgggctccgtccggaggcgtctcgggacagcgccgtcgtgatcatgacctgcgacagcctcatcgagatactcatggacgcgaaccgattcgcggcagtgttctcgagcatcgtgtcgagggcttccacgcacgaggtgctgtcaactggtgtggcagggagctacaatggtgcattacaagtgatgtcgatggagtttcaggtgccgtcgccgctggtgccgacgcgcgagagctacttcgtgaggtactgcaagaacaacccggacgggacatgggccgtcgtcgacgtctcgctcgacagcctccgccctagcccggtcatcaaatgccggcgcaggccgtcaggttgcctcatccaagagatgcccaatggctactcaaaggtgacctgggtggagcatgttgaggtcgacgacagatcagtgcacaacctctacaggcctttggtcaattcaggcctcgcgtttggcgcgaagaggtgggttggcacactggaccggcagtgcgagcggctcgccagcgccatggccagcaacatccccaacggcgacctcggtgtgatcacaagcatagaggggaggaagagcatgctgaagctggcggagaggatggtggcgagcttctgcggcggcgtgacggcgtctgcggcgcaccagtggacgacgctgtcgggaagcggcgcggaggacgtccgtgttatgaccaggaagagcgtggacgacccgggcaggccgccgggcatcgtcctcaatgctgccacctccttctggctgcccgtcccacccaagagggtcttcgatttcctccgcgatgagacctctcgcagcgagtgggacatcctctcgaacggtggtgctgtccaagaaatggctcacattgccaacggccgggaccatggcaactgtgtctccctccttcgtgtcaatagtgcaaactcgaaccagagcaacatgctgatcctccaggagagctgcaccgacgcctcgggctcgtacgtggtgtacgcgccggtggacgtggtggcgatgaacgtggtgctcaacggcggcgacccggactacgtggccctgctgccgtcgggcttcgccatcctccccgacggaccaccgccggccggtgcggctccgtcccacggagagggcttggacactggcggcggcgggtccctcctgacggtggcgttccagatcttggtggactccgtccccaccgccaagctctccctcggctccgtagccaccgtgaacagcctcatcgcctgcaccgtcgagcgcatcaaggccgccgtctgtgcggaagccggcaacccgcagtagccatccatgcgatatagaggagggagaagggggacatgcagcaaggttttgtggaaatgttagtggggagtcaagaacgcacctcagactctccttgccgtgtggtgctcatactgaaaggaaaaagaaggcgtcaccactatgcaaggggggatggttcgggtattgacttcgccgtccaatcaaactactacagaaaggacgtacgggtgctgtggagaagatggatcgatgctgtttctagggtttacttcctcattgttcgtggtgctgccgtagttcaggctaaggtgcctgtgcctgctcgcagtcgtagctagagaacacagagatttgttgcctctgatctttcctttttggatttgcaaagatttgtagatcagtcatttcgtaaaccgatgcgccttggctaaaacgcgcccgttcgttgttgttcgatcgtagctgccttttgctattcataaaacgatgcaatttcaaccactgagtttcttctag

SEQ ID NO: 42876 - DNA, 3223 bp, Zea Mays
ctctccgctccccagctagctcgcaataactccttcctccccacctccacattctcccatccgccctgctttcccctccaaccatgccgtcttcttcctccccgagatctcgccatgcctgctctcccgcctcctgctagctagcctagcctagccagctgcgtgcgtgcgtgcgtgatcgtttcctgcatgcgatatcaccaacgcttcgctggaagaaggcgtcgtcacagacagggatcgaagaataaaagttgatcgatggtagagagcaagagctagctagggtttgggagctgaggctaggaccgaacgtacgtacgtgctgccattgttcatgacgccggcaaggcgcgtgccgccggcggcgatgatcggccggaatggcttcgcgtttgggtcctcgtcggcgctgtctttaagccaggctgacctcctagacagccatcagctgcagcaagcgttccagcagcagctcttcgatcagatcccgaccaccaccacagtggacgatagcagcgacaacctcatccatggccgctctgacacgctggtagatgagttcgagagcaagtcctgcagcgagaatcccgacggaacctctggtgacgatggcctggaggaagaccccaatcagcggccgaacaagaagaagcgataccaccgccacacccagcaccagatccaagagatggaggcgttcttcaaggagtgcccgcacccggacgacaagcagcggaaggagctgagccgggagctcggcctcgagccgctgcaggtcaagttttggttccagaacaagcgcacacagatgaagaaccagcacgagcggcacgagaacgcgcagctgcgcgcggagaacgacaagctgcgagccgagaacatgcggtacaaggaggcgctgggcacggcctcgtgccccagctgcggcggcccggctgccctcggcgagatgtccttcgacgagcaccacctccgcctcgagaacgctcgcctccgtgacgagatcgaccggatctcgggcatcgccgccaagcacgtgggaaagcccatggtgtccttccccgtgctctccagcccgctcgccgccgccgccgccgccgcccggtccccactcgacctcgccggcgcctacggcgtccagtcagctgctgcgggcctcggcgccgaccacgtgctgttcggcgccggtgccggcgatctgctgaggagcgtgtcggccgggcagctcgacgcggacaagcccatgatcgtggagctggccgtcgcggccatggacgagctcctccggatggcgcggcctgacgcgctgctgtggggtggcggcgcgtcggcaggggcgcagcagcagcagctggacgaggaggagtacgtccggacgttccccgctgggctcgggccgaggcagtacgggctccgtccggaggcgtctcgggacagcgccgtcgtgatcatgacctgcgacagcctcatcgagatactcatggacgcgaaccgattcgcggcagtgttctcgagcatcgtgtcgagggcttccacgcacgaggtgctgtcaactggtgtggcagggagctacaatggtgcattacaagtgatgtcgatggagtttcaggtgccgtcgccgctggtgccgacgcgcgagagctacttcgtgaggtactgcaagaacaacccggacgggacatgggccgtcgtcgacgtctcgctcgacagcctccgccctagcccggtcatcaaatgccggcgcaggccgtcaggttgcctcatccaagagatgcccaatggctactcaaaggtgacctgggtggagcatgttgaggtcgacgacagatcagtgcacaacctctacaggcctttggtcaattcaggcctcgcgtttggcgcgaagaggtgggttggcacactggaccggcagtgcgagcggctcgccagcgccatggccagcaacatccccaacggcgacctcggtgtgatcacaagcatagaggggaggaagagcatgctgaagctggcggagaggatggtggcgagcttctgcggcggcgtgacggcgtctgcggcgcaccagtggacgacgctgtcgggaagcggcgcggaggacgtccgtgttatgaccaggaagagcgtggacgacccgggcaggccgccgggcatcgtcctcaatgctgccacctccttctggctgcccgtcccacccaagagggtcttcgatttcctccgcgatgagacctctcgcagcgagtgggacatcctctcgaacggtggtgctgtccaagaaatggctcacattgccaacggccgggaccatggcaactgtgtctccctccttcgtgtcaatagtgcaaactcgaaccagagcaacatgctgatcctccaggagagctgcaccgacgcctcgggctcgtacgtggtgtacgcgccggtggacgtggtggcgatgaacgtggtgctcaacggcggcgacccggactacgtggccctgctgccgtcgggcttcgccatcctccccgacggaccaccgccggccggtgcggctccgtcccacggagagggcttggacactggcggcggcgggtccctcctgacggtggcgttccagatcttggtggactccgtccccaccgccaagctctccctcggctccgtagccaccgtgaacagcctcatcgcctgcaccgtcgagcgcatcaaggccgccgtctgtgcggaagccggcaacccgcagtagccatccatgcgatatagagggagaagggggacatgcagcaaggttttgtggaaatgttagtggggagtcaagaacgcacctcagactctccttgccgtgtggtgctcatactgaaaggaaaaagaaggcgtcaccactatgcaaggggggatggttcgggtattgacttcgccgtccaatcaaactactacagaaaggacgtacgggtgctgtggagaagatggatcgatgctgtttctagggtttacttcctcattgttcgtggtgctgccgtagttcaggctaaggtgcctgtgcctgctcgcagtcgtagctagagaacacagagatttgttgcctctgatctttcctttttggatttgcaaagatttgtagatcagtcatttcgtaaaccgatgcgccttggctaaaacgcgcccgttcgttgttgttcgatcgtagctgccttttgctattcataaaacgatgcaatttcaaccactgagtttcttctag

SEQ ID NO: 42877 - DNA, 1068 bp, Zea Mays
cgagaagccactcctcgtgctgccctcctgcctcctcctcctcctcctcgccccgctcgtctccgccgtccccatgccaagaagcctgcgcctggggagccaccagcagcacccgccgactctgaagctcagttcctctcaggtactgccaagtagctatttccgtcaggagacgacggcgatgaacacgggcaggccgacgacgaggatggatgtggaggtgaacgactaccaaccgttgggccccaacaaccgccacgatccacccattttggccatttccttgttcaaaggatctacgccctcgcgacatgcttggaggtttcagacttccaggtgcttactgatatttcaccacgcgcccagtagtacgaagcaactgatcccgcaaccacagtttaagagcatgtgagaatgaattgagtcacccagtagcaaccaaataagtggaatagaatggcaatgctgatatgaggggtgtaatggatgttgtagtcacaatttacttttcccagcttcagatcatatgaacaacaatcagtattgcaatcatttcggacaacttgaccagagctgaagagatggagtgtagcagaaaaccagaacatataaaagatagaaaggatcaggcacaacaaaagtggaaaagctatcattgcctgaacttcaccaatgacctttgcagcaacctgaagccatgcgtaatggttattggtaggagctaccagctatcacattcaaaatatagagatgattattaatgcccctatgcaatacttgtcatgtatccaacgattttgcttacccttaagacaggtgttgctgtcagtatacaacgacaatagctattgaggacaggaaagcaatgatcattactgctgtcattagtagtaggataaggtttcagtatggaagcatcgcagtatgctgaaaatctggtcttccctacaagttctttactagaatcattgttgttcggctgtgctaaaaggcagttgttgctgctgcgggctgcagctcccgctctctcaaaacacactgttgcaacagctgcaacgacaatttttt

SEQ ID NO: 42878 - DNA, 8071 bp, Zea Mays
cagaaaccccaccagggccagctcgacctcctctatttgggcacgtcatctcctctatccccacgcgtctcctgctctatgtttccaaagccaagcgctctttctccatgccgctcagcctcctctctgtttcagtcgtggagcatcagcaatccacatcatctccgttggccgagcggttccctcgcggcgcccaggatccttcccagacgcgctcggctccctggtctgtctgtcaccttgccgacgcctcctctgctcctccacctgtagctcgcccctatctcctcctctccccatggcggctccccctggatccctccctgcgcgaaccctctcctgcagcacgccagtgccgaccacaatctcccatggcgcaggagctccccattctcctcttgctagggcgccgtcgctgggctcgcccagtctctcgctttctctgctccagcagcaaccgtctcaaggtattccagttcgtgagcagcagcaatcgatatagctcctccgcaccgtggcgcagccagccgtcgatgccatgtccctgcaacctcgtgtcgtcgtcgtgcccgccttggtggagaagaaggttcagttcaacactccctaagtgttcgatgatatgctccggtggccatcgtcgttcttgcaaaaaaatcaagtcggatcatgatgtggtacgttaattgatcacggagtgggagaacaagagctgagttgatctcaagggatactgatgaatgaacttgaagatttgcgtgatcgaatcaagcgccaggataagagatgctccccaagcggacgtcatctaacaacactgacttagtgttatctcaggcaagccccggtgcatttgccacctccttgctgtttttaaacttttatcacttatatgatgcattaggtggtaggagttgaatgattaaacctttgttgcataacttccttgaactattggttaccatccttgatacctgttttaaaaagctagatgtgcttagtatgctcatagactaagaacaaaatgttttgatctatgaatcatgtttttacaaagaaaagaggctggagtgatgaaggtatcaaaggccttgatgactccatcatttcagtagggtacctctgacaggtaccagattttcagaaataacttaatatgagaccagacgttgagcaggaaatgtcgcccgtctgtgtcgcttaaggaccgttccgattgttggcctgctgatctaggaccctttaactggccacatgcctcgtcatgggtaagcttagcctcggtcggaccaataccagaaaggccggcccgcaatgggagtggagagatggcgagagtagcttgtaccctccgtggcaagagactggaaggtggggtgctgtactctcggaaacatggcgggcaccatggcgagggtaacgtgtaccaaccaggccaacggctggaaggtggggtgctgtactctcggaaacatggcgggcaccatggcgagggtaacgtgtaccaaccaggccaatggctggacggtggagtactgtgctctcggttggcggggacccgttctggtcttgagaaacccgtgggcgagttgacatatgcaaggttaagtgctacatatgtcgtgtggttggagatccccagctgggtattaatcgattcggatcgccgaacttctcggatatgaagactggatcttcgaccttcagcgtagataacaagtgaaactaaagctgctaaaatgaatctagtgtaggacaagtgaatgttctagaccaggcaaatctagattcaggaaaagtacttaactggtgaagtaaaagcttggcataaggatccactactagtaagcttttctgcaaaaatgagtctttgaaatttgataagctttaccttgattcccgacaaaccagcatacccttgagagtcttttctttagtcgggtaagtcttgctgagtaattgcgtactcagggttttattccctgttgtttttcaggttgtaattttgtaattttgttctgttgtggatgatgctaagtgccggtgggctcggccttcttatataagtatatcccatctttagcttctttattgaggattgccacttaagctagcatgtattttaaaacttataaatattttatacattttaaagtgtaattctttttaatcattttcttttgtaatcactccgataattgtataatgcaaacttattgtaacatgtaatcattttgcaataaagaatttatttccgctgcaaatgttggtgtgtgatttgtgtttacttaatcttgcgatcttggcgggaagtcgtttatccggggtcctcggggcactcggacagatcctgttgagttgtttggtgcacatgcatagccgtctgaggtttttgagacaaggacgggtgcatgtgggcccgataacttgggaggttctgcgacagcggcatcacgcatcactcacgtgggcgagaggctgtgtgctgtccagacaccggttagcacctgccacgcgccacgatgccaggccacagagagacacgtgcaacggaagcttgaaagaatttcaaacgaagtttaaggaactagatctgatttcaaggattaaagtttgggcaagacgtcgatggctcaacccaaacgatattggattcgttgtttcgaaagattactgaagtctgatttttgcaaaaataaattagctacaatttagacagatggagatagacacgatatcaaaatcgtgatagacgaagatgattaaaatttagtgtccattttattcaccgctatcatgtgttaaagtccgcactcgtggtcgagcagacgataaacacctcgagtgttacatgcgcgctcgcagagccgcccatgcaccggagccccacagagagcccaccccgtcgttcctgcccgaggaccgccaccgccgaccgaagccccgccccgactgagctcccacccgaggtaaaacccatggtcgtctttccttttctctctcctgtttcctcttccgtgttgcatgcccaccgatgagggccaacagcggcgttgcgccaccgtgccgcagtcctccggccagccaccgccgccccacgtccaccttcccacgtgcaccgtcgatctcggccacggcacccgcaccatgcacgggtgtagacggcaagcccaacacacgggacccactgttagcctccccgcgctgccccctccttccccctctctgagtcgctaacaggcggaccccgtctattagcgcgatccctgcgcctcactgcacccgcatctctcccatgccgctgactagcgggctcggtcatgccgagatcccctctatcagctcgcgagtgcggtggcgccccactgcccaccaagccactggctcatggggcctgcgcgccagtgccatgccccagcccttgggccccacctgtcagttgccccgtgcccccgcgcttgcgcgccctgccccgccgatcgaatctcgaccgttgatctgagatctaatggccgagggaacctgataccctttcgtgcgacactttttaaagagcccttcggtttcccgagaataaacttgtcatccctatttatttcacctaggtccttggaattttacagagaggccctaagacttttatttaatcaggaaaatatattaaaattgagttttaaatcccaaaacttgtaaatttcataactttgtcatatgaactccaaataaggtgcttcaaattgaaaaatgttcatcatgtttttgtctacctgttaaaataatgttcacctacttttttaatatcccaatttatgttgatctctagtttagagttgatgctattggaaccttaatagaaataaaataaaggtaggaacatctaataaatgttcaaatacttaagtttatagacgtaacactatctaatgagtaatcccatccacaacatagacttgattagaggttaataaaccacctggcgtagtgactaccctaaacttaggaaacaccttatttcctatacccttctattgaacttgtacttactttgttgcatatgtttggtgtatttttcttttgttattacccaagtgtgttgaatgaatgctttgcatagacaacaagtaacatgtgtttcccgagagagttgcaggagaagtccctgaacaacaacttggtgaaggcaagtgtcctccgacccattatgtcctacttactttataatttactctcttgactaccatgatcaacctaaggattgactagttttctgttatcctgtccttgaattaccttcttgggttgagctattatgattagtatcatgctagtgctttactttaaccaatgaacatgatgacaatactttatgatatgatgatggtattctagatatgatgatgaaattgtgacactaaaggggggctcgagctgtttcccgagtacttctctgtaatgacccattcattggatgaccacccaagaaaacaatacaaccatgatggtggtatgggacgcccttagctgactaattagaggaacttgtgatgtagtatactaccatgtcgtgtcgtcaacggggttcgggcacagtacttgctctaccgaggctaggtgccgaggttctttcattttgcttttgttagtcacccttcctgtggggagagtactatgtttatcaatctggagaaacctaacgggcggctatgatctctagggaatctttgtaaaagctacgtagtgaaaccttgccgactcaccttgggagtgtttaagagtatgtacaacccgagacaaaaagagatcacgactcgtggataaagtgtgcaacctcttcagagggttagaaactgatatatcagccgtgctcgcggttatgagcggccttggagctcctttggttagagatattatggttacggatgatgatgatggttctgattatgaattctggtatttcctctacgaggaggtatcttttggggtaataatttggatctttatgataaaatctggcttctaattataaatatccgatgaactaaaagcaactgccttgagcttaactccacataaagctagtccacctcagccaaatgggacatttgccgagtacgttgatgtgtactcagccttacttaaacaacaaacaccaggttatccacattgcatccgctgctcaggagaagatggaggccatgcagaggactttgaggagttctagattagattagcggtaaactctcagttagttgcctatgaaaggtcttatctttactgtgtttcgccttagcactttgattacggtttaatttaatgactatgtggatgtctctaacatcgtgatgtaataaagtaatacctctttatgttattatttcgagcactgtgcaatgatgttcagttatgtaatctctgtgtacgtgagtttctgatcctgaaatctacatggttggcattcagtttgccttctaaaaccggatgtgacaatcctataccttggtgaaggtataataaattgtaagaaattaaagtatgccaaggaatacataccaccaccaaggtagataaaatcaccacacaaatctatattgacttgacaagtagctttccctttcacaagtggaacttcattgatttgaatgactaatagttctcacttaatcaaatgtggtgaatttgagctcttatgctcatccaagatccatattaggttctattatttgttgtcaaggtattgggtgattgatgggacttatctatatgcacttgatgagctctatagtggagagaaaaataacgaatgagcactatgattcttttctccaactcacttgaatttaattccacttaaagggttggacattcgacattaaatcataagtctttgatttataaagaccaagacctcctataataacctttggaccaccaaaatattcctttgaaccatctgtactcgtttgatcttaatttctgcaatgagtgagactagacaacataaacttgcaagaagccattagtcccacaatatataggctagttgcgatggatttgattgatggaccgaagaatccaagtgaatagttttggtggctggcacctaaggataccgatagacgcgaggacgtggcaaagcagattatgtcgacacggtcgagggtaatggaacacatgtctagaacatgagacgtgtatggactgccgtgacatgtgtctagaacatgtgggagactaagcttgtgttctatcaaatttattttttcctgtgtaatgtgtatttttctcagttttcgtattttacatgtgatcatggcagatttttcatatttgagagttgatattagtttcagattcaacacaaacaacataaaaaaagccaacaacgtgtcatcattgggatgcctatatccctactactaattaagaacgcagtgtgggcgcctggcgtggccatgcccccgcctcgcctcacctcccctctgagttgtcactgccatactggccccgcctgacactcccctcgcgttgcccacaccctcgtctgttgctcccctcgtgttgcccgcccccaccccctagcctccgctcgctgcgccgcgacagacgccgcccccagcctctgctcgccgcgtcgccccatcctcggcccctcccgaaggaatggtagagccctttgcacggcgacctccctccacctccgcgcggcggcctccagatcgcagcttcgattcttcttcccaccccacggtgagacccgccccagcccctttcttctccctctctatccatcctcgacccctctctcgtaatccaaggaagggcagagctcaccaaggcgctcccctcggctggcgcagcgacggaccagatcttggcgaagagtatgcttggagcacctctatcccctccacgatggaggccgagtacttaacgaccgtgcttgacaacaacgccgatttgatgccattttggaggtgaggcgggggtgattttgaatgctccaaggatttcatgactctggtttccacgccgagaagccactcctcgtgctgccctcctgcctcctcctcctcctcctcgccccgctcgtctccgccgtccccatgccaagaagcctgcgcctggggagccaccagcagcacccgccgactctgaagctcagttcctctcaggagacgacggcgatgaacacgggcaggccgacgacgaggatggatgtggaggtgaacgactaccaaccgttgggccccaacaaccgccacgatccacccattttggccatttccttgttcaaaggatctacgccctcgcgacatgcttggaggtttcagacttccaggtgcttactgatatttcaccacgcgcccagtagtacgaagcaactgatcccgcaaccacagtttaagagcatgtgagaatgaattgagtcacccagtagcaaccaaataagtggaatagaatggcaatgctgatatgaggggtgtaatggatgttgtagtcacaatttacttttcccagcttcagatcatatgaacaacaatcagtattgcaatcatttcggacaacttgaccagagctgaagagatggagtgtagcagaaaaccagaacatataaaagatagaaaggatcaggcacaacaaaagtggaaaagctatcattgcctgaacttcaccaatgacctttgcagcaacctgaagccatgcgtaatggttattggtaggagctaccagctatcacattcaaaatatagagatgattattaatgcccctatgcaatacttgtcatgtatccaacgattttgcttacccttaagacaggtgttgctgtcagtatacaacgacaatagctattgaggacaggaaagcaatgatcattactgctgtcattagtagtaggataaggtttcagtatggaagcatcgcagtatgctgaaaatctggtcttccctacaagttctttactagaatcattgttgttcggctgtgctaaaaggcagttgttgctgctgcgggctgcagctcccgctctctcaaaacacactgttgcaacagctgcaacgacaatttttt

SEQ ID NO: 42879 - DNA, 8076 bp, Zea Mays
cagaaaccccaccagggccagctcgacctcctctatttgggcacgtcatctcctctatccccacgcgtctcctgctctatgtttccaaagccaagcgctctttctccatgccgctcagcctcctctctgtttcagtcgtggagcatcagcaatccacatcatctccgttggccgagcggttccctcgcggcgcccaggatccttcccagacgcgctcggctccctggtctgtctgtcaccttgccgacgcctcctctgctcctccacctgtagctcgcccctatctcctcctctccccatggcggctccccctggatccctccctgcgcgaaccctctcctgcagcacgccagtgccgaccacaatctcccatggcgcaggagctccccattctcctcttgctagggcgccgtcgctgggctcgcccagtctctcgctttctctgctccagcagcaaccgtctcaaggtattccagttcgtgagcagcagcaatcgatatagctcctccgcaccgtggcgcagccagccgtcgatgccatgtccctgcaacctcgtgtcgtcgtcgtgcccgccttggtggagaagaaggttcagttcaacactccctaagtgttcgatgatatgctccggtggccatcgtcgttcttgcaaaaaaatcaagtcggatcatgatgtggtgaggtacgttaattgatcacggagtgggagaacaagagctgagttgatctcaagggatactgatgaatgaacttgaagatttgcgtgatcgaatcaagcgccaggataagagatgctccccaagcggacgtcatctaacaacactgacttagtgttatctcaggcaagccccggtgcatttgccacctccttgctgtttttaaacttttatcacttatatgatgcattaggtggtaggagttgaatgattaaacctttgttgcataacttccttgaactattggttaccatccttgatacctgttttaaaaagctagatgtgcttagtatgctcatagactaagaacaaaatgttttgatctatgaatcatgtttttacaaagaaaagaggctggagtgatgaaggtatcaaaggccttgatgactccatcatttcagtagggtacctctgacaggtaccagattttcagaaataacttaatatgagaccagacgttgagcaggaaatgtcgcccgtctgtgtcgcttaaggaccgttccgattgttggcctgctgatctaggaccctttaactggccacatgcctcgtcatgggtaagcttagcctcggtcggaccaataccagaaaggccggcccgcaatgggagtggagagatggcgagagtagcttgtaccctccgtggcaagagactggaaggtggggtgctgtactctcggaaacatggcgggcaccatggcgagggtaacgtgtaccaaccaggccaacggctggaaggtggggtgctgtactctcggaaacatggcgggcaccatggcgagggtaacgtgtaccaaccaggccaatggctggacggtggagtactgtgctctcggttggcggggacccgttctggtcttgagaaacccgtgggcgagttgacatatgcaaggttaagtgctacatatgtcgtgtggttggagatccccagctgggtattaatcgattcggatcgccgaacttctcggatatgaagactggatcttcgaccttcagcgtagataacaagtgaaactaaagctgctaaaatgaatctagtgtaggacaagtgaatgttctagaccaggcaaatctagattcaggaaaagtacttaactggtgaagtaaaagcttggcataaggatccactactagtaagcttttctgcaaaaatgagtctttgaaatttgataagctttaccttgattcccgacaaaccagcatacccttgagagtcttttctttagtcgggtaagtcttgctgagtaattgcgtactcagggttttattccctgttgtttttcaggttgtaattttgtaattttgttctgttgtggatgatgctaagtgccggtgggctcggccttcttatataagtatatcccatctttagcttctttattgaggattgccacttaagctagcatgtattttaaaacttataaatattttatacattttaaagtgtaattctttttaatcattttcttttgtaatcactccgataattgtataatgcaaacttattgtaacatgtaatcattttgcaataaagaatttatttccgctgcaaatgttggtgtgtgatttgtgtttacttaatcttgcgatcttggcgggaagtcgtttatccggggtcctcggggcactcggacagatcctgttgagttgtttggtgcacatgcatagccgtctgaggtttttgagacaaggacgggtgcatgtgggcccgataacttgggaggttctgcgacagcggcatcacgcatcactcacgtgggcgagaggctgtgtgctgtccagacaccggttagcacctgccacgcgccacgatgccaggccacagagagacacgtgcaacggaagcttgaaagaatttcaaacgaagtttaaggaactagatctgatttcaaggattaaagtttgggcaagacgtcgatggctcaacccaaacgatattggattcgttgtttcgaaagattactgaagtctgatttttgcaaaaataaattagctacaatttagacagatggagatagacacgatatcaaaatcgtgatagacgaagatgattaaaatttagtgtccattttattcaccgctatcatgtgttaaagtccgcactcgtggtcgagcagacgataaacacctcgagtgttacatgcgcgctcgcagagccgcccatgcaccggagccccacagagagcccaccccgtcgttcctgcccgaggaccgccaccgccgaccgaagccccgccccgactgagctcccacccgaggtaaaacccatggtcgtctttccttttctctctcctgtttcctcttccgtgttgcatgcccaccgatgagggccaacagcggcgttgcgccaccgtgccgcagtcctccggccagccaccgccgccccacgtccaccttcccacgtgcaccgtcgatctcggccacggcacccgcaccatgcacgggtgtagacggcaagcccaacacacgggacccactgttagcctccccgcgctgccccctccttccccctctctgagtcgctaacaggcggaccccgtctattagcgcgatccctgcgcctcactgcacccgcatctctcccatgccgctgactagcgggctcggtcatgccgagatcccctctatcagctcgcgagtgcggtggcgccccactgcccaccaagccactggctcatggggcctgcgcgccagtgccatgccccagcccttgggccccacctgtcagttgccccgtgcccccgcgcttgcgcgccctgccccgccgatcgaatctcgaccgttgatctgagatctaatggccgagggaacctgataccctttcgtgcgacactttttaaagagcccttcggtttcccgagaataaacttgtcatccctatttatttcacctaggtccttggaattttacagagaggccctaagacttttatttaatcaggaaaatatattaaaattgagttttaaatcccaaaacttgtaaatttcataactttgtcatatgaactccaaataaggtgcttcaaattgaaaaatgttcatcatgtttttgtctacctgttaaaataatgttcacctacttttttaatatcccaatttatgttgatctctagtttagagttgatgctattggaaccttaatagaaataaaataaaggtaggaacatctaataaatgttcaaatacttaagtttatagacgtaacactatctaatgagtaatcccatccacaacatagacttgattagaggttaataaaccacctggcgtagtgactaccctaaacttaggaaacaccttatttcctatacccttctattgaacttgtacttactttgttgcatatgtttggtgtatttttcttttgttattacccaagtgtgttgaatgaatgctttgcatagacaacaagtaacatgtgtttcccgagagagttgcaggagaagtccctgaacaacaacttggtgaaggcaagtgtcctccgacccattatgtcctacttactttataatttactctcttgactaccatgatcaacctaaggattgactagttttctgttatcctgtccttgaattaccttcttgggttgagctattatgattagtatcatgctagtgctttactttaaccaatgaacatgatgacaatactttatgatatgatgatggtattctagatatgatgatgaaattgtgacactaaaggggggctcgagctgtttcccgagtacttctctgtaatgacccattcattggatgaccacccaagaaaacaatacaaccatgatggtggtatgggacgcccttagctgactaattagaggaacttgtgatgtagtatactaccatgtcgtgtcgtcaacggggttcgggcacagtacttgctctaccgaggctaggtgccgaggttctttcattttgcttttgttagtcacccttcctgtggggagagtactatgtttatcaatctggagaaacctaacgggcggctatgatctctagggaatctttgtaaaagctacgtagtgaaaccttgccgactcaccttgggagtgtttaagagtatgtacaacccgagacaaaaagagatcacgactcgtggataaagtgtgcaacctcttcagagggttagaaactgatatatcagccgtgctcgcggttatgagcggccttggagctcctttggttagagatattatggttacggatgatgatgatggttctgattatgaattctggtatttcctctacgaggaggtatcttttggggtaataatttggatctttatgataaaatctggcttctaattataaatatccgatgaactaaaagcaactgccttgagcttaactccacataaagctagtccacctcagccaaatgggacatttgccgagtacgttgatgtgtactcagccttacttaaacaacaaacaccaggttatccacattgcatccgctgctcaggagaagatggaggccatgcagaggactttgaggagttctagattagattagcggtaaactctcagttagttgcctatgaaaggtcttatctttactgtgtttcgccttagcactttgattacggtttaatttaatgactatgtggatgtctctaacatcgtgatgtaataaagtaatacctctttatgttattatttcgagcactgtgcaatgatgttcagttatgtaatctctgtgtacgtgagtttctgatcctgaaatctacatggttggcattcagtttgccttctaaaaccggatgtgacaatcctataccttggtgaaggtataataaattgtaagaaattaaagtatgccaaggaatacataccaccaccaaggtagataaaatcaccacacaaatctatattgacttgacaagtagctttccctttcacaagtggaacttcattgatttgaatgactaatagttctcacttaatcaaatgtggtgaatttgagctcttatgctcatccaagatccatattaggttctattatttgttgtcaaggtattgggtgattgatgggacttatctatatgcacttgatgagctctatagtggagagaaaaataacgaatgagcactatgattcttttctccaactcacttgaatttaattccacttaaagggttggacattcgacattaaatcataagtctttgatttataaagaccaagacctcctataataacctttggaccaccaaaatattcctttgaaccatctgtactcgtttgatcttaatttctgcaatgagtgagactagacaacataaacttgcaagaagccattagtcccacaatatataggctagttgcgatggatttgattgatggaccgaagaatccaagtgaatagttttggtggctggcacctaaggataccgatagacgcgaggacgtggcaaagcagattatgtcgacacggtcgagggtaatggaacacatgtctagaacatgagacgtgtatggactgccgtgacatgtgtctagaacatgtgggagactaagcttgtgttctatcaaatttattttttcctgtgtaatgtgtatttttctcagttttcgtattttacatgtgatcatggcagatttttcatatttgagagttgatattagtttcagattcaacacaaacaacataaaaaaagccaacaacgtgtcatcattgggatgcctatatccctactactaattaagaacgcagtgtgggcgcctggcgtggccatgcccccgcctcgcctcacctcccctctgagttgtcactgccatactggccccgcctgacactcccctcgcgttgcccacaccctcgtctgttgctcccctcgtgttgcccgcccccaccccctagcctccgctcgctgcgccgcgacagacgccgcccccagcctctgctcgccgcgtcgccccatcctcggcccctcccgaaggaatggtagagccctttgcacggcgacctccctccacctccgcgcggcggcctccagatcgcagcttcgattcttcttcccaccccacggtgagacccgccccagcccctttcttctccctctctatccatcctcgacccctctctcgtaatccaaggaagggcagagctcaccaaggcgctcccctcggctggcgcagcgacggaccagatcttggcgaagagtatgcttggagcacctctatcccctccacgatggaggccgagtacttaacgaccgtgcttgacaacaacgccgatttgatgccattttggaggtgaggcgggggtgattttgaatgctccaaggatttcatgactctggtttccacgccgagaagccactcctcgtgctgccctcctgcctcctcctcctcctcctcgccccgctcgtctccgccgtccccatgccaagaagcctgcgcctggggagccaccagcagcacccgccgactctgaagctcagttcctctcaggagacgacggcgatgaacacgggcaggccgacgacgaggatggatgtggaggtgaacgactaccaaccgttgggccccaacaaccgccacgatccacccattttggccatttccttgttcaaaggatctacgccctcgcgacatgcttggaggtttcagacttccaggtgcttactgatatttcaccacgcgcccagtagtacgaagcaactgatcccgcaaccacagtttaagagcatgtgagaatgaattgagtcacccagtagcaaccaaataagtggaatagaatggcaatgctgatatgaggggtgtaatggatgttgtagtcacaatttacttttcccagcttcagatcatatgaacaacaatcagtattgcaatcatttcggacaacttgaccagagctgaagagatggagtgtagcagaaaaccagaacatataaaagatagaaaggatcaggcacaacaaaagtggaaaagctatcattgcctgaacttcaccaatgacctttgcagcaacctgaagccatgcgtaatggttattggtaggagctaccagctatcacattcaaaatatagagatgattattaatgcccctatgcaatacttgtcatgtatccaacgattttgcttacccttaagacaggtgttgctgtcagtatacaacgacaatagctattgaggacaggaaagcaatgatcattactgctgtcattagtagtaggataaggtttcagtatggaagcatcgcagtatgctgaaaatctggtcttccctacaagttctttactagaatcattgttgttcggctgtgctaaaaggcagttgttgctgctgcgggctgcagctcccgctctctcaaaacacactgttgcaacagctgcaacgacaatttttt

SEQ ID NO: 42880 - DNA, 1091 bp, Zea Mays
ctcgacctcctctatttgggcacgtcatctcctctatccccacgcgtctcctgctctatgtttccaaagccaagcgctctttctccatgccgctcagcctcctctctgtttcagtcgtggagcatcagcaatccacatcatctccgttggccgagcggttccctcgcggcgcccaggatccttcccagacgcgctcggctccctggtctgtctgtcaccttgccgacgcctcctctgctcctccacctgtagctcgcccctatctcctcctctccccatggcggctccccctggatccctccctgcgcgaaccctctcctgcagcacgccagtgccgaccacaatctcccatggcgcaggagctccccattctcctcttgctagggcgccgtcgctgggctcgcccagtctctcgctttctctgctccagcagcaaccgtctcaaggtattccagttcgtgagcagcagcaatcgatatagctcctccgcaccgtggcgcagccagccgtcgatgccatgtccctgcaacctcgtgtcgtcgtcgtgcccgccttggtggagaagaaggttcagttcaacactccctaagtgttcgatgatatgctccggtggccatcgtcgttcttgcaaaaaaatcaagtcggatcatgatgtggtgaggtacgttaattgatcacggagtgggagaacaagagctgagttgatctcaagggatactgatgaatgaacttgaagatttgcgtgatcgaatcaagcgccaggataagagatgctccccaagcggacgtcatctaacaacactgacttagtgttatctcaggttgtaattttgtaattttgttctgttgtggatgatgctaagtgccggtgggctcggccttcttatataagtatatcccatctttagcttctttattgaggattgccacttaagctagcatgtattttaaaacttataaatattttatacattttaaagtgtaattctttttaatcattttcttttgtaatcactccgataattgtataatgcaaacttattgtaacatgtaatcattttgcaataaagaatttatttccgctgcaaatg

SEQ ID NO: 42881 - DNA, 1087 bp, Zea Mays
gctcgacctcctctatttgggcacgtcatctcctctatccccacgcgtctcctgctctatgtttccaaagccaagcgctctttctccatgccgctcagcctcctctctgtttcagtcgtggagcatcagcaatccacatcatctccgttggccgagcggttccctcgcggcgcccaggatccttcccagacgcgctcggctccctggtctgtctgtcaccttgccgacgcctcctctgctcctccacctgtagctcgcccctatctcctcctctccccatggcggctccccctggatccctccctgcgcgaaccctctcctgcagcacgccagtgccgaccacaatctcccatggcgcaggagctccccattctcctcttgctagggcgccgtcgctgggctcgcccagtctctcgctttctctgctccagcagcaaccgtctcaaggtattccagttcgtgagcagcagcaatcgatatagctcctccgcaccgtggcgcagccagccgtcgatgccatgtccctgcaacctcgtgtcgtcgtcgtgcccgccttggtggagaagaaggttcagttcaacactccctaagtgttcgatgatatgctccggtggccatcgtcgttcttgcaaaaaaatcaagtcggatcatgatgtggtacgttaattgatcacggagtgggagaacaagagctgagttgatctcaagggatactgatgaatgaacttgaagatttgcgtgatcgaatcaagcgccaggataagagatgctccccaagcggacgtcatctaacaacactgacttagtgttatctcaggttgtaattttgtaattttgttctgttgtggatgatgctaagtgccggtgggctcggccttcttatataagtatatcccatctttagcttctttattgaggattgccacttaagctagcatgtattttaaaacttataaatattttatacattttaaagtgtaattctttttaatcattttcttttgtaatcactccgataattgtataatgcaaacttattgtaacatgtaatcattttgcaataaagaatttatttccgctgcaaatg

SEQ ID NO: 42882 - DNA, 2160 bp, Zea Mays
caccgtccagcctcttgccacggagggtacacgctactctcgccatctctcaactctcattgcgttgtggcctttctggtattggtctgaccgaggcaaagcttacccatgacgaggcatatgaccagttaaaaggtcctcggtcagcagacctacattccctacaaggaaggggttgcatgcaccggggcttgcctggaataacactaggtcagtgtttgttagttgacgtccaattggcgatcaactattgtcttggcactcgttcaaattatccatttttagtttcatcataggcatcatcttgtggacatcgactccgacattatcgatcaaaaacatagattatactaatcaatatctgactccaacattatcgatcacaaacatagattatactaactactagcgcaggacatcgacttcatcttacgcgcactgaacacaattaacatcgacagacttatcgataattgcttaaaatactaaacttaacctacgcgtcaccgaaataccacactctgcaaaatagaactagtttgaacatactcgacaaccaaactcatcgaagcacacctcgcatcactggtatttctaacttaaacttcatacacacacggagcgtcttatttcatgatcataaaaccaatagtaaagatagcgaatcagctcaccacatctcaattcgatttgatatttgcctgaacgacgacaaccttttattgaagtctttgatcgaacacttggcgagtgatgcgctacaaccttcttctccaaccaatttctaggaccttttttctcctccaatcacgtacaaacacacaaataattagtatctaatcaatcgacgctaggcgagaacaagaaccgagagtctcaccggcgataagcgcaaacgcgacctacacacagggacgagaggcaggccgatgaggttgaggtggtggcaacgaccaggttgacgacgagccgcgcgcaatggaaagaccgctcatcgggattgacaagcatgtcgggacacaacgcgggtcaacggcgcacaacatacataggaaggcactggcctgagggcgcgctgtagtgagcttgcaagggcgaaagctgtagtgagcttgcaagggcgaacagctcacgatcaagcgacggcgagcacgagaccgaggcgtgctgcacgtcagcaattgacgagaactgaagaccggcaatgaggattcgaggagcgagcgccgcagccacaggcgtgggaaatcgacggcgagcaggacgcggatcagggagcctgcttgatagtcgagcaggggaggacggggttcgacgactcgacggcaaatgcgaacacgccgaagcccgatggacgaggagcgagcgcgccgcagtgacgacgagcaggcgctgccgagtctgcgcagagcttctaaaccacgtgtgttgcggtggtggtccggtggtcggaggagcgcgcgtccaaagatgaagacgatggcccaaggacgagctccatggcagggggaggtcgaacgcaggggcgcggtccgagctggggccgagcgccatgggagatgggacgagctacggcaggaagggcgcgtggaggggctcggctgggcgaaatccgagcagggaagcaggggcagcgacggccagcgccatggctgagggcaggggctgtcggcgttggggatgaaggccggggcgagcaccagagaacaacagcggcgactgggagcggtggacgtgacctgcagaggagcgccaagtcgcagagatgagggagagaagagcagggtcagcactagtggaacccagggtgagtttgccgatttccatggccaaagggtgagatccgagcatgagggagatgagggagagagaggaggggcggctgggcgccataagcgcgcagaggtgagggcggccgggcgagcagggacggctgagcgccatgagggaagtaggcgcgcgccatgggagacagaggaggagcgctgtgagagcttcacggcgaggtcgcggccaggtagggagctcggctgctcgactgcctgcaggggagggcgcgacggccatggaggcgagcgcggaagaggaaggagcacgcgtgcgggagctgaaggagagagagacatggctgataaaaatcagagagagtggagtgccgat

SEQ ID NO: 42883 - DNA, 641 bp, Zea Mays
gagaaacacaaatgaaagaacagccgatgccaccatctggcagcaaagctaatatttaacaacatttgctccttggagttcttgataaatcgaccaagaagcttgtagtaggtcactggctaaggtgacatcattcatgatacctgataatttttactaacaggaacaggactataacagtaaggggttgtttgtactaaggcattgtttggtgattactaacaaggatagggccacaacagtaaggggttttgtttggatgaaggcattgcttagtgatttgtcaaggatttggattatatttcccctttactcaaaaagggcctatgcatttagggattagtattggccatgacctgaggacctcttgttagaacttctgtctaaggtaccataacggttttgtgattggtgtgagttaggtcttgtggggggtgtcccgcctccataaggtcgctgctgccattgttgacccccatatggtacaggctggtatcccccagaataaccaccagcatatgctggggggtatggcccatacagtccaggacctgctgatggagcagcagactgtgggttgccacggttttgatggtatccaggtggctgaactcttccactagaatcatggtggttatctc

SEQ ID NO: 42884 - DNA, 1116 bp, Zea Mays
agatatagagagagagagccaaatctcgctccacgcccttctccttccggtcttcctcttcttcgatcggtgagcatagcacacacgtacgggaaggcccgcagcatcagcactgcgcgagctctctgctcagctcaggaggctctacgcgtccgcgctcgctccatcggccggtaccgctccttcacctactgcataccaagcaccagtctgtctatgtctatctacggttccacgccgccgccgccgatgagcacgccggggagcagggccagggccatcggcctcaccatcacgctgctttccgtcagcggcggcatccacttcagcagcacctgcggcttcggcttgctcctcagcttcacggggatcctcgccggcgccaaccttgtcgcctttggcgtcagcaaggccgacgacaacccggcgcccaccttccctacggcgttcgacagtgcacgtgctctcgcggcgttcatgcgccgcagcaccgccaccgcggggctcgtcatggcttcctgtgccgtcacggctgtctccagcggcgaggctgacccggtgctcttcttcgccatgttcgctctgctcctgctgggggtctcactggtcatcgccggagctcgtgataacaattcttcagatggaaatgccttcttgaaatgcagaagaacttcaagcctaaagtatattatgtgccaccattttgcatcttcgtgtgggcacttcaatcccatatgtgcaacagcttctagaagttgctgtcgagtcagagatgaggacatatgtgcccgaataaatgtctctagtatgttaccaacatgacaaagcacttgttgccctttcgagacaatgttgttaagtacatcattcacacaatcgatattgtatagctcacctcttataggaaggcatttcctttggatgagcaagtccatcagctttgaggttccctcgtcgtttctaatttcactgccagatgtcaagctgaaatgcttctgatcaagattccaatcccttaaagcttcctgtatgacattaaatggtccaatatcagaatctagccctcaggcctccttaaactgtatcatcctttccaaactagtaggcaaggacgaa

SEQ ID NO: 42885 - DNA, 1383 bp, Zea Mays
aagaaattagaaaagtgaaaaaatacgataaatagtagtataatcaattggaagatgtttattgtcccgtttttacaaaataaatgttttggatggtattattgcgaaacgtcatatttgaagtcccaaaaatgcaattgtctcattgacaggaatgatcaatacaaagtgcaaagcttatgaacacatatatagatcaatgaagaagcaaacctgagcagaatcagatattagtagcaaaacaggatcactgcttggtacagtctcccatatatcacccaaagttcaactctctttggtgaatcctgctgcttgggcttcatcaaaagatttagaaccttaccgaagaccagtctgaaataaaaacaacagaattagagatgcaaaggctgcttattgctttagtaacatcgagtgaacaagaaatgaaggaaaatatgatggccctttgaagtcatgatttagaactgtcctcctgcctctaactcagacgaaacgtcctcctagcccaagtagaaggcatcacggcggcgaccaaacaccacggcggagcgcccgccggagcacccacagctcgccctccggtgccccataacccaatcaccacggcgagggctagcccgacggcctgcacgtctctggccagcatggggcgtaggggcgaccgtctggcgacgggcagttcttgagagatcgagtgatccttttctctcctcgtccatggcagcgcatagcagattagcaggtgacgaagagatgtaagggtaaatgtgagtataaaatacgtggaaagaaattagaaaagtgaaaaaatacgataaatagtagtataatcaattggaagatgtttattgtcccgtttttacaaaataaatgttttggatggtattattgcgaaacgtcatatttgaagtcacaaaaatgcaattgtctcttatatctcctatatatctcctcgcatgtatatgttgtctcttatatattgtcaaaacaccatgagaattctgataatgccaggggtaacatagccaccatttatataagtaataaacaaagaaagaaaagaggattaaaaatatcaaattgtcattgacaggaaagaaataaatgttttggatggtattattgcgaaacgtcatatttgaagtcccaaaaatgcaattgtctcattgacaggaatgatcaatacaaagtgcaaagcttatgaacacatatatagatcaatgaaaaagcaaacctgagcagaatcagatattagtagcaaaacatgatcactgcttggtacagtctcccatatatcacccaaagttcaactctctttggtgaatcctgctgcttgggcttcatcaaaagatttagaaccttaccgaagaccagtctgaa

SEQ ID NO: 42886 - DNA, 2924 bp, Zea Mays
gattgttggtctcaactgggaatgcagctcaacagttctatgtcaaatcttacacttcacatggtctcaaataacacatagttcacacaacatatttcaaatcttacacttcacatggtctcaaataacacatagttcacacaacatatttcaaatcttacatatcaggtactcatgccttcctttttttttggtgtgaacttctttttaagcattctaggaccagtgccatggcatgatggagtagttggaagatttggcgctacactggatggtcctagtaataaaagaggtcttccaccttctatacttggcgctgcaccttgtgtttctaaaacagcggatggtccaccttctccactaggagctgcaccttgtgtttctaaaacagcggatggtccaccttctccacttggcacacttgaagattggatgccactaactgacacaagtacaaggctactacaaaataaaattttaattagtcattatactccgacattaaaagcaaaagagttataagtgaaatgtacctatcatatgtagacttcggagacggaatgtcaccacctatatctagtgttagcacaaattattacacataatggtcaaacatattttgaatatatggcgctgccgcggcggcgatagaacttgggagctgcccggattgagcaccgcgacgccgtgacagaggggtggggtgggcaaaagttacctgcaaaggggaggagtggcagacgtcttcgcagttctattccaatggcttgcacgaccctctggatgaacccactcactgccggctgccgcacattcgcctgggtacgtaaacgttacagagggtaggggatatgtcagcggacaggggaagagggaagggggaagatcacctgcagaggaggaggagtggggttagtcgtcgccgtcgccggccaggccgtgaagatcggtggcggcggacactgagagcgcgaggagagcggcgttccagagccagagagcagcagagagcggacactgagagctcgatatgcttcggttaatggagggagaagacggcgttgtgaacggccgtaagggcaaaatcggcagggagcaacacgggcccacctaccaggtacgccagaagctgtcgtgacctctcctggcgagtgacagcgcttgagcgacccatttttacgacctgagctagcgcaggcgtattttgcagagcggcagtttagaacgacctattttgataaattcctcccgtccatcaggtgctgctgcgatgcaatgaacagcgtgatgcaatggggtgggtcgaaatgagttctatgggctgggtggaaatgggtttcgatagctagcgggccggggcgggttgggttcactgcgatgcgggttggggcgggtcggagtgggtagggccgtagggcacgtcgggtcgatctgccgtccgctcccggctcccgcagaaatagagcggcaacgccgccggcccgcggcccgccgccgccgttcccgcgtgaccttctccagcgaggcggcgacgtccgttgatccaggttctgcgacttcccttgactggtgtggtgggctggtggcgcgcttgcgttcctctcttcacaggcccctcggtgcgcagtggtggatttgtccttctgatttgcagctctgacgacagtgggaccactgaccgagaaggcagcaattcgttgggagcaggtgagttcatcatgttctatcacttttcctcctttaatttcttcccatcctgtgaactgtgtgctcctgctccgttaatggtgtcactgattgctacaaaacctagatggcatgccttgttatgtttttaaaacaaaatttacttgtatccacatattgtttttccccccaaacggcaggtacagacaaggttttcaagtcgttaagtcgagtcgacaaggtaccgacttggtgactagtcgataagtcagtcgactagtcgtcgacgtgccaatatagtggttgttttgcctatataatggcttcatatagacaatataacacttatatatgaagaaagagcatgttttacctcatttgaagcatgaaattgaactaaactgaaataaacagcaagtcttacctcatttgaagcctcaaactgaaccaaatcagcgataagtcaaactcataagtcataacagccatatagttcaaattggaaaacaaattgcaagaaaatatagttcaaacttgaaaggaaataagctccattagatagctaagctgctgctgcagctagatagatactagataatagataccctaaatatctcctaaatcaagatcatccattgcattttctcccaaatcaagaaaatatgttgtgtaatgggcctgtgggctttttgggctgaattggggcacaagtcggccgacttgccagaccaagtcgacgactagtcgactatccagtcgttgacaagtcgcccgacttgccagaaaagttgagccgggtccccaagtcgagctcccaggaccgactacagatatgcatatctgtattggtgctacataacagttgaatgggccttttcgaaaataaatattatcaatactgaattgcataacaagatgcctaatgtttgtcttaatgacttaatgatgtgctacattgactgagatatcatttctatatggggctgtttggatccccataattgaatattccatgaatgattctagcaattagatcccaccagaaataggttacctagaatttgattcaattgaactttttgtttgggtgtacatggaaactttttcttagaattaaattccaattcttgtttggctgtttcttagaattttgttagttggcggcggctaacaaaagcgccaggcaatgggaactgagcctatcatctcggtacaaccacagttccccactactgatt

SEQ ID NO: 42887 - DNA, 3076 bp, Zea Mays
gattgttggtctcaactgggaatgcagctcaacagttctatgtcaaatcttacacttcacatggtctcaaataacacatagttcacacaacatatttcaaatcttacacttcacatggtctcaaataacacatagttcacacaacatatttcaaatcttacatatcaggtactcatgccttcctttttttttggtgtgaacttctttttaagcattctaggaccagtgccatggcatgatggagtagttggaagatttggcgctacactggatggtcctagtaataaaagaggtcttccaccttctatacttggcgctgcaccttgtgtttctaaaacagcggatggtccaccttctccactaggagctgcaccttgtgtttctaaaacagcggatggtccaccttctccacttggcacacttgaagattggatgccactaactgacacaagtacaaggctactacaaaataaaattttaattagtcattatactccgacattaaaagcaaaagagttataagtgaaatgtacctatcatatgtagacttcggagacggaatgtcaccacctatatctagtgttagcacaaattattacacataatggtcaaacatattttgaatatatggcgctgccgcggcggcgatagaacttgggagctgcccggattgagcaccgcgacgccgtgacagaggggtggggtgggcaaaagttacctgcaaaggggaggagtggcagacgtcttcgcagttctattccaatggcttgcacgaccctctggatgaacccactcactgccggctgccgcacattcgcctgggtacgtaaacgttacagagggtaggggatatgtcagcggacaggggaagagggaagggggaagatcacctgcagaggaggaggagtggggttagtcgtcgccgtcgccggccaggccgtgaagatcggtggcggcggacactgagagcgcgaggagagcggcgttccagagccagagagcagcagagagcggacactgagagctcgatatgcttcggttaatggagggagaagacggcgttgtgaacggccgtaagggcaaaatcggcagggagcaacacgggcccacctaccaggtacgccagaagctgtcgtgacctctcctggcgagtgacagcgcttgagcgacccatttttacgacctgagctagcgcaggcgtattttgcagagcggcagtttagaacgacctattttgataaattcctcccgtccatcaggtgctgctgcgatgcaatgaacagcgtgatgcaatggggtgggtcgaaatgagttctatgggctgggtggaaatgggtttcgatagctagcgggccggggcgggttgggttcactgcgatgcgggttggggcgggtcggagtgggtagggccgtagggcacgtcgggtcgatctgccgtccgctcccggctcccgcagaaatagagcggcaacgccgccggcccgcggcccgccgccgccgttcccgcgtgaccttctccagcgaggcggcgacgtccgttgatccaggtgcgcctcctcttgctctcctcccctatctattctccgcatcatcccctgccctgctgaagtagcgcccagctcgtatttcaccgccgccgccgccgccaccctggccgccgggagtcgctaccaccggaacccgtgctggattcgcgctggttctgcgacttcccttgactggtgtggtgggctggtggcgcgcttgcgttcctctcttcacaggcccctcggtgcgcagtggtggatttgtccttctgatttgcagctctgacgacagtgggaccactgaccgagaaggcagcaattcgttgggagcaggtgagttcatcatgttctatcacttttcctcctttaatttcttcccatcctgtgaactgtgtgctcctgctccgttaatggtgtcactgattgctacaaaacctagatggcatgccttgttatgtttttaaaacaaaatttacttgtatccacatattgtttttccccccaaacggcaggtacagacaaggttttcaagtcgttaagtcgagtcgacaaggtaccgacttggtgactagtcgataagtcagtcgactagtcgtcgacgtgccaatatagtggttgttttgcctatataatggcttcatatagacaatataacacttatatatgaagaaagagcatgttttacctcatttgaagcatgaaattgaactaaactgaaataaacagcaagtcttacctcatttgaagcctcaaactgaaccaaatcagcgataagtcaaactcataagtcataacagccatatagttcaaattggaaaacaaattgcaagaaaatatagttcaaacttgaaaggaaataagctccattagatagctaagctgctgctgcagctagatagatactagataatagataccctaaatatctcctaaatcaagatcatccattgcattttctcccaaatcaagaaaatatgttgtgtaatgggcctgtgggctttttgggctgaattggggcacaagtcggccgacttgccagaccaagtcgacgactagtcgactatccagtcgttgacaagtcgcccgacttgccagaaaagttgagccgggtccccaagtcgagctcccaggaccgactacagatatgcatatctgtattggtgctacataacagttgaatgggccttttcgaaaataaatattatcaatactgaattgcataacaagatgcctaatgtttgtcttaatgacttaatgatgtgctacattgactgagatatcatttctatatggggctgtttggatccccataattgaatattccatgaatgattctagcaattagatcccaccagaaataggttacctagaatttgattcaattgaactttttgtttgggtgtacatggaaactttttcttagaattaaattccaattcttgtttggctgtttcttagaattttgttagttggcggcggctaacaaaagcgccaggcaatgggaactgagcctatcatctcggtacaaccacagttccccactactgatt

SEQ ID NO: 42888 - DNA, 2591 bp, Zea Mays
accacgaagagacaggatcccatcacaggctcacatagtcacaaggaagtccagtcggccatggggagaccgagagctaccaccaccgcagcctcttccaagccgaagccgaagccgaagcccaagcccaagcccaggtccagggccaagcctagggcgacgcccagccccgtctccctgctctccggcatctcctctccttacgcgtgccgcacgccgtcccctgctgccgccgacctcagcttcctctcgccctcctccccgcccgcggaacccggaaccaggaattcttcgcccctcgccgcccccactaccatgtccaccatcggagacctgaggagcctcgccgcgtcgcacctcgactccctgaagcgccgcttggacgcgctccacggcgactatgtccgcgaccttgaggcctcccactcccgcatctccaagcgcgtcaagatggagtcccatggctgcctgcagctagcagaggaagtggacaaggaacagcagaagatagccgacaagatcgccgagcgcgccgagctggtgaagacctcttacaagaagttcgtggctgaagtgcaggcgtccacatcccgtgtgtgcaaggtgactgtccctgagatgacgaagtccatggagagggctattgatggcttgcgcagtcgctacatctccgctataccatcagcttagctggtgctgttgtccacatcaattgaggtcacatgttgagtcttaaatcggcttcgcagcagggacttgcacatttgtacataatatcaccgttgcatgagtacatgagatagttcattgctacatctccatttccagatatcccgaaaagtcaataatagttccttcgatccttggaacttttttttttgcttcgtcgcatttcttgtgcatcccgtaagatgctactgtcgatgtacctttcacgctcagagcatctaatttttaatcatgtttgttctagcagtacgttagctatcgcctcaagcctgaatggtcagttgctgcatgacaattaacaaccaaaacccaggtcttgttttgttctaagcggtaatttctgttcagtttgtagctgccagttgatttgcactttatacttgcgcccgaaaacagtttatgacttcggattaaacccatgattaaaactagctgtttgaattgctgcaaactatgacacgttatgacaacacaacctgtgtttgctgcttgttggtttttcatcatccaattccaatccacgatacactggataaaaccggttcagatttcttttgattaaaacccttgtttcgcactcactctatgctaacaataacgggttctcgattgatatgtcatcttttagctactcagatgttttagtttgctaagtttgaatagtcttttgctgtcatgctcatgcttggttccgtccgtccgtcgaggaatttgtcaaaataggtcgttctaaactgccgctctgcaaaatacgcccgcgctagctcaggtcgtaaaaatgggtcgctcaagcgctgtcactcgccaggagaggtcacggcagcttctggcgtacctggcaggtgggccccagtacgcttgtacctattatgcccttacggtttaactccatgccgtctgttcttcttctctggacgccgagcactccttctcctcctctgtcggcggtcgtgggagacgtacacggcgattaggaggcacgtcgtccaccagtctcctcgcaggtaaccttcccccttccctcagtgagtaacctttcccctaccctaatcgacgcttaggcatggttgtgcaccctgtattttttggttttagggttagggtttagaggtatagtgtttagctgcagtggtgattcactgagagctcgatatgcaccctgtattttttggttttagggttagggtttagaggtttagtgtttagctgctgttgtgattttttatctgctcctcgccgtgtactaatggatgcagggatgtcgaagagcacggaaatcgcagataaagcaatcatcttgatgcaggatcatgccaagcatatctatcgtatttgcaatgagaagctaatattgggtaaaggattgactgcatttgaggtcaaagaacttcgtgaagcacttgaattcgccgccgaaggattggaccaggactcccttttttgccaagaggaattggatgcaactgttaaggaggaacaattggagcatgacgagaaggtggcttcacagatgattgaaagcccacttcttctcctgattcggactgcttcctatcccttgaagagcacattgagaagttttggggcgttgattacaactcggaccagatgcctagctactccgactaggctcagagtttatggtgctgtgaaattctggatgtttgggtgtaatggtattttggatgtgtatgtgaactgtaattctggatgtgtggatgtaatggtgaactgactgaatggtgtcttgtgtaatggtattttggatgtctatgtgaactctagttctgggtttaatggtgaactgaaattcagtgttcattgttcagtataatttgttaactccactaattgtgttcggc

SEQ ID NO: 42889 - DNA, 3684 bp, Zea Mays
accacgaagagacaggatcccatcacaggctcacatagtcacaaggaagtccagtcggccatggggagaccgagagctaccaccaccgcagcctcttccaagccgaagccgaagccgaagcccaagcccaagcccaggtccagggccaagcctagggcgacgcccagccccgtctccctgctctccggcatctcctctccttacgcgtgccgcacgccgtcccctgctgccgccgacctcagcttcctctcgccctcctccccgcccgcggaacccggaaccaggaattcttcgcccctcgccgcccccactaccatgtccaccatcggagacctgaggagcctcgccgcgtcgcacctcgactccctgaagcgccgcttggacgcgctccacggcgactatgtccgcgaccttgaggcctcccactcccgcatctccaagcgcgtcaagatggagtcccatggctgcctgcagctagcagaggaagtggacaaggaacagcagaagatagccgacaagatcgccgagcgcgccgagctggtgaagacctcttacaagaagttcgtggctgaagtgcaggcgtccacatcccgtggtacttttgcacacggaaaaaaatacttctctgtatttctgtccggttccacttccatgtgctcgtttctctcttcaacatgctgtgttataactctgttggtggcggccagtgtgcaaggtgactgtccctgagatgacgaagtccatggagagggctattgatggcttgcgcagtcgctacatctccgctataccatcagcttagctggtgagtcgggctgtgttcatacgaactgaatatgggtaaaatgacttatccacattgcacatgttgttcgctgccgaatatctgttatttctagcgactgttaagtgttgaaagaagtagatatatagtacgcacatgtgatggatgatgggtactgctctagtactctagagctaggtcgtcctgccgactgccgtatagcttagtgttttgatatcctgattcctggtttacaataccatgcgacatgcgctctgagtttgtatgttgcgagaagaaacttgaatactgtatttgctgagttgtctagaattgcattttgagaacactacaatgaattttgattttggaataacaatcagctagtttgtcaaataagagttactgatttcatagtaggaatttggtcaaactagagagggacttacccgtgtcgagagaatatcctagacttcggcttttttaggcatgccaatttttattcaaaatctgaactcctacggtaaatttcaaaattcaggaccatgtcatttactggatgtagcaattgcattttcagaaatttcagcatggtgacattgtaggcaaatatgaaggatctgttccataaaaaaagcataaagcaaggtccgtacaccttaaattgcttggaagtaccattattatttttcttggaggtgtcatcacgctaatgatgctgggatttttattttgaggatgttctgtcgggcaagtcaatttttctagcaaatgggtccgcgagatgtttctagtttctcaaaaatatcctcctccttattcgtccttcctgccaattttcatcagaacagaataattaaatgttgtaacggcatgcattgttacagttccttggaacactgatagaggcagcttctcgtttcatgtttttttgtttttgtttttttacacacagtattcaatccctacctggctgattcttgtttgtttaatcttgatcaggtgctgttgtccacatcaattgaggtcacatgttgagtcttaaatcggcttcgcagcagggacttgcacatttgtacataatatcaccgttgcatgagtacatgagatagttcattgctacatctccatttccagatatcccgaaaagtcaataatagttccttcgatccttggaacttttttttttgcttcgtcgcatttcttgtgcatcccgtaagatgctactgtcgatgtacctttcacgctcagagcatctaatttttaatcatgtttgttctagcagtacgttagctatcgcctcaagcctgaatggtcagttgctgcatgacaattaacaaccaaaacccaggtcttgttttgttctaagcggtaatttctgttcagtttgtagctgccagttgatttgcactttatacttgcgcccgaaaacagtttatgacttcggattaaacccatgattaaaactagctgtttgaattgctgcaaactatgacacgttatgacaacacaacctgtgtttgctgcttgttggtttttcatcatccaattccaatccacgatacactggataaaaccggttcagatttcttttgattaaaacccttgtttcgcactcactctatgctaacaataacgggttctcgattgatatgtcatcttttagctactcagatgttttagtttgctaagtttgaatagtcttttgctgtcatgctcatgcttggttccgtccgtccgtcgaggaatttgtcaaaataggtcgttctaaactgccgctctgcaaaatacgcccgcgctagctcaggtcgtaaaaatgggtcgctcaagcgctgtcactcgccaggagaggtcacggcagcttctggcgtacctggcaggtgggccccagtacgcttgtacctattatgcccttacggtttaactccatgccgtctgttcttcttctctggacgccgagcactccttctcctcctctgtcggcggtcgtgggagacgtacacggcgattaggaggcacgtcgtccaccagtctcctcgcaggtaaccttcccccttccctcagtgagtaacctttcccctaccctaatcgacgcttaggcatggttgtgcaccctgtattttttggttttagggttagggtttagaggtatagtgtttagctgcagtggtgattcactgagagctcgatatgcaccctgtattttttggttttagggttagggtttagaggtttagtgtttagctgctgttgtgattttttatctgctcctcgccgtgtactaatggatgcagggatgtcgaagagcacggaaatcgcagataaagcaatcatcttgatgcaggatcatgccaagcatatctatcgtatttgcaatgagaagctaatattgggtaaaggattgactgcatttgaggtcaaagaacttcgtgaagcacttgaattcgccgccgaaggattggaccaggactcccttttttgccaagaggaattggatgcaactgttaaggaggaacaattggagcatgacgagaaggtggcttcacagatgattgaaagcccacttcttctcctgattcggactgcttcctatcccttgaagagcacattgagaagttttggggcgttgattacaactcggaccagatgcctagctactccgactaggctcagagtttatggtgctgtgaaattctggatgtttgggtgtaatggtattttggatgtgtatgtgaactgtaattctggatgtgtggatgtaatggtgaactgactgaatggtgtcttgtgtaatggtattttggatgtctatgtgaactctagttctgggtttaatggtgaactgaaattcagtgttcattgttcagtataatttgttaactccactaattgtgttcggc

SEQ ID NO: 42890 - DNA, 2754 bp, Zea Mays
ctgtaggatttatattttaagtacccagaatattagtcgcgaaaaaagtgaagatgatctgcctgagggtgtgctagcagtacctctgcttagacatcagaaaatggcattggcttggatggtttcaaaggagaatagctcacattgtgctggtggaattcttgccgatgatcagggccttgggaagacagtgtctactattgcccttatacaaaaacagaggatggaacagtcgaaatttatgtttgttgattcagatcgtttgaaatctgaagcactaaaccttgatgaagatgatgagggagaacaaactgttagcaatgaacctaaaaaggaccaaggcgcttgttcattgtcaacatctgctggtactagtgctgaactttttgttaatcaaccgaataatgttgtgaataaaatggttgaaaccaaagcagaacgcaagaaaaaagctaaagtttccacatcatctgcatccacctcacgttccatgacaaggccagctgcaggtactctagtagtgtgccctgctagtgttcttaagcagtggtctaacgaattaactgacaaggttagcgaaagtgctaaattatctgttttagtctaccatggtggtgcaaggaccaaagatccacgtgagctggcaaaatacgatgtagttgttactacatatacaattgtggccaatgaagtacctaaacagatggctgatgatgacgcagatcaaaagaacagtgaagaaccctctgctagcaataaaagaaagccatcggcgaatatgcaaaacaaggctaagaaaaagaagaagaaacttaaggactcaaactttgaccttgacagtggtccaattgcaagagtgcgatggtttagggttgtgcttgatgaagctcagacaataaaaaacttccgaactgtagtggccagagcctgttgtgggctaagagcaaagcggagatggtgcttatcaggaacacctatacaaaatgcaattgatgatctgtttagctatttccgtttcttgaaatatgatccgtattgcacgtataactcgttttgcacaatgattaagcacccaattgctagagatgcaattaatggatacaagaaacttcaggctgtgctgaaggtagttctcctgcgtcgtacgaaagaaactgtgatcaatggcaaaccaataataaatttacctcctaagacaattaatctgaataaagtagatttcacacaagaggagcggtcgttttatttgatgctggaagaacgctctcggcaacaattcaaggcatttgctgcggctgggacactcaaacaaaactatgccaacatccttttaatgttgctgcgacttcggcaagcctgtgatcatcctattcttgtaaagggcaatcagtcagaatatggaggtgatggttctatagaaatggcaaagaaacttcctaaggaagtggtgatagatttgcttgcaaaactggaagtggggtcaacactttgtggcttatgcaatgatacacctgaggatgctattgtgacaatttgtggtcatgttttctgctatcaatgtatacatgaacgaataacgactgatgagaatatgtgccctgcccctaattgcagtagaacattaggtcttgaattgttattttcgtcaggagctttaaagatttgcatctctggcaaatcgagttctgcagtagctagttcatcatcagataacgagtcatcttcaatcagtcaaagcagctttgtctcatccaagatacaagcagccattgatatactgaattcaatcattgtcatggatcctcttactgaaagttatacaatggaatcaagcagaagtggactaggccctgtgaaagccattgtcttttcccaatggactggcatgctggatttgctggagctttcactgaatatcaactgtatacagtacaggagactagatggaacaatgtctctcaatttaagagaaaaaaatgtgaaggattttaacactgacccagaggttagagttatgattatgtcactgaaagctggtaatcttggtctcaacatggtttctgcttgccatgtaattctccttgatctctggtggaacccttatgctgaggaccaggcagttgatagggcacacaggattgggcagactaggcctgttactgtatctcgcttgaccgttaaagacactgtggaagatcgtattttagctctgcaggaggaaaagagaaccatggtgaactctgctttcggtgatgacaaagccggcggccatgcgacccggctcaccgtggaagacctgcggtacctatttaggatatgattgcgagggaactctctcaatgcctcggtcaacttgtcaggtcatgatgcgttgtaccttgtaatcgtagtccggcaaaagggcggtgtaccattgcgagggtaggctcattggtccatgtccgccacgccttgctgcagctccagttttgtggtgctcagatttctagatgggtaatctagggctagatagcatgtgtaattataaccccccaaccccccctccccggggcatggaggagagttccgcagtgccaatgctttatgatttagtgtatgtatatacatgatcaccatgtctaacttgcaatgagttgttttagctcgagatgtgagactgatactgccagcgggtcagcattttgtaccttctgtgttatgtccctttgcccgtcatcagaaaatccaaaaaatcaaaacttttgttggtgtcca

SEQ ID NO: 42891 - DNA, 3652 bp, Zea Mays
atgcagccggccgaaagcctgactggctgcattcgggcctggcccttgtgccacttcctccgcaacgcctcgccagttgcaaggactgaatatcccccgaccgcaacggcgccggtctccctcgctccatccttctaggcaggccctcgctctcccgtggatcctccgccgcgccgccgcccctttatctgagccatccagcggagcggagatccatccgttggggcgtggattcagtcccttcccttctcggtggttactcccacagtgagggtaactcgaataactgtgagtgctactgtgagatgggtggtgtgctctctcttttagcttggtgatcatctgaaaaaaggaagtgctgtttatttctgtaagatagaaagcaaaccattggttcatgaatggtttagtcatgctaagaaaaacaaagttctaagaacacatatacagtgcacgtgcttgctggcaatatgaatgaaaactctgccattattatttcggatagtgatgatgactcaattggctcaatattcgatgatgacgaccagccagcgtctgcaatcgcaaggcttgatcaaaatgctgaaggacgaataatcaattttgaggatgaagattggcaaaggagcgctcctgctccaccatcgactaagcctactgagaacaacaatggtcaatacaggattcttccagcatcccttacgaatggtagacatgctgagagtagtcgttatacatttggttcagtggacaggattcatccccatgcaaatccttatatggctatgcgaccgggccattctacttccagtagaattgatagcgtagtggaaaagcacaacagttctacagcagatgcaaatgacaataacaagagggtccttccatcatccttttcaaatggcaacacatcaaaatctatgcatccaattgttgctagcgaaacacgcaagctcccactgcctttatccaccaaaaagtcaccaaatattggtgaaaacagaatggggacaaatattgccaatggaaatttgcagccttcatcttcaataatggcaagaggaacttctagtacacttaatacccataaagtggatgatgatgatgatgtcattgtatatggaggttctagctcacatagggtactgccttcaacgtttgaggcaaccaattctaataacagtgaagttgctaagggctttgagacacacagtcgccttaatcctgaaaatagggtcttagattacgctgagagagcagtatatcaagaagccctgcagaatattagtcgcgaaaaaagtgaagatgatctgcctgagggtgtgctagcagtacctctgcttagacatcagaaaatggcattggcttggatggtttcaaaggagaatagctcacattgtgctggtggaattcttgccgatgatcagggccttgggaagacagtgtctactattgcccttatacaaaaacagaggatggaacagtcgaaatttatgtttgttgattcagatcgtttgaaatctgaagcactaaaccttgatgaagatgatgagggagaacaaactgttagcaatgaacctaaaaaggaccaaggcgcttgttcattgtcaacatctgctgatcaaaagaacagtgaagaaccctctgctagcaataaaagaaagccatcggcgaatatgcaaaacaaggctaagaaaaagaagaagaaacttaaggactcaaactttgaccttgacagtggtccaattgcaagagtgcgatggtttagggttgtgcttgatgaagctcagacaataaaaaacttccgaactgtagtggccagagcctgttgtgggctaagagcaaagcggagatggtgcttatcaggaacacctatacaaaatgcaattgatgatctgtttagctatttccgtttcttgaaatatgatccgtattgcacgtataactcgttttgcacaatgattaagcacccaattgctagagatgcaattaatggatacaagaaacttcaggctgtgctgaaggtagttctcctgcgtcgtacgaaagaaactgtgatcaatggcaaaccaataataaatttacctcctaagacaattaatctgaataaagtagatttcacacaagaggagcggtcgttttatttgatgctggaagaacgctctcggcaacaattcaaggcatttgctgcggctgggacactcaaacaaaactatgccaacatccttttaatgttgctgcgacttcggcaagcctgtgatcatcctattcttgtaaagggcaatcagtcagaatatggaggtgatggttctatagaaatggcaaagaaacttcctaaggaagtggtgatagatttgcttgcaaaactggaagtggggtcaacactttgtggcttatgcaatgatacacctgaggatgctattgtgacaatttgtggtcatgttttctgctatcaatgtatacatgaacgaataacgactgatgagaatatgtgccctgcccctaattgcagtagaacattaggtcttgaattgttattttcgtcaggagctttaaagatttgcatctctggcaaatcgagttctgcagtagctagttcatcatcagataacgagtcatcttcaatcagtcaaagcagctttgtctcatccaagatacaagcagccattgatatactgaattcaatcattgtcatggatcctcttactgaaagttatacaatggaatcaagcagaagtggactaggccctgtgaaagccattgtcttttcccaatggactggcatgctggatttgctggagctttcactgaatatcaactgtatacagtacaggagactagatggaacaatgtctctcaatttaagagaaaaaaatgtgaaggattttaacactgacccagaggttagagttatgattatgtcactgaaagctggtaatcttggtctcaacatggtttctgcttgccatgtaattctccttgatctctggtggaacccttatgctgaggaccaggcagttgatagggcacacaggattgggcagactaggcctgttactgtatctcgcttgaccgttaaagacactgtggaagatcgtattttagctctgcaggaggaaaagagaaccatggtgaactctgctttcggtgatgacaaagccggcggccatgcgacccggctcaccgtggaagacctgcggtacctatttaggatatgattgcgagggaactctctcaatgcctcggtcaacttgtcaggtcatgatgcgttgtaccttgtaatcgtagtccggcaaaagggcggtgtaccattgcgagggtaggctcattggtccatgtccgccacgccttgctgcagctccagttttgtggtgctcagatttctagatgggtaatctagggctagatagcatgtgtaattataaccccccaaccccccctccccggggcatggaggagagttccgcagtgccaatgctttatgatttagtgtatgtatatacatgatcaccatgtctaacttgcaatgagttgttttagctcgagatgtgagactgatactgccagcgggtcagcattttgtaccttctgtgttatgtccctttgcccgtcatcagaaaatccaaaaaatcaaaacttttgttggtgtcca

SEQ ID NO: 42892 - DNA, 2815 bp, Zea Mays
atgcagccggccgaaagcctgactggctgcattcgggcctggcccttgtgccacttcctccgcaacgcctcgccagttgcaaggactgaatatcccccgaccgcaacggcgccggtctccctcgctccatccttctaggcaggccctcgctctcccgtggatcctccgccgcgccgccgcccctttatctgagccatccagcggagcggagatccatccgttggggcgtggattcagtcccttcccttctcggtggttactcccacagtgagggtaactcgaataactgtgagtgctactgtgagatgggtggtgtgctctctcttttagcttggtgatcatctgaaaaaaggaagtgctgtttatttctgtaagatagaaagcaaaccattggttcatgaatggtttagtcatgctaagaaaaacaaagttctaagaacacatatacagtgcacgtgcttgctggcaatatgaatgaaaactctgccattattatttcggatagtgatgatgactcaattggctcaatattcgatgatgacgaccagccagcgtctgcaatcgcaaggcttgatcaaaatgctgaaggacgaataatcaattttgaggatgaagattggcaaaggagcgctcctgctccaccatcgactaagcctactgagaacaacaatggtcaatacaggattcttccagcatcccttacgaatggtagacatgctgagagtagtcgttatacatttggttcagtggacaggattcatccccatgcaaatccttatatggctatgcgaccgggccattctacttccagtagaattgatagcgtagtggaaaagcacaacagttctacagcagatgcaaatgacaataacaagagggtccttccatcatccttttcaaatggcaacacatcaaaatctatgcatccaattgttgctagcgaaacacgcaagctcccactgcctttatccaccaaaaagtcaccaaatattggtgaaaacagaatggggacaaatattgccaatggaaatttgcagccttcatcttcaataatggcaagaggaacttctagtacacttaatacccataaagtggatgatgatgatgatgtcattgtatatggaggttctagctcacatagggtactgccttcaacgtttgaggcaaccaattctaataacagtgaagttgctaagggctttgagacacacagtcgccttaatcctgaaaatagggtcttagattacgctgagagagcagtatatcaagaagccctgcagaatattagtcgcgaaaaaagtgaagatgatctgcctgagggtgtgctagcagtacctctgcttagacatcagaaaatggcattggcttggatggtttcaaaggagaatagctcacattgtgctggtggaattcttgccgatgatcagggccttgggaagacagtgtctactattgcccttatacaaaaacagaggatggaacagtcgaaatttatgtttgttgattcagatcgtttgaaatctgaagcactaaaccttgatgaagatgatgagggagaacaaactgttagcaatgaacctaaaaaggaccaaggcgcttgttcattgtcaacatctgctggtactagtgctgaactttttgttaatcaaccgaataatgttgtgaataaaatggttgaaaccaaagcagaacgcaagaaaaaagctaaagtttccacatcatctgcatccacctcacgttccatgacaaggccagctgcaggtactctagtagtgtgccctgctagtgttcttaagcagtggtctaacgaattaactgacaaggttagcgaaagtgctaaattatctgttttagtctaccatggtggtgcaaggaccaaagatccacgtgagctggcaaaatacgatgtagttgttactacatatacaattgtggccaatgaagtacctaaacagatggctgatgatgacgcagatcaaaagaacagtgaagaaccctctgctagcaataaaagaaagccatcggcgaatatgcaaaacaaggctaagaaaaagaagaagaaacttaaggactcaaactttgaccttgacagtggtccaattgcaagagtgcgatggtttagggttgtgcttgatgaagctcagacaataaaaaacttccgaactgtagtggccagagcctgttgtgggctaagagcaaagcggagatggtgcttatcaggaacacctatacaaaatgcaattgatgatctgtttagctatttccgtttcttgaaatatgatccgtattgcacgtataactcgttttgcacaatgattaagcacccaattgctagagatgcaattaatggatacaagaaacttcaggctgtgctgaaggtagttctcctgcgtcgtacgaaagatttcacacaagaggagcggtcgttttatttgatgctggaagaacgctctcggcaacaattcaaggcatttgctgcggctgggacactcaaacaaaactatgccaacatccttttaatgttgctgcgacttcggcaagcctgtgatcatcctattcttgtaaagggcaatcagtcagaatatggaggtgatggttctatagaaatggcaaagaaacttcctaaggaagtggtgatagatttgcttgcaaaactggaagtggggtcaacactttgtggcttatgcaatgtaagcaatctggtctctattttgatgttcgcctgttttttatcttcttttctcttctttttggtataatcatgagcctcatgtgtacttctggatgtgttattagttggattgttgggtcgtcg

SEQ ID NO: 42893 - DNA, 7615 bp, Zea Mays
ctcgcgctcgcgcccgcgccacgacgcgagagcgcgcgaggcgtggagccctaaatcccggaagcttccgaggccgctcgccgggggcgggagagggagctcgccgccggtgacggagccctcgccgccgtagatctcccgatctgagacgccgcttctcaattccctacaggtttttcggtgccggcgacggagatgactgtggagagccccggggagctaggcttctgaagcgcaccgtggggcacagcttggcggacgacggcccccgacagccaactaggttttccatgggagatgggggtgtcgcgtgcgccgtccgcgcagtcgagggcttccatgccggcgccctcgtgaggagaggaggagcgggagaagcgatgccggataagggggagaaggctcatggacaccaccaccagcagcagcactggaagaaccagcagtcagcgtcagctactgacctggaggagggggagctgctcagtggggaggcggagaccaatgggttgcctgagaggagcatgccacctaagaagtggaggaaggtgctggcagcctccgcagctgctgtggaggtggagcctggggagattgtgagtacgaagcaagcagtgccattgaagaaagcaaggagaaatggggaggttgacaaggtagagctgctgccggagaggcagaggaaggtaaaatcttctgggaagagcaccaggaagtctatcaaggatgacatggagccaggggagattgcaccgccagaaaaaaggcgagatgccaagtcccaacgggctgatgataacagcaggaggccaagttcatctgcccagaaaagctccttgcgggattctgatgaagagcctggtgaaattaagccagagagcagcaccagtggcagtctaaggaagaaccagccaacagagccccacagcattaaccacaagcaccacactgacacctctgaccagtcaggatcaaaaagtcataggaagggtccgaagggagaagggaagagatctgctgccaggcatttgtctgggagaaaccgtgagatatcatcaccaacacgggatcggcgtgatcggcacgagaggagcccaggcatcttgggtcgttttcctcatgagcgctctcgtcatgacaggtatgacaggagcccgagccgcttagagcgttccccacatcgagagcgtgctcgccactacgaaagcagagaccacagcccatatgtttcacctcgacatagagctcgtcagccccatttcagggataacacgccaagtcgtgttgataatttccctcgtgggagagtccagcgtgaggatgtcagagaccgtagcccatttcttcacgacagatcgccttctgaacgttttcggcctactgatactcatgaagcaagcaagaagagcagaagtggcaacaactcagaaaagtcacagcacaaaagcaaatcagcgaagcaatcttcaaagaccaagagtggtagcaatgagaagaatgagaaaatctccaatgaaaagcccactgaaagcagtaagtacactgaactgccaccgccacctccactaccgctgccaccaccgccgcctccaccacctccacctccacctctgccacctgctgtaccgcctcccctgcctccaccaccagaacctgagccaactggagttctagccgaagatatgatagaagacatggatatctgtgacaccccacctcacactagtgcagcacctgaacccacggatccaatttatgatatagggaggtggttttaccttgatcacttcggtatcgagcaaggaccttccaagcttgctgtattgaagaagctggtggaagatggatatcttctttctgaccatttgataaaacatgctgatagcaaccgatgggtgactgtagagaatgcagcttcaccactggtgccatctgatttcccctctttttattcggacacttcaacacagatggttaacccaccagaagcaccaggaaatttgctcgatgaagctctagaggaggcttctaacttggcatcaggttctgaggataaacaaatggtggaagcttctgcagaagatagtgaagaattctatattaatgatagggttgaagcactgatggatggatcaattttggtgcatggccaggagctcgagatcattggagagcttttaggtgcagattttcagcctgctgattggcaaagattgagtcaccctgaagattttactaggttccatgtgcacatcgaaggagacgatgaaatcattggaggcacagaattcttagaaaatagaacaacagatgcttatggccttgtttctgtggacaacttccatcattatgtcgagtctagcgaatggttttctgggagatggtcttgcaaaggtggtgactggaggagaaatgacgaattgggccaagatactccattcaggaaaaaacttgttctcaatgaagggtatcctctatgtcagataccaaaaggtagctatgaggatccacgccggccctgcaaggatgagttgtactaccctgtacgtggtaaaaagcatgacttgccattgtgggcattctcatcgacagaagaagatattgacggtgttaatgacaccactaaaaacactgttgtgcctgggaggccaggtcagaccagacagcctcctagcgaagtgaaggtgatgcttcaagtggttagtataaattatcatgttattaaagaccaatcatctgtcgaaccccgtacaaaacccagaggaactgatcgaccaccgtcgagatcttcacgctcccattcaattggggctgagagaagttctatccatgatggttcgtcgcatttcaggaagcaccatgaccatgattcacaaagttttcacaagtccaagtctgttccaaacattccgaaggaccatgtatgcactgttgatgagctgtcagttaatcggggtgactggtactaccttgatggcactgggcatgatcaaggcccattttcttattccgaattgcaagaattagttaaaaaggacactatcattgaacaaagtagcgtgttccgtaagatcgataacacatggtttccagttcttaaggatttaaaacctggaagctctgttcccagtgcagcaccaagctcaaacttaattgctgcttttacgcacccagaccaatataattttggtgtgaaccaaggatcaagtagcttccatgagttacacccccagttcgcgggttatacacgtggcaaattacatgaactagtcatgaaatatttcaagagcagggaacttactttagctataaatgaggtcttggatccatggatttcagcaaagcaaccaaaaaaagagtttgaagcatacttttctcacaattcagcatctaggaatttcctgccagatggtgggtctgcaaaaagggcaagattgctacctgaccagagtgacgaaaatattcatttgtcagaagacattattgctagtcggaaggaggacatctgttttgaagagttatgtgatggagcatcgtctgttgataatgattctgtgaatcccagagcaggaaatgcaagctggggtctactaaatgaccatctgttagcaagaatctttcattttatgagggcagatttgaaatcacttatttcttctgcagctacctgtaagagctggaatgctgctgcgaagtattacagaaacatgtgtagattcattgatctgtcttctgttggtcctctttgcactgattcagtgttttgtgatattatggctggctttgagaagcaaaatattaggactcttattttagctggttgttcgaaccttagttcacatgcccttggcagagtacttgaacaccttccacaaatatcttatgttcatattcaaggttgcagtcatctaggggatctgaaaaataaatttcagcatgtaaaatggatcaggagctcattgaatccagaggggtcatatcggaaaatgaaaaccttgaagcagataggtgatgggaacaactatgcatccaaagttgcaaggaacttcgaccagctagatgattctgatgagcttgatggttattttgctgatatttcaaaaatcgagggtgctagccttttttcatttggacaaggtttctataaacgatcgaaattgcttgatgctagaaagtcctccgcggttttgtcgagggatgcagaaatgaggcgtttgatgcagagacaggcagagaacagttacaggaagatggaagagtttgtcataaacaggctgagagaaattatgaggtgtaacagatttgattttttcattccaaaggtttccaagatcgaaggtaggttgaaaaatgggtattatgctcgccatggttttcgtaccatcaagcatgacatccgtaccatgtgccaagatgcattgagatataaagatggcaatgatttggatgatgtaaagcaaattgttgtctccttcatacaactagcaaagagactagggaacccaaggtacatttctgagagaaacggagcagcagcccaggacagcctggacattagtcaatattcattcgatactaaactcaaaaagaagcaaaacaaaacaagagcaaatttggtggctgctggagcagataattcatctcgcgcatttgaccttgaaatcaaaagaagcctgtctaaattaaagaaaaaggatgtctgctctggtagtgaaacatctgatgatgatggctactctgaaggtgatgaaactgagagtgaaactactgtttctgatactgagagtgactttgatgtaaattctggagcctgggatttaaaaggaaattgcctaaagttaactgaacatggggagtctgtgatcgatgatcgtatattaggtgcccgcatgacaaaggccagccttgttcctccagttactaggaagtatgaagttattgaggagtaccttattgtagcagatgtggaggaagtacaacgaaaaatgagagtttctttacctgatgactattctgagaagttgctttcacagaagaatggcaccgaaaatttggagcttccagaggttaaggattatcaaccccgaaaagtagcaggggatgaaattcttgagcaagaagtatatggcatagatccatatacacacaatctactgagtgacattatgccttctgatcttgagttgtcacctactgacaagcatatctttattgaggagttgcttctgaatgcattgaataagcaagttaggcatttcactggtttgggaaatacccctatgacttacaacattaggcctgtcattgaagaaattcaaaggtctgcggaggatagtggtgacagacgaactttgaagatgtgcttggggatgctaaagtccatgagaaatcgctctgatcagaactttgttgcttatagaaagggtcttggtgttgtttgcaacaaaaaaggtggatttggtgtagatgactttgttgttgaattctttggggaggtctacccttcttggagatggtatgaaaagcaagatggtattaaacatatacaaaataacagtgaagatcaagctcctgagttttacaacattatgttagaaaggccaaagggagaccgacatggatatgacttggtttttgttgatgcgatgcacaaggccaactacgcgagtagaatctgccactcctgcaaccctaactgcgaagcaaaagtgacagcagtggatggtaaataccagattggagtttacacacttcgaccaattgcagaaggcgaggaaatcacttttgattacaattctgtaactgagagcaaagaagaacatgaagcatcagtctgcctctgtggaagtcaagtatgccgcggcagctatttgaatttttctggtgaaggagcctttgagaaggtattaatggaatttcatggtgtgctcgataggcatagcctactgctacaggcttgtgaaacagactctgtctcccagcaagacttgattgacttgggtagagctggtcttggtacctgtttgcttgctggtttgcctgtatggcttgttgcttacacagctcacctggtacggtttatataccttgagaggcagaagctccctgatgagatcttaaggcacaatgtggatgagaagcgacagttccttatagaaataaacatggattctgagaagaatgatgctgaggttcaggcagagggagtactaaattcaagattacagcaaatagtgcatacacttgacaaggtgagatatgttatgagatgcatatttggagacccaaagaatgctcctcctcctatggtaaggttgtctgggaaaagtttggtctctgccatctggaaaggggacagttcgatagttgctgaacttcttcagtcgatggaacctcatgttgaagaagaggtacttagtgatctgaaggccaaaatctgtgctcatgacccatcagattctgaagatattgagggaggcatccgtaattctctcttgtggctgcgtgatgaattacgaactcttccatgcacttacaagtgccgtcatgatgctgctgcagatttgatccatttgtatgcttatacaaagtgctttttccgagtccgggattacaagacagtaaaatctccaccagttcatatcagtccgcttgacttaggccccaaatatgccgataaactgggaccaggctttcaggagtactgcaagacatacccagaaaattactgcttagcccagcttatctattggtatagccagaattcagaacctgaatctagattgacaagagctagaaaaggttgcatgtcattgcccgatgtctcgtccttctatgtgaagtctctaaaaccattgcaagagcgagtttatgggaacagaactgtgagattcatgttatcacgcatggaaaaacaggcacagagaccatggccaaaggataggatatgggtgttcaagagtgatccgagatactttggcagtccaatgatggatgccgtgttgaataattccccccttgacaaggagatggtgcattggctcaagacgagaccaaacgttttcctaggctagaaaaaaaatgattgtaggcagataagatggtatttggttgtttctcccttttggagattttagtctgcaggattttttttttccaggctcacaccttggctacctgatcacagggagtttagcttatagatagcagggtaacagtcaccaccccccatctgtacattccccagtccctacataccttgcggagatgtatctggttagtaaatgatagatttgtcattgatttaatgtagtgaattttcccataggaatgcccccccccctcttttgtttcatgtaaatgcagaacaatttcaatcttgaattcagtaatgtgttacaggcattttgcatttctatggttcagttgggttgtttcagtcaataaaatggttttaagggctcaataggtttcattcacatgaaatgatctgtgcatgggattcgatgattggaattgtacatgatttatgttgcggatgttaatttgcagcatgatgctatattttcgttttacacaggtggtgatggaatttgcgccagctttgtgttgtgtg

SEQ ID NO: 42894 - DNA, 7611 bp, Zea Mays
ctcgcgctcgcgcccgcgccacgacgcgagagcgcgcgaggcgtggagccctaaatcccggaagcttccgaggccgctcgccgggggcgggagagggagctcgccgccggtgacggagccctcgccgccgtagatctcccgatctgagacgccgcttctcaattccctacaggtttttcggtgccggcgacggagatgactgtggagagccccggggagctaggcttctgaagcgcaccgtggggcacagcttggcggacgacggcccccgacagccaactaggttttccatgggagatgggggtgtcgcgtgcgccgtccgcgcagtcgagggcttccatgccggcgccctcgtgaggagaggaggagcgggagaagcgatgccggataagggggagaaggctcatggacaccaccaccagcagcagcactggaagaaccagcagtcagcgtcagctactgacctggaggagggggagctgctcagtggggaggcggagaccaatgggttgcctgagaggagcatgccacctaagaagtggaggaaggtgctggcagcctccgcagctgctgtggaggtggagcctggggagattgtgagtacgaagcaagcagtgccattgaagaaagcaaggagaaatggggaggttgacaaggtagagctgctgccggagaggcagaggaaggtaaaatcttctgggaagagcaccaggaagtctatcaaggatgacatggagccaggggagattgcaccgccagaaaaaaggcgagatgccaagtcccaacgggctgatgataacagcaggaggccaagttcatctgcccagaaaagctccttgcgggattctgatgaagagcctggtgaaattaagccagagagcagcaccagtggcagtctaaggaagaaccagccaacagagccccacagcattaaccacaagcaccacactgacacctctgaccagtcaggatcaaaaagtcataggaagggtccgaagggagaagggaagagatctgctgccaggcatttgtctgggagaaaccgtgagatatcatcaccaacacgggatcggcgtgatcggcacgagaggagcccaggcatcttgggtcgttttcctcatgagcgctctcgtcatgacaggtatgacaggagcccgagccgcttagagcgttccccacatcgagagcgtgctcgccactacgaaagcagagaccacagcccatatgtttcacctcgacatagagctcgtcagccccatttcagggataacacgccaagtcgtgttgataatttccctcgtgggagagtccagcgtgaggatgtcagagaccgtagcccatttcttcacgacagatcgccttctgaacgttttcggcctactgatactcatgaagcaagcaagaagagcagaagtggcaacaactcagaaaagtcacagcacaaaagcaaatcagcgaagcaatcttcaaagaccaagagtggtagcaatgagaagaatgagaaaatctccaatgaaaagcccactgaaagcagtaagtacactgaactgccaccgccacctccactaccgctgccaccaccgccgcctccaccacctccacctccacctctgccacctgctgtaccgcctcccctgcctccaccaccagaacctgagccaactggagttctagccgaagatatgatagaagacatggatatctgtgacaccccacctcacactagtgcagcacctgaacccacggatccaatttatgatatagggaggtggttttaccttgatcacttcggtatcgagcaaggaccttccaagcttgctgtattgaagaagctggtggaagatggatatcttctttctgaccatttgataaaacatgctgatagcaaccgatgggtgactgtagagaatgcagcttcaccactggtgccatctgatttcccctctttttattcggacacttcaacacagatggttaacccaccagaagcaccaggaaatttgctcgatgaagctctagaggaggcttctaacttggcatcaggttctgaggataaacaaatggtggaagcttctgcagaagatagtgaagaattctatattaatgatagggttgaagcactgatggatggatcaattttggtgcatggccaggagctcgagatcattggagagcttttaggtgcagattttcagcctgctgattggcaaagattgagtcaccctgaagattttactaggttccatgtgcacatcgaaggagacgatgaaatcattggaggcacagaattcttagaaaatagaacaacagatgcttatggccttgtttctgtggacaacttccatcattatgtcgagtctagcgaatggttttctgggagatggtcttgcaaaggtggtgactggaggagaaatgacgaattgggccaagatactccattcaggaaaaaacttgttctcaatgaagggtatcctctatgtcagataccaaaaggtagctatgaggatccacgccggccctgcaaggatgagttgtactaccctgtacgtggtaaaaagcatgacttgccattgtgggcattctcatcgacagaagaagatattgacggtgttaatgacaccactaaaaacactgttgtgcctgggaggccaggtcagaccagacagcctcctagcgaagtgaaggtgatgcttcaagtggttagtataaattatcatgttattaaagaccaatcatctgtcgaaccccgtacaaaacccagaggaactgatcgaccaccgtcgagatcttcacgctcccattcaattggggctgagagaagttctatccatgatggttcgtcgcatttcaggaagcaccatgaccatgattcacaaagttttcacaagtccaagtctgttccaaacattccgaaggaccatgtatgcactgttgatgagctgtcagttaatcggggtgactggtactaccttgatggcactgggcatgatcaaggcccattttcttattccgaattgcaagaattagttaaaaaggacactatcattgaacaaagtagcgtgttccgtaagatcgataacacatggtttccagttcttaaggatttaaaacctggaagctctgttcccagtgcagcaccaagctcaaacttaattgctgcttttacgcacccagaccaatataattttggtgtgaaccaaggatcaagtagcttccatgagttacacccccagttcgcgggttatacacgtggcaaattacatgaactagtcatgaaatatttcaagagcagggaacttactttagctataaatgaggtcttggatccatggatttcagcaaagcaaccaaaaaaagagtttgaagcatacttttctcacaattcagcatctaggaatttcctgccagaagatggtgggtctgcaaaaagggcaagattgctacctgaccagagtgacgaaaatattcatttgtcagaagacattattgctagtcggaaggaggacatctgttttgaagagttatgtgatggagcatcgtctgttgataatgattctgtgaatcccagagcaggaaatgcaagctggggtctactaaatgaccatctgttagcaagaatctttcattttatgagggcagatttgaaatcacttatttcttctgcagctacctgtaagagctggaatgctgctgcgaagtattacagaaacatgtgtagattcattgatctgtcttctgttggtcctctttgcactgattcagtgttttgtgatattatggctggctttgagaagcaaaatattaggactcttattttagctggttgttcgaaccttagttcacatgcccttggcagagtacttgaacaccttccacaaatatcttatgttcatattcaaggttgcagtcatctaggggatctgaaaaataaatttcagcatgtaaaatggatcaggagctcattgaatccagaggggtcatatcggaaaatgaaaaccttgaagcagataggtgatgggaacaactatgcatccaaagttgcaaggaacttcgaccagctagatgattctgatgagcttgatggttattttgctgatatttcaaaaatcgagggtgctagccttttttcatttggacaaggtttctataaacgatcgaaattgcttgatgctagaaagtcctccgcggttttgtcgagggatgcagaaatgaggcgtttgatgcagagacaggcagagaacagttacaggaagatggaagagtttgtcataaacaggctgagagaaattatgaggtgtaacagatttgattttttcattccaaaggtttccaagatcgaaggtaggttgaaaaatgggtattatgctcgccatggttttcgtaccatcaagcatgacatccgtaccatgtgccaagatgcattgagatataaagatggcaatgatttggatgatgtaaagcaaattgttgtctccttcatacaactagcaaagagactagggaacccaaggtacatttctgagagaaacggagcagcagcccaggacagcctggacattagtcaatattcattcgatactaaactcaaaaagaagcaaaacaaaacaagagcaaatttggtggctgctggagcagataattcatctcgcgcatttgaccttgaaatcaaaagaagcctgtctaaattaaagaaaaaggatgtctgctctggtagtgaaacatctgatgatgatggctactctgaaggtgatgaaactgagagtgaaactactgtttctgatactgagagtgactttgatgtaaattctggagcctgggatttaaaaggaaattgcctaaagttaactgaacatggggagtctgtgatcgatgatcgtatattaggtgcccgcatgacaaaggccagccttgttcctccagttactaggaagtatgaagttattgaggagtaccttattgtagcagatgtggaggaagtacaacgaaaaatgagagtttctttacctgatgactattctgagaagttgctttcacagaagaatggcaccgaaaatttggagcttccagaggttaaggattatcaaccccgaaaagtagcaggggatgaaattcttgagcaagaagtatatggcatagatccatatacacacaatctactgagtgacattatgccttctgatcttgagttgtcacctactgacaagcatatctttattgaggagttgcttctgaatgcattgaataagcaagttaggcatttcactggtttgggaaatacccctatgacttacaacattaggcctgtcattgaagaaattcaaaggtctgcggaggatagtggtgacagacgaactttgaagatgtgcttggggatgctaaagtccatgagaaatcgctctgatcagaactttgttgcttatagaaagggtcttggtgttgtttgcaacaaaaaaggtggatttggtgtagatgactttgttgttgaattctttggggaggtctacccttcttggagatggtatgaaaagcaagatggtattaaacatatacaaaataacagtgaagatcaagctcctgagttttacaacattatgttagaaaggccaaagggagaccgacatggatatgacttggtttttgttgatgcgatgcacaaggccaactacgcgagtagaatctgccactcctgcaaccctaactgcgaagcaaaagtgacagcagtggatggtaaataccagattggagtttacacacttcgaccaattgcagaaggcgaggaaatcacttttgattacaattctgtaactgagaagaacatgaagcatcagtctgcctctgtggaagtcaagtatgccgcggcagctatttgaatttttctggtgaaggagcctttgagaaggtattaatggaatttcatggtgtgctcgataggcatagcctactgctacaggcttgtgaaacagactctgtctcccagcaagacttgattgacttgggtagagctggtcttggtacctgtttgcttgctggtttgcctgtatggcttgttgcttacacagctcacctggtacggtttatataccttgagaggcagaagctccctgatgagatcttaaggcacaatgtggatgagaagcgacagttccttatagaaataaacatggattctgagaagaatgatgctgaggttcaggcagagggagtactaaattcaagattacagcaaatagtgcatacacttgacaaggtgagatatgttatgagatgcatatttggagacccaaagaatgctcctcctcctatggtaaggttgtctgggaaaagtttggtctctgccatctggaaaggggacagttcgatagttgctgaacttcttcagtcgatggaacctcatgttgaagaagaggtacttagtgatctgaaggccaaaatctgtgctcatgacccatcagattctgaagatattgagggaggcatccgtaattctctcttgtggctgcgtgatgaattacgaactcttccatgcacttacaagtgccgtcatgatgctgctgcagatttgatccatttgtatgcttatacaaagtgctttttccgagtccgggattacaagacagtaaaatctccaccagttcatatcagtccgcttgacttaggccccaaatatgccgataaactgggaccaggctttcaggagtactgcaagacatacccagaaaattactgcttagcccagcttatctattggtatagccagaattcagaacctgaatctagattgacaagagctagaaaaggttgcatgtcattgcccgatgtctcgtccttctatgtgaagtctctaaaaccattgcaagagcgagtttatgggaacagaactgtgagattcatgttatcacgcatggaaaaacaggcacagagaccatggccaaaggataggatatgggtgttcaagagtgatccgagatactttggcagtccaatgatggatgccgtgttgaataattccccccttgacaaggagatggtgcattggctcaagacgagaccaaacgttttcctaggctagaaaaaaaatgattgtaggcagataagatggtatttggttgtttctcccttttggagattttagtctgcaggattttttttttccaggctcacaccttggctacctgatcacagggagtttagcttatagatagcagggtaacagtcaccaccccccatctgtacattccccagtccctacataccttgcggagatgtatctggttagtaaatgatagatttgtcattgatttaatgtagtgaattttcccataggaatgcccccccccctcttttgtttcatgtaaatgcagaacaatttcaatcttgaattcagtaatgtgttacaggcattttgcatttctatggttcagttgggttgtttcagtcaataaaatggttttaagggctcaataggtttcattcacatgaaatgatctgtgcatgggattcgatgattggaattgtacatgatttatgttgcggatgttaatttgcagcatgatgctatattttcgttttacacaggtggtgatggaatttgcgccagctttgtgttgtgtg

SEQ ID NO: 42895 - DNA, 7671 bp, Zea Mays
tagcaccccgcgctcgcgctcgcgcccgcgccacgacgcgagagcgcgcgaggcgtggagccctaaatcccggaagcttccgaggccgctcgccgggggcgggagagggagctcgccgccggtgacggagccctcgccgccgtagatctcccgatctgagacgccgcttctcaattccctacaggtttttcggtgccggcgacggagatgactgtggagagccccggggagctaggcttctgaagcgcaccgtggggcacagcttggcggacgacggcccccgacagccaactaggttttccatgggagatgggggtgtcgcgtgcgccgtccgcgcagtcgagggcttccatgccggcgccctcgtgaggagaggaggagcgggagaagcgatgccggataagggggagaaggctcatggacaccaccaccagcagcagcactggaagaaccagcagtcagcgtcagctactgacctggaggagggggagctgctcagtggggaggcggagaccaatgggttgcctgagaggagcatgccacctaagaagtggaggaaggtgctggcagcctccgcagctgctgtggaggtggagcctggggagattgtgagtacgaagcaagcagtgccattgaagaaagcaaggagaaatggggaggttgacaaggtagagctgctgccggagaggcagaggaaggtaaaatcttctgggaagagcaccaggaagtctatcaaggatgacatggagccaggggagattgcaccgccagaaaaaaggcgagatgccaagtcccaacgggctgatgataacagcaggaggccaagttcatctgcccagaaaagctccttgcgggattctgatgaagagcctggtgaaattaagccagagagcagcaccagtggcagtctaaggaagaaccagccaacagagccccacagcattaaccacaagcaccacactgacacctctgaccagtcaggatcaaaaagtcataggaagggtccgaagggagaagggaagagatctgctgccaggcatttgtctgggagaaaccgtgagatatcatcaccaacacgggatcggcgtgatcggcacgagaggagcccaggcatcttgggtcgttttcctcatgagcgctctcgtcatgacaggtatgacaggagcccgagccgcttagagcgttccccacatcgagagcgtgctcgccactacgaaagcagagaccacagcccatatgtttcacctcgacatagagctcgtcagccccatttcagggataacacgccaagtcgtgttgataatttccctcgtgggagagtccagcgtgaggatgtcagagaccgtagcccatttcttcacgacagatcgccttctgaacgttttcggcctactgatactcatgaagcaagcaagaagagcagaagtggcaacaactcagaaaagtcacagcacaaaagcaaatcagcgaagcaatcttcaaagaccaagagtggtagcaatgagaagaatgagaaaatctccaatgaaaagcccactgaaagcagtaagtacactgaactgccaccgccacctccactaccgctgccaccaccgccgcctccaccacctccacctccacctctgccacctgctgtaccgcctcccctgcctccaccaccagaacctgagccaactggagttctagccgaagatatgatagaagacatggatatctgtgacaccccacctcacactagtgcagcacctgaacccacggatccaatttatgatatagggaggtggttttaccttgatcacttcggtatcgagcaaggaccttccaagcttgctgtattgaagaagctggtggaagatggatatcttctttctgaccatttgataaaacatgctgatagcaaccgatgggtgactgtagagaatgcagcttcaccactggtgccatctgatttcccctctttttattcggacacttcaacacagatggttaacccaccagaagcaccaggaaatttgctcgatgaagctctagaggaggcttctaacttggcatcaggttctgaggataaacaaatggtggaagcttctgcagaagatagtgaagaattctatattaatgatagggttgaagcactgatggatggatcaattttggtgcatggccaggagctcgagatcattggagagcttttaggtgcagattttcagcctgctgattggcaaagattgagtcaccctgaagattttactaggttccatgtgcacatcgaaggagacgatgaaatcattggaggcacagaattcttagaaaatagaacaacagatgcttatggccttgtttctgtggacaacttccatcattatgtcgagtctagcgaatggttttctgggagatggtcttgcaaaggtggtgactggaggagaaatgacgaattgggccaagatactccattcaggaaaaaacttgttctcaatgaagggtatcctctatgtcagataccaaaaggtagctatgaggatccacgccggccctgcaaggatgagttgtactaccctgtacgtggtaaaaagcatgacttgccattgtgggcattctcatcgacagaagaagatattgacggtgttaatgacaccactaaaaacactgttgtgcctgggaggccaggtcagaccagacagcctcctagcgaagtgaaggtgatgcttcaagtggttagtataaattatcatgttattaaagaccaatcatctgtcgaaccccgtacaaaacccagaggaactgatcgaccaccgtcgagatcttcacgctcccattcaattggggctgagagaagttctatccatgatggttcgtcgcatttcaggaagcaccatgaccatgattcacaaagttttcacaagtccaagtctgttccaaacattccgaaggaccatgtatgcactgttgatgagctgtcagttaatcggggtgactggtactaccttgatggcactgggcatgatcaaggcccattttcttattccgaattgcaagaattagttaaaaaggacactatcattgaacaaagtagcgtgttccgtaagatcgataacacatggtttccagttcttaaggatttaaaacctggaagctctgttcccagtgcagcaccaagctcaaacttaattgctgcttttacgcacccagaccaatataattttggtgtgaaccaaggatcaagtagcttccatgagttacacccccagttcgcgggttatacacgtggcaaattacatgaactagtcatgaaatatttcaagagcagggaacttactttagctataaatgaggtcttggatccatggatttcagcaaagcaaccaaaaaaagagtttgaagcatacttttctcacaattcagcatctaggaatttcctgccagaagatggtgggtctgcaaaaagggcaagattgctacctgaccagagtgacgaaaatattcatttgtcagaagacattattgctagtcggaaggaggacatctgttttgaagagttatgtgatggagcatcgtctgttgataatgattctgtgaatcccagagcaggaaatgcaagctggggtctactaaatgaccatctgttagcaagaatctttcattttatgagggcagatttgaaatcacttatttcttctgcagctacctgtaagagctggaatgctgctgcgaagtattacagaaacatgtgtagattcattgatctgtcttctgttggtcctctttgcactgattcagtgttttgtgatattatggctggctttgagaagcaaaatattaggactcttattttagctggttgttcgaaccttagttcacatgcccttggcagagtacttgaacaccttccacaaatatcttatgttcatattcaaggttgcagtcatctaggggatctgaaaaataaatttcagcatgtaaaatggatcaggagctcattgaatccagaggggtcatatcggaaaatgaaaaccttgaagcagataggtgatgggaacaactatgcatccaaagttgcaaggaacttcgaccagctagatgattctgatgagcttgatggttattttgctgatatttcaaaaatcgagggtgctagccttttttcatttggacaaggtttctataaacgatcgaaattgcttgatgctagaaagtcctccgcggttttgtcgagggatgcagaaatgaggcgtttgatgcagagacaggcagagaacagttacaggaagatggaagagtttgtcataaacaggctgagagaaattatgaggtgtaacagatttgattttttcattccaaaggtttccaagatcgaaggtaggttgaaaaatgggtattatgctcgccatggttttcgtaccatcaagcatgacatccgtaccatgtgccaagatgcattgagatataaagatggcaatgatttggatgatgtaaagcaaattgttgtctccttcatacaactagcaaagagactagggaacccaaggtacatttctgagagaaacggagcagcagcccaggacagcctggacattagtcaatattcattcgatactaaactcaaaaagaagcaaaacaaaacaagagcaaatttggtggctgctggagcagataattcatctcgcgcatttgaccttgaaatcaaaagaagcctgtctaaattaaagaaaaaggatgtctgctctggtagtgaaacatctgatgatgatggctactctgaaggtgatgaaactgagagtgaaactactgtttctgatactgagagtgactttgatgtaaattctggagcctgggatttaaaaggaaattgcctaaagttaactgaacatggggagtctgtgatcgatgatcgtatattaggtgcccgcatgacaaaggccagccttgttcctccagttactaggaagtatgaagttattgaggagtaccttattgtagcagatgtggaggaagtacaacgaaaaatgagagtttctttacctgatgactattctgagaagttgctttcacagaagaatggcaccgaaaatttggagcttccagaggttaaggattatcaaccccgaaaagtagcaggggatgaaattcttgagcaagaagtatatggcatagatccatatacacacaatctactgagtgacattatgccttctgatcttgagttgtcacctactgacaagcatatctttattgaggagttgcttctgaatgcattgaataagcaagttaggcatttcactggtttgggaaatacccctatgacttacaacattaggcctgtcattgaagaaattcaaaggtctgcggaggatagtggtgacagacgaactttgaagatgtgcttggggatgctaaagtccatgagaaatcgctctgatcagaactttgttgcttatagaaagggtcttggtgttgtttgcaacaaaaaaggtggatttggtgtagatgactttgttgttgaattctttggggaggtctacccttcttggagatggtatgaaaagcaagatggtattaaacatatacaaaataacagtgaagatcaagctcctgagttttacaacattatgttagaaaggccaaagggagaccgacatggatatgacttggtttttgttgatgcgatgcacaaggccaactacgcgagtagaatctgccactcctgcaaccctaactgcgaagcaaaaaaaaaaagaatttatacgtatgattatgcaaaagctgacatgagagctatagtgacagcagtggatggtaaataccagattggagtttacacacttcgaccaattgcagaaggcgaggaaatcacttttgattacaattctgtaactgagaacatgaagcatcagtctgcctctgtggaagtcaagtatgccgcggcagctatttgaatttttctggtgaaggagcctttgagaaggtattaatggaatttcatggtgtgctcgataggcatagcctactgctacaggcttgtgaaacagactctgtctcccagcaagacttgattgacttgggtagagctggtcttggtacctgtttgcttgctggtttgcctgtatggcttgttgcttacacagctcacctggtacggtttatataccttgagaggcagaagctccctgatgagatcttaaggcacaatgtggatgagaagcgacagttccttatagaaataaacatggattctgagaagaatgatgctgaggttcaggcagagggagtactaaattcaagattacagcaaatagtgcatacacttgacaaggtgagatatgttatgagatgcatatttggagacccaaagaatgctcctcctcctatggtaaggttgtctgggaaaagtttggtctctgccatctggaaaggggacagttcgatagttgctgaacttcttcagtcgatggaacctcatgttgaagaagaggtacttagtgatctgaaggccaaaatctgtgctcatgacccatcagattctgaagatattgagggaggcatccgtaattctctcttgtggctgcgtgatgaattacgaactcttccatgcacttacaagtgccgtcatgatgctgctgcagatttgatccatttgtatgcttatacaaagtgctttttccgagtccgggattacaagacagtaaaatctccaccagttcatatcagtccgcttgacttaggccccaaatatgccgataaactgggaccaggctttcaggagtactgcaagacatacccagaaaattactgcttagcccagcttatctattggtatagccagaattcagaacctgaatctagattgacaagagctagaaaaggttgcatgtcattgcccgatgtctcgtccttctatgtgaagtctctaaaaccattgcaagagcgagtttatgggaacagaactgtgagattcatgttatcacgcatggaaaaacaggcacagagaccatggccaaaggataggatatgggtgttcaagagtgatccgagatactttggcagtccaatgatggatgccgtgttgaataattccccccttgacaaggagatggtgcattggctcaagacgagaccaaacgttttcctaggctagaaaaaaaatgattgtaggcagataagatggtatttggttgtttctcccttttggagattttagtctgcaggattttttttttccaggctcacaccttggctacctgatcacagggagtttagcttatagatagcagggtaacagtcaccaccccccatctgtacattccccagtccctacataccttgcggagatgtatctggttagtaaatgatagatttgtcattgatttaatgtagtgaattttcccataggaatgcccccccccctcttttgtttcatgtaaatgcagaacaatttcaatcttgaattcagtaatgtgttacaggcattttgcatttctatggttcagttgggttgtttcagtcaataaaatggttttaagggctcaataggtttcattcacatgaaatgatctgtgcatgggattcgatgattggaattgtacatgatttatgttgcggatgttaatttgcagcatgatgctatattttcgttttacacaggtggtgatggaatttgcgccagctttgtgttgtgtg

SEQ ID NO: 42896 - DNA, 7711 bp, Zea Mays
ccactccacataagagcgaggccccagtcgcggaggaggctttacgaatcccaaaaagcaaacacacacaaacccaggagatagcaccccgcgctcgcgctcgcgcccgcgccacgacgcgagagcgcgcgaggcgtggagccctaaatcccggaagcttccgaggccgctcgccgggggcgggagagggagctcgccgccggtgacggagccctcgccgccgtagatctcccgatctgagacgccgcttctcaattccctacaggtttttcggtgccggcgacggagatgactgtggagagccccggggagctaggcttctgaagcgcaccgtggggcacagcttggcggacgacggcccccgacagccaactaggttttccatgggagatgggggtgtcgcgtgcgccgtccgcgcagtcgagggcttccatgccggcgccctcgtgaggagaggaggagcgggagaagcgatgccggataagggggagaaggctcatggacaccaccaccagcagcagcactggaagaaccagcagtcagcgtcagctactgacctggaggagggggagctgctcagtggggaggcggagaccaatgggttgcctgagaggagcatgccacctaagaagtggaggaaggtgctggcagcctccgcagctgctgtggaggtggagcctggggagattgtgagtacgaagcaagcagtgccattgaagaaagcaaggagaaatggggaggttgacaaggtagagctgctgccggagaggcagaggaaggtaaaatcttctgggaagagcaccaggaagtctatcaaggatgacatggagccaggggagattgcaccgccagaaaaaaggcgagatgccaagtcccaacgggctgatgataacagcaggaggccaagttcatctgcccagaaaagctccttgcgggattctgatgaagagcctggtgaaattaagccagagagcagcaccagtggcagtctaaggaagaaccagccaacagagccccacagcattaaccacaagcaccacactgacacctctgaccagtcaggatcaaaaagtcataggaagggtccgaagggagaagggaagagatctgctgccaggcatttgtctgggagaaaccgtgagatatcatcaccaacacgggatcggcgtgatcggcacgagaggagcccaggcatcttgggtcgttttcctcatgagcgctctcgtcatgacaggtatgacaggagcccgagccgcttagagcgttccccacatcgagagcgtgctcgccactacgaaagcagagaccacagcccatatgtttcacctcgacatagagctcgtcagccccatttcagggataacacgccaagtcgtgttgataatttccctcgtgggagagtccagcgtgaggatgtcagagaccgtagcccatttcttcacgacagatcgccttctgaacgttttcggcctactgatactcatgaagcaagcaagaagagcagaagtggcaacaactcagaaaagtcacagcacaaaagcaaatcagcgaagcaatcttcaaagaccaagagtggtagcaatgagaagaatgagaaaatctccaatgaaaagcccactgaaagcagtaagtacactgaactgccaccgccacctccactaccgctgccaccaccgccgcctccaccacctccacctccacctctgccacctgctgtaccgcctcccctgcctccaccaccagaacctgagccaactggagttctagccgaagatatgatagaagacatggatatctgtgacaccccacctcacactagtgcagcacctgaacccacggatccaatttatgatatagggaggtggttttaccttgatcacttcggtatcgagcaaggaccttccaagcttgctgtattgaagaagctggtggaagatggatatcttctttctgaccatttgataaaacatgctgatagcaaccgatgggtgactgtagagaatgcagcttcaccactggtgccatctgatttcccctctttttattcggacacttcaacacagatggttaacccaccagaagcaccaggaaatttgctcgatgaagctctagaggaggcttctaacttggcatcaggttctgaggataaacaaatggtggaagcttctgcagaagatagtgaagaattctatattaatgatagggttgaagcactgatggatggatcaattttggtgcatggccaggagctcgagatcattggagagcttttaggtgcagattttcagcctgctgattggcaaagattgagtcaccctgaagattttactaggttccatgtgcacatcgaaggagacgatgaaatcattggaggcacagaattcttagaaaatagaacaacagatgcttatggccttgtttctgtggacaacttccatcattatgtcgagtctagcgaatggttttctgggagatggtcttgcaaaggtggtgactggaggagaaatgacgaattgggccaagatactccattcaggaaaaaacttgttctcaatgaagggtatcctctatgtcagataccaaaaggtagctatgaggatccacgccggccctgcaaggatgagttgtactaccctgtacgtggtaaaaagcatgacttgccattgtgggcattctcatcgacagaagaagatattgacggtgttaatgacaccactaaaaacactgttgtgcctgggaggccaggtcagaccagacagcctcctagcgaagtgaaggtgatgcttcaagtggttagtataaattatcatgttattaaagaccaatcatctgtcgaaccccgtacaaaacccagaggaactgatcgaccaccgtcgagatcttcacgctcccattcaattggggctgagagaagttctatccatgatggttcgtcgcatttcaggaagcaccatgaccatgattcacaaagttttcacaagtccaagtctgttccaaacattccgaaggaccatgtatgcactgttgatgagctgtcagttaatcggggtgactggtactaccttgatggcactgggcatgatcaaggcccattttcttattccgaattgcaagaattagttaaaaaggacactatcattgaacaaagtagcgtgttccgtaagatcgataacacatggtttccagttcttaaggatttaaaacctggaagctctgttcccagtgcagcaccaagctcaaacttaattgctgcttttacgcacccagaccaatataattttggtgtgaaccaaggatcaagtagcttccatgagttacacccccagttcgcgggttatacacgtggcaaattacatgaactagtcatgaaatatttcaagagcagggaacttactttagctataaatgaggtcttggatccatggatttcagcaaagcaaccaaaaaaagagtttgaagcatacttttctcacaattcagcatctaggaatttcctgccagaagatggtgggtctgcaaaaagggcaagattgctacctgaccagagtgacgaaaatattcatttgtcagaagacattattgctagtcggaaggaggacatctgttttgaagagttatgtgatggagcatcgtctgttgataatgattctgtgaatcccagagcaggaaatgcaagctggggtctactaaatgaccatctgttagcaagaatctttcattttatgagggcagatttgaaatcacttatttcttctgcagctacctgtaagagctggaatgctgctgcgaagtattacagaaacatgtgtagattcattgatctgtcttctgttggtcctctttgcactgattcagtgttttgtgatattatggctggctttgagaagcaaaatattaggactcttattttagctggttgttcgaaccttagttcacatgcccttggcagagtacttgaacaccttccacaaatatcttatgttcatattcaaggttgcagtcatctaggggatctgaaaaataaatttcagcatgtaaaatggatcaggagctcattgaatccagaggggtcatatcggaaaatgaaaaccttgaagcagataggtgatgggaacaactatgcatccaaagttgcaaggaacttcgaccagctagatgattctgatgagcttgatggttattttgctgatatttcaaaaatcgagggtgctagccttttttcatttggacaaggtttctataaacgatcgaaattgcttgatgctagaaagtcctccgcggttttgtcgagggatgcagaaatgaggcgtttgatgcagagacaggcagagaacagttacaggaagatggaagagtttgtcataaacaggctgagagaaattatgaggtgtaacagatttgattttttcattccaaaggtttccaagatcgaaggtaggttgaaaaatgggtattatgctcgccatggttttcgtaccatcaagcatgacatccgtaccatgtgccaagatgcattgagatataaagatggcaatgatttggatgatgtaaagcaaattgttgtctccttcatacaactagcaaagagactagggaacccaaggtacatttctgagagaaacggagcagcagcccaggacagcctggacattagtcaatattcattcgatactaaactcaaaaagaagcaaaacaaaacaagagcaaatttggtggctgctggagcagataattcatctcgcgcatttgaccttgaaatcaaaagaagcctgtctaaattaaagaaaaaggatgtctgctctggtagtgaaacatctgatgatgatggctactctgaaggtgatgaaactgagagtgaaactactgtttctgatactgagagtgactttgatgtaaattctggagcctgggatttaaaaggaaattgcctaaagttaactgaacatggggagtctgtgatcgatgatcgtatattaggtgcccgcatgacaaaggccagccttgttcctccagttactaggaagtatgaagttattgaggagtaccttattgtagcagatgtggaggaagtacaacgaaaaatgagagtttctttacctgatgactattctgagaagttgctttcacagaagaatggcaccgaaaatttggagcttccagaggttaaggattatcaaccccgaaaagtagcaggggatgaaattcttgagcaagaagtatatggcatagatccatatacacacaatctactgagtgacattatgccttctgatcttgagttgtcacctactgacaagcatatctttattgaggagttgcttctgaatgcattgaataagcaagttaggcatttcactggtttgggaaatacccctatgacttacaacattaggcctgtcattgaagaaattcaaaggtctgcggaggatagtggtgacagacgaactttgaagatgtgcttggggatgctaaagtccatgagaaatcgctctgatcagaactttgttgcttatagaaagggtcttggtgttgtttgcaacaaaaaaggtggatttggtgtagatgactttgttgttgaattctttggggaggtctacccttcttggagatggtatgaaaagcaagatggtattaaacatatacaaaataacagtgaagatcaagctcctgagttttacaacattatgttagaaaggccaaagggagaccgacatggatatgacttggtttttgttgatgcgatgcacaaggccaactacgcgagtagaatctgccactcctgcaaccctaactgcgaagcaaaagtgacagcagtggatggtaaataccagattggagtttacacacttcgaccaattgcagaaggcgaggaaatcacttttgattacaattctgtaactgagagcaaagaagaacatgaagcatcagtctgcctctgtggaagtcaagtatgccgcggcagctatttgaatttttctggtgaaggagcctttgagaaggtattaatggaatttcatggtgtgctcgataggcatagcctactgctacaggcttgtgaaacagactctgtctcccagcaagacttgattgacttgggtagagctggtcttggtacctgtttgcttgctggtttgcctgtatggcttgttgcttacacagctcacctggtacggtttatataccttgagaggcagaagctccctgatgagatcttaaggcacaatgtggatgagaagcgacagttccttatagaaataaacatggattctgagaagaatgatgctgaggttcaggcagagggagtactaaattcaagattacagcaaatagtgcatacacttgacaaggtgagatatgttatgagatgcatatttggagacccaaagaatgctcctcctcctatggtaaggttgtctgggaaaagtttggtctctgccatctggaaaggggacagttcgatagttgctgaacttcttcagtcgatggaacctcatgttgaagaagaggtacttagtgatctgaaggccaaaatctgtgctcatgacccatcagattctgaagatattgagggaggcatccgtaattctctcttgtggctgcgtgatgaattacgaactcttccatgcacttacaagtgccgtcatgatgctgctgcagatttgatccatttgtatgcttatacaaagtgctttttccgagtccgggattacaagacagtaaaatctccaccagttcatatcagtccgcttgacttaggccccaaatatgccgataaactgggaccaggctttcaggagtactgcaagacatacccagaaaattactgcttagcccagcttatctattggtatagccagaattcagaacctgaatctagattgacaagagctagaaaaggttgcatgtcattgcccgatgtctcgtccttctatgtgaagtctctaaaaccattgcaagagcgagtttatgggaacagaactgtgagattcatgttatcacgcatggaaaaacaggcacagagaccatggccaaaggataggatatgggtgttcaagagtgatccgagatactttggcagtccaatgatggatgccgtgttgaataattccccccttgacaaggagatggtgcattggctcaagacgagaccaaacgttttcctaggctagaaaaaaaatgattgtaggcagataagatggtatttggttgtttctcccttttggagattttagtctgcaggattttttttttccaggctcacaccttggctacctgatcacagggagtttagcttatagatagcagggtaacagtcaccaccccccatctgtacattccccagtccctacataccttgcggagatgtatctggttagtaaatgatagatttgtcattgatttaatgtagtgaattttcccataggaatgcccccccccctcttttgtttcatgtaaatgcagaacaatttcaatcttgaattcagtaatgtgttacaggcattttgcatttctatggttcagttgggttgtttcagtcaataaaatggttttaagggctcaataggtttcattcacatgaaatgatctgtgcatgggattcgatgattggaattgtacatgatttatgttgcggatgttaatttgcagcatgatgctatattttcgttttacacaggtggtgatggaatttgcgccagctttgtgttgtgtg

SEQ ID NO: 42897 - DNA, 7681 bp, Zea Mays
ccactccacataagagcgaggccccagtcgcggaggaggctttacgaatcccaaaaagcaaacacacacaaacccaggagatagcaccccgcgctcgcgctcgcgcccgcgccacgacgcgagagcgcgcgaggcgtggagccctaaatcccggaagcttccgaggccgctcgccgggggcgggagagggagctcgccgccggtgacggagccctcgccgccgtagatctcccgatctgagacgccgcttctcaattccctacaggtttttcggtgccggcgacggagatgactgtggagagccccggggagctaggcttctgaagcgcaccgtggggcacagcttggcggacgacggcccccgacagccaactaggttttccatgggagatgggggtgtcgcgtgcgccgtccgcgcagtcgagggcttccatgccggcgccctcgtgaggagaggaggagcgggagaagcgatgccggataagggggagaaggctcatggacaccaccaccagcagcagcactggaagaaccagcagtcagcgtcagctactgacctggaggagggggagctgctcagtggggaggcggagaccaatgggttgcctgagaggagcatgccacctaagaagtggaggaaggtgctggcagcctccgcagctgctgtggaggtggagcctggggagattgtgagtacgaagcaagcagtgccattgaagaaagcaaggagaaatggggaggttgacaaggtagagctgctgccggagaggcagaggaaggtaaaatcttctgggaagagcaccaggaagtctatcaaggatgacatggagccaggggagattgcaccgccagaaaaaaggcgagatgccaagtcccaacgggctgatgataacagcaggaggccaagttcatctgcccagaaaagctccttgcgggattctgatgaagagcctggtgaaattaagccagagagcagcaccagtggcagtctaaggaagaaccagccaacagagccccacagcattaaccacaagcaccacactgacacctctgaccagtcaggatcaaaaagtcataggaagggtccgaagggagaagggaagagatctgctgccaggcatttgtctgggagaaaccgtgagatatcatcaccaacacgggatcggcgtgatcggcacgagaggagcccaggcatcttgggtcgttttcctcatgagcgctctcgtcatgacaggtatgacaggagcccgagccgcttagagcgttccccacatcgagagcgtgctcgccactacgaaagcagagaccacagcccatatgtttcacctcgacatagagctcgtcagccccatttcagggataacacgccaagtcgtgttgataatttccctcgtgggagagtccagcgtgaggatgtcagagaccgtagcccatttcttcacgacagatcgccttctgaacgttttcggcctactgatactcatgaagcaagcaagaagagcagaagtggcaacaactcagaaaagtcacagcacaaaagcaaatcagcgaagcaatcttcaaagaccaagagtggtagcaatgagaagaatgagaaaatctccaatgaaaagcccactgaaagcagtaagtacactgaactgccaccgccacctccactaccgctgccaccaccgccgcctccaccacctccacctccacctctgccacctgctgtaccgcctcccctgcctccaccaccagaacctgagccaactggagttctagccgaagatatgatagaagacatggatatctgtgacaccccacctcacactagtgcagcacctgaacccacggatccaatttatgatatagggaggtggttttaccttgatcacttcggtatcgagcaaggaccttccaagcttgctgtattgaagaagctggtggaagatggatatcttctttctgaccatttgataaaacatgctgatagcaaccgatgggtgactgtagagaatgcagcttcaccactggtgccatctgatttcccctctttttattcggacacttcaacacagatggttaacccaccagaagcaccaggaaatttgctcgatgaagctctagaggaggcttctaacttggcatcaggttctgaggataaacaaatggtggaagcttctgcagaagatagtgaagaattctatattaatgatagggttgaagcactgatggatggatcaattttggtgcatggccaggagctcgagatcattggagagcttttaggtgcagattttcagcctgctgattggcaaagattgagtcaccctgaagattttactaggttccatgtgcacatcgaaggagacgatgaaatcattggaggcacagaattcttagaaaatagaacaacagatgcttatggccttgtttctgtggacaacttccatcattatgtcgagtctagcgaatggttttctgggagatggtcttgcaaaggtggtgactggaggagaaatgacgaattgggccaagatactccattcaggaaaaaacttgttctcaatgaagggtatcctctatgtcagataccaaaaggtagctatgaggatccacgccggccctgcaaggatgagttgtactaccctgtacgtggtaaaaagcatgacttgccattgtgggcattctcatcgacagaagaagatattgacggtgttaatgacaccactaaaaacactgttgtgcctgggaggccaggtcagaccagacagcctcctagcgaagtgaaggtgatgcttcaagtggttagtataaattatcatgttattaaagaccaatcatctgtcgaaccccgtacaaaacccagaggaactgatcgaccaccgtcgagatcttcacgctcccattcaattggggctgagagaagttctatccatgatggttcgtcgcatttcaggaagcaccatgaccatgattcacaaagttttcacaagtccaagtctgttccaaacattccgaaggaccatgtatgcactgttgatgagctgtcagttaatcggggtgactggtactaccttgatggcactgggcatgatcaaggcccattttcttattccgaattgcaagaattagttaaaaaggacactatcattgaacaaagtagcgtgttccgtaagatcgataacacatggtttccagttcttaaggatttaaaacctggaagctctgttcccagtgcagcaccaagctcaaacttaattgctgcttttacgcacccagaccaatataattttggtgtgaaccaaggatcaagtagcttccatgagttacacccccagttcgcgggttatacacgtggcaaattacatgaactagtcatgaaatatttcaagagcagggaacttactttagctataaatgaggtcttggatccatggatttcagcaaagcaaccaaaaaaagagtttgaagcatacttttctcacaattcagcatctaggaatttcctgccagaagatggtgggtctgcaaaaagggcaagattgctacctgaccagagtgacgaaaatattcatttgtcagaagacattattgctagtcggaaggaggacatctgttttgaagagttatgtgatggagcatcgtctgttgataatgattctgtgaatcccagagcaggaaatgcaagctggggtctactaaatgaccatctgttagcaagaatctttcattttatgagggcagatttgaaatcacttatttcttctgcagctacctgtaagagctggaatgctgctgcgaagtattacagaaacatgtgtagattcattgatctgtcttctgttggtcctctttgcactgattcagtgttttgtgatattatggctggctttgagaagcaaaatattaggactcttattttagctggttgttcgaaccttagttcacatgcccttggcagagtacttgaacaccttccacaaatatcttatgttcatattcaaggttgcagtcatctaggggatctgaaaaataaatttcagcatgtaaaatggatcaggagctcattgaatccagaggggtcatatcggaaaatgaaaaccttgaagcagataggtgatgggaacaactatgcatccaaagttgcaaggaacttcgaccagctagatgattctgatgagcttgatggttattttgctgatatttcaaaaatcgagggtgctagccttttttcatttggacaaggtttctataaacgatcgaaattgcttgatgctagaaagtcctccgcggttttgtcgagggatgcagaaatgaggcgtttgatgcagagacaggcagagaacagttacaggaagatggaagagtttgtcataaacaggctgagagaaattatgaggtgtaacagatttgattttttcattccaaaggtttccaagatcgaaggtaggttgaaaaatgggtattatgctcgccatggttttcgtaccatcaagcatgacatccgtaccatgtgccaagatgcattgagatataaagatggcaatgatttggatgatgtaaagcaaattgttgtctccttcatacaactagcaaagagactagggaacccaaggtacatttctgagagaaacggagcagcagcccaggacagcctggacattagtcaatattcattcgatactaaactcaaaaagaagcaaaacaaaacaagagcaaatttggtggctgctggagcagataattcatctcgcgcatttgaccttgaaatcaaaagaagcctgtctaaattaaagaaaaaggatgtctgctctggtagtgaaacatctgatgatgatggctactctgaaggtgatgaaactgagagtgaaactactgtttctgatactgagagtgactttgatgtaaattctggagcctgggatttaaaaggaaattgcctaaagttaactgaacatggggagtctgtgatcgatgatcgtatattaggtgcccgcatgacaaaggccagccttgttcctccagttactaggaagtatgaagttattgaggagtaccttattgtagcagatgtggaggaagtacaacgaaaaatgagagtttctttacctgatgactattctgagaagttgctttcacagaagaatggcaccgaaaatttggagcttccagaggttaaggattatcaaccccgaaaagtagcaggggatgaaattcttgagcaagaagtatatggcatagatccatatacacacaatctactgagtgacattatgccttctgatcttgagttgtcacctactgacaagcatatctttattgaggagttgcttctgaatgcattgaataagcaagttaggcatttcactggtttgggaaatacccctatgacttacaacattaggcctgtcattgaagaaattcaaaggtctgcggaggatagtggtgacagacgaactttgaagatgtgcttggggatgctaaagtccatgagaaatcgctctgatcagaactttgttgcttatagaaagggtcttggtgttgtttgcaacaaaaaaggtggatttggtgtagatgactttgttgttgaattctttggggaggtctacccttcttggagatggtatgaaaagcaagatggtattaaacatatacaaaataacagtgaagatcaagctcctgagttttacaacattatgttagaaaggccaaagggagaccgacatggatatgacttggtttttgttgatgcgatgcacaaggccaactacgcgagtagaatctgccactcctgcaaccctaactgcgaagcaaaagtgacagcagtggatggtaaataccagattggagtttacacacttcgaccaattgcagaaggcgaggaaatcacttttgattacaattctgtaactgagagcaaagaagaacatgaagcatcagtctgcctctgtggaagtcaagtatgccgcggcagctatttgaatttttctggtgaaggagcctttgagaaggtattaatggaatttcatggtgtgctcgataggcatagcctactgctacaggcttgtgaaacagactctgtctcccagcaagacttgattgacttgggtagagctggtcttggtacctgtttgcttgctggtttgcctgtacggtttatataccttgagaggcagaagctccctgatgagatcttaaggcacaatgtggatgagaagcgacagttccttatagaaataaacatggattctgagaagaatgatgctgaggttcaggcagagggagtactaaattcaagattacagcaaatagtgcatacacttgacaaggtgagatatgttatgagatgcatatttggagacccaaagaatgctcctcctcctatggtaaggttgtctgggaaaagtttggtctctgccatctggaaaggggacagttcgatagttgctgaacttcttcagtcgatggaacctcatgttgaagaagaggtacttagtgatctgaaggccaaaatctgtgctcatgacccatcagattctgaagatattgagggaggcatccgtaattctctcttgtggctgcgtgatgaattacgaactcttccatgcacttacaagtgccgtcatgatgctgctgcagatttgatccatttgtatgcttatacaaagtgctttttccgagtccgggattacaagacagtaaaatctccaccagttcatatcagtccgcttgacttaggccccaaatatgccgataaactgggaccaggctttcaggagtactgcaagacatacccagaaaattactgcttagcccagcttatctattggtatagccagaattcagaacctgaatctagattgacaagagctagaaaaggttgcatgtcattgcccgatgtctcgtccttctatgtgaagtctctaaaaccattgcaagagcgagtttatgggaacagaactgtgagattcatgttatcacgcatggaaaaacaggcacagagaccatggccaaaggataggatatgggtgttcaagagtgatccgagatactttggcagtccaatgatggatgccgtgttgaataattccccccttgacaaggagatggtgcattggctcaagacgagaccaaacgttttcctaggctagaaaaaaaatgattgtaggcagataagatggtatttggttgtttctcccttttggagattttagtctgcaggattttttttttccaggctcacaccttggctacctgatcacagggagtttagcttatagatagcagggtaacagtcaccaccccccatctgtacattccccagtccctacataccttgcggagatgtatctggttagtaaatgatagatttgtcattgatttaatgtagtgaattttcccataggaatgcccccccccctcttttgtttcatgtaaatgcagaacaatttcaatcttgaattcagtaatgtgttacaggcattttgcatttctatggttcagttgggttgtttcagtcaataaaatggttttaagggctcaataggtttcattcacatgaaatgatctgtgcatgggattcgatgattggaattgtacatgatttatgttgcggatgttaatttgcagcatgatgctatattttcgttttacacaggtggtgatggaatttgcgccagctttgtgttgtgtg

SEQ ID NO: 42898 - DNA, 900 bp, Zea Mays
ggcacctgcacttctccatacatgtggcttatttcaacgagtcgccagttgaggttgttaaggaacaagataaagagtttaataaactggcaactgatgccatgattccttctatgcctggacatgtggttcaagcttttacgttgctgaaatcaagcacggaggctcagagtgttgtcgcctcccttgcatcagatagaaatgtctgggatgcagtattgaagaacgagaaggttatggagttttataagactcaccagacaactctagttcagacatcccctaacgaagccgtcacagtagagttgccggggaagctggaagatgctgcctctgaaaacacatccagcggcgaactccccgctggctcaggcctgagtttctccgatttcgtggacaatgcgaagaagacagtgatggacgtggtccataacataaccgacttcttcaaggacttgttcgacgactcagccaagacccagactggggcaggcccttcagcagctgagaagggcccttctatggcagatatggctgtcggcggatccttcatggctctggccatagcggtcatcctagttgttatgttcaagagggcatgatatagccatgagtatcttctgggatccacggtgctttaaatctgtcgaaaattactcgtctatcgtttggtcaagaactcctgactgtaatgtaatgtacagcttgtgtccttgtccttggaaacagcacactaaaaggctatctatgatatacaacggtgtgtatcttggtttctcaacctctgatgtgcagacatgacaagagcgtgcaacgcgttttgatgacgtctcctagtattcctgggtcatgaaacgtcaataaatgttcttgcatgtgcaaaaaaagcaaaccatccag

SEQ ID NO: 42899 - DNA, 1412 bp, Zea Mays
accgatcaacttcaaaagatttcttctgcagtttctcaagtcgagaagctagtgggggacgacgccaccgagagggaacgcgacacgagatcgccatcgccatggggggaggagtcatgcgcaccgccgcgaaggtcagcatcgccgggggcgcggcggcggcgaaaagcggccggttccgcaacgccgctccggtcttcgccacggcccccgccgccgcgggttccgaagcggcgccgcttgtctccgtctcgagtggcgaggtgccccccgccgcggcgcagtgggcggcgtcctgggagctggacgactgggagtttgcggactggagggacgacgccgcggcggcggcggcggtagtggagagggaggcaacggcggccgccgccaagcccaggctggtcttcgcgccgccgtcgagggaggaggccgaggaggccacgaccgagctcagggacgccgtagagagggcttatttcaacgagtcgccagttgaggttgttaaggaacaagataaagagtttaataaactggcaactgatgccatgattccttctatgcctggacatgtggttcaagcttttacgttgctgaaatcaagcacggaggctcagatagaaatgtctgggatgcagtattgaagaacgagaaggttatggagttttataagactcaccagacaagtacctcatgagactttagacagttaaacttatcgtattcatcgtctctaccaacttgtttgaccattgttgatgtcctctgctatgacacagctctagttcagacatcccctaacgaagccgtcacagtagagttgccggggaagctggaagatgctgcctctgaaaacacatccagcggcgaactccccgctggctcaggcctgagtttctccgatttcgtggacaatgcgaagaagacagtgatggacgtggtccataacataaccgacttcttcaaggacttgttcgacgactcagccaagacccagactggggcaggcccttcagcagctgagaagggcccttctatggcagatatggctgtcggcggatccttcatggctctggccatagcggtcatcctagttgttatgttcaagagggcatgatatagccatgagtatcttctgggatccacggtgctttaaatctgtcgaaaattactcgtctatcgtttggtcaagaactcctgactgtaatgtaatgtacagcttgtgtccttgtccttggaaacagcacactaaaaggctatctatgatatacaacggtgtgtatcttggtttctcaacctctgatgtgcagacatgacaagagcgtgcaacgcgttttgatgacgtctcctagtattcctgggtcatgaaacgtcaataaatgttcttgcatgtgcaaaaaaagcaaaccatccag

SEQ ID NO: 42900 - DNA, 2006 bp, Zea Mays
accgatcaacttcaaaagatttcttctgcagtttctcaagtcgagaagctagtgggggacgacgccaccgagagggaacgcgacacgagatcgccatcgccatggggggaggagtcatgcgcaccgccgcgaaggtcagcatcgccgggggcgcggcggcggcgaaaagcggccggttccgcaacgccgctccggtcttcgccacggcccccgccgccgcgggttccgaagcggcgccgcttgtctccgtctcgagtggcgaggtgccccccgccgcggcgcagtgggcggcgtcctgggagctggacgactgggagtttgcggactggagggacgacgccgcggcggcggcggcggtagtggagagggaggcaacggcggccgccgccaagcccaggctggtcttcgcgccgccgtcgagggaggaggccgaggaggccacgaccgagctcagggacgccgtagagagggcttatttcaacgagtcgccagttgaggttgttaaggaacaagataaagagtttaataaactggcaactgatgccatgattccttctatgcctggacatgtggttcaagcttttacgttgctgaaatcaagcacggaggctcaggtttgtgcaatggcctatgtaaacatatcatttgagggaaattaattatttgtcaccctagtcactggcggagccacccccaggcaacgtagggcggctgccgaggcttgttggcaaagcgcaaagaaagtatttctttgtattgtagaggaatattatatctttttagataaatatttgtgcacaatgagaatcacttgggctcctaaaagtttctggctccgacattaaccctaatagatgcccactttaggggggagaatcattcatcagatacatcgacctttgtacaatgctacctagtttattgaattttgttagggtgataatgttttgccttgccaataattataatcccagaagaaactctttgattatgtttggttgatgctcctgtttgatttgcattaatgagttccgtgagcagtctttccttttcagttttcagtcacgcggttctacatatgtactccctttattcaaaattataagactgtctgacttttctagatacatagcttttgctatgtatttgtatcacatagtttatcttagttgatgatcatatagcgatacatcaatggatcacttagattaatttgttctgatatcatctgctatgtttctcactggaactgtttgttttggctcttgatctctagagtgttgtcgcctcccttgcatcagatagaaatgtctgggatgcagtattgaagaacgagaaggttatggagttttataagactcaccagacaactctagttcagacatcccctaacgaagccgtcacagtagagttgccggggaagctggaagatgctgcctctgaaaacacatccagcggcgaactccccgctggctcaggcctgagtttctccgatttcgtggacaatgcgaagaagacagtgatggacgtggtccataacataaccgacttcttcaaggacttgttcgacgactcagccaagacccagactggggcaggcccttcagcagctgagaagggcccttctatggcagatatggctgtcggcggatccttcatggctctggccatagcggtcatcctagttgttatgttcaagagggcatgatatagccatgagtatcttctgggatccacggtgctttaaatctgtcgaaaattactcgtctatcgtttggtcaagaactcctgactgtaatgtaatgtacagcttgtgtccttgtccttggaaacagcacactaaaaggctatctatgatatacaacggtgtgtatcttggtttctcaacctctgatgtgcagacatgacaagagcgtgcaacgcgttttgatgacgtctcctagtattcctgggtcatgaaacgtcaataaatgttcttgcatgtgcaaaaaaagcaaaccatccag

SEQ ID NO: 42901 - DNA, 1021 bp, Zea Mays
ctagaggtcacccgcactgctcctctctccctcatctctgaaactcgacgccaactccatggagctcgccttcctgctggccgccgctgctttgctttccatggcggcgacctccctttctgcagcaaggaagttttcccctgccccttgcttctcctatggtgagctcgttccctgccctggtgctcatggctgctatttctctggccatgtcgagccctctcccatagatgccagcgcccccctcctgctgaggccaacaccccatcccctcgcccttccctgctcgccagccatctccctggacacaccccttcccttgctacttcctatggttgccctagctgacctctctcatgacgtaggaaacagcagcacctccctccatggacgtcctaagttctcacgagaattttggaactggaccattatgaaacgtgggcttcactggattgccatcaagtgaattggtttcgcctaggtgccattatgaacaactgcatacccgctagaatgccttctggctgtttaataagaagtggatcagctttaatttaaaagtagcagctgatctgactgttttacccctgtcgatttacccgcgcctgcacccacacccacacccacgcccacggtctgcagcccccacgcgacttggagaagagcagaacctgcattggagaagagcagaactacacccacgttctgcatatgagaaaaagcaaacaataattacagacttgatacctgcactagtaccttgcaataagattacagcacaaatacctcacaataattacaacagcaccactaaccttacaatggtctgtagcagcaaaccttatacagacttgatacatgagaatcacattagaattttcacacaagcatcagatacatcagttagactcaccataataaagcatcacatcagatttacacacaagcttcagatgagaatttttcacacaaacctcacatcagatagacatggctctccatatgagaaaaggcaagtagc

SEQ ID NO: 42902 - DNA, 944 bp, Zea Mays
ataccttgttggctgtcattgtggctgacgagggagtggaggagcactgtgacccacgaggcaacgacgagggagacaatagcagcataatgcgtcttcaggtagtgcgcaggtcgagcgagcacaccacggtgccgagctcctcggcagagatgaacccagatctgagggacaggggcttgcctggagatgagaggaggggcgacgtgtgccggaacgcgaccaccgccgtgtacagggtgcggtgtgggcggaggccggggacgacgatgcggcagcatggtggagtgaggggcgtaaggtttggaggcggtgccacacggcgggcgtggtggtggtgttcttaggtcaccccttgaggaggtggggccgatggagtggcgccatcggctgtggcatcgccaaagtcgtcgcagtcgaaggactgggaagtgatgcgcgggaggtcaccgtcggaggggggaagaggtgatgaatccgagagtgggaggagatgtggcgacggggagagggaagaggcgctgaggatggggcaggcgcgtgatgaggacacgagggcggctgtcacggcgggggcaacaacctctggtgtcactgtcatcggagcaacaacctccacgcggatgggcttgctctccgacgccttacccacagccttgccttgcttcggttgagccgtcggcaccgaccggaccttctctactttcccggtgaaagcccgccgggcgcggaccgactccgtggatgcatccgaggatcaagacgcgctgagcggcaagcccggatgcgacagcggcgcgtcgttcctcctcgacggcggcccaggaggtgtgcgccgcggcgacggcaccggggatgcaaagctagggtgctcgcacggttggacgatcgggtgggggcggagcgatgcgtgggggtgagagtgcgcgcatcggatggctgag

SEQ ID NO: 42903 - DNA, 693 bp, Zea Mays
cagatgcatgtaaccgttttttctagttctctctaaatgtaaggaacacctacttcttacggtgacataatcttcaagatttatgtttcatgttgttgtgcacaaaaggaaccatgcaaattagtttcgatcaatcaaggacagatagtgactgcttcatattcagctagagaaactcgttggggctttatgacttcttagtaacactaagcaagcacatacttaacaaagggcttcatgatttgttagtaatactaagcaaacacaagtgaagcaaagggcttgacataggaggtatttgaaaaggtaaaaaggaagtcgtaagatctcacccgttttatatgaatccatagttctctgaatctgtggtccttaagatgtccgttaagcagagcacatttatagctcataaaaaagttagtgataatctgagatcgtctcttgtttccaagaatgcaggagacctggtcctctttaaaataagaagaagaaaaaacagatttagttcttagttcttacaatgtgtaatccacctcgcgaagataatttcagtctcctcagcagtgcttttcagtctcctggacaccagtcttcacggtagcagcaagtgcagcacacaacagggaaacataatgaaggagaagatcagacaaacttccaggaaaatgatacaattttaaaaatatagaggag

SEQ ID NO: 42904 - DNA, 1111 bp, Zea Mays
ccgcagtaaagaaataaaagaaaatgttgacaaagctgccatatttattgagagtaatcaaaacaaggatggatcctggtttgtatgaaaacatattctaatttgtacaggttatcggttttttccctctgtctaattgtaactaaatcagaaattacctgcaaggtatggcacttggggaatatgttttatctatgggaccctccatgcgataaatggcttagttgctgctgggagaaattatgagaacaatatttgcattcggaaagcatgtgaatttttgctctcaatacaactcaaaactggtggctgggcagagagctatcgttcctgcgaaagacaggtgagtaactgttgtatttcatttcacattcagagattagatgacgtaccttggaagtcagatacttttaggctctttatcgcaacaatgggcaaactgtcaaccatgtccaaaagctcttgtccagtcctagttattgaagaataaaccaaggaattagaattacataggaactaagtacacagcatagtggtacaattcctagttcccagttattttatttattatccgaagataatatatcattcctgactggtaacaggcatttaacaaacctgaaatttggtgttcactgattggcatttgaaaatgataaaggacaaagtaagatatatagaagatccaatatcctctcctttttgaagcttcctaatacgagtattttcttatcaaatggtgaaatataaaaccctctgatttatatggtctctacgggtacctcactattatactatatgtataggtggagacgcacccaccctttatttgcttcagactttggagacgatcgagtcagtataatactattataaaggttgttttattaattaagtcagaatgggattgcggaagaagatacgtagctgtctgacgcattgctgctactcattaattccttcccgaccaccgcttcacgcctgccgtcgtttcggacattgacagacaggctcacagccaattccgtgtgccattttatatagagccatctagttgataatttggtcaaaaccaattacctgcagggccaagaaaatgaacagaagtata

SEQ ID NO: 42905 - DNA, 1241 bp, Zea Mays
aaatgaagtaaagatatattaagaccagatgatccgtaataaaccatagatataatattataatgtttcagtgatgattatgatagtacagagataataaaataaggacaggtttgtgattgaaatagtgatgatgtgttctcagaagttatagcagaaaatagaagtatatagtgttcagaccaaatcaagcaatcattgagaaaacacttaccgagagaatgactctggttttaaatgatcccaatgacagcatctcaatcccctgagaaagtgaagtgttaaggttctagtatttcaacgaggtcctaccttgaaaggaagaaggacagatcgatctctaacagtctgacgccacgtcaaccagcagagagaattcctcaaagatcgttaacaagtcaatccatcattggatcatgcagggctgcacccatcatttgctgcaagcaaccgagctggtttggtgtgctaaaaagcccctcccagatcgattgagcagcacgcccgaccgagggggatgcaacccgattatttggtgatataatttggtttgatattgacatcctagatgtagctccaaattgttaaaatcatgattttggctcagaacatcgttctcatgaacaggagactgattatgttttgctactcggctctcacgtgccgctcagccgtcaataccattaaatatgattgtgccgttgcaacgcacgggtattgaacataaggttcaattgcatagtgatctaccatccttatggcactacctcttatgcactaatcatcctcagaaacaaacattccagtgataaacccaatacaacactacacaagagaaagttgtacaaaggccttagagcacaaaaatatggaaatttactccattccaaactatgtcattttggattttctagataatgtttttttactatgtatctaggcatgacatatatctaagtgcatggctgcatctagaaaagctaaatgacttagagagggagtaacaggaatagaaaaacagtagcatgattatacttaactacattttcatctctatttaaacattacagtcagctgtaatagaaccctgaaatcaaatatattccatttaaaggggcttaggccataaaaccaaacccaaactaatagaaagtcccctgaggaatcaaatacaatggttcggtgtcgtttcaacgatcatatagccctaggaaattaccatatcaatgttttcatgtcca

SEQ ID NO: 42906 - DNA, 2606 bp, Zea Mays
gtaaaacttctcaaattgggcccacaagctcaaacaaaattcctcccatcgaagttgctggataattctaagaaacagtacaacacctgcacatgcacgaatagaaaataagcactggttttatgtcaggatacatataaaagataagaaactaaagtcacctcaagacgtccggtgaaagagttgttaatcgatgacacaagataatataacaaacaaagagaaccaatgataaaaatttaatcaatatgaataatatcaatagtattgtgattactcgaccaaggaccttcaccaattccatgttacattacagaaattgccaaaattgcaatacctgagcatggatcatgctacataaagtccctctgcaactctaggataatgaactaaccaatgaaagcatgtttttaggcaaagaaacaacaaacaaaaggtttcatgaatataacttgacctactaatgattggccaagttggattttgagcaaaaatgatttgcatggaccagttccaataatagcaagcatctatgacctgacacaagctatagttggcttgttttttaaataacatgcaccatagaaatccttatttctgaaaatatcaaaatcattgacatgttcttatctgcctatccggattctttctataatattagaagcaagaattacatgaaaacaaacaacatattacactgacacaaaactaacctcagtgacctcttcacctttttttattcttcctcctctttagactctttagactatttagacaaggatgaagaattacattaagtataattgaaggaagctaaattacaataaactatagcaatcattacccccaaatgttcttgatttctccttccatgtatatatgagaatgacacaaattgtgagcagttcttaactaagctttcaattcttgcagggtcagtaaactcatacttgtcatcatcctaaaggaacaagaaggcaataagaattgtggtagaaggtggagatcttatagaaagtcttttaagtttcttactctcaaataaagagtagtctgtgttccacgtgtgagcactttctcaggataagtttgttccttgataacgtaagagctgtcgtcagcctccgcttcccacacatgctccactattgctaacatccacttactcccaagccaaatacaaccagggtattatgctcttaaaattctaaattttacctatacactcaaaatagaaaaccaaaaaacacaacatgattgagtatctcacacttcaataaaaggttaacatatttgtttgtgatttacaaacaaaacagatttaatgaacagggttatcatgccaaaatttgatgtgtgtgtgtgggcagtttggatgttacatggacaacgaggcatccctgaatcattattaattaacaaaaggatttgtattgcactatgccccatacatgacaaacgaagtacccacattatgctaactgggaggataagggcacacttattctagactctacattggtacaattccacatttccactgaaccagaaagttcctgactatgaagaggaaattgggagacaataataagtaaatgcagtgaatttccaccaaccaaatcttaccgaagacatttctcactacagaaacgaataggaggaaacaaagaacaatagaatccggagaaagggaaggagattcggaatgcacctgcacctgcattgccccctcccctccatcacatccctaccaatcatgtatgacaccgttgaagtaatcggttcaatctgaaaggcctgcaaacacgactaggataggtacctaaccatcagtatgtatgttacaagaagcatgtttatactccacatcaaataattataacctagtagtacatgaagagaaagtgattagttgacatacaccatgaccacttgatcattaattaggccaattcagagcacaaatattagtgggtatcaaagattagtttagagctaattgagagcacaaagattagtgggtatcaaagattagtgggccaataaaggcctgcaaacatgcgcaagaccaattcattcaacaacctcaagaatcatctatcatgaagcgtttggtttagaggatatcaaagattagttggtatcttaatagtattcccagaaaaattattcataggaaaataatcatagtcaaaaggagatatcataaggtggtgctctaaagctatttaagacaaatggaacctacccaggagtaagaaacctgcaactacaagataaaagtgaataaactgaggaataaaaagggaacatatacataaagcgaacacaaagatatggcctcgtgtaccaaacaagctggaccacatggtcacgtagcagaatccatgatggacattgttcttttgagtattcaagaagaacattgttcttgcagtacactggcttactattttgtagttatagtgaacgaaagagttaatttttgaaaaagtaaccacaaaacctaaaaagttactcccttcggtcacaacaaaaagattcattttggatatctacatggtctccgaaatcattctagtacataacataactataaaaagtac

SEQ ID NO: 42907 - DNA, 1645 bp, Zea Mays
caaaagaaaattcgctcaatcctctacttcggcatcctcctcctgatcacagcgccgtacctcccggcggcaacctgtgaacgacaacgataaatcaacaaaagctcaaaccttgagaaaaccagagctgacaactgagagatcgatggccgagagcccgagacagcttacgggaggccggcgtttcctggccgtggcggcgtcgtcttccttcaccggaaccctctggaacgcagccaggtccgtcttcctcctcgcaccggcagccgcagacccgccgcctggtgcagctcgcctcttctttcctgcctgctggctgccaccactctcctcggggtccttgagcaatgaatgagcatggagcacagtccatcaaacgtgtcgttaggcaagatcaagatgcccctactgccagtcgatctgccactactgctcagagttgaatctgaaacggctgccatacggagagtgagatcacttacggaagactcgatgggttcatcatccgagtcaagggcccgctgctcctccgtcgtcgtcgaacgcttctgcttctcaaacacgccgagtgcatcagtctgcagattctccgagcttgttctttccctggtcaggcttttcttttcctggagctgcgcaacaaggttactcggcttgtcagcttgaagaaattatcatcagttgatatcctactttttcttcagcggaaaactcgatctgtggactgtggtggtagttaatttgtgatgcatttttttttcaaccagaggttcttcagactggatagaaattgaagttcagaatgttggacagtttgaagaaacagtttgtcaaggagtttcttactatcgcttcctcgatattttgctgcacgcaagcgtgaaatgccctcttgtcgtccccctcgacaaactcatggagtgcgctgttgaaatcgtctataggaaggacctgcggtttctggaaaagcaaggatgggacgaaaaaaaagtacagaattttgcatcaaccttcatcgcgcaatcatgtagtaatcgaatggtggacgacctatgcacaaaaaagaggaaagaaagaaagaaagaaaagaaaagaaaagaagagaagagaagaagacatcttgtttgagtagtactagaaaggaaaggatcaggaggaagttgggtacaatgttactgtctgcgataagtgcttcaaccgtctgctggttgagctcatttggacaaagatcttcagaaatgttgcagctttctacaatatatagaaagaacaagttcagtagcccgcgtccgcgttgctcaactattgaactaagattggtttgctaggtaagcaatactagaaaaagatggaatgccaaatcttgtgtctagttgtattaagcagaagtgccgaccacataaggcaatacaataaaagagacagcctgaaaatacactcagcttgaatttgttaaatgtattcaaattttaaacttgcgatatagccagtattatacttttcattaaccaatctataatgttgattgttgatatgctcacaataagatagtaatatggccacgttaacaataaattgattggcaaactaaaaaagtattctaaaacagaaactcaacacaagtaccaccctggtcccatatgag

SEQ ID NO: 42908 - DNA, 1072 bp, Zea Mays
tttacaaaacgtatgcgtcacacgtttccatcggcaagcctaacatagcacattctgcatggctatagggtcccacctaacaaagtacatatttttggagattataccatcctcgtcatgtttgtgtgtgttaatgcttaattaaccgagtagcacaccacaacgatgatttatacctcattactcccgatcttagagcaaaataactatcgaccacatttggagactagaagcacataagaatctagaaatgtactttcttatttctgggacgccacaaacatcatccaaaaaacttcattattgaactataactcataagcaatctaaaagagggcaccaccaatgatgggttgttggtagaacactgttgagtttgtcaaagcaagttggttgaatggcagcaattgttgcagttgtaagagggtgccagcgttaggcgcagcgtgcaggtagaacggcaacaactgttgttgtgtcaagaaggcaacagggctcacatcagctagctggctgaatggtggtagctgttgctgttgtaaataagcagcagagttcaatgctgccagttggttgaatggaagaaattgctgggggtaggcagcagctagctgactgaatggtagttgttgttgcaaataagcagcagagttcaatgcagccagttggttgaatggaagaaactgctgttgctgagagtaggcagcaaggtttcctagcacaagttgttgtagttgttgtgccttgatgttttgtgccaacaaatgcaccaaaggtaactgctgtaatagggctgacggttgttggaggaacaagggtgataaaggtaagatgcctgctgcgattgcctgttggatcctgtagggttgaagaattgggttttcacatactgaagacaccgctggtgagaggtatgggggaagaaaggaagctataggagcttgtgagcattgtgggaaaatggttgcggtagcagcacttgcagaaagaccaaggagcataaggaagcaaaatattttggctgccattgttggtacactattgtgctttctatgttgctagttggtctcaa

SEQ ID NO: 42909 - DNA, 2016 bp, Zea Mays
atagctgcctagcctcattgggtcccatacattggaagaggcgtcttaacaacaacagcctttctggttcaattccaaaatcattaactgctatcactgcactccaagttctggatctgtcaaataacaatttgtctggagaagttccatcaactggttccttttctttattcacccctatcaggaagtagctcttctagtactggagcaattgctggtggagtggctgctggcacagccttgctatttgctgttcctgcaattagttttgcctattggcagcgcaggaaaccacaagaacatttctttgaagtacctgccgaggaagatccagaggtgcatcttggccagcttaaaagattttcactacgagaattacaagttgcaacagatggcttctgcaataagaacattcttggaagaggtggatttggcaaagtctacaaaggacggctggcagatggatctttggttgctgttaagagactaaaggaggagcgcacgcctggtggggaattacagtttcaaacagaagttgagatgattagtatggctgtacacagaaatctattgcgtcttcgtggattctgtatgacaccaacagaaaggttgcttgtgtatccatacatggctaatggaagtgttgcatcacgtttaagagaccgggcaccagctgaacctccgctagattggcaaacaaggagaaggattgctttgggttctgctaggggcctgtcttatttacatgaccattgtgacccaaagattattcatcgtgatgtcaaagctgcaaatattttgttagatgaagacttcgaggctgtggtgggggattttggtttggccaaactaatggattacaaggatacccatgtaactactgctgttcgtggaacaattgggcacattgcacctgaatacctttcaacaggaaaatcctctgagaaaactgatgtatttggctatggaattacacttttagagcttattacaggacagcgggccttcgatctagcttgccttgctaatgatgatgatgtcatgcttcttgattgggtcaagggattgctcaaggagaagaaactggagagtctggtcgaccaagatctagaacacaactacgtcgacgttgaggtggaatctctggtacaggtcgcactcctctgcactcagagcaaccccatggaacgccctaagatgtcagaggttgtgaggatgctcgaaggcgatggtctcgccgagagatgggaggagtggcagaaagcggaagtagtacggcaagaggtcgagctaggccctcatcgaacttcggaatggatcctcgacttgaccgacaacctccacgctgaacagctgtcagggccgaggtgaaggcagctttggactcactgattcttgtatcttgcaagggcaatagcgatgtgtatcaatcatcctagtcaagaatcccccatttgttcataccaatcgttgggtgaagcgaggagatgtggtcagccatgatgtgcattggatgtatgttgctgaggtgacatggctgagttcatatatgcgagggcagcagagctcgacaagctagtgtcgtgcgctgtcggtgcatgcactagtggtcctggatttgcgaaggttggaaggaactgacgcgaaccgttctgactcccctcctacaaaaggatcggatgatataggtgtgcctatggacctgttctgggtggcaaggttaatcagaagtttccgtgctgagtgttgtaattatgtctctagactgtactctgtagtggcgaacttaagagttagtttgatggacaggaaaatgaaggggattcctctcctatggatcttctctatttttctgtccaaactaaatcagccctaatgagggtgggacgttagggtggggatgtatagacgtcatgtaatggaggaggtgcatatttcttagggtacatctacacatcctaaactgaatatagcttcgcccccctatttatatcgatgatctcaattttcgtgcat

SEQ ID NO: 42910 - DNA, 2777 bp, Zea Mays
cccgtgtctcgtatcgccattctacccaaccgcaacgaaaatgagcccaggcgataaaggctgagtccgtccgtcgaaaagcgagcgcagagtgggagagagaagggggtcgattcggagagatcgagaaagaggagggaggcggagggcgacgtggcggtgggtgctgaagcggagcctgcagcgcccgctcgagtactcgccggatcgcccgacctgccggtacagcgctgcagacagcctgatccggccgatccggcgggaatggcggcgcgaggagggatctagcggaggtggtggggtcgcgcggcaatggcggaggcagagccgcggcgccggtgggcggtgtgggcgctactgctgctgctccaccccgccgcgctcgtgctcgccaacaccgaaggtgcgcggtgatgccttgcatagcttacgtaccaacttaaatgatcctaataatgttctacaaagttgggatcccactctggtcaacccctgcacttggtttcatgttacctgcaataatgacaacagtgtcatcagagttgatcttggaaatgctgcactatcaggaactttggttccgcaacttggacagctctaaaacttgcagtacctggagctctacagtaataatatcagcggaattatacctagtggatttggaaaccttacaaacttggtcagtttggatttgtacctgaacaacttcactggtccaataccagattcattggggaagctattgaagctgcggttcttgcgtcttaacaacaacagcctttctggttcaattccaaaatcattaactgctatcactgcactccaagttctggatctgtcaaataacaatttgtctggagaagttccatcaactggttccttttctttattcacccctatcaggaagtagctcttctagtactggagcaattgctggtggagtggctgctggcacagccttgctatttgctgttcctgcaattagttttgcctattggcagcgcaggaaaccacaagaacatttctttgaagtacctgccgaggaagatccagaggtgcatcttggccagcttaaaagattttcactacgagaattacaagttgcaacagatggcttctgcaataagaacattcttggaagaggtggatttggcaaagtctacaaaggacggctggcagatggatctttggttgctgttaagagactaaaggaggagcgcacgcctggtggggaattacagtttcaaacagaagttgagatgattagtatggctgtacacagaaatctattgcgtcttcgtggattctgtatgacaccaacagaaaggttgcttgtgtatccatacatggctaatggaagtgttgcatcacgtttaagagaccgggcaccagctgaacctccgctagattggcaaacaaggagaaggattgctttgggttctgctaggggcctgtcttatttacatgaccattgtgacccaaagattattcatcgtgatgtcaaagctgcaaatattttgttagatgaagacttcgaggctgtggtgggggattttggtttggccaaactaatggattacaaggatacccatgtaactactgctgttcgtggaacaattgggcacattgcacctgaatacctttcaacaggaaaatcctctgagaaaactgatgtatttggctatggaattacacttttagagcttattacaggacagcgggccttcgatctagcttgccttgctaatgatgatgatgtcatgcttcttgattgggctgacagctgaacaagtagtgacatgctcctgtccctgaaagtcaagggattgctcaaggagaagaaactggagagtctggtcgaccaagatctagaacacaactacgtcgacgttgaggtggaatctctggtacaggtcgcactcctctgcactcagagcaaccccatggaacgccctaagatgtcagaggttgtgaggatgctcgaaggcgatggtctcgccgagagatgggaggagtggcagaaagcggaagtagtacggcaagaggtcgagctaggccctcatcgaacttcggaatggatcctcgacttgaccgacaacctccacgctgaacagctgtcagggccgaggtgaaggcagctttggactcactgattcttgtatcttgcaagggcaatagcgatgtgtatcaatcatcctagtcaagaatcccccatttgttcataccaatcgttgggtgaagcgaggagatgtggtcagccatgatgtgcattggatgtatgttgctgaggtgacatggctgagttcatatatgcgagggcagcagagctcgacaagctagtgtcgtgcgctgtcggtgcatgcactagtggtcctggatttgcgaaggttggaaggaactgacgcgaaccgttctgactcccctcctacaaaaggatcggatgatataggtgtgcctatggacctgttctgggtggcaaggttaatcagaagtttccgtgctgagtgttgtaattatgtctctagactgtactctgtagtggcgaacttaagagttagtttgatggacaggaaaatgaaggggattcctctcctatggatcttctctatttttctgtccaaactaaatcagccctaatgagggtgggacgttagggtggggatgtatagacgtcatgtaatggaggaggtgcatatttcttagggtacatctacacatcctaaactgaatatagcttcgcccccctatttatatcgatgatctcaattttcgtgcat

SEQ ID NO: 42911 - DNA, 2728 bp, Zea Mays
cccgtgtctcgtatcgccattctacccaaccgcaacgaaaatgagcccaggcgataaaggctgagtccgtccgtcgaaaagcgagcgcagagtgggagagagaagggggtcgattcggagagatcgagaaagaggagggaggcggagggcgacgtggcggtgggtgctgaagcggagcctgcagcgcccgctcgagtactcgccggatcgcccgacctgccggtacagcgctgcagacagcctgatccggccgatccggcgggaatggcggcgcgaggagggatctagcggaggtggtggggtcgcgcggcaatggcggaggcagagccgcggcgccggtgggcggtgtgggcgctactgctgctgctccaccccgccgcgctcgtgctcgccaacaccgaaggtgatgccttgcatagcttacgtaccaacttaaatgatcctaataatgttctacaaagttgggatcccactctggtcaacccctgcacttggtttcatgttacctgcaataatgacaacagtgtcatcagagttgatcttggaaatgctgcactatcaggaactttggttccgcaacttggacagctctaaaacttgcagtacctggagctctacagtaataatatcagcggaattatacctagtggatttggaaaccttacaaacttggtcagtttggatttgtacctgaacaacttcactggtccaataccagattcattggggaagctattgaagctgcggttcttgcgtcttaacaacaacagcctttctggttcaattccaaaatcattaactgctatcactgcactccaagttctggatctgtcaaataacaatttgtctggagaagttccatcaactggttccttttctttattcacccctatcaggaagtagctcttctagtactggagcaattgctggtggagtggctgctggcacagccttgctatttgctgttcctgcaattagttttgcctattggcagcgcaggaaaccacaagaacatttctttgaagtacctgccgaggaagatccagaggtgcatcttggccagcttaaaagattttcactacgagaattacaagttgcaacagatggcttctgcaataagaacattcttggaagaggtggatttggcaaagtctacaaaggacggctggcagatggatctttggttgctgttaagagactaaaggaggagcgcacgcctggtggggaattacagtttcaaacagaagttgagatgattagtatggctgtacacagaaatctattgcgtcttcgtggattctgtatgacaccaacagaaaggttgcttgtgtatccatacatggctaatggaagtgttgcatcacgtttaagagaccgggcaccagctgaacctccgctagattggcaaacaaggagaaggattgctttgggttctgctaggggcctgtcttatttacatgaccattgtgacccaaagattattcatcgtgatgtcaaagctgcaaatattttgttagatgaagacttcgaggctgtggtgggggattttggtttggccaaactaatggattacaaggatacccatgtaactactgctgttcgtggaacaattgggcacattgcacctgaatacctttcaacaggaaaatcctctgagaaaactgatgtatttggctatggaattacacttttagagcttattacaggacagcgggccttcgatctagcttgccttgctaatgatgatgatgtcatgcttcttgattgggtcaagggattgctcaaggagaagaaactggagagtctggtcgaccaagatctagaacacaactacgtcgacgttgaggtggaatctctggtacaggtcgcactcctctgcactcagagcaaccccatggaacgccctaagatgtcagaggttgtgaggatgctcgaaggcgatggtctcgccgagagatgggaggagtggcagaaagcggaagtagtacggcaagaggtcgagctaggccctcatcgaacttcggaatggatcctcgacttgaccgacaacctccacgctgaacagctgtcagggccgaggtgaaggcagctttggactcactgattcttgtatcttgcaagggcaatagcgatgtgtatcaatcatcctagtcaagaatcccccatttgttcataccaatcgttgggtgaagcgaggagatgtggtcagccatgatgtgcattggatgtatgttgctgaggtgacatggctgagttcatatatgcgagggcagcagagctcgacaagctagtgtcgtgcgctgtcggtgcatgcactagtggtcctggatttgcgaaggttggaaggaactgacgcgaaccgttctgactcccctcctacaaaaggatcggatgatataggtgtgcctatggacctgttctgggtggcaaggttaatcagaagtttccgtgctgagtgttgtaattatgtctctagactgtactctgtagtggcgaacttaagagttagtttgatggacaggaaaatgaaggggattcctctcctatggatcttctctatttttctgtccaaactaaatcagccctaatgagggtgggacgttagggtggggatgtatagacgtcatgtaatggaggaggtgcatatttcttagggtacatctacacatcctaaactgaatatagcttcgcccccctatttatatcgatgatctcaattttcgtgcat

SEQ ID NO: 42912 - DNA, 3378 bp, Zea Mays
cccgtgtctcgtatcgccattctacccaaccgcaacgaaaatgagcccaggcgataaaggctgagtccgtccgtcgaaaagcgagcgcagagtgggagagagaagggggtcgattcggagagatcgagaaagaggagggaggcggagggcgacgtggcggtgggtgctgaagcggagcctgcagcgcccgctcgagtactcgccggatcgcccgacctgccggtacagcgctgcagacagcctgatccggccgatccggcgggaatggcggcgcgaggagggatctagcggaggtggtggggtcgcgcggcaatggcggaggcagagccgcggcgccggtgggcggtgtgggcgctactgctgctgctccaccccgccgcgctcgtgctcgccaacaccgaaggtgatgccttgcatagcttacgtaccaacttaaatgatcctaataatgttctacaaagttgggatcccactctggtcaacccctgcacttggtttcatgttacctgcaataatgacaacagtgtcatcagagttgatcttggaaatgctgcactatcaggaactttggttccgcaacttggacagctctaaaacttgcagtacctggagctctacagtaataatatcagcggaattatacctagtggatttggaaaccttacaaacttggtcagtttggatttgtacctgaacaacttcactggtccaataccagattcattggggaagctattgaagctgcggttcttgtaagatatctgaagacatccacattgattttccctactatttacagtagagtaaaacctgttaagagtaggaatcacgcacactgaatctgtctgtcatcattggttgcttcatcccatcttttgtattgaccaagggagatcttctatgacattgagatttcactaggccacatacatggtagctgctttgttaaaatcatgattttgttcttatgaatgcagttactttgttaataaaaggttaaagaaaatagctgcctagcctcattgggtcccatacattggaagaggtaagattttccaggacagagttgctattgatggtagcgttgagtgattccttgtgttcaaaagtgactcttgacgtatgtatattgtataattagattattcatatccagcaatctgtttttgatgttttaaggtgtctatctctatcatggtgttaggtttttaacttattatagtttctaagttttctcattttttatgaaattacctgtggatgtttctaatttgacacatctttgaacttttgtgcggggcataggcgtcttaacaacaacagcctttctggttcaattccaaaatcattaactgctatcactgcactccaagttctggatctgtcaaataacaatttgtctggagaagttccatcaactggttccttttctttattcacccctatcaggaagtagctcttctagtactggagcaattgctggtggagtggctgctggcacagccttgctatttgctgttcctgcaattagttttgcctattggcagcgcaggaaaccacaagaacatttctttgaagtacctgccgaggaagatccagaggtgcatcttggccagcttaaaagattttcactacgagaattacaagttgcaacagatggcttctgcaataagaacattcttggaagaggtggatttggcaaagtctacaaaggacggctggcagatggatctttggttgctgttaagagactaaaggaggagcgcacgcctggtggggaattacagtttcaaacagaagttgagatgattagtatggctgtacacagaaatctattgcgtcttcgtggattctgtatgacaccaacagaaaggttgcttgtgtatccatacatggctaatggaagtgttgcatcacgtttaagagaccgggcaccagctgaacctccgctagattggcaaacaaggagaaggattgctttgggttctgctaggggcctgtcttatttacatgaccattgtgacccaaagattattcatcgtgatgtcaaagctgcaaatattttgttagatgaagacttcgaggctgtggtgggggattttggtttggccaaactaatggattacaaggatacccatgtaactactgctgttcgtggaacaattgggcacattgcacctgaatacctttcaacaggaaaatcctctgagaaaactgatgtatttggctatggaattacacttttagagcttattacaggacagcgggccttcgatctagcttgccttgctaatgatgatgatgtcatgcttcttgattgggtcaagggattgctcaaggagaagaaactggagagtctggtcgaccaagatctagaacacaactacgtcgacgttgaggtggaatctctggtacaggtcgcactcctctgcactcagagcaaccccatggaacgccctaagatgtcagaggttgtgaggatgctcgaaggcgatggtctcgccgagagatgggaggagtggcagaaagcggaagtagtacggcaagaggtcgagctaggccctcatcgaacttcggaatggatcctcgacttgaccgacaacctccacgctgaacagctgtcagggccgaggtgaaggcagctttggactcactgattcttgtatcttgcaagggcaatagcgatgtgtatcaatcatcctagtcaagaatcccccatttgttcataccaatcgttgggtgaagcgaggagatgtggtcagccatgatgtgcattggatgtatgttgctgaggtgacatggctgagttcatatatgcgagggcagcagagctcgacaagctagtgtcgtgcgctgtcggtgcatgcactagtggtcctggatttgcgaaggtagggggagctaaggtgctgtggctgtcatctgggtctgcgataagttaattgtactgacagttgacatctaactattttgtgtatctaatgtaaggttggaaggaactgacgcgaaccgttctgactcccctcctacaaaaggatcggatgatataggtgtgcctatggacctgttctgggtggcaaggttaatcagaagtttccgtgctgagtgttgtaattatgtctctagactgtactctgtagtggcgaacttaagagttagtttgatggacaggaaaatgaaggggattcctctcctatggatcttctctatttttctgtccaaactaaatcagccctaatgagggtgggacgttagggtggggatgtatagacgtcatgtaatggaggaggtgcatatttcttagggtacatctacacatcctaaactgaatatagcttcgcccccctatttatatcgatgatctcaattttcgtgcat

SEQ ID NO: 42913 - DNA, 2735 bp, Zea Mays
cccgtgtctcgtatcgccattctacccaaccgcaacgaaaatgagcccaggcgataaaggctgagtccgtccgtcgaaaagcgagcgcagagtgggagagagaagggggtcgattcggagagatcgagaaagaggagggaggcggagggcgacgtggcggtgggtgctgaagcggagcctgcagcgcccgctcgagtactcgccggatcgcccgacctgccggtacagcgctgcagacagcctgatccggccgatccggcgggaatggcggcgcgaggagggatctagcggaggtggtggggtcgcgcggcaatggcggaggcagagccgcggcgccggtgggcggtgtgggcgctactgctgctgctccaccccgccgcgctcgtgctcgccaacaccgaaggtgcgcggtgatgccttgcatagcttacgtaccaacttaaatgatcctaataatgttctacaaagttgggatcccactctggtcaacccctgcacttggtttcatgttacctgcaataatgacaacagtgtcatcagagttgatcttggaaatgctgcactatcaggaactttggttccgcaacttggacagctctaaaacttgcagtacctggagctctacagtaataatatcagcggaattatacctagtggatttggaaaccttacaaacttggtcagtttggatttgtacctgaacaacttcactggtccaataccagattcattggggaagctattgaagctgcggttcttgcgtcttaacaacaacagcctttctggttcaattccaaaatcattaactgctatcactgcactccaagttctggatctgtcaaataacaatttgtctggagaagttccatcaactggttccttttctttattcacccctatcaggaagtagctcttctagtactggagcaattgctggtggagtggctgctggcacagccttgctatttgctgttcctgcaattagttttgcctattggcagcgcaggaaaccacaagaacatttctttgaagtacctgccgaggaagatccagaggtgcatcttggccagcttaaaagattttcactacgagaattacaagttgcaacagatggcttctgcaataagaacattcttggaagaggtggatttggcaaagtctacaaaggacggctggcagatggatctttggttgctgttaagagactaaaggaggagcgcacgcctggtggggaattacagtttcaaacagaagttgagatgattagtatggctgtacacagaaatctattgcgtcttcgtggattctgtatgacaccaacagaaaggttgcttgtgtatccatacatggctaatggaagtgttgcatcacgtttaagagaccgggcaccagctgaacctccgctagattggcaaacaaggagaaggattgctttgggttctgctaggggcctgtcttatttacatgaccattgtgacccaaagattattcatcgtgatgtcaaagctgcaaatattttgttagatgaagacttcgaggctgtggtgggggattttggtttggccaaactaatggattacaaggatacccatgtaactactgctgttcgtggaacaattgggcacattgcacctgaatacctttcaacaggaaaatcctctgagaaaactgatgtatttggctatggaattacacttttagagcttattacaggacagcgggccttcgatctagcttgccttgctaatgatgatgatgtcatgcttcttgattgggtcaagggattgctcaaggagaagaaactggagagtctggtcgaccaagatctagaacacaactacgtcgacgttgaggtggaatctctggtacaggtcgcactcctctgcactcagagcaaccccatggaacgccctaagatgtcagaggttgtgaggatgctcgaaggcgatggtctcgccgagagatgggaggagtggcagaaagcggaagtagtacggcaagaggtcgagctaggccctcatcgaacttcggaatggatcctcgacttgaccgacaacctccacgctgaacagctgtcagggccgaggtgaaggcagctttggactcactgattcttgtatcttgcaagggcaatagcgatgtgtatcaatcatcctagtcaagaatcccccatttgttcataccaatcgttgggtgaagcgaggagatgtggtcagccatgatgtgcattggatgtatgttgctgaggtgacatggctgagttcatatatgcgagggcagcagagctcgacaagctagtgtcgtgcgctgtcggtgcatgcactagtggtcctggatttgcgaaggttggaaggaactgacgcgaaccgttctgactcccctcctacaaaaggatcggatgatataggtgtgcctatggacctgttctgggtggcaaggttaatcagaagtttccgtgctgagtgttgtaattatgtctctagactgtactctgtagtggcgaacttaagagttagtttgatggacaggaaaatgaaggggattcctctcctatggatcttctctatttttctgtccaaactaaatcagccctaatgagggtgggacgttagggtggggatgtatagacgtcatgtaatggaggaggtgcatatttcttagggtacatctacacatcctaaactgaatatagcttcgcccccctatttatatcgatgatctcaattttcgtgcat

SEQ ID NO: 42914 - DNA, 3181 bp, Zea Mays
cccgtgtctcgtatcgccattctacccaaccgcaacgaaaatgagcccaggcgataaaggctgagtccgtccgtcgaaaagcgagcgcagagtgggagagagaagggggtcgattcggagagatcgagaaagaggagggaggcggagggcgacgtggcggtgggtgctgaagcggagcctgcagcgcccgctcgagtactcgccggatcgcccgacctgccggtacagcgctgcagacagcctgatccggccgatccggcgggaatggcggcgcgaggagggatctagcggaggtggtggggtcgcgcggcaatggcggaggcagagccgcggcgccggtgggcggtgtgggcgctactgctgctgctccaccccgccgcgctcgtgctcgccaacaccgaaggtgatgccttgcatagcttacgtaccaacttaaatgatcctaataatgttctacaaagttgggatcccactctggtcaacccctgcacttggtttcatgttacctgcaataatgacaacagtgtcatcagagttgatcttggaaatgctgcactatcaggaactttggttccgcaacttggacagctctaaaacttgcagtacctggagctctacagtaataatatcagcggaattatacctagtggatttggaaaccttacaaacttggtcagtttggatttgtacctgaacaacttcactggtccaataccagattcattggggaagctattgaagctgcggttcttgcgtcttaacaacaacagcctttctggttcaattccaaaatcattaactgctatcactgcactccaagttctggatctgtcaaataacaatttgtctggagaagttccatcaactggttccttttctttattcacccctatcagttttgcgaacaaccctaacttatgtggtcctggcaccacaaaaccttgtcctggtgctcctcccttttctccacctccatacaaccctacaccccctgtgcaatcaccaggaagtagctcttctagtactggagcaattgctggtggagtggctgctggcacagccttgctatttgctgttcctgcaattagttttgcctattggcagcgcaggaaaccacaagaacatttctttgaagtacctgccgaggaagatccagaggtgcatcttggccagcttaaaagattttcactacgagaattacaagttgcaacagatggcttctgcaataagaacattcttggaagaggtggatttggcaaagtctacaaaggacggctggcagatggatctttggttgctgttaagagactaaaggaggagcgcacgcctggtggggaattacagtttcaaacagaagttgagatgattagtatggctgtacacagaaatctattgcgtcttcgtggattctgtatgacaccaacagaaaggttgcttgtgtatccatacatggctaatggaagtgttgcatcacgtttaagagaccgggcaccagctgaacctccgctagattggcaaacaaggagaaggattgctttgggttctgctaggggcctgtcttatttacatgaccattgtgacccaaagattattcatcgtgatgtcaaagctgcaaatattttgttagatgaagacttcgaggctgtggtgggggattttggtttggccaaactaatggattacaaggatacccatgtaactactgctgttcgtggaacaattgggcacattgcacctgaatacctttcaacaggaaaatcctctgagaaaactgatgtatttggctatggaattacacttttagagcttattacaggacagcgggccttcgatctagcttgccttgctaatgatgatgatgtcatgcttcttgattgggtaattaactatgccatttcctctgttcaaattgcaacttaaatgttcatgccttttttgtggcttccatactgtgtaggggttggtggtcaatttttcctatgtaaccgttaaaaaacttgctaatcatttgatccaatgacaaagagcttttgataatgtctaaggaataaatattttaactgaattggtgcattgtgataggctgacagctgaacaagtagtgacatgctcctgtccctgaaagtcaagggattgctcaaggagaagaaactggagagtctggtcgaccaagatctagaacacaactacgtcgacgttgaggtggaatctctggtacaggtcgcactcctctgcactcagagcaaccccatggaacgccctaagatgtcagaggttgtgaggatgctcgaaggcgatggtctcgccgagagatgggaggagtggcagaaagcggaagtagtacggcaagaggtcgagctaggccctcatcgaacttcggaatggatcctcgacttgaccgacaacctccacgctgaacagctgtcagggccgaggtgaaggcagctttggactcactgattcttgtatcttgcaagggcaatagcgatgtgtatcaatcatcctagtcaagaatcccccatttgttcataccaatcgttgggtgaagcgaggagatgtggtcagccatgatgtgcattggatgtatgttgctgaggtgacatggctgagttcatatatgcgagggcagcagagctcgacaagctagtgtcgtgcgctgtcggtgcatgcactagtggtcctggatttgcgaaggtagggggagctaaggtgctgtggctgtcatctgggtctgcgataagttaattgtactgacagttgacatctaactattttgtgtatctaatgtaaggttggaaggaactgacgcgaaccgttctgactcccctcctacaaaaggatcggatgatataggtgtgcctatggacctgttctgggtggcaaggttaatcagaagtttccgtgctgagtgttgtaattatgtctctagactgtactctgtagtggcgaacttaagagttagtttgatggacaggaaaatgaaggggattcctctcctatggatcttctctatttttctgtccaaactaaatcagccctaatgagggtgggacgttagggtggggatgtatagacgtcatgtaatggaggaggtgcatatttcttagggtacatctacacatcctaaactgaatatagcttcgcccccctatttatatcgatgatctcaattttcgtgcat

SEQ ID NO: 42915 - DNA, 2937 bp, Zea Mays
cacccgtgtctcgtatcgccattctacccaaccgcaacgaaaatgagcccaggcgataaaggctgagtccgtccgtcgaaaagcgagcgcagagtgggagagagaagggggtcgattcggagagatcgagaaagaggagggaggcggagggcgacgtggcggtgggtgctgaagcggagcctgcagcgcccgctcgagtactcgccggatcgcccgacctgccggtacagcgctgcagacagcctgatccggccgatccggcgggaatggcggcgcgaggagggatctagcggaggtggtggggtcgcgcggcaatggcggaggcagagccgcggcgccggtgggcggtgtgggcgctactgctgctgctccaccccgccgcgctcgtgctcgccaacaccgaaggtgatgccttgcatagcttacgtaccaacttaaatgatcctaataatgttctacaaagttgggatcccactctggtcaacccctgcacttggtttcatgttacctgcaataatgacaacagtgtcatcagagttgatcttggaaatgctgcactatcaggaactttggttccgcaacttggacagctctaaaacttgcagtacctggagctctacagtaataatatcagcggaattatacctagtggatttggaaaccttacaaacttggtcagtttggatttgtacctgaacaacttcactggtccaataccagattcattggggaagctattgaagctgcggttcttttactttgttaataaaaggttaaagaaaatagctgcctagcctcattgggtcccatacattggaagaggcgtcttaacaacaacagcctttctggttcaattccaaaatcattaactgctatcactgcactccaagttctggatctgtcaaataacaatttgtctggagaagttccatcaactggttccttttctttattcacccctatcaggaagtagctcttctagtactggagcaattgctggtggagtggctgctggcacagccttgctatttgctgttcctgcaattagttttgcctattggcagcgcaggaaaccacaagaacatttctttgaagtacctgccgaggaagatccagaggtgcatcttggccagcttaaaagattttcactacgagaattacaagttgcaacagatggcttctgcaataagaacattcttggaagaggtggatttggcaaagtctacaaaggacggctggcagatggatctttggttgctgttaagagactaaaggaggagcgcacgcctggtggggaattacagtttcaaacagaagttgagatgattagtatggctgtacacagaaatctattgcgtcttcgtggattctgtatgacaccaacagaaaggttgcttgtgtatccatacatggctaatggaagtgttgcatcacgtttaagagaccgggcaccagctgaacctccgctagattggcaaacaaggagaaggattgctttgggttctgctaggggcctgtcttatttacatgaccattgtgacccaaagattattcatcgtgatgtcaaagctgcaaatattttgttagatgaagacttcgaggctgtggtgggggattttggtttggccaaactaatggattacaaggatacccatgtaactactgctgttcgtggaacaattgggcacattgcacctgaatacctttcaacaggaaaatcctctgagaaaactgatgtatttggctatggaattacacttttagagcttattacaggacagcgggccttcgatctagcttgccttgctaatgatgatgatgtcatgcttcttgattgggctgacagctgaacaagtagtgacatgctcctgtccctgaaagtcaagggattgctcaaggagaagaaactggagagtctggtcgaccaagatctagaacacaactacgtcgacgttgaggtggaatctctggtacaggtcgcactcctctgcactcagagcaaccccatggaacgccctaagatgtcagaggttgtgaggatgctcgaaggcgatggtctcgccgagagatgggaggagtggcagaaagcggaagtagtacggcaagaggtcgagctaggccctcatcgaacttcggaatggatcctcgacttgaccgacaacctccacgctgaacagctgtcagggccgaggtgaaggcagctttggactcactgattcttgtatcttgcaagggcaatagcgatgtgtatcaatcatcctagtcaagaatcccccatttgttcataccaatcgttgggtgaagcgaggagatgtggtcagccatgatgtgcattggatgtatgttgctgaggtgacatggctgagttcatatatgcgagggcagcagagctcgacaagctagtgtcgtgcgctgtcggtgcatgcactagtggtcctggatttgcgaaggtagggggagctaaggtgctgtggctgtcatctgggtctgcgataagttaattgtactgacagttgacatctaactattttgtgtatctaatgtaaggttggaaggaactgacgcgaaccgttctgactcccctcctacaaaaggatcggatgatataggtgtgcctatggacctgttctgggtggcaaggttaatcagaagtttccgtgctgagtgttgtaattatgtctctagactgtactctgtagtggcgaacttaagagttagtttgatggacaggaaaatgaaggggattcctctcctatggatcttctctatttttctgtccaaactaaatcagccctaatgagggtgggacgttagggtggggatgtatagacgtcatgtaatggaggaggtgcatatttcttagggtacatctacacatcctaaactgaatatagcttcgcccccctatttatatcgatgatctcaattttcgtgcat

SEQ ID NO: 42916 - DNA, 2775 bp, Zea Mays
caccacccgtgtctcgtatcgccattctacccaaccgcaacgaaaatgagcccaggcgataaaggctgagtccgtccgtcgaaaagcgagcgcagagtgggagagagaagggggtcgattcggagagatcgagaaagaggagggaggcggagggcgacgtggcggtgggtgctgaagcggagcctgcagcgcccgctcgagtactcgccggatcgcccgacctgccggtacagcgctgcagacagcctgatccggccgatccggcgggaatggcggcgcgaggagggatctagcggaggtggtggggtcgcgcggcaatggcggaggcagagccgcggcgccggtgggcggtgtgggcgctactgctgctgctccaccccgccgcgctcgtgctcgccaacaccgaaggtgatgccttgcatagcttacgtaccaacttaaatgatcctaataatgttctacaaagttgggatcccactctggtcaacccctgcacttggtttcatgttacctgcaataatgacaacagtgtcatcagagttgatcttggaaatgctgcactatcaggaactttggttccgcaacttggacagctctaaaacttgcagtacctggagctctacagtaataatatcagcggaattatacctagtggatttggaaaccttacaaacttggtcagtttggatttgtacctgaacaacttcactggtccaataccagattcattggggaagctattgaagctgcggttcttgcgtcttaacaacaacagcctttctggttcaattccaaaatcattaactgctatcactgcactccaagttctggatctgtcaaataacaatttgtctggagaagttccatcaactggttccttttctttattcacccctatcaggaagtagctcttctagtactggagcaattgctggtggagtggctgctggcacagccttgctatttgctgttcctgcaattagttttgcctattggcagcgcaggaaaccacaagaacatttctttgaagtacctgccgaggaagatccagaggtgcatcttggccagcttaaaagattttcactacgagaattacaagttgcaacagatggcttctgcaataagaacattcttggaagaggtggatttggcaaagtctacaaaggacggctggcagatggatctttggttgctgttaagagactaaaggaggagcgcacgcctggtggggaattacagtttcaaacagaagttgagatgattagtatggctgtacacagaaatctattgcgtcttcgtggattctgtatgacaccaacagaaaggttgcttgtgtatccatacatggctaatggaagtgttgcatcacgtttaagagaccgggcaccagctgaacctccgctagattggcaaacaaggagaaggattgctttgggttctgctaggggcctgtcttatttacatgaccattgtgacccaaagattattcatcgtgatgtcaaagctgcaaatattttgttagatgaagacttcgaggctgtggtgggggattttggtttggccaaactaatggattacaaggatacccatgtaactactgctgttcgtggaacaattgggcacattgcacctgaatacctttcaacaggaaaatcctctgagaaaactgatgtatttggctatggaattacacttttagagcttattacaggacagcgggccttcgatctagcttgccttgctaatgatgatgatgtcatgcttcttgattgggctgacagctgaacaagtagtgacatgctcctgtccctgaaagtcaagggattgctcaaggagaagaaactggagagtctggtcgaccaagatctagaacacaactacgtcgacgttgaggtggaatctctggtacaggtcgcactcctctgcactcagagcaaccccatggaacgccctaagatgtcagaggttgtgaggatgctcgaaggcgatggtctcgccgagagatgggaggagtggcagaaagcggaagtagtacggcaagaggtcgagctaggccctcatcgaacttcggaatggatcctcgacttgaccgacaacctccacgctgaacagctgtcagggccgaggtgaaggcagctttggactcactgattcttgtatcttgcaagggcaatagcgatgtgtatcaatcatcctagtcaagaatcccccatttgttcataccaatcgttgggtgaagcgaggagatgtggtcagccatgatgtgcattggatgtatgttgctgaggtgacatggctgagttcatatatgcgagggcagcagagctcgacaagctagtgtcgtgcgctgtcggtgcatgcactagtggtcctggatttgcgaaggttggaaggaactgacgcgaaccgttctgactcccctcctacaaaaggatcggatgatataggtgtgcctatggacctgttctgggtggcaaggttaatcagaagtttccgtgctgagtgttgtaattatgtctctagactgtactctgtagtggcgaacttaagagttagtttgatggacaggaaaatgaaggggattcctctcctatggatcttctctatttttctgtccaaactaaatcagccctaatgagggtgggacgttagggtggggatgtatagacgtcatgtaatggaggaggtgcatatttcttagggtacatctacacatcctaaactgaatatagcttcgcccccctatttatatcgatgatctcaattttcgtgcat

SEQ ID NO: 42917 - DNA, 1395 bp, Zea Mays
caccaggggaaaaagtaaagagataaacggatagaacaggcgtggagcgcgcgaccccgtacgtctccaccgctgcaggaactccccccctccccggcggcccgcgcgcccaccaaccatggcagtcgcagccgccgcccaccacctgcccgttgtgccgcaccgccttgtcccggtccggcacaccagtagcagcccgccgccgcatccggcctcccgctgctccgccgcggggaagccgcccgtccagctccacgcggcgcaagcgagggcgtctgggttcgccgcgcgcgtcgcgttcaacccttccgggaactacgacctgtccctctccatgggcgaagacgagaccccgcaggtccagcctccgccgccgcctacccaagggcgcttcgaaatcgttatcaacaacgacaacatccgaacgctcgacctatcgccagtcgaagcagcactcggcgacttgagctccttgacaccagctgcttcaagaaccctgctggaccagaccgtcgggttcaccatcagctacgagagggaggacgagtacgacacgcgggagctgtcggagttccccgacatacggctgtggttcgtgaggctcgacgccgcgtacccttggttcccggtcgtgctcgactggagagccggcgagcttgccagatacgccgcgatgctcgtccctcaccaatgagcatgcggatgggcgtcgtcttcaacccggaggcgctggagctgttcgtgatgaagaaggtgttcgccgtcgacgcttggctgaagcagcagagccatcccaaaccgaggctgaagacggcggacatggcaaggatgctcggcttcggcgtcggagatgagctgttcgacctgatcgagaagtaccctgtccatcgttcgtgataaaaaaataattaaacaacaaagctgagaatagggatccgatcccacacacagaagaatcagtcgtctggtcggtgctgctgcctgctgctcataccatacccacacccttgaagtagaaactaaggcacgtttgctttgctccaggagaccaggagcgctctgatgttgtcgtgttcctcgcgtcgccttctcggcctgttgtactcagtagcgccgcagagtctctagcatgagacgacctcgaggagtctatgttgtcgtctatggatggaacagtcagcatagaccaaggccgtgacctttcctccggtgctagccctttcgcatgtatcggataaatttggttctgctaatcactaccaaaatttagctctttgccgagtgtcatattctttgccgattgtttttttttgcactcggcaaagaagctctttgccgagtgccacgcaaaaaactctcggtaaaagaaaacactcggtgaagaagctctttgtc

SEQ ID NO: 42918 - DNA, 3073 bp, Zea Mays
aaagggtgaaaaaatgaagcgaaagtaacgcaaaggagccgctgtcggtagcagccgccgccgctggtagagcttaaacagcctcaaggatccagagtttgctaggggtcggagtgccggagccagagccacgcgggagtttgagctggattggttcttcaattgagcgtggcggccggcgtcaggtagaagtttccatggttcttggtttgttgttggagtgtaggagataacacggggaaggagattgcgggagggtaacggaggtcggggagctggcggcgggccacgggatgatggagccccaagtggtggacctcgaggatgacagcatcaacttctgggcctccctcggcgtcagcccccacgtggaccagatgccgctgcacagcgtccatattgtcgaccaccaagctcagtcagcgctggcagctgcggctgcggcgatacagccgcagtccgtctgcagggacctcttcccggtggagtccgacgcctgcctggagcctcggctggggatggagtttgagtccggtgaggctgccaagaccttctacattgcctatgctggccgtgttggtttctctgttcgcattgcccggtcacgcaagtctaagtgcagtgagtccataatcatgctaagatttgtgtgctcaagggaagggttcagtaaggagaaacgtgtggtcacagctgggaagaagacgaggaagcgccctgcctccatcagggagggttgcaatgccatgctcgaagtgctccgcagaggtgatagcaagtggattgtcaccaagcttgtcaaggagcacaatcatgaggtcgggttgcccagtcgagtgcagtatattgccatcgagagtgatactgtggttgacccttacattggtatggaattcgagtcccttgagtctgccaagacattctactactcgtatgccagccgtgtgggatttgaagctcgtgtacgccagtcccgcaagtcacaggatgagtcactcaagatgctgaagcttgtgtgctcaaggcatcggtaccattctggacgggagagcaatggagaggataccaagagagtacgtgcgatggacccctcgagggatggttgtgatgcattgtttgagataattcggaagggaaaagacacctggacagtctccaaactcatcctagagcatacccatgagctgaaaccagcaccagcaagtagagttcactgtgttcgctcgcaaggtgaggtacttgtcattgcaaataacttttctgacactcgtaatctccttctgaatggccaagattctcagcatccaagagaggtgaggtataatgatttagggccagaggatgctcaaagcttatttgaataccttaagaagagacaggaagaggacccttcatttttctatgctgtgcagtatgaaaagaatgggcactccaccaatatcttctgggctgatgctaaggctaggatggcttactaccattttggtgatgctgttaggtttgagacaacgtatcggaaaaacaaggagactatccctattgtcatattctcaggtgttaatcatcatgtgcagcctgttgtttttggctgcgcactacttcttgacgagtcagaagcatcatttacatggttgtttgagaaatggcttgaagcaatgcacatgggtccacctgtttctttgctaacagagttgaaccgaggaatggcagctgctgttgccaaggtattgcccaatacccaccatattttctgtgaaaggcatatcttagacacaatgaaggaggatctacatggtacgtttccggatccagtggctttagtaactgatctaaggaagtgcattgatgggtccagaatagaagaactgtttgactcaggttggaactcggtcatcataaagcatgaactcagcaacaatgagcttttacagtctctctatgatattcgccaacgatgggccccagcatacacgaaaaatgtattttatcccagaaatctgatgccaacaacctttggaagtattgagaaggctattcagaagtacttttcgtccaagactgaattgcgggtggctgtttgtcaacttggacaagtaatttctagttcatttgaagctgaagttcaggcagattatttcacaatgtttcaaatgccagcgttgagtacagcctcaccagtagaaaaacaagggagttcaatattcactagcacaatttttggcttatttcaggggcaatttgttgattcttttgggtaccacgcagagagacttgaggatgacacagtacacaagtatcgtgttaacagatatgaaggtgatgaggagatacatactgtctatttcaatcctgatcaaggtacggtgaattgtagttgctgcctgtttgagagctgtggtatcttgtgcagacacgctcttcggattttcattatcgaaggagtacatgaccttccaaaggcttatattctgaaacgttggacaaagcatgcaaaaaatattgacacctctgataattacattgatctgaggggggaccgtgatgatccttcaactgcaaggttcaatgatctcttctgtcatgtggtaaaatttgcaaaagaaggttcaaaatctgctgaaatctatgcagtcgctaaagattcactgtccaaggcttttgatgaggtagttcagtcatcgaagaacttcagagggcagcaaaatctgcaaagctatacaatgtcactgaaaaggtcaatcaagaagtttggtaagggcagagattcctccgataaaagctcaaagaggtcagcatctaaacatcccctaatggagtgtgatgatgtagatgaccaaatatattgaatttgggaacaatatgattttacctgtcataccttgtgtgtagcatcatgcaatctaatagtaccaattagattgtagctgactgcagaatttggttattaacagatctagtaactgtaagggttctagtgaacccctaacattcagagattaacgctcaaaagagttgtagaaagatgccttttttgaaacatttataaatactactgcagatagaccatttcttt

SEQ ID NO: 42919 - DNA, 1414 bp, Zea Mays
gcatgagatgtgtcgaccgattgaaatgtatctggggtggtctgatagggctactccgagggatcgaaaaatttgatgcatcgaggggattcaggatttccacctatgtgtattggtggattcgtcagggtgtttcaagagcattggctgataactcaaaaacgttcaggctccctacgtatttgcacgagaggttgatagcaattcgtggtgcaaagtacgcgttagaggatcaaggaattgctccgacaatagagaacatagcagagtcgctcaatatatcggaaaagaaagtgcacaatgctacagaggctgtgaacaaggttctttcactggatcaacaggcgttcccctccttaaacggtctacctggggacacactccatagttacatagaggatcaaaacgtcgcaaatgatccatggcatggatttgaggaaatgtatctcaaggaggaagttaacaatcttataaattcaaacctcaacgagcgtgagagggacattattcgattataccatggcataggaaaacagtgccatacatgggaggatattagcagacaatttgggttgtcgagggagcgtgtgaggcaagtaggactcgttgcgatggagaagctgaagcatgctgcgaggaggaagcatttggatgcattgcttgaggattattgagtgagatgtttttcgtttacacaaatgcagtggctgtatatactcggaaacatagggttcatcatccttgaaaggctttaccgctactcactcggcagataactatacatgtacatttgtgacaatcaataggcacgattcagatatctatgtctgcagctgcacagtcatcaaaacgacccaacaaaaagagaagctgtttttttccttgggaagcttcgtaaattttctgtaatgtatcatttagcaccttaatcagcagaagagcaacatttatgtaccggatctgtattattatctagttacaattacatggaagcaaaatgcttacaggaatatggtgcctacaaaatttatcttacatgtgcctaaaatgtgcgatcaaataaatttcaggagaaatttctgaatatcttggaaaacttttgttgacatatgggcatatggccagagtttggtcagggtaattccgcaagaatatgtacgtgacgtctcatttaggcctgcatattccatcaataattctagttgcatcaaatcaaccagaagatttttgcatgtctgaaatagcaacaatatggtggtattctgcaaatgattttgggaaacttgaaatgatagacctcaagaaaaatctctgaacattcccgagaactcctgattgacgtgtagcatgagctctaatcaaggcaactctacaaaaatgtatgtgtgatgaagcaattaaggaaatgcttgaa

SEQ ID NO: 42920 - DNA, 1177 bp, Zea Mays
gatctcgcgcggggtttcgttcatgggatcggggaattcccctgcttgatccgctgctcgagctgagaaccagaagacattccgccccaagaagagcgctccatcaggcagcaagggagcacagctccgtaagcacatagatgccactctcggcagtggaaaccttagggaagctgtgaggttgcctcctggagaggatatcaatgaatggcttgctgtgaataccgtggatttctttaaccaagttaatatgctgtatggcacgctcacagaattctgcacacctgagagctgcccaacaatgacagctggcccaaagtatgagtacagatgggctgatggtgtgcagataaagaaacccatagaggtatcagcaccaaaatatatggagtatctgatggattggattgaaggccagcttgacgatgaatccatatttcctcaaaaacttggcacaccattcccaccaaacttcaaggaagtagtgaagacgatattcaagcgcttgtttcgtgtttatgcccacatataccactcgcatttccagaagattgttagccttaaagaggaggcccatctcaatacctgtttcaagcacttcattctgtttacaaatgagtttggcctgattgacaagaaggagctggctccactccaggagctcattgaatccatcatcgttccttactgagactacggtgtagtaaacgtggatatagagctctcagtgcagatggctgtgaagtgtccatccgtgacagaacttcactgcatagagctatatgtgcatgtacctgtgtgtttctaaatgatcatgtattggccatgtaagtgtgcctgttatcagttatagaagggtgatgatgatcatgtactgcaaaaagagaaagcacaagaatgtgttggattgatgtatgcagtgtttattttcctcctggttgtggaaccgtcagtttgtctgcttattgctagacattctctccgttctataaattgtaggtcgttttaattttgctccaactttgatcaagtttacatgcaaatatttcgacatgcaaaaccaaataaatgtattgtcaatgctcaaacgatttaatgtaactactctcatgtactagatgtttgatcgaatcctttataaatttagtcaaagttaaactagtttatttgtgtttta

SEQ ID NO: 42921 - DNA, 1199 bp, Zea Mays
gggatccaggcccgctgatggaactgagatctcgcgcggggtttcgttcatgggatcggggaattcccctgcttgatccgctgctcgagaaccagaagacattccgccccaagaagagcgctccatcaggcagcaagggagcacagctccgtaagcacatagatgccactctcggcagtggaaaccttagggaagctgtgaggttgcctcctggagaggatatcaatgaatggcttgctgtgaataccgtggatttctttaaccaagttaatatgctgtatggcacgctcacagaattctgcacacctgagagctgcccaacaatgacagctggcccaaagtatgagtacagatgggctgatggtgtgcagataaagaaacccatagaggtatcagcaccaaaatatatggagtatctgatggattggattgaaggccagcttgacgatgaatccatatttcctcaaaaacttggcacaccattcccaccaaacttcaaggaagtagtgaagacgatattcaagcgcttgtttcgtgtttatgcccacatataccactcgcatttccagaagattgttagccttaaagaggaggcccatctcaatacctgtttcaagcacttcattctgtttacaaatgagtttggcctgattgacaagaaggagctggctccactccaggagctcattgaatccatcatcgttccttactgagactacggtgtagtaaacgtggatatagagctctcagtgcagatggctgtgaagtgtccatccgtgacagaacttcactgcatagagctatatgtgcatgtacctgtgtgtttctaaatgatcatgtattggccatgtaagtgtgcctgttatcagttatagaagggtgatgatgatcatgtactgcaaaaagagaaagcacaagaatgtgttggattgatgtatgcagtgtttattttcctcctggttgtggaaccgtcagtttgtctgcttattgctagacattctctccgttctataaattgtaggtcgttttaattttgctccaactttgatcaagtttacatgcaaatatttcgacatgcaaaaccaaataaatgtattgtcaatgctcaaacgatttaatgtaactactctcatgtactagatgtttgatcgaatcctttataaatttagtcaaagttaaactagtttatttgtgtttta

SEQ ID NO: 42922 - DNA, 1144 bp, Zea Mays
gcgggatctcgatcgtattgtagtattgtacacgaaccagaagacattccgccccaagaagagcgctccatcaggcagcaagggagcacagctccgtaagcacatagatgccactctcggcagtggaaaccttagggaagctgtgaggttgcctcctggagaggatatcaatgaatggcttgctgtgaataccgtggatttctttaaccaagttaatatgctgtatggcacgctcacagaattctgcacacctgagagctgcccaacaatgacagctggcccaaagtatgagtacagatgggctgatggtgtgcagataaagaaacccatagaggtatcagcaccaaaatatatggagtatctgatggattggattgaaggccagcttgacgatgaatccatatttcctcaaaaacttggcacaccattcccaccaaacttcaaggaagtagtgaagacgatattcaagcgcttgtttcgtgtttatgcccacatataccactcgcatttccagaagattgttagccttaaagaggaggcccatctcaatacctgtttcaagcacttcattctgtttacaaatgagtttggcctgattgacaagaaggagctggctccactccaggagctcattgaatccatcatcgttccttactgagactacggtgtagtaaacgtggatatagagctctcagtgcagatggctgtgaagtgtccatccgtgacagaacttcactgcatagagctatatgtgcatgtacctgtgtgtttctaaatgatcatgtattggccatgtaagtgtgcctgttatcagttatagaagggtgatgatgatcatgtactgcaaaaagagaaagcacaagaatgtgttggattgatgtatgcagtgtttattttcctcctggttgtggaaccgtcagtttgtctgcttattgctagacattctctccgttctataaattgtaggtcgttttaattttgctccaactttgatcaagtttacatgcaaatatttcgacatgcaaaaccaaataaatgtattgtcaatgctcaaacgatttaatgtaactactctcatgtactagatgtttgatcgaatcctttataaatttagtcaaagttaaactagtttatttgtgtttta

SEQ ID NO: 42923 - DNA, 8841 bp, Zea Mays
tgcttccctcacctttattccaataattggtaattgtgaacgaacatgcttttctcatctttattccgataataaataattggaaactttatgaagtattactgttctataagcaatttctggctttgtttgttgtgtcctttagacatgtctttatgtggtttgtggttcttcttaatttgaccgctagtccaacttgtgtttgttatggtatgtttgtgtaaactaaaaatctggccatgtcctcacccaggagccatgacccgaatcgatgttaattcctcgaagttttttccccagtttccaaaagtggacgagtctgaatttctatcgttactttaggatcaagcttatctaaataggtgtttaagtaatcttctcgtagaaaataaattcaccggtgcttaagataaggatctcgagtctatgatcttgacaatccacttgtagctctcttatggtcatgttttcctcgtaagcttcgacttgttcggttggtgcaaactggtatccctattctagtttgcctctacttgaggatcacattgtcgttttctcaatctaacctaggaaaggaatgcccaataaattttcttgaatttaatgcctttggtttcctcatatctctcgaaggcatattaatttaatcttccgatcgtttttcctgtgtatctaatcagacgctcatccttgaccttgaaattgctacgatgggcatagaaatatgtttggggctaaattaacagtctcccatcatactcctttcatcaagtttaggttatggccatgccttgttcgtttcatcgggccatgatctatttggctctctacttgtaaccgttttgacaggcagagtctttttgtatattgtcatcctggctcagtctattgtgtcgcgtgagatttcttattggttatgtctggtaatggtgttatgactaacaccggtggtgccgtgacgaaaccgagggccttctgtgtgtgcgcacacatggatgtgctgctcggcacgcgctggtatcacagttagtagttgtaatccattatgagactatgtcaatgcgttatcttggcacaatctgtttttttctacgtgggattcattattggtgccagttcggtgatggtgtcatggttaatgacttatggtgccgcagcgaaactgagagcctcctgtgaatgcgcacacatgactgtgctactcgtcggatgctggtatcaaggtctctggtcatgatccattatagaactaccctaatatgttatctttcgtatatcttttccttgaaataatttctatgttgtttgtcgagtgatcaagcaacatctatcatctctgttggatcaaaagggcatacccctttaatgtgtggtctcttgtccctttactttgatggtgactactcatacaagttccctttgcatcctttgttgcaaaggtgaagccttgaagctttttagtgctggaagacaactaattagttctcaaaatgaagattgatttttccctgctgttgtgatgcaggagtttgttcatttgctctctcgtttaatccctgtatttcctaaccaagtcaattcatctcgcatggaagaaatggatgaaaaacctgaccaaatggattcctgcccaaatgcatgatcaactgttaataagagtgaactctcaacccttggcttaccggtggtactgagaggacctgctcaatatcaaaagtagttcaacaagttggttttactaacttgtaactgccctatgaacaaaggttgagtttagagatcgttttgtcgagttggctaaactcactttggttcaacccatcctaagaaagttcttaccaagatcaagttaaaatcgactgatagtcacctaattatcgctctagtcgtgccttgatcgcctcacgtgtgcttttccagcatatgtgatcaggtcgagtcatgcttagtgctcaaaaaagtgggttgattgtgaagccaacagttgttgaaaatcttcactgatgtttccttgagtctccattagcatcattggacttggattttctggctaacacgagttaactgtgatgttattcgacattcacacccgtcccgtgtgctataaacttaccgtgatcacttgttggtaaacctctttctatgtgttttacccaagaggttgcatctgattctacttgggtaaaatcgcgtatttaccgctcgcccaacagacttagatagtacagtgtcatcagaaaaagcaaattgcacacatggaaccttatgtgttcctctagcagacatcgtctctattggtggacattctaaatgagcctaaggcgatacatgttatatccactagagaaaccacatcctgagacactcgctctcgctcaggactgtctcatgattatcgttgatatggatatgggttacatgcttctctattctcagaagtctttcgctccgaatctcgggacgagattcttttaaggggggagggctgtaacatctcaggtgtttatattctgctcgacaacgagtatggatttaagcacgtaatatcagtggataaaacagatgctcaattttaatcatctcgcaaaagttcaagtttggcgccgttttcattttcataatttaagtaaaaaaagggggttcatgaagcttttggattatcgaattttcgtcactggcgaattttgaactgttcagatcacgcgcgtaagtgaatatcaaaatcagaaaacttctgattttatgtaaaaatttggagccccgcgctgtccgaaaagagtaatgcgctagcgcattaattgaattgttctctaagtcgagtgttcgagtagtgaacgaaattcgtctaaattcaactaaatcaaacgtcgactaaaatatcgaatttgatctcgtctggtttaatccgtctacacctcgctcccgtgacgatgctgacatcgtctccggagggattttcattgcgatgtcgtgttcggctcgcgtagttcaacatttatttatttcatatagtgtcaagtctggtgccagtttaaaattaatcgaataaggccgattgaaaacgtcatctaaatattttgctcttatctgagcggtttttacgaattctgtagacactaataagagtaggctttttaaataaaatgaacctaaactaaatgaaacgagaacaacggttagctgaatcagtttcctattccagagtctgagaaaaataatatcgtaacctaacaacattttgatccaatctgtttgtatcttgcccaacattttgatctaatctatttgtatcttgcccagatccgaatccctaaacacgaattgtttaaaattctgcagtataaattccaatcaagataaatcatagccagagattcaaacatggaataattattgcgctaaaaatacatcggaaagaagattatataataattaaggaaagaaagaaagttccaatcttctatctctgccgttatttttcctaactacgtatgctgtcccacttctggtattttccattgttcttatctcagccacgtatccttctccctgatccaaatcaagccaacgaaggaagcttatctctttcctatgcacgtcatcttcatctattccacgtacgtttcctctggtccatccacgttgctgctcctttctttattctgagatgagcgatccctggaagcatcttccgggtgtggcatttatctcccctcacacacgttctttgcttcgcttcggcaccgcacaggccctgctccatcgtcacttgtccctgcgctgacgctcgctgtggctaccggtggtcgagctcctccccttggccgcgctctccttcgcttgtgccttacccatcgagctccagcgtttgccagcttagagctcgccccttgcgtgtccctcgtctccacgcatgcatcagctccctgcgccctcgcctgctgctctggcttgccactatttcggtcctaccccacctttccggttaccggccgtcgtcgtggacacgccccgacagtaccaccaattgatcgtcgactcctaaaacctcaccagcgttctcctcgccacgccctagatttaaggagaaatccccggatttgtaaaggagaaagcgaagtgagcgccgcctactaagtgttcgatggaaggtccgaaccgggaacctcgactttctcacggatcttcgggtacgttaagggatcatgtgatatggaggaccagagctgagtcgaccacaatatggtgttaagcgtgggcttcttcgcaagggatacttatgaataaacttgaagatttgcgtgatcggatcaagcgtcaggatgtgagatgattgccaagtggacgtcatctaacaacactaacgtagtgttatcccaggcaagccccggtgcatttgccaccttccttgtattacaaaattttatcacttatatgctgcattaggtaataggagttgaatgattaaacacttgatgcattaccatccttgaaagattgattatcataccttgttacctgttttataaaaactagtaatgcttagttatgcttatagattaagaaaaatgtttttgatctatgactcatgatttttaaaaaagaaaaagggcttgggatgatggagacatcctccgcggggatgaattcatcattcaagcagggtacctctgccaggtatcaaactttgagaatttgtttaaaatgagaccagacattgagctggacaggtcgcccgtctgtgtcgattaaggaccgtaccgattgttggcctgctgatctaggaccctttatctggccacatacctcgtcatgggtaagcttgaacccggctattccatacatgaaaagacaatcgcgcactgggagtggagagatggcgagagtggcacgtaccctcctggcaaccgaccgcctataaggggtggtgtgctctcgggtggcgcggacctgttcatgtggtggaggatccgtgggaatggtagacatgtgcaaaagagttaagggaagcatatgtcgtgtggttggagatccccagctgggtattaatcgattcggatcgctgaacttctcggatatgaagactggatcttcgaccctcatcgtagataacaagtgaaactaaagctgctaaaatgaatctagtgtaggacaagcgaataatctagattaggaaaatctagattcaggaaaattacttaactggtgaagtaaaagcttggcataaggatccactactagtaagcttttctgcaaaaacgagtctttgaaatttgataagctttaccttgattcccaataaaccagcatacccttgagagtcttttctttagtcgggtaagtcttgctgagtaattgcgtactcagggttttattccctgttgtttttcaggttgtaattttgttctgttgtggatggtgctaagtgccggtgggctcggccttcttatataagtatatcccttctatagtttctttaatgaggattgtcacttaagctagcatgtatttcaaatttacaaatattatataacattttaaagtgtaattcttttgaaacactttcttttgtaatcactccgatgaggtataatatcatcttgataaatttgtaatcattttgtaataaagattttatttccgctgcaagtgtttgtatgtgagttgtgtttacttaatcctgcgatcttggcggtaagtggtttatccggggtccttgggacactcggacagatcctgttaagttgtttgacgcacatgcatagccgtttgaggtccttgggacaaggacaggtgcatgtgggcccaatagcttgggaggttctgccacaaatccgaagctcttgctcatctcccgacagacagaaatctccttgctgtcagggagacaatacaggaagtcttcttctccactgccgttgaatattaactccccctttggatacttcagtttttgggcgtaaagctgggcctcttgcttttcttttactgataattttttccccgaagcatgtcgaacaatataatcaaggactttgggggatgcttcgggggcaacagcactgatttcttcaacaagaattggctccgtcattttttcttcctcggtttccaaggattttaccttcgtgggctctgagggcccagcttcagcctcagtttcttgctctggagccttagtatcaaaaatctcagttttcgcttcggaagtttcaacagtcttcttcggagttgtgcttgaggacttaattgtctccagaacatctagcacattggccattctttttcttttcggagttaccgctggcctcttttggttttttattgtctcaacatttgctgaaggacttaaaacttctgatatttttgatccctcggttgatccttttgcttcttccattttttctgtcgatggcgcttcggccatctctttggtttctgataacaaaatctttggttcttccaattctgttcttgttggcgcttcggccatttctgcaatttctggcagcaaggttggctgttcagcctcggtggccgaagaggtctctctggtgaactcaggcaccgaggctggttcaatatagcgtggccgatgtgtgaggacctttatcctttttcttttcggtgctggctcactaggagcagctgcagcttcttctttcgcagaggtcgtgccttttcttttctgccctcgaatgggataacgatagtcagggtagacgaacccgattgctcaaacactcggttcagtcttttctttttccggcctccgaaggctgctgacaatgcagtatcttcggccttcgagtaagccccaagtagttcatcacttaaattttcaatgctttttagccagtcatcatctgactcaacgaatttatctccgaacttgaaagtatacttcagcctgataagtccaccttcgtcagcctcctttatggtctcttgcggcatttcccatttttccgtgagcggccatactctgaaggcaatatgctcttggaccaaatctctcgttccaataaaagaacaaataactccgaaggctctctggcattcttcggcagcttcattcatttcaaccttcggcctccgcaggctgaagctttgccaaatagggcgcataattatacctttaatattttcccgtgttttcaggtcattcttcacataaaaccattctgtcatccagtcgccgggccatctcttccgaaaggttggcacgggacagcttgacccagaccgagaaacgaaactgtagcagccaaaattattgtgatactgttccttaccccaaggttttgtctcgtatgataattcgtgtatgttgcagaaactttttgcatcaggttccagaccttagcttctcacggcccacacgaagatattcagccttatgattgcttcgggggtaagttggtgaagatagacttcaaatattttcagcacctctacgacaaagttgctcaggggaaatcgaagtccagctttcaaaaagcttcggtacactacaacttcattttcttcagggttcggacaagtcttttctccttcgtcggccctcataacggacaagtcccagaaatatcttcctctcatgttgacaagatgattttctttgatacttgatttgccgaaaaccgcatggcttggtcgccaagggcgatcttcggagtcttcaccaccactatccacatcataactgtcgctgtcatcagtatcttcagacaaaccttctaaaatctctttggtgatttttttctgtattggtcttcgacattgctataagaaaccccagattcttctcttcagagagactcagcttcatctcagcagcagccttcttatcttcagacatcttcgaaaacactaaaaaactgttttcaacgccgaagcttcaaaacttaaaaagctaagcaaatcttggtgcgcaagagctaaaaattgagtgagcgagagcagatggcaaaaaagcgtaccaaatgagctcacggtatgcccttatttatacgcccagtgcgttgaaaattgaaagaccccgcctgtcagtgaatgttgctattctagcaaagggaaggtgttttttcggaccttcggcttaaaaccttcgtccatgtcgcaatctaaatttattattttaacaaattaatattgcgaggggctactgttgggggccttcggcttccgaaggtcctcaaaaacaggatttaacagtgtttctggagtataatgtgtgaacaggtatcttcagactcgagtcgatatcacagtaggagaagcccaaaataatacgaaggttgatacaacgccgaagatgtgagcgggaaagcttcggcgtggtagcagaaaaggaaaccgacttaaagatgaaaaggctattcagacctcggtggattactatagaattactaccaaatgtaaagggcatgaatgtaattttatatgggctgtgtcccgtgcctataaataggtaaacagtacccccgtactgttcacgctgacttggcatttgcttttgcgtcacacttgtactttcatctccttccaagccgaaggtacatttgtaatttgatgtcatttctatttcttcataataataatgcaaaaataagttgataataatatataattgtctatgttatccttcatatttcatatagttcattctccatcatcgtatgttgtgtttatgaaggtgcgcccttcataaccttcgtccgaaaatcattatatcctaagggaaataatgcttcgaaggacgaaggactttaccgtttaacattttctgtgttgccttgttcttaactcatagcatttgagaacaagtccccaacaaac

SEQ ID NO: 42924 - DNA, 13909 bp, Zea Mays
ataaattccaatcaagataaatcatagccagagattcaaacatggaataattattgcgctaaaaatacatcggaaagaagattatataataattaaggaaagaaagaaagttccaatcttctatctctgccgttatttttcctaactacgtatgctgtcccacttctggtattttccattgttcttatctcagccacgtatccttctccctgatccaaatcaagccaacgaaggaagcttatctctttcctatgcacgtcatcttcatctattccacgtacgtttcctctggtccatccacgttgctgctcctttctttattctgagatgagcgatccctggaagcatcttccgggtgtggcatttatctcccctcacacacgttctttgcttcgcttcggcaccgcacaggccctgctccatcgtcacttgtccctgcgctgacgctcgctgtggctaccggtggtcgagctcctccccttggccgcgctctccttcgcttgtgccttacccatcgagctccagcgtttgccagcttagagctcgccccttgcgtgtccctcgtctccacgcatgcatcagctccctgcgccctcgcctgctgctctggcttgccactatttcggtcctaccccacctttccggttaccagccgtcgtcgtggacacgccccgacagtaccaccaattgatcgtcgactcctaaaacctcaccagcgttctcctcgccacgccctagatttaaggagaaatccccgaatttgtaaaggagaaagcgaagtgagcgccgcctactaagtgttcgatggaaggtccgaaccgggaacctcgactttctcacggatcttcgggtcggtttgtgaattggtacgttaagggatcatgtgatatggaggaccagagctgagtcgaccacaatatggtgttaagcgtgggcttcttcgcaagggatacttatgaataaacttgaagatttgcgtgatcggatcaagcgtcaggatgtgagatgattgccaagtggatgtcatctaacaacactaacgtagtgttatcccaggcaagccccggtgcatttgccaccttccttgtattacaaaattttatcacttatatgctgcattaggtaataggagttgaatgattaaacacttgatgcattaccatccttgaaagattgattatcataccttgttacctgttttataaaaactagtaatgcttatttttgcttatagattaagaaaaatgtttttgatctatgactcatgatttttaaaaaagaaaaagggcttgggatgatggagacatcctccgcggggatgaattcatcattcaagcagggtacctctgccaggtatcaaactttgagaatttgtttaaaatgagaccagacgttgagctggacaggtcgcccgtctgtgtcgattaaggaccgtaccgattgttgtcctgctgatctaggaccctttatctggccacatacctcgtcatgggtaagcttgaacccggctattccatacatgaaaagacaatcgcgcactgggagtggagagatggcgagagtggcacgtaccctcctggcaaccgaccgcctataaggggtggtgtgctctcgggtggcgcagacctgttcatgtggtggaggatccgtgggaatggtagacatgtgcaaaagagttaagggaagcatatgtcgtgtggttggagatccccagctgggtattaatcgattcggatcgccgaacttctcggatatgaagactggatcttcgaccctcatcgtagataacaagtgaaactaaagctgctaaaatgaatctagtgtaggacaagcgaatgatctagattaggaaaatctagattcaggaaaattacttaactggtgaagtaaaagcttggcataaggatccactactagtaagcttttctgcaaaaatgagtctttgaaatttgataagctttaccttgattcccaataaaccagcatacccttgagagtcttttctttagtcgggtaagtcttgctgagtaattgcgtactcagggttttattccctgttgtttttcaggttgtaattttgttctgttgtggatggtgctaagtgccggtgggctcggccttcttatataagtatatcccttctatagtttctttaatgaggattgtcacttaagctagcatgtatttcaaatttacaaatattctataacattttaaagtgtaattcttttgaaacactttcttttgtaatcactccgatgaggtataatatcatcttgataaatttgtaatcattttgtaataaagattttatttccgctgcaagtgtttgtatgtgagttgtgtttacttaatcctgcgatcttggcggtaagtggtttatccggggtccttgggacactcggacagatcctgttaagttgtttgacgcacatgcatagccgtttgaggtccttgggacaaggacaggtgcatgtgggcccaatagcttgggaggttctgccacagctggtatcggagcaagattaagtatatatggtcacatacgtattttcaaaacaaaagttttgatttcgaaaaacctattttcaactaaacacattgtttggctttgaaaacaattttgaaaaactataatgctagcgacatcctctgttaataagccctaaactaaggactatcaggtggcttagttgaaaaaccactaacccacaaccgggggtattgcattcatgtgtattgttattttgaggctattcagttctgaatggatcgacgctcaggtaaggtgagatgtgagagcgtgaccgaacaaacgtcggtctaggggagagtataaaaagcgcttgattatatacatgttacacatatgtatatatgaaggctgcaaagtggagtaattactttttgggattcagtaccccatggaggtgtatggccatacagacatgggaatactgaaaagtgtaatgtaccacaatgggctgtcctgtggttaaagtgtggcagcggcgcctatgcgtggctcggcgcttaatgaggagctggcctccatatagaaatatatggagtataaactgtgataaactgtcatgtgtgaattgcatcattgggaacagggctgtgatgaaattttctgcaggtacactaactttgaactcgtatgtgtagctgacgactagcaatatatcgagagagaacgtaggtacgccaccgatatagaacgctattgccctattaagttggcaaaattcgtgaggacgaataggacgagcatgcatcctgattgttgcattgtgtttgttgtttgcgcacaaaaatgcttccctcacctttattccaataattggtaattgtgaacgaacatgcttttctcatctttattccgataataaataattggaaactttatgaagtattactgttctataagcaatttctggctttgtttgttgtgtcctttagacatgtctttatgtggtttgtggttcttcttaatttgaccgctagtccaacttgtgtttgttatggtatgtttgtgtaaactaaaaatctggccatgtcctcacccaggagccatgacccgaatcgatgttaattcctcgaagttttttccccagtttccaaaagtggacgagtctgaatttctatcgttactttaggatcaagcttatctaaataggtgtttaagtaatcttctcgtagaaaataaattcaccggtgcttaagataaggatctcgagtctatgatcttgacaatccacttgtagctctcttatggtcatgttttcctcgtaagcttcgacttgttcggttggtgcaaactggtatccctattctagtttgcctctacttgaggatcacattgtcgttttctcaatctaacctaggaaaggaatgcccaataaattttcttgaatttaatgcctttggtttcctcatatctctcgaaggcatattaatttaatcttccgatcgtttttcctgtgtatctaatcagacgctcatccttgaccttgaaattgctacgatgggcatagaaatatgtttggggctaaattaacagtctcccatcatactcctttcatcaagtttaggttatggccatgccttgttcgtttcatcgggccatgatctatttggctctctacttgtaaccgttttgacaggcagagtctttttgtatattgtcatcctggctcagtctattgtgtcgcgtgagatttcttattggttatgtctggtaatggtgttatgactaacaccggtggtgccgtgacgaaaccgagggccttctgtgtgtgcgcacacatggatgtgctgctcggcacgcgctggtatcacagttagtagttgtaatccattatgagactatgtcaatgcgttatcttggcacaatctgtttttttctacgtgggattcattattggtgccagttcggtgatggtgtcatggttaatgacttatggtgccgcagcgaaactgagagcctcctgtgaatgcgcacacatgactgtgctactcgtcggatgctggtatcaaggtctctggtcatgatccattatagaactaccctaatatgttatctttcgtatatcttttccttgaaataatttctatgttgtttgtcgagtgatcaagcaacatctatcatctctgttggatcaaaagggcatacccctttaatgtgtggtctcttgtccctttactttgatggtgactactcatacaagttccctttgcatcctttgttgcaaaggtgaagccttgaagctttttagtgctggaagacaactaattagttctcaaaatgaagattgatttttccctgctgttgtgatgcaggagtttgttcatttgctctctcgtttaatccctgtatttcctaaccaagtcaattcatctcgcatggaagaaatggatgaaaaacctgaccaaatggattcctgcccaaatgcatgatcaactgttaataagagtgaactctcaacccttggcttaccggtggtactgagaggacctgctcaatatcaaaagtagttcaacaagttggttttactaacttgtaactgccctatgaacaaaggttgagtttagagatcgttttgtcgagttggctaaactcactttggttcaacccatcctaagaaagttcttaccaagatcaagttaaaatcgactgatagtcacctaattatcgctctagtcgtgccttgatcgcctcacgtgtgcttttccagcatatgtgatcaggtcgagtcatgcttagtgctcaaaaaagtgggttgattgtgaagccaacagttgttgaaaatcttcactgatgtttccttgagtctccattagcatcattggacttggattttctggctaacacgagttaactgtgatgttattcgacattcacacccgtcccgtgtgctataaacttaccgtgatcacttgttggtaaacctctttctatgtgttttacccaagaggttgcatctgattctacttgggtaaaatcgcgtatttaccgctcgcccaacagacttagatagtacagtgtcatcagaaaaagcaaattgcacacatggaaccttatgtgttcctctagcagacatcgtctctattggtggacattctaaatgagcctaaggcgatacatgttatatccactagagaaaccacatcctgagacactcgctctcgctcaggactgtctcatgattatcgttgatatggatatgggttacatgcttctctattctcagaagtctttcgctccgaatctcgggacgagattcttttaaggggggagggctgtaacatctcaggtgtttatattctgctcgacaacgagtatggatttaagcacgtaatatcagtggataaaacagatgctcaattttaatcatctcgcaaaagttcaagtttggcgccgttttcattttcataatttaagtaaaaaaagggggttcatgaagcttttggattatcgaattttcgtcactggcgaattttgaactgttcagatcacgcgcgtaagtgaatatcaaaatcagaaaacttctgattttatgtaaaaatttggagccccgcgctgtccgaaaagagtaatgcgctagcgcattaattgaattgttctctaagtcgagtgttcgagtagtgaacgaaattcgtctaaattcaactaaatcaaacgtcgactaaaatatcgaatttgatctcgtctggtttaatccgtctacacctcgctcccgtgacgatgctgacatcgtctccggagggattttcattgcgatgtcgtgttcggctcgcgtagttcaacatttatttatttcatatagtgtcaagtctggtgccagtttaaaattaatcgaataaggccgattgaaaacgtcatctaaatattttgctcttatctgagcggtttttacgaattctgtagacactaataagagtaggctttttaaataaaatgaacctaaactaaatgaaacgagaacaacggttagctgaatcagtttcctattccagagtctgagaaaaataatatcgtaacctaacaacattttgatccaatctgtttgtatcttgcccaacattttgatctaatctatttgtatcttgcccagatccgaatccctaaacacgaattgtttaaaattctgcagtataaattccaatcaagataaatcatagccagagattcaaacatggaataattattgcgctaaaaatacatcggaaagaagattatataataattaaggaaagaaagaaagttccaatcttctatctctgccgttatttttcctaactacgtatgctgtcccacttctggtattttccattgttcttatctcagccacgtatccttctccctgatccaaatcaagccaacgaaggaagcttatctctttcctatgcacgtcatcttcatctattccacgtacgtttcctctggtccatccacgttgctgctcctttctttattctgagatgagcgatccctggaagcatcttccgggtgtggcatttatctcccctcacacacgttctttgcttcgcttcggcaccgcacaggccctgctccatcgtcacttgtccctgcgctgacgctcgctgtggctaccggtggtcgagctcctccccttggccgcgctctccttcgcttgtgccttacccatcgagctccagcgtttgccagcttagagctcgccccttgcgtgtccctcgtctccacgcatgcatcagctccctgcgccctcgcctgctgctctggcttgccactatttcggtcctaccccacctttccggttaccggccgtcgtcgtggacacgccccgacagtaccaccaattgatcgtcgactcctaaaacctcaccagcgttctcctcgccacgccctagatttaaggagaaatccccggatttgtaaaggagaaagcgaagtgagcgccgcctactaagtgttcgatggaaggtccgaaccgggaacctcgactttctcacggatcttcgggtcggtttgtgaattggtgagcctgttcgctactctatttagttaatttgatcgttgtattgattaaagttgtggtcgatgattttcttgtttatagcgcaagcatatggtgtgtcgactttcagattcattgttgtccacatgtgcgatagttggtgaatgaatatgtcaaaggagagtaaattctttaggtatatgtgtagtatgattaagacgagttctttttgtgatgatatattatgtggaatatacttgggtgaatatgtatatgtatagtgtaattaagtaggtgatcttagctttaatttataataaagtactagagaattctaagttttaagaacatgtgtgattcttgctgtttaatgctgcatgaccagttttacgtaagtagctagtttagtaaagtaaaccatgttttctgtgaatgtgttatatataaaagatgtagataacttcttcatcttactggtataaaaatatcatggtcataggtctagtagtttgagagttatgaattttccaagtccagtttcagaatctgtccaaattctgtacaggtttcgaaaattggattgtttgattaagtaaaactgagaatcagctcttagtaattataggagaattgtagtacttttcttaaggtttccaacaaattttggatcaccctttttggtggtctagaagtcaggttatggctgtttaaattgtgatgtttgaagctgtcaaaatctggacagcaatgcttgtttgtattaactgacttcgatacacattgaatcaccttgagatgattataaatgaattgtagacaattctactagctttctaaaaagtctaggatcacctgatttggatttctgaaactccagttatgaatttttgaagtgaagagctgaattctatccaaatctggacagaattaaagtttagcactgtttgaccattctgtcgaatcatgttgtgatgataatataagagttatagaggactttctaagatttccagaaagtcttagtttactatttttggatgcatattttgtaagttatgagcaaaactgttgactgctgtactgctgtccaaaatcttcatgtgttaaattgattgtttggagtcattcttgtttggctaggttggattagtcaattttttattcttaattgatgaagtgatggcttattttagtaattttcatatttaatatttgttgattgagtaaatgtcatagatggagatttacttatggttcattagtggtttgtcatattaattctatcaggtcatgtcgtttaagtgttctccattactaatagaaagttagtaagggacagtattgtggatttgtatatctctaggccttctcatgctggtacttgagtttttgtttggagagtaaggtatccaggtagtaataggtagtaatgatcatgcaacttaattaactagtaattcattgattacaatacgtgtgacttgggattagctttgtctatgtccctatgcttacgtagttgcaaataaatgcttgatcaaatgccttgttgtctaaaaatgatgtattgctttcttgatatttggttaggtccatttgactagaaggccatgagtgatatagaattaaatgtatctagtagttaccctcaagggttgtaatgtttgttttaagtgttatcctctttagtatagattatatatattgtggttttttatgcccatgctcatgtgcattatgcataatcatttaggtacgttaagggatcatgtgatatggaggaccagagctgagtcgaccacaatatggtgttaagcgtgggcttcttcgcaagggatacttatgaataaacttgaagatttgcgtgatcggatcaagcgtcaggatgtgagatgattgccaagtggacgtcatctaacaacactaacgtagtgttatcccaggcaagccccggtgcatttgccaccttccttgtattacaaaattttatcacttatatgctgcattaggtaataggagttgaatgattaaacacttgatgcattaccatccttgaaagattgattatcataccttgttacctgttttataaaaactagtaatgcttagttatgcttatagattaagaaaaatgtttttgatctatgactcatgatttttaaaaaagaaaaagggcttgggatgatggagacatcctccgcggggatgaattcatcattcaagcagggtacctctgccaggtatcaaactttgagaatttgtttaaaatgagaccagacattgagctggacaggtcgcccgtctgtgtcgattaaggaccgtaccgattgttggcctgctgatctaggaccctttatctggccacatacctcgtcatgggtaagcttgaacccggctattccatacatgaaaagacaatcgcgcactgggagtggagagatggcgagagtggcacgtaccctcctggcaaccgaccgcctataaggggtggtgtgctctcgggtggcgcggacctgttcatgtggtggaggatccgtgggaatggtagacatgtgcaaaagagttaagggaagcatatgtcgtgtggttggagatccccagctgggtattaatcgattcggatcgctgaacttctcggatatgaagactggatcttcgaccctcatcgtagataacaagtgaaactaaagctgctaaaatgaatctagtgtaggacaagcgaataatctagattaggaaaatctagattcaggaaaattacttaactggtgaagtaaaagcttggcataaggatccactactagtaagcttttctgcaaaaacgagtctttgaaatttgataagctttaccttgattcccaataaaccagcatacccttgagagtcttttctttagtcgggtaagtcttgctgagtaattgcgtactcagggttttattccctgttgtttttcaggttgtaattttgttctgttgtggatggtgctaagtgccggtgggctcggccttcttatataagtatatcccttctatagtttctttaatgaggattgtcacttaagctagcatgtatttcaaatttacaaatattatataacattttaaagtgtaattcttttgaaacactttcttttgtaatcactccgatgaggtataatatcatcttgataaatttgtaatcattttgtaataaagattttatttccgctgcaagtgtttgtatgtgagttgtgtttacttaatcctgcgatcttggcggtaagtggtttatccggggtccttgggacactcggacagatcctgttaagttgtttgacgcacatgcatagccgtttgaggtccttgggacaaggacaggtgcatgtgggcccaatagcttgggaggttctgccacaaatccgaagctcttgctcatctcccgacagacagaaatctccttgctgtcagggagacaatacaggaagtcttcttctccactgccgttgaatattaactccccctttggatacttcagtttttgggcgtaaagctgggcctcttgcttttcttttactgataattttttccccgaagcatgtcgaacaatataatcaaggactttgggggatgcttcgggggcaacagcactgatttcttcaacaagaattggctccgtcattttttcttcctcggtttccaaggattttaccttcgtgggctctgagggcccagcttcagcctcagtttcttgctctggagccttagtatcaaaaatctcagttttcgcttcggaagtttcaacagtcttcttcggagttgtgcttgaggacttaattgtctccagaacatctagcacattggccattctttttcttttcggagttaccgctggcctcttttggttttttattgtctcaacatttgctgaaggacttaaaacttctgatatttttgatccctcggttgatccttttgcttcttccattttttctgtcgatggcgcttcggccatctctttggtttctgataacaaaatctttggttcttccaattctgttcttgttggcgcttcggccatttctgcaatttctggcagcaaggttggctgttcagcctcggtggccgaagaggtctctctggtgaactcaggcaccgaggctggttcaatatagcgtggccgatgtgtgaggacctttatcctttttcttttcggtgctggctcactaggagcagctgcagcttcttctttcgcagaggtcgtgccttttcttttctgccctcgaatgggataacgatagtcagggtagacgaacccgattgctcaaacactcggttcagtcttttctttttccggcctccgaaggctgctgacaatgcagtatcttcggccttcgagtaagccccaagtagttcatcacttaaattttcaatgctttttagccagtcatcatctgactcaacgaatttatctccgaacttgaaagtatacttcagcctgataagtccaccttcgtcagcctcctttatggtctcttgcggcatttcccatttttccgtgagcggccatactctgaaggcaatatgctcttggaccaaatctctcgttccaataaaagaacaaataactccgaaggctctctggcattcttcggcagcttcattcatttcaaccttcggcctccgcaggctgaagctttgccaaatagggcgcataattatacctttaatattttcccgtgttttcaggtcattcttcacataaaaccattctgtcatccagtcgccgggccatctcttccgaaaggttggcacgggacagcttgacccagaccgagaaacgaaactgtagcagccaaaattattgtgatactgttccttaccccaaggttttgtctcgtatgataattcgtgtatgttgcagaaactttttgcatcaggttccagaccttagcttctcacggcccacacgaagatattcagccttatgattgcttcgggggtaagttggtgaagatagacttcaaatattttcagcacctctacgacaaagttgctcaggggaaatcgaagtccagctttcaaaaagcttcggtacactacaacttcattttcttcagggttcggacaagtcttttctccttcgtcggccctcataacggacaagtcccagaaatatcttcctctcatgttgacaagatgattttctttgatacttgatttgccgaaaaccgcatggcttggtcgccaagggcgatcttcggagtcttcaccaccactatccacatcataactgtcgctgtcatcagtatcttcagacaaaccttctaaaatctctttggtgatttttttctgtattggtcttcgacattgctataagaaaccccagattcttctcttcagagagactcagcttcatctcagcagcagccttcttatcttcagacatcttcgaaaacactaaaaaactgttttcaacgccgaagcttcaaaacttaaaaagctaagcaaatcttggtgcgcaagagctaaaaattgagtgagcgagagcagatggcaaaaaagcgtaccaaatgagctcacggtatgcccttatttatacgcccagtgcgttgaaaattgaaagaccccgcctgtcagtgaatgttgctattctagcaaagggaaggtgttttttcggaccttcggcttaaaaccttcgtccatgtcgcaatctaaatttattattttaacaaattaatattgcgaggggctactgttgggggccttcggcttccgaaggtcctcaaaaacaggatttaacagtgtttctggagtataatgtgtgaacaggtatcttcagactcgagtcgatatcacagtaggagaagcccaaaataatacgaaggttgatacaacgccgaagatgtgagcgggaaagcttcggcgtggtagcagaaaaggaaaccgacttaaagatgaaaaggctattcagacctcggtggattactatagaattactaccaaatgtaaagggcatgaatgtaattttatatgggctgtgtcccgtgcctataaataggtaaacagtacccccgtactgttcacgctgacttggcatttgcttttgcgtcacacttgtactttcatctccttccaagccgaaggtacatttgtaatttgatgtcatttctatttcttcataataataatgcaaaaataagttgataataatatataattgtctatgttatccttcatatttcatatagttcattctccatcatcgtatgttgtgtttatgaaggtgcgcccttcataaccttcgtccgaaaatcattatatcctaagggaaataatgcttcgaaggacgaaggactttaccgtttaacattttctgtgttgccttgttcttaactcatagcatttgagaacaagtccccaacaaac

SEQ ID NO: 42925 - DNA, 570 bp, Zea Mays
gcttaacatgtagtgggtgcacttttaggacacgagcaagaagtcgccaatggaactgatcaacgaggtacctccaatcaagcttctgaaggtgttggacttggccacccaatcgagtacatctgccttgatctggaggcacctaatgtgtgcaagtactgtggtctccgttatgttcaagttcaccatcactaaattgagaagataatgctgtctaccgctgcagaagctgagttgaggagtttatgtgcacacacatttgttccacaatgttctgtagcgtactttgaactatgcttgcgggcaaaatattacctttgatgatcatcctcttctcgggcgatcttttattaatcctgtcttagtatggttcatttttctacagatgaattgtgctcctttttcagaatctatacaagctgtgtgtattgaagttttactctgaataagcatggaactaactctaaggcaatttaatctcagaagttctagttttctggagttccatgatccagacgttttccttgttgagcctatttaactttctggaatccatgtgcttcagttccg

SEQ ID NO: 42926 - DNA, 626 bp, Zea Mays
gtttttttccctgcagtacctataagcttaacatgtagtgggtgcacttttaggacacgagcaagaagtcgccaatggaactgatcaacgaggtacctccaatcaaggttgatggtcgcattgccgtctgtgaaggggcttctgaaggtgttggacttggccacccaatcgagtacatctgccttgatctggaggcacctaatgtgtgcaagtactgtggtctccgttatgttcaagttcaccatcactaaattgagaagataatgctgtctaccgctgcagaagctgagttgaggagtttatgtgcacacacatttgttccacaatgttctgtagcgtactttgaactatgcttgcgggcaaaatattacctttgatgatcatcctcttctcgggcgatcttttattaatcctgtcttagtatggttcatttttctacagatgaattgtgctcctttttcagaatctatacaagctgtgtgtattgaagttttactctgaataagcatggaactaactctaaggcaatttaatctcagaagttctagttttctggagttccatgatccagacgttttccttgttgagcctatttaactttctggaatccatgtgcttcagttccg

SEQ ID NO: 42927 - DNA, 633 bp, Zea Mays
gtttttttccctgcagtacctataagcttaacatgtagtgggtgcacttttaggttttaggacacgagcaagaagtcgccaatggaactgatcaacgaggtacctccaatcaaggttgatggtcgcattgccgtctgtgaaggggcttctgaaggtgttggacttggccacccaatcgagtacatctgccttgatctggaggcacctaatgtgtgcaagtactgtggtctccgttatgttcaagttcaccatcactaaattgagaagataatgctgtctaccgctgcagaagctgagttgaggagtttatgtgcacacacatttgttccacaatgttctgtagcgtactttgaactatgcttgcgggcaaaatattacctttgatgatcatcctcttctcgggcgatcttttattaatcctgtcttagtatggttcatttttctacagatgaattgtgctcctttttcagaatctatacaagctgtgtgtattgaagttttactctgaataagcatggaactaactctaaggcaatttaatctcagaagttctagttttctggagttccatgatccagacgttttccttgttgagcctatttaactttctggaatccatgtgcttcagttccg

SEQ ID NO: 42928 - DNA, 624 bp, Zea Mays
catgacagcccataccacaagttgggccacaacgggccgggctttaatcccgacacgagcaagaagtcgccaatggaactgatcaacgaggtacctccaatcaaggttgatggtcgcattgccgtctgtgaaggggcttctgaaggtgttggacttggccacccaatcgagtacatctgccttgatctggaggcacctaatgtgtgcaagtactgtggtctccgttatgttcaagttcaccatcactaaattgagaagataatgctgtctaccgctgcagaagctgagttgaggagtttatgtgcacacacatttgttccacaatgttctgtagcgtactttgaactatgcttgcgggcaaaatattacctttgatgatcatcctcttctcgggcgatcttttattaatcctgtcttagtatggttcatttttctacagatgaattgtgctcctttttcagaatctatacaagctgtgtgtattgaagttttactctgaataagcatggaactaactctaaggcaatttaatctcagaagttctagttttctggagttccatgatccagacgttttccttgttgagcctatttaactttctggaatccatgtgcttcagttccg

SEQ ID NO: 42929 - DNA, 1918 bp, Zea Mays
atttcaccatgcccccgcccccttccttgcgcaagcctcgctgtccgccacccggaaatcacgcccgccgtgtcaccgctgcgcgcaacgaccccacccgcgctccggcaacgtcctgcctcgcctccgtctccgcgctgtcgtgctccactgctccctccccgtctctctcgctccttccctcccccatctgttcaaccgtccacacgcattcgccgccaccattcgcgcgccagcaccagccacagagaggcttaccacttccccaccgctctggatcctattgttccccgattgaacctccagcagcattagcggcatccagtcagttgatgtgtggatttggggcctccaagtgcggatccagtcctaccttctccagatctggtgtcctctcgcccgggtgggcatcgtcttgccgccggtcccctccccgggctcgtcagcgcgaaacatggtcgtggtgggtccgatctgcggcgtgcggaagaacaggaggctcggttggtgctggtacctagaggaggcagactaggaccatcagcatctgcaggaggtggcgaatgggcttcgctaggagcttctccatcggctggcaataaccagcaagttttggatggtttagccttgaaatacttgcaactaactcaacgaacaaatctgaaggatggcttcgaaatgcagaaaagtttattttctttacagccattcctgaaatttaccatccagaaagtgatgatatcgcaatagttttgatcataatttgaaattcgtgaatctgaaatgaagcatatcatcaagatacagtggcctaatagttggtttcaacatgtaagaattagcgatataccttctgatcaccgaatttcgctttgtaaacgcggggcctaacgacccctcacaaataagactgtcaggaccgaagctgcctgttgcacctgaaggtctgccaccgtctatgcatgtattgttatggaaccaactggtgtgggaataatagcaatatttggattcatgttccattttaggttggagtctgcctcaaatttagaacttaccttttgtggttgatcaaatacaccatagccattggatcgaaatcctggtcatatggagtcgccaccatagccatacttcatcaagtttttgatcttcgtatttttctttttttcttgtttttattgcctgagctccatgtttttggttttgcttttgagtctgtggctgttgttgtggttctgatttgtggggcttaaggaagccatcgcctttgagagaaccagatggcttcttgctcatgccatctcagttcagttgcgggcatagggaatcgtcatcctctctgctttgtcccatccttcacatagtgtcctactatgagatggcagatgagtttttgaacaaatccttttcttttaattccttttttcagtgagtagagccacatttttttcaggaactaaggatgcaggcactcgaaagacataggaatccagtgtccctgtaatttgtaatagtttctaaggggagacaaacaatacaattggtttatcactttgtatcttaattaaatgcaccttgccttctaagcattaatttgctgtcatcaatttgtgcaggcatacgtggagtaggaaatatgaagctcatttatgggacaattcttgcagagtagatggacgtagaaggaaagggacaagaagtttttgtagagctgctattaatgttttgcttgtcaagtttttaatcaatcttgaatcatttacggtgaacatctttggttctattttcatcgtcgggtggcaagaaactaatcaaagggagattccttgcaatggactgtttagctacagctgagaagcatgctttctaggtattgttggacagtaaattgcaagcgagtttctgtaattatgag

SEQ ID NO: 42930 - DNA, 2114 bp, Zea Mays
ggaaggtctccctgcgtcgcgcgttatcgcctcctcgcgcaagcctcgccatttcagtgtgggcgtccacaccatttcaccatgcccccgcccccttccttgcgcaagcctcgctgtccgccacccggaaatcacgcccgccgtgtcaccgctgcgcgcaacgaccccacccgcgctccggcaacgtcctgcctcgcctccgtctccgcgctgtcgtgctccactgctccctccccgtctctctcgctccttccctcccccatctgttcaaccgtccacacgcattcgccgccaccattcgcgcgccagcaccagccacagagaggcttaccacttccccaccgctctggatcctattgttccccgattgaacctccagcagcattagcggcatccagtcagttgatgtgtggatttggggcctccaagtgcggatccagtcctaccttctccagatctggtgtcctctcgcccgggtgggcatcgtcttgccgccggtcccctccccgggctcgtcagcgcgaaacatggtcgtggtgggtccgatctgcggcgtgcggaagaacaggaggctcggttggtgctggtacctagaggaggcagactaggaccatcagcatctgcaggaggtggcgaatgggcttcgctaggagcttctccatcggctggcaataaccagcaagttttggatggtttagccttgaaatacttgcaactaactcaacgaacaaatctgaaggatggcttcgaaatgcagaaaagtttattttctttacagccattcctgaaatttaccatccagaaagtgatgatatcgcaatagttttgatcataatttgaaattcgtgaatctgaaatgaagcatatcatcaagatacagtggcctaatagttggtttcaacatgtaagaattagcgatataccttctgatcaccgaatttcgctttgtaaacgcggggcctaacgacccctcacaaataagactgtcaggaccgaagctgcctgttgcacctgaaggtctgccaccgtctatgcatgtattgttatggaaccaactggtgtgggaataatagcaatatttggattcatgttccattttaggttggagtctgcctcaaatttagaacttaccttttgtggttgatcaaatacaccatagccattggatcgaaatcctggtcatatggagtcgccaccatagccatacttcatcaagtttttgatcttcgtatttttctttttttcttgtttttattgcctgagctccatgtttttggttttgcttttgagtctgtggctgttgttgtggttctgatttgtggggcttaaggaagccatcgcctttgagagaaccagatggcttcttgctcatgccatctcagttcagttgcgggcatagggaatcgtcatcctctctgctttgtcccatccttcacatagtgtcctactatgagatggcagatgagtttttgaacaaatccttttcttttaattccttttttcagtgagtagagccacatttttttcaggaactaaggatgcaggcactcgaaagacataggaatccagtgtccctgtaatttgtaatagtttctaaggggagacaaacaatacaattggtttatcactttgtatcttaattaaatgcaccttgccttctaagcattaatttgctgtcatcaatttgtgcaggcatacgtggagtaggaaatatgaagctcatttatgggacaattcttgcagagtagatggacgtagaaggaaagggacaaggcacatggaactgacttggttttgctgacagaagtttttgtagagctgctattaatgttttgcttgtcaagtttttaatcaatcttgaatcatttacggtgaacatctttggttctattttcatcgtcgggtggcaagaaactaatcaaagggagattccttgcaatggactgtttagctacagctgagaagcatgctttctagcatgttgggaagttagtttcttctgctatcacgccacaacctctgttactgaaaataataagccataaatcaaggcagtctcttgctcatgtgtaacgaatgatgttcttactctatagactgaggactgaggagag

SEQ ID NO: 42931 - DNA, 2360 bp, Zea Mays
ggaaggtctccctgcgtcgcgcgttatcgcctcctcgcgcaagcctcgccatttcagtgtgggcgtccacaccatttcaccatgcccccgcccccttccttgcgcaagcctcgctgtccgccacccggaaatcacgcccgccgtgtcaccgctgcgcgcaacgaccccacccgcgctccggcaacgtcctgcctcgcctccgtctccgcgctgtcgtgctccactgctccctccccgtctctctcgctccttccctcccccatctgttcaaccgtccacacgcattcgccgccaccattcgcgcgccagcaccagccacagagaggcttaccacttccccaccgctctggatcctattgttccccgattgaacctccagcagcattagcggcatccagtcagttgatgtgtggatttggggcctccaagtgcggatccagtcctaccttctccagatctggtgtcctctcgcccgggtgggcatcgtcttgccgccggtcccctccccgggctcgtcagcgcgaaacatggtcgtggtgggtccgatctgcggcgtgcggaagaacaggaggctcggttggtgctggtacctagaggaggcagactaggaccatcagcatctgcaggaggtggcgaatgggcttcgctaggagcttctccatcggctggcaataaccagcaagttttggatggtttagccttgaaatacttgcaactaactcaacgaacaaatctgaaggatggcttcgaaatgcagaaaagtttattttctttacagccattcctgaaatttaccatccagaaagtgatgatatcgcaatagttttgatcataatttgaaattcgtgaatctgaaatgaagcatatcatcaagatacagtggcctaatagttggtttcaacatgtaagaattagcgatataccttctgatcaccgaatttcgctttgtaaacgcggggcctaacgacccctcacaaataagactgtcaggaccgaagctgcctgttgcacctgaaggtctgccaccgtctatgcatgtattgttatggaaccaactggtgtgggaataatagcaatatttggattcatgttccattttaggttggagtctgcctcaaatttagaacttaccttttgtggttgatcaaatacaccatagccattggatcgaaatcctggtcatatggagtcgccaccatagccatacttcatcaagtttttgatcttcgtatttttctttttttcttgtttttattgcctgagctccatgtttttggttttgcttttgagtctgtggctgttgttgtggttctgatttgtggggcttaaggaagccatcgcctttgagagaaccagatggcttcttgctcatgccatctcagttcagttgcgggcatagggaatcgtcatcctctctgctttgtcccatccttcacatagtgtcctactatgagatggcagatgagtttttgaacaaatccttttcttttaattccttttttcagtgagtagagccacatttttttcaggaactaaggatgcaggcactcgaaagacataggaatccagtgtccctgtaatttgtaatagtttctaaggggagacaaacaatacaattggtttatcactttgtatcttaattaaatgcaccttgccttctaagcattaatttgctgtcatcaatttgtgcaggcatacgtggagtaggaaatatgaagctcatttatgggacaattcttgcagagtagatggacgtagaaggaaagggacaaggcacatggaactgacttggttttgctgacagaagtttttgtagagctgctattaatgttttgcttgtcaagtttttaatcaatcttgaatcatttacggtatgttctcatatagctcaattctacctaattctacctgttgcttaactcttttttacaggttatgtttctaacacttaatatttttcttatgttcttttttgtcttgttttttccctaacatttgttgtatgtaggaccatccaggtcctaatcattcttgggaaagttttgttcttctttatataactatgttgctaacttatgttcatttgttaattattctgctttattttgttttgcaggtgaacatctttggttctattttcatcgtcgggtggcaagaaactaatcaaagggagattccttgcaatggactgtttagctacagctgagaagcatgctttctaggcatgttgggaagttagtttcttctgctatcacgccacaacctctgttactgaaaataataagccataaatcaaggcagtctcttgctcatgtgtaacgaatgatgttcttactctatagactgaggactgaggagag

SEQ ID NO: 42932 - DNA, 1668 bp, Zea Mays
cctccgtctccgcgctgtcgtgctccactgctccctccccgtctctctcgctccttccctcccccatctgttcaaccgtccacacgcattcgccgccaccattcgcgcgccagcaccagccacagagaggcttaccacttccccaccgctctggatcctattgttccccgattgaacctccagcagcattagcggcatccagtcagttgatgtgtggatttggggcctccaagtgcggatccagtcctaccttctccagatctggtgtcctctcgcccgggtgggcatcgtcttgccgccggtcccctccccgggctcgtcagcgcgaaacatggtcgtggtgggtccgatctgcggcgtgcggaagaacaggaggctcggttggtgctggtacctagaggaggcagactaggaccatcagcatctgcaggaggtggcgaatgggcttcgctaggagcttctccatcggctggcaataaccagcaagttttggatggtttagccttgaaatacttgcaactaactcaacgaacaaatctgaaggatggcttcgaaatgcagaaaagtttattttctttacagccattcctgaaatttaccatccagaaagtgatgatatcgcaatagttttgatcataatttgaaattcgtgaatctgaaatgaagcatatcatcaagatacagtggcctaatagttggtttcaacatgtaagaattagcgatataccttctgatcaccgaatttcgctttgtaaacgcggggcctaacgacccctcacaaataagactgtcaggaccgaagctgcctgttgcacctgaaggtctgccaccgtctatgcatgtattgttatggaaccaactggtgtgggaataatagcaatatttggattcatgttccattttaggttggagtctgcctcaaatttagaacttaccttttgtggttgatcaaatacaccatagccattggatcgaaatcctggtcatatggagtcgccaccatagccatacttcatcaagtttttgatcttcgtatttttctttttttcttgtttttattgcctgagctccatgtttttggttttgcttttgagtctgtggctgttgttgtggttctgatttgtggggcttaaggaagccatcgcctttgagagaaccagatggcttcttgctcatgccatctcagttcagttgcgggcatagggaatcgtcatcctctctgctttgtcccatccttcacatagtgtcctactatgagatggcagatgagtttttgaacaaatccttttcttttaattccttttttcagtgagtagagccacatttttttcaggaactaaggatgcaggcactcgaaagacataggaatccagtgtccctgtaatttgtaatagtttctaaggggagacaaacaatacaattggtttatcactttgtatcttaattaaatgcaccttgccttctaagcattaatttgctgtcatcaatttgtgcaggcatacgtggagtaggaaatatgaagctcatttatgggacaattcttgcagagtagatggacgtagaaggaaagggacaaggtgaacatctttggttctattttcatcgtcgggtggcaagaaactaatcaaagggagattccttgcaatggactgtttagctacagctgag

SEQ ID NO: 42933 - DNA, 1468 bp, Zea Mays
ccacctcgtccctcttcgtcgcatcgcacgccatcagcagctagcgcgctcctcgagcccagcagagaaaggccggcctacccactctctctctctctctctccagtctccaccggcagcgctaatcgtaatagccatgggctccaccgccggcgacgtggccgcggtggtggacgaggaggcgtgcatgtacgcgatgcagctggcgtcgtcgtccatcctgcccatgacgctgaagaacgccatcgagctgggcctgctggaggtgctgcagaaggaggccggcggcggcaaggcggcgctggcgcccgaggaggtggtggcgcggatgcccgcggcgcccggcgaccccgccgccgcggcggccatggtggaccgcatgctccgcctgctcgcctcctacgacgtcgtccggtgccagatggaggaccgggacggccggtacgagcgccgctactccgccgcgcccgtctgcaagtggctcacccccaacgaggacggcgtgtccatggccgccctcgcgctcatgaaccaggacaaggtcctcatggagagctggtactatctcaaggacgcggtgctggacggcggcatcccgttcaacaaggcgtacgggatgacggcgttcgagtaccacggcacggactcgcgcttcaaccgcgtgttcaacgagggcatgaagaaccactcggtgatcatcaccaagaagctgctggacttctacacgggcttcgagggcgtgtcgacgctggtggacgtgggcggcggcgtgggcgccacgctgcacgccatcacgtcccgccacccgcacatctccggggtcaacttcgacctgccgcacgtcatctccgaggcgccgccgttccccggcgtgcgccacgtgggcggggacatgttcgcgtccgtgcccgccggcgacgccatcctcatgaagtggatcctccacgactggagcgacgcgcactgcgccacgctgctcaagaactgctacgacgcgctgccggaaaatggcaaggtcatcgtcgtcgagtgcgtgctgccggtcaacacggaggccacccccaaggcgcagggcgtcttccacgtcgacatgatcatgctcgcgcacaaccccggcggcaaggagcggtacgagcgcgagttccgcgagctcgcaaagggcgccggcttctccgggttcaaggccacctacatctacgccaacgcctgggccatcgagttcatcaagtgaaccaccgtcgccgcgatgagatggcatggctgccacatgctttgcttgcttggtcctcgtatcgtacgtcgccgtcgtcgtcttcttctggttattgcgctgctacctcgctgctctcgcgtatgcatgtacttttgcttaattttctttcttcatatcatgcactctggctggcctagactgcccccgatccatggtggccggtacgtcttgtcgagctcttgcatgtcgaggtcc

SEQ ID NO: 42934 - DNA, 5087 bp, Zea Mays
gtgaattgcatcatggggtttgggctgtaatggaattttctgcaggtacactaactaaactctaggaaattacgactagttaactccggagtgagtaggtatgccaccgccatagagcgtgcaagccactatatgctggcaagattgtgaggacgaataggacgagcatgcatcatgacatacacttttaagttaaaccccctatgtagtagctttagtacgtgtttcgtctaccctgttcatgctacatgtctttgcctttctatgctacctttctttgtttttgaagactagaagccaagtttagttggtgggcagaataccttgcgctgcagctagaaggacgttaagttctcgggttgagttctgtgaggtatttcgggcacgtcatgttccagaagcccctatgtaaataaagttcaaagcgtttttggatctaaagcaaggtgaagaagcgagtgtaatggactatttgagaggtttactcgtccatcccagtatgttttggattatgtggatgctagtgaaaaaagtaatacatcatatgtgatcttaatgtgaaactttagctcctgatggcaattagtttggttgaaggatataaggagatggtcagtcaggctattctaggaaataataagattcgtctacatcaggagtttaagtgaaagaagtaaaggatatacctgatgtgagggagttctcggatgtgttcctcgaagatttgactagttgcctccagaaagggatgttgaattgcgattgggttgcagtccgggactccattcaccctgaaggtagcaataggtaccaaggtttgaaacagagattttggtggacctatagcttataaggtatagttgccaaaaggaccttcaacagtgcatgacttgttccatgtgtcccaatggaagaaatgttttcgagtccccaaatatgttattgagatttcagatattaaccataaaccaggtttgacctcctcgggatatccataaatgtgttagatcaaaaggatcgggtcactcgaagaaaagttattgagttttacgagatacagtggaactaacacccggaagataaagtcacgtagtagtcagagaagtatttggaaaagtatattcctgagttcctagtgtcttgtaaaccctaggtttgtataagttgtctttcgatgggggcatacccccttccttgtaggagttactgggaaataaaccagtgacgcacttccttttccattacttggcttggagtttaaatctcgggacgagattcctttttaggggggaaggatgtaacacccctggtgttacgattactaaaactctgacatgtcatcatcatcatttgcattaacttgcttgatacacctagaatgcattcactaggtcaacaatttgcaaaattgggatgttttgtattgagtgtagggcttagtattagggctttgcttgagctaagtaggtgagaatcatctcttaggcgagtgacaagttgacttggagtcttaagtactgaaggtaaacttagaacctagagtaactttacctttgaagtgtaaatcaagtggaaggatcgcttgaggagagggatcgacttcaaaaccctaaattgagcccaagagtgaaatggtgcataaacaaagcaactccaaaaataagggcctttttggccataagttctgagtaccaaagttggatcttagattaaggagtaactttgcttttagtggtgggtcaaagttgagaggtggtttggagaaatagtagtcacatttgaaactctaaattagtccgaaaagtggaatttaaaatccttgagaatttgtcaaaagtccatatatcaaagttgtggagcttggaaaagtgaacaattttcatatttggagctctccaagtgatgtgggagaatttgaagtaatttgcaaaagttcagatttgagtctgttggaatcagcccaaaacagttttgtttatctgtttttggatccctgtaacatttaatccatgagtattttggaaacagttgctataacaaacttgtagagtaactataagagaacaacttttattgagtattatagccttaaaactatatgaaattatgataaaaagggatccaaagtggggctgccaggtttctgcattttcagattgagaacagtaggttaagtctgaaatttcagtattttggctgtttttggagcttgtttgtggccaatccatgaagctttgggctacggtgtttatagagtaagtgaagcccatatgatgttgaacaagtctccttaagtaagtttggcttggtcctgtataaaaagtggagtaaagttggttccaaaatcagctgacaggtttgcactgactgcatttttattcagctgctgaaatctgaagttcagtgaaggatgccttgtttggagccattttgtgattgatctgagtggttttagactatagtttctatagtaaacttggagagcttatgttgataagtaagttccttattttgatacttgtaaggttctgcataaaaagtggagtaaagtgtactcaaagttggaatgtcaggtgttggggattcagattagtgtaataaccaagtctgaatctgtgtggttttacccaacttgggggctttgtgctaattaatctaggaggaattgggttagaaattctatataaaaatgaaagaccatatgaacgagaacaagtttcatacaaagaattggtcttgatactttgtaggatttggaggtaatggtgttgcaaattcctctgtcaggattggtgtgtgctgtttcagtagctgaaactgggtatttcagttcttttgctctgtttggtgcaccataacttttgatcagtgtgttttcaatcttgtggtgctatacaaaagtgataggaatatatttagagagtaacttttgctaagcaaggttgatctgttgctgtgtagaattgggagaaaatgttcttccaagatgagctgtcaggcaaattgtgcactaaacattattcagttagtgctgctgaaattcagtgtttcatcatattttggagcactgtaattcttgatctatgcacttgtggtcttgggctgatgcaacaatcttgtagagctatgtctagagtgtaacttttgctaagtaagtttggcttcttgccatggggaatggtgagttaacagggactgaaccgggagggtgcaatgaagcagtggtggctgattcagtgatccagtgttgaaattggcaatctaaagaagaatcttcagaccctgctgaactctgcatatgtgattaagttggcatatgaataagtgttagtagggatgtattagagatgggcttgggagtttctggcagagtggaaccaaatgaagatgtctaagttaagaagggattcaaagctatgtatggtgaagcttttttatccgtttggttcctgctcacttcattggatcaagttcaatgtactgctgtgttttatcgtgaagagtggagatatggatgaagtatagagtttaggtgctgaaggcctctcagtactgaaaaatatcaagttttggttccattaatgcctgcacgctttggttctctgggaaaaatctcattttccttatcctcaagcagccgatggacatctccgcatgccacctgcacacctgctccaccacgtgcctccctctccttgatcttatagcagccgctgctcttggacgatctcactccccataggtcacctccttcctctcccttaccccttccacgcctgactctccaaacgtgatctcaaaatccaggagctgagctcctcccgtgcgtctccttccgaccccgtccttcattcaagctgctgaagccgtctcgcatccgagcccctcttccatggtcgtcgtcctctgctttccttgctcggcctccaccccgtcaggtttgcgccagacgtgccgctccgccatctccccaagcagccatgtcttcccagcccatctcactgctcatccccaagtgcacttcggccatcatcctccggcgggcgccgccatgggctcgcctcacccagctccttgctcgtcgtgttggccgcctagtcgttgccatcgctgctttggccttcctctggtgctcggcttccctatctgcacacaacaccgcgcccagcacacccacttggcaaattcctgttcgcctcttctccaaactcatcggccatgctctttcctcgccgtggcgctctggtggtccgcaccacctagctctgtgtcatctgtcgttgtctccatcctcgctgtgccaccagcgcctactcggagcttcagcttgtcccctgcacaggccatgcccctactctgctacagctttgcgtgatcgagcagcacgccctaaaacctgcatagccctgttcgtctcgtcatcaccttgctactgcatccggtgtggagcgatttgtgtgtgtcgataaagcaagcgaagtcccgcaacgtccgccaggtgttcgacaaaaataaaaaaatgagccaggtgttgtcgccgcgttcacggatttctaattgatttgagtacgttagtgatcacgtgatgcggaggacgagagccgagtcgacctcaaggtgatgcaaagggtggattacttcgagagacgatgtcaacggaccaagttcgagatggatggatatatcgagtacccagatgggagatgaccgacaagcaaatctcgtttaacaaacactgacttaatagtgtttaatcccaggcaagccccggtgcatttgccccttccttgtgttttaaatgctttatcaccttaaatgatgcattaggtgataggagttgtgtgatgaacaattgacgcattaccattccttggaatttgaatactaaaccttgatccctaatttataaaaaaagaactgataatgcttaatcctgcttagaaactgaaaatcatttgttttcaaaaagaatgattgtggaacattggttatggtctttttgattcaaaaatcaaagcaaactaaggtgatgactccacttcggccggagtgggctcatcattggaaaagagtacccctgtcgggtg

SEQ ID NO: 42935 - DNA, 5740 bp, Zea Mays
gtgaattgcatcatggggtttgggctgtaatggaattttctgcaggtacactaactaaactctaggaaattacgactagttaactccggagtgagtaggtatgccaccgccatagagcgtgcaagccactatatgctggcaagattgtgaggacgaataggacgagcatgcatcatgacatacacttttaagttaaaccccctatgtagtagctttagtacgtgtttcgtctaccctgttcatgctacatgtctttgcctttctatgctacctttctttgtttttgaagactagaagccaagtttagttggtgggcagaataccttgcgctgcagctagaaggacgttaagttctcgggttgagttctgtgaggtatttcgggcacgtcatgttccagaagcccctatgtaaataaagttcaaagcgtttttggatctaaagcaaggtgaagaagcgagtgtaatggactatttgagaggtttactcgtccatcccagtatgttttggattatgtggatgctagtgaaaaaagtaatacatcatatgtgatcttaatgtgaaactttagctcctgatggcaattagtttggttgaaggatataaggagatggtcagtcaggctattctaggaaataataagattcgtctacatcaggagtttaagtgaaagaagtaaaggatatacctgatgtgagggagttctcggatgtgttcctcgaagatttgactagttgcctccagaaagggatgttgaattgcgattgggttgcagtccgggactccattcaccctgaaggtagcaataggtaccaaggtttgaaacagagattttggtggacctatagcttataaggtatagttgccaaaaggaccttcaacagtgcatgacttgttccatgtgtcccaatggaagaaatgttttcgagtccccaaatatgttattgagatttcagatattaaccataaaccaggtttgacctcctcgggatatccataaatgtgttagatcaaaaggatcgggtcactcgaagaaaagttattgagttttacgagatacagtggaactaacacccggaagataaagtcacgtagtagtcagagaagtatttggaaaagtatattcctgagttcctagtgtcttgtaaaccctaggtttgtataagttgtctttcgatgggggcatacccccttccttgtaggagttactgggaaataaaccagtgacgcacttccttttccattacttggcttggagtttaaatctcgggacgagattcctttttaggggggaaggatgtaacacccctggtgttacgattactaaaactctgacatgtcatcatcatcatttgcattaacttgcttgatacacctagaatgcattcactaggtcaacaatttgcaaaattgggatgttttgtattgagtgtagggcttagtattagggctttgcttgagctaagtaggtgagaatcatctcttaggcgagtgacaagttgacttggagtcttaagtactgaaggtaaacttagaacctagagtaactttacctttgaagtgtaaatcaagtggaaggatcgcttgaggagagggatcgacttcaaaaccctaaattgagcccaagagtgaaatggtgcataaacaaagcaactccaaaaataagggcctttttggccataagttctgagtaccaaagttggatcttagattaaggagtaactttgcttttagtggtgggtcaaagttgagaggtggtttggagaaatagtagtcacatttgaaactctaaattagtccgaaaagtggaatttaaaatccttgagaatttgtcaaaagtccatatatcaaagttgtggagcttggaaaagtgaacaattttcatatttggagctctccaagtgatgtgggagaatttgaagtaatttgcaaaagttcagatttgagtctgttggaatcagcccaaaacagttttgtttatctgtttttggatccctgtaacatttaatccatgagtattttggaaacagttgctataacaaacttgtagagtaactataagagaacaacttttattgagtattatagccttaaaactatatgaaattatgataaaaagggatccaaagtggggctgccaggtttctgcattttcagattgagaacagtaggttaagtctgaaatttcagtattttggctgtttttggagcttgtttgtggccaatccatgaagctttgggctacggtgtttatagagtaagtgaagcccatatgatgttgaacaagtctccttaagtaagtttggcttggtcctgtataaaaagtggagtaaagttggttccaaaatcagctgacaggtttgcactgactgcatttttattcagctgctgaaatctgaagttcagtgaaggatgccttgtttggagccattttgtgattgatctgagtggttttagactatagtttctatagtaaacttggagagcttatgttgataagtaagttccttattttgatacttgtaaggttctgcataaaaagtggagtaaagtgtactcaaagttggaatgtcaggtgttggggattcagattagtgtaataaccaagtctgaatctgtgtggttttacccaacttgggggctttgtgctaattaatctaggaggaattgggttagaaattctatataaaaatgaaagaccatatgaacgagaacaagtttcatacaaagaattggtcttgatactttgtaggatttggaggtaatggtgttgcaaattcctctgtcaggattggtgtgtgctgtttcagtagctgaaactgggtatttcagttcttttgctctgtttggtgcaccataacttttgatcagtgtgttttcaatcttgtggtgctatacaaaagtgataggaatatatttagagagtaacttttgctaagcaaggttgatctgttgctgtgtagaattgggagaaaatgttcttccaagatgagctgtcaggcaaattgtgcactaaacattattcagttagtgctgctgaaattcagtgtttcatcatattttggagcactgtaattcttgatctatgcacttgtggtcttgggctgatgcaacaatcttgtagagctatgtctagagtgtaacttttgctaagtaagtttggcttcttgccatggggaatggtgagttaacagggactgaaccgggagggtgcaatgaagcagtggtggctgattcagtgatccagtgttgaaattggcaatctaaagaagaatcttcagaccctgctgaactctgcatatgtgattaagttggcatatgaataagtgttagtagggatgtattagagatgggcttgggagtttctggcagagtggaaccaaatgaagatgtctaagttaagaagggattcaaagctatgtatggtgaagcttttttatccgtttggttcctgctcacttcattggatcaagttcaatgtactgctgtgttttatcgtgaagagtggagatatggatgaagtatagagtttaggtgctgaaggcctctcagtactgaaaaatatcaagttttggttccattaatgcctgcacgctttggttctctgggaaaaatctcattttccttatcctcaagcagccgatggacatctccgcatgccacctgcacacctgctccaccacgtgcctccctctccttgatcttatagcagccgctgctcttggacgatctcactccccataggtcacctccttcctctcccttaccccttccacgcctgactctccaaacgtgatctcaaaatccaggagctgagctcctcccgtgcgtctccttccgaccccgtccttcattcaagctgctgaagccgtctcgcatccgagcccctcttccatggtcgtcgtcctctgctttccttgctcggcctccaccccgtcaggtttgcgccagacgtgccgctccgccatctccccaagcagccatgtcttcccagcccatctcactgctcatccccaagtgcacttcggccatcatcctccggcgggcgccgccatgggctcgcctcacccagctccttgctcgtcgtgttggccgcctagtcgttgccatcgctgctttggccttcctctggtgctcggcttccctatctgcacacaacaccgcgcccagcacacccacttggcaaattcctgttcgcctcttctccaaactcatcggccatgctctttcctcgccgtggcgctctggtggtccgcaccacctagctctgtgtcatctgtcgttgtctccatcctcgctgtgccaccagcgcctactcggagcttcagcttgtcccctgcacaggccatgcccctactctgctacagctttgcgtgatcgagcagcacgccctaaaacctgcatagccctgttcgtctcgtcatcaccttgctactgcatccggtgtggagcgatttgtgtgtgtcgataaagcaagcgaagtcccgcaacgtccgccaggtgttcgacaaaaataaaaaaatgagccaggtgttgtcgccgcgttcacggatttctaattgatttggtaataatactttggcttgctactcttgctaattagtttaatgaatggattgaatggatattaatcgtgatcattctcgtcggtagcttagatgtgttgtggtcttgttctaacctttgaagcagtggcgagttggtattttgaagtgatttttgtttgtataataatgtcaatgctctactccagtcgttgttatctactacgtttagcgaccggttaaatgtctaaactagatgttagctgctggtccaaatgttaaaagcgtgtagcatcgtcaaactgattttagttggcgtgctgtgcatagtcgtctgaaaataatagttgaaacagattagcttgtttctatccatactctgagttttagaggtccgcttttggtgaacctaattgtgttagccttttatgtatcgtgctttagctatgaaaaatatagaacatgctataatttatatgtttcttgatatgtgagttcggttcaattaaactagaggggcgtggatgttgtatttaatgctatgtcaatgtctagtgttctctcataagtattgcaacgcctcaccattacgtacttaattctctattgcgtagcatcataatatcttatgttattcttccttatgttcatacatgtgcattatgcatctcatcagagtacgttagtgatcacgtgatgcggaggacgagagccgagtcgacctcaaggtgatgcaaagggtggattacttcgagagacgatgtcaacggaccaagttcgagatggatggatatatcgagtacccagatgggagatgaccgacaagcaaatctcgtttaacaaacactgacttaatagtgtttaatcccaggcaagccccggtgcatttgccccttccttgtgttttaaatgctttatcaccttaaatgatgcattaggtgataggagttgtgtgatgaacaattgacgcattaccattccttggaatttgaatactaaaccttgatccctaatttataaaaaaagaactgataatgcttaatcctgcttagaaactgaaaatcatttgttttcaaaaagaatgattgtggaacattggttatggtctttttgattcaaaaatcaaagcaaactaaggtgatgactccacttcggccggagtgggctcatcattggaaaagagtacccctgtcgggtg

SEQ ID NO: 42936 - DNA, 1934 bp, Zea Mays
tgcatatgttggctacatgtgtgtgtgtacgtacgtatatacattgtttacgaccacccagaagggagaacttcaacgacgcctacgttgtttacgagctgatggacaccgaccttcaccacctcctacgatccaaccagccactgaccgatgaccactgccagttgatgaggctctatgccacccatacctggcatcccttcatgagataaacgacgaacccgtctgcccagcgcctttcagcttcgacttcgagcagccatcgctcaccgaagaagatatcaaggagctcatctggagggagtctctcaagttcaaccctgacccagtccgctgaatagttcccagtgtacacacgagtaaactaggatggcatgtctatcagctccatggggacaaaaggcatgaagcaactgcagcaagatgagtgtacaagtgacatcatcatcaccacatctcgtggcttgtcaatagcgacaccgtaacgtcaaaaatattggacatttgtgaaacaagaagcttgatcaataatttctagtggagaaagctggcagcttatctgcatcttgttaggttgtatctacctcccttcagttgtatgcgtaacaaatgtagtcagaaccttgtcactgcctatgggaccatggtaacacagttgtccacaaactacagacagcagctcaacacgtcaccttccagcagttactgttattatgttctaaaatcttgatgaacataaaaccacataatattttgtgactactcacccgaatttgttccagcaattgggcaccattccccgagcattacgcaaacattcctcatacaacatcacgttcttcaaaccagacacatgatacgaggttacacaccaaagcatttgaatagcatccacaacatgcaggaaggagtaccgacacatttgtttaagggcacatgggcatcaagctttaatagacacatgaacagaacagataatcattgcatcagaaatggacgcgacaagcaggcacggagctttttcccagctggacacaatcaggaacagcaaaaaggaaaagagaaaagataaagagataaaaggcccggcacagtaaagacaactctacttaatagagatctagacagaaaatcatgatgccttctttaaaaggtgcactctcattgtttgtacacgcaacttggggaacccagatatacaatttaaaaacatcacaaacaaattagtagctgcatctttccaatgttcgacatcatgaaacatatgtacatattccttcacaggggtcctgtcacagatacctccatcaaacaacagaaaggtcaacaagcactagcgatgcagttgcaacaaaaaaaatcctacatttcagatattaaatccaaaatggaaatagaagtatatgcaatatagatcagccaggactaaaaagaacaacaattgcagtaatttgttggcagcctgccaactttggctatgtgtaaccatcagcagacaaattaaagttactaaaggacctgtttaagcaataatcaaaagaacatgggagcagacccagtgttagaggctcccacatgagtgaggcctaggaaagggataaactgaggcaagccttccccatgcaaatgcaagcaggctgctttgaacctgtgacttggtgaattagtgagaactctcaccactgcactaaacataaatgtttaccaaagaatcggatgactacaaaaaatccaagtataaataaagcaaacagtactttagaaatctaaaatttgatattctataaacaataagaaattcaagaactacacaggatgcaacatgtataaaaaaaactgcataatacagagattgcaagaatcctgtactgaacaactggtaagtctcttaaagagcatatggacaacctatgtaaaacaaaacaagaaatttg

SEQ ID NO: 42937 - DNA, 432 bp, Zea Mays
ctatgatgcatgattatcatcccagttcataacacgaacagattccacacctgagacctgctgagtacaagaggtccaggttggcaaggaaccaaaggactgtgaatcgtccatatggtggtgttctgtctggtactgcagttagggagagatagtgaagaaggtgttgaagatccaaaagaccaaggataaggcctccaagagctagacgatataggccacaatgtttgagtccattcgaatttatttcagcaggaaaatttctcgcgggtatggggaatcttggtacttatgctagtagtatgtgagatgggtgtggtttaaattttgagcgtaagttgagttctgttaacttgttaagttcggtggaatgttttaaactatgtggatgtcagattttgttaatgtttgcgcagtttgccccaattttgg

SEQ ID NO: 42938 - DNA, 486 bp, Zea Mays
gtacaccaagaagcgcgcgagcggaccgaagtgcccagtcaccgggaagaagatccaaggaattccacacctgagacctgctgagtacaagaggtccaggttggcaaggaaccaaaggactgtgaatcgtccatatggtggtgttctgtctggtactgcagttagggagaggatcatccgtgcctttttggtcgaggaacagaagatagtgaagaaggtgttgaagatccaaaagaccaaggataaggcctccaagagctagacgatataggccacaatgtttgagtccattcgaatttatttcagcaggaaaatttctcgcgggtatggggaatcttggtacttatgctagtagtatgtgagatgggtgtggtttaaattttgagcgtaagttgagttctgttaacttgttaagttcggtggaatgttttaaactatgtggatgtcagattttgttaatgtttgcgcagtttgccccaattttgg

SEQ ID NO: 42939 - DNA, 1592 bp, Zea Mays
tgctattgctgacatagtcgaaggccgccatgggctgcttgctccgccgtctgttccccttcctggtcggcgcggccgtcggggtgtacgcggcgcagaactacaaggtgcccaacatccggcgcctcgccgaccgcggcgccgacgccgccaggcgctacgaggaggcctaccgcaagaagcctgctgccgccgcggacgacgacgcccgtcccgtcggcggctgcaggaagaagaaggtggtgcaggtggatattgacgacgacgaccaagagtaggtagccacggtacgcgcgttgcctgacgccgccgctggacggtggatgcatgctgcgaattagttagttacgttacgttacgttacgttacgtacagtatttttttacctgtataggagtgtctgtatatatgtatgcttgcgctgcttacagtatatgtagttatttctcgcagtgggtttcctcgatttaccatgtactactactacgagttgcttgagatgtggattaagaaataataataagaaaagattacggtaaagttaccctcgtcccaaactaattaaatcaatgaataaatcaagattactgtagagctacactcgtttccaagctctaagccattcaaagtcttgtaatagataaatggtctctgttgtgtatctagacgtacatgtgttagtcaataccaagaacaagccagaaccatttgctcgtaccaacaacaactagcagtctagcattgtgttgtgtgagagtgcatgcagttcagttggcttggtctggaccaaaggctagcatgcccgtttttacggcccacgtccatcatgcacgcatgggccggcggcctctgaaagcatgggctgctcgtggatggaaaacgggcgggcgggttcggggggatcgagcaaccgccactctcggaaaggaaaggggccgggcaggcaggaaaggaccaccggtgcgcggctgacgcatccgatccgtagtctctctcctgctcctcgctttcctcctttgctttactaggttcgtgcgttccgtcgccaggcaaacgcagccggtcggcaatgtaaaagcctcgttgggcaggggcccagggctctcgtttgctttagttcgcccgccatcgacggcgattgcagacgacctaacaaccatggaaagcaagcaaagcaagtgcggatccgtccggggtccaggaaaatcaaaagcggtaggctcagcgcgcagctggagctggggatcagaaaacgagacctcgatcacccagggcatgcagggcatgcagcgccccccctcgtctcgcctgtgtttccgatcctaggagcagtcactgtcaaccacaaacaaccagtggcggatacaggattgattcaagagagggctattaaattaagactaacataaaaaaatttaaaccaaacaaaaaaatataattgatatttaatatgacacaagaagcaagttataatttaaacattaaagaaatatgtagtccaaaaataagtcgatataaattctagaaatacaataatcttacacataccgttcatgagttgatgctgcgaggttaatttatcttccgagttc

SEQ ID NO: 42940 - DNA, 1418 bp, Zea Mays
aagaagagaccgaaacatggtcccggctgaaaaaatccccgaaccctggcccccatcactagcgggccgtcaccgcccactctgcaacggcccagccggagggtggcgcgcaggacgtaacccgggagcgggcggggcacagcgaggggatttttttaaccaagccagaaattcgcccccgagggggatcgaacccaggacttggaggtgctactcggaagccttaaccattacgctagaggccctttcgcatggtgtgccaaagaagatagttcagacagaggaacacagttcacctctcatttctagcagcagttgcatgaagccttgggtacacatctgaatttcagttcaacatatcatccgcagacagacggtcagactgaaagaattaatcaaatactcgaagatatgttgagagcatgtgcgttgcaagatcagtccggatgggacaagaggttaccttatgtagagttctcctataacaacagttactaggccagtttgaagatgtcaccatttcatgcgctttatggaaggagttgtagaactccattgcaatgggatcagcctgaagaaaagcaagtgtttggtccagacgtattgctcaaaactgaggagaacatcaagatggtttgggagaatctaaagatagcgcagtcaagacaacaaaattatgcagacacaaggagagagctgagttttgaaatcgaagattttgtctacctgaaggtatcgcctatcagaggagtcagaagattcggaatcaaaggcaagctagcgccccggtatgttggtccgtatcagattctcgcaaagcgtggagaagtggcctatcagctcagtctgccggaagatttgtcagcggtgcatgatgtctttcatgtgtctcaattaaagaaatgtctgtgtgtgccagaagagaagttgccagtggaaggtctagaagtccaagaagacttgacctacatagagaagccaacgcagattcttgagactgcagatagggtcacccggaggaacactatcagaatgtgcaaaatcagatggggtcaccactctgaggaagaagcaacctgggagcgtgaagatgatctgatggccaagtatcccgaactctctgcttgccaaccttgaatctcaagggtgagattcttttaagggggataggtttgttacgccctgaatttgtgggtagaatttttttcttctttggtactcaccaaattcaggcgttactctcttttcttttcccgcttcgctccttcttcccattttcaaagcagtatatcgactggtgtttgtatcgcgtgtacacaaaaacctaagttgacatgagtgttgtgtcatgccgaagcattttttctttgtctgatgattgtgtttaatcgcgcgtctgtatcgcctcgtttcggatt

SEQ ID NO: 42941 - DNA, 747 bp, Zea Mays
ccggttttaaggagcaaagccgggtgcatctcatacatgtgccaagaagacaacatatataataacagagtgtatagagataaatttcacaataacatcagagtatttattacatagcagaagtcttattacaaaataaaagataaatataaaacaaactaaggatcatccttggcgccaaaagtcaactaggaaacgccacctagatcagatcaaactcctcgctttgtggctcctcctggaccacctgttcttctcctgtggggggtgagacagcaagggtgagctcacacatgatcatagctcaacaagttgtggggaaaccagtgggcatgaactcaccaaaggtgggagttcatgtgatgtgtaaggctaatcaacaactggggttaaagctgagcattgcttttaattagttggtcaaagttttattagcagttactagatgtaagtaaataccaaaccttaataaaagtaatagaacaaaattaataaataatctcatgcatatgcaaatgacaaaattgaatttaagttacataaattaatcatgcgagagtcctgagctgctcatgaccgtgagctcggctagtataccagttttacactttgtagaggttgtaccatgtacccacaagtcatgttacccatctgccaagggatcgcgactctcatacacctctaccaaggaagcgaggcagggcaacactacgaggcctttacaaagttccactggctttcgaaaac

SEQ ID NO: 42942 - DNA, 2265 bp, Zea Mays
atgtcgtttctcggttttttttgctaaaaattattgtttcaaatttagaaaaacgaaattcatatttgtcggccgagatcccgtgtgctctttatgaaattcgttgtctttttaccgaacaatgaacatttttttaaaaaaacaaaagttgatatttaccaaattactcaagaaagcatgtaattttttatcatattttccctggtttctatagtttttttcattttttccaaattttgaaagggattaaaaaaccattgggaaaccgtttcccggaccccaatacccgcggttctaggctgtgctaagatttgggtcaattccctaaaactctaaaaaaacactatatatactcaaaataatagtttattttgtacatgatccaagtcaaactagcaggaagacaagaaaacagaagtaaatgcaaaacatatcaaatacaaatgatagtgccgattctcagtccgagccatgaattgatcaagtgctttgatgaaaagaatcttgcaggttagcgagaaagacatcgctgcaacatccaacactgaagcaagaacaaatagcaagcacgtcacaggtcaatgaaacaaatatcatcataacctaggagttcggtggaaatattaatattcacatgcagctctgtttaatttgaatagagattgacagaaccaaatggagacaccaaaaaacatagatagaacaagagaagagaaacatagcaaacttggagacgccagaaaacatagatagaacaagaaaagcaaaacatagcaaactagtgagattggaggttctcagccttgagttatgattgaatttaggcgtctttcatggaataaagatgtatcaggttaacgagaaagccatcattgcaacccaaaaaattgtaaaataggcatgcacaaactgggatgcagggcacaaaagattgtaacgccctcaacttgttatatcttcagacaaacaatgctgctcagttatggtttttgaatggatagatgctatcctcatagtatgtctcaggttaacgagaagtccatcatggcagccacaaaaagcagtaagcaaactacaaactgtaatgtgaacacattcttgcacttgggcaaagttaacatgatattgatgtaaccagcaaaatatttgaaatggaactattattaaggaatggtttggatacaagagctgattagaagctagctaaaaattggccctggtgcatccaaacaagaggggccaatagatgagctatttttttagccaaatttccaactacttagccatctaccaagccaaactgggctaaactttagcccaactagtactatccctaggctatctcagccaaacagaccctaaattaaccagtgtacaacatagacaagcacaaaagaacgttacttggaaacagcagcagatacaaaaaaagagagaacaacgcagtagcagcagcagattatggaactggaggcgctcagcagcttattattcaaatgaatatcatcatcatactagcaatgcatgcttaacaagaacttgttaatggggaaaagaggaggaatggatggaaacacacaaactcagagtgagtgagtgagcgagagagagagagagagagagttcttgaaaatgctagcataagttcttgaaaaagctatcatcacagcagcttattattcaaatgaatatcatcatcatactagcaatgtatgcttaacaagaagctgttaatgggaaggagaggaggaggaatggatcgatatatatatatacacacagagagagagagagaaagaaagaaagagtgagttcatgaaaatgctagcataagttcttgaaaaagctatcatcacagcaacctccagttcctaatgactccatctttattatcctcctaacgggcatggcttccatgcgagtaggaatgaaacagaatcggatacagatggatattaatgatcatgtgttctatcccatatttttcctcagatcacagaccatcatgccagctattaatatcaatctcatatgcatatcaaaaatctgattttcagcatttggattcagatatagtatggatattaaatgttcaggttcaaatatgaactatccatgtagggttttgagttttgaccctttcgaggcggacagatattagaaaatgtccatcccgttttcatcccacaacaacaattaaaaaggcagacccagtgtcaggacctaaataagcaaatttgcccagtgtcggcgttcacatgtgtt

SEQ ID NO: 42943 - DNA, 358 bp, Zea Mays
gaacccctgctcgtcatcaacatcagccgcaccaccatctgcagtagagcagctgagtccctccaccaacgccctcgtctacaactccataacctcgcctgatgcacagtcgtcgcttcccttgacagcagcgttgccggacaccacgttgctcatctcggccatgttcctcttcgtgctcagcacctaagcgttgtgtccgacaccagcactttgcatcgtcctcgccgtcaaattatcagcagtagccttggctcctgcagccgcgtctatgacgtgctcgtcatccccagcgactcatttccctgctgcgcgctaggtagtcgtattccttcgacggtaaggaccagttgttcgt

SEQ ID NO: 42944 - DNA, 2488 bp, Zea Mays
caaggtctttgggggtcccaagaattaaagcatgtacagtccatccaagtggccgcatatagagatagggaataaaatggaggacatatggtctgtctcagattgaatcaggggggtcttgaggattttcaggaactgagtaggttgtttgtatcagggggatcttgtggatattgaggaactgtgtaggttgtttggttgaggtagattgcagattggatttgttttggtttcttgagatccttgtttgccccttcatttttctttcgattttcattttgtcacccccaaccaaagattgaagttgaaggggtttgaatgcctgatgcataatattgcataaggccaagggaagttctacacatttttcatgcgcaaggctgcctagttacaaacatatgggagctgataagttactatgtttctaggtgtcagcatttcgggaaaagtgatgtttcaatttcaactgcaaggcttagagatcgaatgcatcaggagggtttgaatgagagtcttatacaggactgtgaacaaattgtgctttccgagttctcaagctaccggaagcaactgaagtgtcgttacgaggattacttaagcttgtttgggtcctgcagacataattttgaggaaggtaaagatggaagtataacacaggggacattgacacgaaatgacttctctagttctaggcatggaaattttagcgaatatagcacaacagaatctgatgagcatgagtttgagaaacacgatggaggcgaattgatttgtgaagatgaatctgcattctttgattctatagattacttcacagagtcagacaacaggtcttcaaccatgttaagtggcaaggaagtagtggattcccaaacacatgattccagtaataatatacaagcacaaatcagacgacggagtaggctgcctgaccctattgagaaagagaaagggatcagtctctggtccattattaaagatagcgttggaaaggatttgacacgagtttgtcttccagtttacttcaatgaaccactctcatcccttcagaagtgctttgaggatttggagtattcatacctcttggatcaggcatatcaacatggaaaagtgggggacagcctcatgagaatcctcaaagtagctgcttttgcggcctctggctatgcttcatctgttgcaaggccttgcaaaccattcaatccattgctaggagagacctatgaagctgattaccctgacagaggaattcgtttttttgcagaaaaggttagtcatcatccaatgctgattgcctgccactgtgaaggcaagggctggaaattctggggcgacagcaatctcaaatccaagttttggggacagtcaattcaagttgaaccagttggcattttgactctagaatttgaggatggtgaaatcttccaatggaataaggttacaacaaccattcacaatctcattcttgggaagttgtactgcagccaccatggaacaatgcatataaaagggaatcgccaatattcatgtaaactgaagttcaaagagccatcacttcttgaccggaatccccatctagtacaaggctttgtagaggacaacaatgggaacaaagcttcgtttttgatagggatgtgggacgaaagcatatattgtagtaactctgatacttccaaggtgaagagcgccgatcaactgaaaggtgcctcgctgctgtgggaaaagaacaaacctgctcctaacccaactcgatacaatttatcttcattcgcgatcacactgaatgagttgaccccagggctgcaggagaaacttccacctactgattcacggctgagaccagaccagcgccacctagagaatggtgaatacgagaaagcgaatgcagagaagctgaggttggaacgacggcaaagaatgtctactaaacttcaagacaatggctggaaatcccggtggttcgagcaagacaccgaggacgggacgtattgctacaaaggtggatactgggaaacaagagagaggggcttctgggatgggtgcctcgacatttttggggatagcagaggttcaagcagccaacacgccacccagaaacaatggagtactgccatctccaatggagcatcctcttgcctctagaagagaagggggaggagccctgtgcgaggagtagagcattcgagatgtgaaggcattgtgccttgaatggtagcatagcatatgattggccacgaataggcattgccaccttgttagtatagtatagttcgatccaatgcaaataagaatgctgacattcattctttggttccttcttgcgttgaacatggatctgttgtcgtggaagaaatttgcttgctcggctaggcaaaagtctgcctacactgtatttgtttgccgatcgaaaaccaaagcaagtcaccatctataactcttcacttccatgagactgtgactgacagttcgtcatccatccagaaacaga

SEQ ID NO: 42945 - DNA, 2424 bp, Zea Mays
caaggtctttgggggtcccaagaattaaagcatgtacagtccatccaagtggccgcatatagagatagggaataaaatggaggacatatggtctgtctcagattgaatcaggggggtcttgaggattttcaggaactgagtaggttgtttgtatcagggggatcttgtggatattgaggaactgtgtaggttgtttggttgaggtgtcagcatttcgggaaagtaagtcagatgacaggagattttacatattttcccccactaagacgcttcacttgaagacaaactcaaaagttgaccgtgttgcctggattgaggctttgatcctggcaaggagtgtttattctcttgggtcacttagcgggagagcaacttttgtgcagagtgatgtttcaatttcaactgcaaggcttagagatcgaatgcatcaggagggtttgaatgagagtcttatacaggactgtgaacaaattgtgctttccgagttctcaagctaccggaagcaactgaagtgtcgttacgaggattacttaagcttgtttgggtcctgcagacataattttgaggaaggtaaagatggaagtataacacaggggacattgacacgaaatgacttctctagttctaggcatggaaattttagcgaatatagcacaacagaatctgatgagcatgagtttgagaaacacgatggaggcgaattgatttgtgaagatgaatctgcattctttgattctatagattacttcacagagtcagacaacaggtcttcaaccatgttaagtggcaaggaagtagtggattcccaaacacatgattccagtaataatatacaagcacaaatcagacgacggagtaggctgcctgaccctattgagaaagagaaagggatcagtctctggtccattattaaagatagcgttggaaaggatttgacacgagtttgtcttccagtttacttcaatgaaccactctcatcccttcagaagtgctttgaggatttggagtattcatacctcttggatcaggcatatcaacatggaaaagtgggggacagcctcatgagaatcctcaaagtagctgcttttgcggcctctggctatgcttcatctgttgcaaggccttgcaaaccattcaatccattgctaggagagacctatgaagctgattaccctgacagaggaattcgtttttttgcagaaaaggttagtcatcatccaatgctgattgcctgccactgtgaaggcaagggctggaaattctggggcgacagcaatctcaaatccaagttttggggacagtcaattcaagttgaaccagttggcattttgactctagaatttgaggatggtgaaatcttccaatggaataaggttacaacaaccattcacaatctcattcttgggaagttgtactgcagccaccatggaacaatgcatataaaagggaatcgccaatattcatgtaaactgaagttcaaagagccatcacttcttgaccggaatccccatctagtacaaggctttgtagaggacaacaatgggaacaaagcttcgtttttgatagggatgtgggacgaaagcatatattgtagtaactctgatacttccaaggtgaagagcgccgatcaactgaaaggtgcctcgctgctgtgggaaaagaacaaacctgctcctaacccaactcgatacaatttatcttcattcgcgatcacactgaatgagttgaccccagggctgcaggagaaacttccacctactgattcacggctgagaccagaccagcgccacctagagaatggtgaatacgagaaagcgaatgcagagaagctgaggttggaacgacggcaaagaatgtctactaaacttcaagacaatggctggaaatcccggtggttcgagcaagacaccgaggacgggacgtattgctacaaaggtggatactgggaaacaagagagaggggcttctgggatgggtgcctcgacatttttggggatagcagaggttcaagcagccaacacgccacccagaaacaatggagtactgccatctccaatggagcatcctcttgcctctagaagagaagggggaggagccctgtgcgaggagtagagcattcgagatgtgaaggcattgtgccttgaatggtagcatagcatatgattggccacgaataggcattgccaccttgttagtatagtatagttcgatccaatgcaaataagaatgctgacattcattctttggttccttcttgcgttgaacatggatctgttgtcgtggaagaaatttgcttgctcggctaggcaaaagtctgcctacactgtatttgtttgccgatcgaaaaccaaagcaagtcaccatctataactcttcacttccatgagactgtgactgacagttcgtcatccatccagaaacaga

SEQ ID NO: 42946 - DNA, 2466 bp, Zea Mays
cttttcaaggtctttgggggtcccaagaattaaagcatgtacagtccatccaagtggccgcatatagagatagggaataaaatggaggacatatggtctgtctcagattgaatcaggggggtcttgaggattttcaggaactgagtaggttgtttgtatcagggggatcttgtggatattgaggaactgtgtaggttgtttggttgaggtgtcagcatttcgggaaagtaagtcagatgacaggagattttacatattttcccccactaagacgcttcacttgaagacaaactcaaaagttgaccgtgttgcctggattgaggctttgatcctggcaaggagtgtttattctcttgggtcacttagcgggagagcaacttttgtgcagagtgatgtttcaatttcaactgcaaggcttagagatcgaatgcatcaggagggtttgaatgagagtcttatacaggactgtgaacaaattgtgctttccgagttctcaagctaccggaagcaactgaagtgtcgttacgaggattacttaagcttgtttgggtcctgcagacataattttgaggaattttacatagtgtattacacacatatttgtgcaggaaggtaaagatggaagtataacacaggggacattgacacgaaatgacttctctagttctaggcatggaaattttagcgaatatagcacaacagaatctgatgagcatgagtttgagaaacacgatggaggcgaattgatttgtgaagatgaatctgcattctttgattctatagattacttcacagagtcagacaacaggtcttcaaccatgttaagtggcaaggaagtagtggattcccaaacacatgattccagtaataatatacaagcacaaatcagacgacggagtaggctgcctgaccctattgagaaagagaaagggatcagtctctggtccattattaaagatagcgttggaaaggatttgacacgagtttgtcttccagtttacttcaatgaaccactctcatcccttcagaagtgctttgaggatttggagtattcatacctcttggatcaggcatatcaacatggaaaagtgggggacagcctcatgagaatcctcaaagtagctgcttttgcggcctctggctatgcttcatctgttgcaaggccttgcaaaccattcaatccattgctaggagagacctatgaagctgattaccctgacagaggaattcgtttttttgcagaaaaggttagtcatcatccaatgctgattgcctgccactgtgaaggcaagggctggaaattctggggcgacagcaatctcaaatccaagttttggggacagtcaattcaagttgaaccagttggcattttgactctagaatttgaggatggtgaaatcttccaatggaataaggttacaacaaccattcacaatctcattcttgggaagttgtactgcagccaccatggaacaatgcatataaaagggaatcgccaatattcatgtaaactgaagttcaaagagccatcacttcttgaccggaatccccatctagtacaaggctttgtagaggacaacaatgggaacaaagcttcgtttttgatagggatgtgggacgaaagcatatattgtagtaactctgatacttccaaggtgaagagcgccgatcaactgaaaggtgcctcgctgctgtgggaaaagaacaaacctgctcctaacccaactcgatacaatttatcttcattcgcgatcacactgaatgagttgaccccagggctgcaggagaaacttccacctactgattcacggctgagaccagaccagcgccacctagagaatggtgaatacgagaaagcgaatgcagagaagctgaggttggaacgacggcaaagaatgtctactaaacttcaagacaatggctggaaatcccggtggttcgagcaagacaccgaggacgggacgtattgctacaaaggtggatactgggaaacaagagagaggggcttctgggatgggtgcctcgacatttttggggatagcagaggttcaagcagccaacacgccacccagaaacaatggagtactgccatctccaatggagcatcctcttgcctctagaagagaagggggaggagccctgtgcgaggagtagagcattcgagatgtgaaggcattgtgccttgaatggtagcatagcatatgattggccacgaataggcattgccaccttgttagtatagtatagttcgatccaatgcaaataagaatgctgacattcattctttggttccttcttgcgttgaacatggatctgttgtcgtggaagaaatttgcttgctcggctaggcaaaagtctgcctacactgtatttgtttgccgatcgaaaaccaaagcaagtcaccatctataactcttcacttccatgagactgtgactgacagttcgtcatccatccagaaacaga

SEQ ID NO: 42947 - DNA, 2377 bp, Zea Mays
cttttcaaggtctttgggggtcccaagaattaaagcatgtacagtccatccaagtggccgcatatagagatagggaataaaatggaggacatatggtctgtctcagattgaatcaggggggtcttgaggattttcaggaactgagtaggttgtttgtatcagggggatcttgtggatattgaggaactgtgtaggttgtttggttgaggtttgaatgcctgatgcataatattgcataaggccaagggaagttctacacatttttcatgcgcaaggctgcctagttacaaacatatgggagctgataagttactatgtttctaggtgtcagcatttcgggaaagtaagtcagatgacaggagattttacatattttcccccactaagacgcttcacttgaagacaaactcaaaagttgaccgtgttgcctggattgaggctttgatcctggcaaggagtgtttattctcttgggtcacttagcgggagagcaacttttgtgcagagtgatgtttcaatttcaactgcaaggcttagagatcgaatgcatcaggagggtttgaatgagagtcttatacaggactgtgaacaaattgtgctttccgagttctcaagctaccggaagcaactgaagtgtcgttacgaggattacttaagcttgtttgggtcctgcagacataattttgaggaaggtaaagatggaagtataacacaggggacattgacacgaaatgacttctctagttctaggcatggaaattttagcgaatatagcacaacagaatctgatgagcatgagtttgagaaacacgatggaggcgaattgatttgtgaagatgaatctgcattctttgattctatagattacttcacagagtcagacaacaggtcttcaaccatgttaagtggcaaggaagtagtggattcccaaacacatgattccagtaataatatacaagcacaaatcagacgacggagtaggctgcctgaccctattgagaaagagaaagggatcagtctctggtccattattaaagatagcgttggaaaggatttgacacgagtttgtcttccagtttacttcaatgaaccactctcatcccttcagaagtgctttgaggatttggagtattcatacctcttggatcaggcatatcaacatggaaaagtgggggacagcctcatgagaatcctcaaagtagctgcttttgcggcctctggctatgcttcatctgttgcaaggccttgcaaaccattcaatccattgctaggagagacctatgaagctgattaccctgacagaggaattcgtttttttgcagaaaaggttacaacaaccattcacaatctcattcttgggaagttgtactgcagccaccatggaacaatgcatataaaagggaatcgccaatattcatgtaaactgaagttcaaagagccatcacttcttgaccggaatccccatctagtacaaggctttgtagaggacaacaatgggaacaaagcttcgtttttgatagggatgtgggacgaaagcatatattgtagtaactctgatacttccaaggtgaagagcgccgatcaactgaaaggtgcctcgctgctgtgggaaaagaacaaacctgctcctaacccaactcgatacaatttatcttcattcgcgatcacactgaatgagttgaccccagggctgcaggagaaacttccacctactgattcacggctgagaccagaccagcgccacctagagaatggtgaatacgagaaagcgaatgcagagaagctgaggttggaacgacggcaaagaatgtctactaaacttcaagacaatggctggaaatcccggtggttcgagcaagacaccgaggacgggacgtattgctacaaaggtggatactgggaaacaagagagaggggcttctgggatgggtgcctcgacatttttggggatagcagaggttcaagcagccaacacgccacccagaaacaatggagtactgccatctccaatggagcatcctcttgcctctagaagagaagggggaggagccctgtgcgaggagtagagcattcgagatgtgaaggcattgtgccttgaatggtagcatagcatatgattggccacgaataggcattgccaccttgttagtatagtatagttcgatccaatgcaaataagaatgctgacattcattctttggttccttcttgcgttgaacatggatctgttgtcgtggaagaaatttgcttgctcggctaggcaaaagtctgcctacactgtatttgtttgccgatcgaaaaccaaagcaagtcaccatctataactcttcacttccatgagactgtgactgacagttcgtcatccatccagaaacaga

SEQ ID NO: 42948 - DNA, 2578 bp, Zea Mays
attgaactcccagtgttggtacaatcactgggtcttttcaaggtctttgggggtcccaagaattaaagcatgtacagtccatccaagtggccgcatatagagatagggaataaaatggaggacatatggtctgtctcagattgaatcaggggggtcttgaggattttcaggaactgagtaggttgtttgtatcagggggatcttgtggatattgaggaactgtgtaggttgtttggttgaggtttgaatgcctgatgcataatattgcataaggccaagggaagttctacacatttttcatgcgcaaggctgcctagttacaaacatatgggagctgataagttactatgtttctaggtgtcagcatttcgggaaagtaagtcagatgacaggagattttacatattttcccccactaagacgcttcacttgaagacaaactcaaaagttgaccgtgttgcctggattgaggctttgatcctggcaaggagtgtttattctcttgggtcacttagcgggagagcaacttttgtgcagagtgatgtttcaatttcaactgcaaggcttagagatcgaatgcatcaggagggtttgaatgagagtcttatacaggactgtgaacaaattgtgctttccgagttctcaagctaccggaagcaactgaagtgtcgttacgaggattacttaagcttgtttgggtcctgcagacataattttgaggaaggtaaagatggaagtataacacaggggacattgacacgaaatgacttctctagttctaggcatggaaattttagcgaatatagcacaacagaatctgatgagcatgagtttgagaaacacgatggaggcgaattgatttgtgaagatgaatctgcattctttgattctatagattacttcacagagtcagacaacaggtcttcaaccatgttaagtggcaaggaagtagtggattcccaaacacatgattccagtaataatatacaagcacaaatcagacgacggagtaggctgcctgaccctattgagaaagagaaagggatcagtctctggtccattattaaagatagcgttggaaaggatttgacacgagtttgtcttccagtttacttcaatgaaccactctcatcccttcagaagtgctttgaggatttggagtattcatacctcttggatcaggcatatcaacatggaaaagtgggggacagcctcatgagaatcctcaaagtagctgcttttgcggcctctggctatgcttcatctgttgcaaggccttgcaaaccattcaatccattgctaggagagacctatgaagctgattaccctgacagaggaattcgtttttttgcagaaaaggttagtcatcatccaatgctgattgcctgccactgtgaaggcaagggctggaaattctggggcgacagcaatctcaaatccaagttttggggacagtcaattcaagttgaaccagttggcattttgactctagaatttgaggatggtgaaatcttccaatggaataaggttacaacaaccattcacaatctcattcttgggaagttgtactgcagccaccatggaacaatgcatataaaagggaatcgccaatattcatgtaaactgaagttcaaagagccatcacttcttgaccggaatccccatctagtacaaggctttgtagaggacaacaatgggaacaaagcttcgtttttgatagggatgtgggacgaaagcatatattgtagtaactctgatacttccaaggtgaagagcgccgatcaactgaaaggtgcctcgctgctgtgggaaaagaacaaacctgctcctaacccaactcgatacaatttatcttcattcgcgatcacactgaatgagttgaccccagggctgcaggagaaacttccacctactgattcacggctgagaccagaccagcgccacctagagaatggtgaatacgagaaagcgaatgcagagaagctgaggttggaacgacggcaaagaatgtctactaaacttcaagacaatggctggaaatcccggtggttcgagcaagacaccgaggacgggacgtattgctacaaaggtggatactgggaaacaagagagaggggcttctgggatgggtgcctcgacatttttggggatagcagaggttcaagcagccaacacgccacccagaaacaatggagtactgccatctccaatggagcatcctcttgcctctagaagagaagggggaggagccctgtgcgaggagtagagcattcgagatgtgaaggcattgtgccttgaatggtagcatagcatatgattggccacgaataggcattgccaccttgttagtatagtatagttcgatccaatgcaaataagaatgctgacattcattctttggttccttcttgcgttgaacatggatctgttgtcgtggaagaaatttgcttgctcggctaggcaaaagtctgcctacactgtatttgtttgccgatcgaaaaccaaagcaagtcaccatctataactcttcacttccatgagactgtgactgacagttcgtcatccatccagaaacaga

SEQ ID NO: 42949 - DNA, 2622 bp, Zea Mays
atttgtactgctccgggcgttgcttttccacgatgcttttactagctattgaactcccagtgttggtacaatcactgggtcttttcaaggtctttgggggtcccaagaattaaagcatgtacagtccatccaagtggccgcatatagagatagggaataaaatggaggacatatggtctgtctcagattgaatcaggggggtcttgaggattttcaggaactgagtaggttgtttgtatcagggggatcttgtggatattgaggaactgtgtaggttgtttggttgaggtttgaatgcctgatgcataatattgcataaggccaagggaagttctacacatttttcatgcgcaaggctgcctagttacaaacatatgggagctgataagttactatgtttctaggtgtcagcatttcgggaaagtaagtcagatgacaggagattttacatattttcccccactaagacgcttcacttgaagacaaactcaaaagttgaccgtgttgcctggattgaggctttgatcctggcaaggagtgtttattctcttgggtcacttagcgggagagcaacttttgtgcagagtgatgtttcaatttcaactgcaaggcttagagatcgaatgcatcaggagggtttgaatgagagtcttatacaggactgtgaacaaattgtgctttccgagttctcaagctaccggaagcaactgaagtgtcgttacgaggattacttaagcttgtttgggtcctgcagacataattttgaggaattttacatagtgtattacacacatatttgtgcaggaaggtaaagatggaagtataacacaggggacattgacacgaaatgacttctctagttctaggcatggaaattttagcgaatatagcacaacagaatctgatgagcatgagtttgagaaacacgatggaggcgaattgatttgtgaagatgaatctgcattctttgattctatagattacttcacagagtcagacaacaggtcttcaaccatgttaagtggcaaggaagtagtggattcccaaacacatgattccagtaataatatacaagcacaaatcagacgacggagtaggctgcctgaccctattgagaaagagaaagggatcagtctctggtccattattaaagatagcgttggaaaggatttgacacgagtttgtcttccagtttacttcaatgaaccactctcatcccttcagaagtgctttgaggatttggagtattcatacctcttggatcaggcatatcaacatggaaaagtgggggacagcctcatgagaatcctcaaagtagctgcttttgcggcctctggctatgcttcatctgttgcaaggccttgcaaaccattcaatccattgctaggagagacctatgaagctgattaccctgacagaggaattcgtttttttgcagaaaaggcaagggctggaaattctggggcgacagcaatctcaaatccaagttttggggacagtcaattcaagttgaaccagttggcattttgactctagaatttgaggatggtgaaatcttccaatggaataaggttacaacaaccattcacaatctcattcttgggaagttgtactgcagccaccatggaacaatgcatataaaagggaatcgccaatattcatgtaaactgaagttcaaagagccatcacttcttgaccggaatccccatctagtacaaggctttgtagaggacaacaatgggaacaaagcttcgtttttgatagggatgtgggacgaaagcatatattgtagtaactctgatacttccaaggtgaagagcgccgatcaactgaaaggtgcctcgctgctgtgggaaaagaacaaacctgctcctaacccaactcgatacaatttatcttcattcgcgatcacactgaatgagttgaccccagggctgcaggagaaacttccacctactgattcacggctgagaccagaccagcgccacctagagaatggtgaatacgagaaagcgaatgcagagaagctgaggttggaacgacggcaaagaatgtctactaaacttcaagacaatggctggaaatcccggtggttcgagcaagacaccgaggacgggacgtattgctacaaaggtggatactgggaaacaagagagaggggcttctgggatgggtgcctcgacatttttggggatagcagaggttcaagcagccaacacgccacccagaaacaatggagtactgccatctccaatggagcatcctcttgcctctagaagagaagggggaggagccctgtgcgaggagtagagcattcgagatgtgaaggcattgtgccttgaatggtagcatagcatatgattggccacgaataggcattgccaccttgttagtatagtatagttcgatccaatgcaaataagaatgctgacattcattctttggttccttcttgcgttgaacatggatctgttgtcgtggaagaaatttgcttgctcggctaggcaaaagtctgcctacactgtatttgtttgccgatcgaaaaccaaagcaagtcaccatctataactcttcacttccatgagactgtgactgacagttcgtcatccatccagaaacaga

SEQ ID NO: 42950 - DNA, 2247 bp, Zea Mays
ccacgtgcggttggcgcgtgatcccggtgtcagcatttcgggaaagtaagtcagatgacaggagattttacatattttcccccactaagacgcttcacttgaagacaaactcaaaagttgaccgtgttgcctggattgaggctttgatcctggcaaggagtgtttattctcttgggtcacttagcgggagagcaacttttgtgcagagtgatgtttcaatttcaactgcaaggcttagagatcgaatgcatcaggagggtttgaatgagagtcttatacaggactgtgaacaaattgtgctttccgagttctcaagctaccggaagcaactgaagtgtcgttacgaggattacttaagcttgtttgggtcctgcagacataattttgaggaaggtaaagatggaagtataacacaggggacattgacacgaaatgacttctctagttctaggcatggaaattttagcgaatatagcacaacagaatctgatgagcatgagtttgagaaacacgatggaggcgaattgatttgtgaagatgaatctgcattctttgattctatagattacttcacagagtcagacaacaggtcttcaaccatgttaagtggcaaggaagtagtggattcccaaacacatgattccagtaataatatacaagcacaaatcagacgacggagtaggctgcctgaccctattgagaaagagaaagggatcagtctctggtccattattaaagatagcgttggaaaggatttgacacgagtttgtcttccagtttacttcaatgaaccactctcatcccttcagaagtgctttgaggatttggagtattcatacctcttggatcaggcatatcaacatggaaaagtgggggacagcctcatgagaatcctcaaagtagctgcttttgcggcctctggctatgcttcatctgttgcaaggccttgcaaaccattcaatccattgctaggagagacctatgaagctgattaccctgacagaggaattcgtttttttgcagaaaaggttagtcatcatccaatgctgattgcctgccactgtgaaggcaagggctggaaattctggggcgacagcaatctcaaatccaagttttggggacagtcaattcaagttgaaccagttggcattttgactctagaatttgaggatggtgaaatcttccaatggaataaggttacaacaaccattcacaatctcattcttgggaagttgtactgcagccaccatggaacaatgcatataaaagggaatcgccaatattcatgtaaactgaagttcaaagagccatcacttcttgaccggaatccccatctagtacaaggctttgtagaggacaacaatgggaacaaagcttcgtttttgatagggatgtgggacgaaagcatatattgtagtaactctgatacttccaaggtgaagagcgccgatcaactgaaaggtgcctcgctgctgtgggaaaagaacaaacctgctcctaacccaactcgatacaatttatcttcattcgcgatcacactgaatgagttgaccccagggctgcaggagaaacttccacctactgattcacggctgagaccagaccagcgccacctagagaatggtgaatacgagaaagcgaatgcagagaagctgaggttggaacgacggcaaagaatgtctactaaacttcaagacaatggctggaaatcccggtggttcgagcaagacaccgaggacgggacgtattgctacaaaggtggatactgggaaacaagagagaggggcttctgggatgggtgcctcgacatttttggggatagcagaggttcaagcagccaacacgccacccagaaacaatggagtactgccatctccaatggagcatcctcttgcctctagaagagaagggggaggagccctgtgcgaggagtagagcattcgagatgtgaaggcattgtgccttgaatggtagcatagcatatgattggccacgaataggcattgccaccttgttagtatagtatagttcgatccaatgcaaataagaatgctgacattcattctttggttccttcttgcgttgaacatggatctgttgtcgtggaagaaatttgcttgctcggctaggcaaaagtctgcctacactgtatttgtttgccgatcgaaaaccaaagcaagtcaccatctataactcttcacttccatgagactgtgactgacagttcgtcatccatccagaaacaga

SEQ ID NO: 42951 - DNA, 2678 bp, Zea Mays
gtcccatccattccctcaccgtcgccaccgttggagcgtcgcgcggacgatacagagcatgagaggcggagggagcggccgcggccatgggaacgaccaatacagccacaaccaccatcacagctcgttgtgctgcctctctgccgcgccgccgctggctggggacgccaccccgacgctgactccggagccagaggctgccgccgcctcgattgcctcgacggtgtcgacggttgtggtggagggcgtgctgcacaagtggaccaactacggtcgcgggtggcgggagcgctggttctcgctccgcgacggcgtcctgtcctactccaagattcgggccaacgcgggggcgaagacgggggcgggggcgacggacggtgacggggaggttagagtgattggttctagggtggaaggagcgcgccgcacggagaagcctgccggcgtcgtattcctcaaggtgtcagcatttcgggaaagtaagtcagatgacaggagattttacatattttcccccactaagacgcttcacttgaagacaaactcaaaagttgaccgtgttgcctggattgaggctttgatcctggcaaggagtgtttattctcttgggtcacttagcgggagagcaacttttgtgcagagtgatgtttcaatttcaactgcaaggcttagagatcgaatgcatcaggagggtttgaatgagagtcttatacaggactgtgaacaaattgtgctttccgagttctcaagctaccggaagcaactgaagtgtcgttacgaggattacttaagcttgtttgggtcctgcagacataattttgaggaattttacatagtgtattacacacatatttgtgcaggaaggtaaagatggaagtataacacaggggacattgacacgaaatgacttctctagttctaggcatggaaattttagcgaatatagcacaacagaatctgatgagcatgagtttgagaaacacgatggaggcgaattgatttgtgaagatgaatctgcattctttgattctatagattacttcacagagtcagacaacaggtcttcaaccatgttaagtggcaaggaagtagtggattcccaaacacatgattccagtaataatatacaagcacaaatcagacgacggagtaggctgcctgaccctattgagaaagagaaagggatcagtctctggtccattattaaagatagcgttggaaaggatttgacacgagtttgtcttccagtttacttcaatgaaccactctcatcccttcagaagtgctttgaggatttggagtattcatacctcttggatcaggcatatcaacatggaaaagtgggggacagcctcatgagaatcctcaaagtagctgcttttgcggcctctggctatgcttcatctgttgcaaggccttgcaaaccattcaatccattgctaggagagacctatgaagctgattaccctgacagaggaattcgtttttttgcagaaaaggcaagggctggaaattctggggcgacagcaatctcaaatccaagttttggggacagtcaattcaagttgaaccagttggcattttgactctagaatttgaggatggtgaaatcttccaatggaataaggttacaacaaccattcacaatctcattcttgggaagttgtactgcagccaccatggaacaatgcatataaaagggaatcgccaatattcatgtaaactgaagttcaaagagccatcacttcttgaccggaatccccatctagtacaaggctttgtagaggacaacaatgggaacaaagcttcgtttttgatagggatgtgggacgaaagcatatattgtagtaactctgatacttccaaggtgaagagcgccgatcaactgaaaggtgcctcgctgctgtgggaaaagaacaaacctgctcctaacccaactcgatacaatttatcttcattcgcgatcacactgaatgagttgaccccagggctgcaggagaaacttccacctactgattcacggctgagaccagaccagcgccacctagagaatggtgaatacgagaaagcgaatgcagagaagctgaggttggaacgacggcaaagaatgtctactaaacttcaagacaatggctggaaatcccggtggttcgagcaagacaccgaggacgggacgtattgctacaaaggtggatactgggaaacaagagagaggggcttctgggatgggtgcctcgacatttttggggatagcagaggttcaagcagccaacacgccacccagaaacaatggagtactgccatctccaatggagcatcctcttgcctctagaagagaagggggaggagccctgtgcgaggagtagagcattcgagatgtgaaggcattgtgccttgaatggtagcatagcatatgattggccacgaataggcattgccaccttgttagtatagtatagttcgatccaatgcaaataagaatgctgacattcattctttggttccttcttgcgttgaacatggatctgttgtcgtggaagaaatttgcttgctcggctaggcaaaagtctgcctacactgtatttgtttgccgatcgaaaaccaaagcaagtcaccatctataactcttcacttccatgagactgtgactgacagttcgtcatccatccagaaacaga

SEQ ID NO: 42952 - DNA, 2797 bp, Zea Mays
cccgtcccatccattccctcaccgtcgccaccgttggagcgtcgcgcggacgatacagagcatgagaggcggagggagcggccgcggccatgggaacgaccaatacagccacaaccaccatcacagctcgttgtgctgcctctctgccgcgccgccgctggctggggacgccaccccgacgctgactccggagccagaggctgccgccgcctcgattgcctcgacggtgtcgacggttgtggtggagggcgtgctgcacaagtggaccaactacggtcgcgggtggcgggagcgctggttctcgctccgcgacggcgtcctgtcctactccaagattcgggccaacgcgggggcgaagacgggggcgggggcgacggacggtgacggggaggttagagtgattggttctagggtggaaggagcgcgccgcacggagaagcctgccggcgtcgtattcctcaaggtttgaatgcctgatgcataatattgcataaggccaagggaagttctacacatttttcatgcgcaaggctgcctagttacaaacatatgggagctgataagttactatgtttctaggtgtcagcatttcgggaaagtaagtcagatgacaggagattttacatattttcccccactaagacgcttcacttgaagacaaactcaaaagttgaccgtgttgcctggattgaggctttgatcctggcaaggagtgtttattctcttgggtcacttagcgggagagcaacttttgtgcagagtgatgtttcaatttcaactgcaaggcttagagatcgaatgcatcaggagggtttgaatgagagtcttatacaggactgtgaacaaattgtgctttccgagttctcaagctaccggaagcaactgaagtgtcgttacgaggattacttaagcttgtttgggtcctgcagacataattttgaggaattttacatagtgtattacacacatatttgtgcaggaaggtaaagatggaagtataacacaggggacattgacacgaaatgacttctctagttctaggcatggaaattttagcgaatatagcacaacagaatctgatgagcatgagtttgagaaacacgatggaggcgaattgatttgtgaagatgaatctgcattctttgattctatagattacttcacagagtcagacaacaggtcttcaaccatgttaagtggcaaggaagtagtggattcccaaacacatgattccagtaataatatacaagcacaaatcagacgacggagtaggctgcctgaccctattgagaaagagaaagggatcagtctctggtccattattaaagatagcgttggaaaggatttgacacgagtttgtcttccagtttacttcaatgaaccactctcatcccttcagaagtgctttgaggatttggagtattcatacctcttggatcaggcatatcaacatggaaaagtgggggacagcctcatgagaatcctcaaagtagctgcttttgcggcctctggctatgcttcatctgttgcaaggccttgcaaaccattcaatccattgctaggagagacctatgaagctgattaccctgacagaggaattcgtttttttgcagaaaaggcaagggctggaaattctggggcgacagcaatctcaaatccaagttttggggacagtcaattcaagttgaaccagttggcattttgactctagaatttgaggatggtgaaatcttccaatggaataaggttacaacaaccattcacaatctcattcttgggaagttgtactgcagccaccatggaacaatgcatataaaagggaatcgccaatattcatgtaaactgaagttcaaagagccatcacttcttgaccggaatccccatctagtacaaggctttgtagaggacaacaatgggaacaaagcttcgtttttgatagggatgtgggacgaaagcatatattgtagtaactctgatacttccaaggtgaagagcgccgatcaactgaaaggtgcctcgctgctgtgggaaaagaacaaacctgctcctaacccaactcgatacaatttatcttcattcgcgatcacactgaatgagttgaccccagggctgcaggagaaacttccacctactgattcacggctgagaccagaccagcgccacctagagaatggtgaatacgagaaagcgaatgcagagaagctgaggttggaacgacggcaaagaatgtctactaaacttcaagacaatggctggaaatcccggtggttcgagcaagacaccgaggacgggacgtattgctacaaaggtggatactgggaaacaagagagaggggcttctgggatgggtgcctcgacatttttggggatagcagaggttcaagcagccaacacgccacccagaaacaatggagtactgccatctccaatggagcatcctcttgcctctagaagagaagggggaggagccctgtgcgaggagtagagcattcgagatgtgaaggcattgtgccttgaatggtagcatagcatatgattggccacgaataggcattgccaccttgttagtatagtatagttcgatccaatgcaaataagaatgctgacattcattctttggttccttcttgcgttgaacatggatctgttgtcgtggaagaaatttgcttgctcggctaggcaaaagtctgcctacactgtatttgtttgccgatcgaaaaccaaagcaagtcaccatctataactcttcacttccatgagactgtgactgacagttcgtcatccatccagaaacaga

SEQ ID NO: 42953 - DNA, 2691 bp, Zea Mays
atcgcgtcccgtcccatccattccctcaccgtcgccaccgttggagcgtcgcgcggacgatacagagcatgagaggcggagggagcggccgcggccatgggaacgaccaatacagccacaaccaccatcacagctcgttgtgctgcctctctgccgcgccgccgctggctggggacgccaccccgacgctgactccggagccagaggctgccgccgcctcgattgcctcgacggtgtcgacggttgtggtggagggcgtgctgcacaagtggaccaactacggtcgcgggtggcgggagcgctggttctcgctccgcgacggcgtcctgtcctactccaagattcgggccaacgcgggggcgaagacgggggcgggggcgacggacggtgacggggaggttagagtgattggttctagggtggaaggagcgcgccgcacggagaagcctgccggcgtcgtattcctcaaggtgtcagcatttcgggaaagtaagtcagatgacaggagattttacatattttcccccactaagacgcttcacttgaagacaaactcaaaagttgaccgtgttgcctggattgaggctttgatcctggcaaggagtgtttattctcttgggtcacttagcgggagagcaacttttgtgcagagtgatgtttcaatttcaactgcaaggcttagagatcgaatgcatcaggagggtttgaatgagagtcttatacaggactgtgaacaaattgtgctttccgagttctcaagctaccggaagcaactgaagtgtcgttacgaggattacttaagcttgtttgggtcctgcagacataattttgaggaaggtaaagatggaagtataacacaggggacattgacacgaaatgacttctctagttctaggcatggaaattttagcgaatatagcacaacagaatctgatgagcatgagtttgagaaacacgatggaggcgaattgatttgtgaagatgaatctgcattctttgattctatagattacttcacagagtcagacaacaggtcttcaaccatgttaagtggcaaggaagtagtggattcccaaacacatgattccagtaataatatacaagcacaaatcagacgacggagtaggctgcctgaccctattgagaaagagaaagggatcagtctctggtccattattaaagatagcgttggaaaggatttgacacgagtttgtcttccagtttacttcaatgaaccactctcatcccttcagaagtgctttgaggatttggagtattcatacctcttggatcaggcatatcaacatggaaaagtgggggacagcctcatgagaatcctcaaagtagctgcttttgcggcctctggctatgcttcatctgttgcaaggccttgcaaaccattcaatccattgctaggagagacctatgaagctgattaccctgacagaggaattcgtttttttgcagaaaaggttagtcatcatccaatgctgattgcctgccactgtgaaggcaagggctggaaattctggggcgacagcaatctcaaatccaagttttggggacagtcaattcaagttgaaccagttggcattttgactctagaatttgaggatggtgaaatcttccaatggaataaggttacaacaaccattcacaatctcattcttgggaagttgtactgcagccaccatggaacaatgcatataaaagggaatcgccaatattcatgtaaactgaagttcaaagagccatcacttcttgaccggaatccccatctagtacaaggctttgtagaggacaacaatgggaacaaagcttcgtttttgatagggatgtgggacgaaagcatatattgtagtaactctgatacttccaaggtgaagagcgccgatcaactgaaaggtgcctcgctgctgtgggaaaagaacaaacctgctcctaacccaactcgatacaatttatcttcattcgcgatcacactgaatgagttgaccccagggctgcaggagaaacttccacctactgattcacggctgagaccagaccagcgccacctagagaatggtgaatacgagaaagcgaatgcagagaagctgaggttggaacgacggcaaagaatgtctactaaacttcaagacaatggctggaaatcccggtggttcgagcaagacaccgaggacgggacgtattgctacaaaggtggatactgggaaacaagagagaggggcttctgggatgggtgcctcgacatttttggggatagcagaggttcaagcagccaacacgccacccagaaacaatggagtactgccatctccaatggagcatcctcttgcctctagaagagaagggggaggagccctgtgcgaggagtagagcattcgagatgtgaaggcattgtgccttgaatggtagcatagcatatgattggccacgaataggcattgccaccttgttagtatagtatagttcgatccaatgcaaataagaatgctgacattcattctttggttccttcttgcgttgaacatggatctgttgtcgtggaagaaatttgcttgctcggctaggcaaaagtctgcctacactgtatttgtttgccgatcgaaaaccaaagcaagtcaccatctataactcttcacttccatgagactgtgactgacagttcgtcatccatccagaaacaga

SEQ ID NO: 42954 - DNA, 2854 bp, Zea Mays
cgaaactcgcatcgcgtcccgtcccatccattccctcaccgtcgccaccgttggagcgtcgcgcggacgatacagagcatgagaggcggagggagcggccgcggccatgggaacgaccaatacagccacaaccaccatcacagctcgttgtgctgcctctctgccgcgccgccgctggctggggacgccaccccgacgctgactccggagccagaggctgccgccgcctcgattgcctcgacggtgtcgacggttgtggtggagggcgtgctgcacaagtggaccaactacggtcgcgggtggcgggagcgctggttctcgctccgcgacggcgtcctgtcctactccaagattcgggccaacgcgggggcgaagacgggggcgggggcgacggacggtgacggggaggttagagtgattggttctagggtggaaggagcgcgccgcacggagaagcctgccggcgtcgtattcctcaaggtttgaatgcctgatgcataatattgcataaggccaagggaagttctacacatttttcatgcgcaaggctgcctagttacaaacatatgggagctgataagttactatgtttctaggtgtcagcatttcgggaaagtaagtcagatgacaggagattttacatattttcccccactaagacgcttcacttgaagacaaactcaaaagttgaccgtgttgcctggattgaggctttgatcctggcaaggagtgtttattctcttgggtcacttagcgggagagcaacttttgtgcagagtgatgtttcaatttcaactgcaaggcttagagatcgaatgcatcaggagggtttgaatgagagtcttatacaggactgtgaacaaattgtgctttccgagttctcaagctaccggaagcaactgaagtgtcgttacgaggattacttaagcttgtttgggtcctgcagacataattttgaggaattttacatagtgtattacacacatatttgtgcaggaaggtaaagatggaagtataacacaggggacattgacacgaaatgacttctctagttctaggcatggaaattttagcgaatatagcacaacagaatctgatgagcatgagtttgagaaacacgatggaggcgaattgatttgtgaagatgaatctgcattctttgattctatagattacttcacagagtcagacaacaggtcttcaaccatgttaagtggcaaggaagtagtggattcccaaacacatgattccagtaataatatacaagcacaaatcagacgacggagtaggctgcctgaccctattgagaaagagaaagggatcagtctctggtccattattaaagatagcgttggaaaggatttgacacgagtttgtcttccagtttacttcaatgaaccactctcatcccttcagaagtgctttgaggatttggagtattcatacctcttggatcaggcatatcaacatggaaaagtgggggacagcctcatgagaatcctcaaagtagctgcttttgcggcctctggctatgcttcatctgttgcaaggccttgcaaaccattcaatccattgctaggagagacctatgaagctgattaccctgacagaggaattcgtttttttgcagaaaaggttagtcatcatccaatgctgattgcctgccactgtgaaggcaagggctggaaattctggggcgacagcaatctcaaatccaagttttggggacagtcaattcaagttgaaccagttggcattttgactctagaatttgaggatggtgaaatcttccaatggaataaggttacaacaaccattcacaatctcattcttgggaagttgtactgcagccaccatggaacaatgcatataaaagggaatcgccaatattcatgtaaactgaagttcaaagagccatcacttcttgaccggaatccccatctagtacaaggctttgtagaggacaacaatgggaacaaagcttcgtttttgatagggatgtgggacgaaagcatatattgtagtaactctgatacttccaaggtgaagagcgccgatcaactgaaaggtgcctcgctgctgtgggaaaagaacaaacctgctcctaacccaactcgatacaatttatcttcattcgcgatcacactgaatgagttgaccccagggctgcaggagaaacttccacctactgattcacggctgagaccagaccagcgccacctagagaatggtgaatacgagaaagcgaatgcagagaagctgaggttggaacgacggcaaagaatgtctactaaacttcaagacaatggctggaaatcccggtggttcgagcaagacaccgaggacgggacgtattgctacaaaggtggatactgggaaacaagagagaggggcttctgggatgggtgcctcgacatttttggggatagcagaggttcaagcagccaacacgccacccagaaacaatggagtactgccatctccaatggagcatcctcttgcctctagaagagaagggggaggagccctgtgcgaggagtagagcattcgagatgtgaaggcattgtgccttgaatggtagcatagcatatgattggccacgaataggcattgccaccttgttagtatagtatagttcgatccaatgcaaataagaatgctgacattcattctttggttccttcttgcgttgaacatggatctgttgtcgtggaagaaatttgcttgctcggctaggcaaaagtctgcctacactgtatttgtttgccgatcgaaaaccaaagcaagtcaccatctataactcttcacttccatgagactgtgactgacagttcgtcatccatccagaaacaga

SEQ ID NO: 42955 - DNA, 2578 bp, Zea Mays
gcgaaactcgcatcgcgtcccgtcccatccattccctcaccgtcgccaccgttggagcgtcgcgcggacgatacagagcatgagaggcggagggagcggccgcggccatgggaacgaccaatacagccacaaccaccatcacagctcgttgtgctgcctctctgccgcgccgccgctggctggggacgccaccccgacgctgactccggagccagaggctgccgccgcctcgattgcctcgacggtgtcgacggttgtggtggagggcgtgctgcacaagtggaccaactacggtcgcgggtggcgggagcgctggttctcgctccgcgacggcgtcctgtcctactccaagattcgggccaacgcgggggcgaagacgggggcgggggcgacggacggtgacggggaggttagagtgattggttctagggtggaaggagcgcgccgcacggagaagcctgccggcgtcgtattcctcaaggtttgaatgcctgatgcataatattgcataaggccaagggaagttctacacatttttcatgcgcaaggctgcctagttacaaacatatgggagctgataagttactatgtttctaggtgtcagcatttcgggaaaagtgatgtttcaatttcaactgcaaggcttagagatcgaatgcatcaggagggtttgaatgagagtcttatacaggactgtgaacaaattgtgctttccgagttctcaagctaccggaagcaactgaagtgtcgttacgaggattacttaagcttgtttgggtcctgcagacataattttgagaatatagcacaacagaatctgatgagcatgagtttgagaaacacgatggaggcgaattgatttgtgaagatgaatctgcattctttgattctatagattacttcacagagtcagacaacaggtcttcaaccatgttaagtggcaaggaagtagtggattcccaaacacatgattccagtaataatatacaagcacaaatcagacgacggagtaggctgcctgaccctattgagaaagagaaagggatcagtctctggtccattattaaagatagcgttggaaaggatttgacacgagtttgtcttccagtttacttcaatgaaccactctcatcccttcagaagtgctttgaggatttggagtattcatacctcttggatcaggcatatcaacatggaaaagtgggggacagcctcatgagaatcctcaaagtagctgcttttgcggcctctggctatgcttcatctgttgcaaggccttgcaaaccattcaatccattgctaggagagacctatgaagctgattaccctgacagaggaattcgtttttttgcagaaaaggttagtcatcatccaatgctgattgcctgccactgtgaaggcaagggctggaaattctggggcgacagcaatctcaaatccaagttttggggacagtcaattcaagttgaaccagttggcattttgactctagaatttgaggatggtgaaatcttccaatggaataaggttacaacaaccattcacaatctcattcttgggaagttgtactgcagccaccatggaacaatgcatataaaagggaatcgccaatattcatgtaaactgaagttcaaagagccatcacttcttgaccggaatccccatctagtacaaggctttgtagaggacaacaatgggaacaaagcttcgtttttgatagggatgtgggacgaaagcatatattgtagtaactctgatacttccaaggtgaagagcgccgatcaactgaaaggtgcctcgctgctgtgggaaaagaacaaacctgctcctaacccaactcgatacaatttatcttcattcgcgatcacactgaatgagttgaccccagggctgcaggagaaacttccacctactgattcacggctgagaccagaccagcgccacctagagaatggtgaatacgagaaagcgaatgcagagaagctgaggttggaacgacggcaaagaatgtctactaaacttcaagacaatggctggaaatcccggtggttcgagcaagacaccgaggacgggacgtattgctacaaaggtggatactgggaaacaagagagaggggcttctgggatgggtgcctcgacatttttggggatagcagaggttcaagcagccaacacgccacccagaaacaatggagtactgccatctccaatggagcatcctcttgcctctagaagagaagggggaggagccctgtgcgaggagtagagcattcgagatgtgaaggcattgtgccttgaatggtagcatagcatatgattggccacgaataggcattgccaccttgttagtatagtatagttcgatccaatgcaaataagaatgctgacattcattctttggttccttcttgcgttgaacatggatctgttgtcgtggaagaaatttgcttgctcggctaggcaaaagtctgcctacactgtatttgtttgccgatcgaaaaccaaagcaagtcaccatctataactcttcacttccatgagactgtgactgacagttcgtcatccatccagaaacaga

SEQ ID NO: 42956 - DNA, 2818 bp, Zea Mays
gcgaaactcgcatcgcgtcccgtcccatccattccctcaccgtcgccaccgttggagcgtcgcgcggacgatacagagcatgagaggcggagggagcggccgcggccatgggaacgaccaatacagccacaaccaccatcacagctcgttgtgctgcctctctgccgcgccgccgctggctggggacgccaccccgacgctgactccggagccagaggctgccgccgcctcgattgcctcgacggtgtcgacggttgtggtggagggcgtgctgcacaagtggaccaactacggtcgcgggtggcgggagcgctggttctcgctccgcgacggcgtcctgtcctactccaagattcgggccaacgcgggggcgaagacgggggcgggggcgacggacggtgacggggaggttagagtgattggttctagggtggaaggagcgcgccgcacggagaagcctgccggcgtcgtattcctcaaggtttgaatgcctgatgcataatattgcataaggccaagggaagttctacacatttttcatgcgcaaggctgcctagttacaaacatatgggagctgataagttactatgtttctaggtgtcagcatttcgggaaagtaagtcagatgacaggagattttacatattttcccccactaagacgcttcacttgaagacaaactcaaaagttgaccgtgttgcctggattgaggctttgatcctggcaaggagtgtttattctcttgggtcacttagcgggagagcaacttttgtgcagagtgatgtttcaatttcaactgcaaggcttagagatcgaatgcatcaggagggtttgaatgagagtcttatacaggactgtgaacaaattgtgctttccgagttctcaagctaccggaagcaactgaagtgtcgttacgaggattacttaagcttgtttgggtcctgcagacataattttgaggaaggtaaagatggaagtataacacaggggacattgacacgaaatgacttctctagttctaggcatggaaattttagcgaatatagcacaacagaatctgatgagcatgagtttgagaaacacgatggaggcgaattgatttgtgaagatgaatctgcattctttgattctatagattacttcacagagtcagacaacaggtcttcaaccatgttaagtggcaaggaagtagtggattcccaaacacatgattccagtaataatatacaagcacaaatcagacgacggagtaggctgcctgaccctattgagaaagagaaagggatcagtctctggtccattattaaagatagcgttggaaaggatttgacacgagtttgtcttccagtttacttcaatgaaccactctcatcccttcagaagtgctttgaggatttggagtattcatacctcttggatcaggcatatcaacatggaaaagtgggggacagcctcatgagaatcctcaaagtagctgcttttgcggcctctggctatgcttcatctgttgcaaggccttgcaaaccattcaatccattgctaggagagacctatgaagctgattaccctgacagaggaattcgtttttttgcagaaaaggttagtcatcatccaatgctgattgcctgccactgtgaaggcaagggctggaaattctggggcgacagcaatctcaaatccaagttttggggacagtcaattcaagttgaaccagttggcattttgactctagaatttgaggatggtgaaatcttccaatggaataaggttacaacaaccattcacaatctcattcttgggaagttgtactgcagccaccatggaacaatgcatataaaagggaatcgccaatattcatgtaaactgaagttcaaagagccatcacttcttgaccggaatccccatctagtacaaggctttgtagaggacaacaatgggaacaaagcttcgtttttgatagggatgtgggacgaaagcatatattgtagtaactctgatacttccaaggtgaagagcgccgatcaactgaaaggtgcctcgctgctgtgggaaaagaacaaacctgctcctaacccaactcgatacaatttatcttcattcgcgatcacactgaatgagttgaccccagggctgcaggagaaacttccacctactgattcacggctgagaccagaccagcgccacctagagaatggtgaatacgagaaagcgaatgcagagaagctgaggttggaacgacggcaaagaatgtctactaaacttcaagacaatggctggaaatcccggtggttcgagcaagacaccgaggacgggacgtattgctacaaaggtggatactgggaaacaagagagaggggcttctgggatgggtgcctcgacatttttggggatagcagaggttcaagcagccaacacgccacccagaaacaatggagtactgccatctccaatggagcatcctcttgcctctagaagagaagggggaggagccctgtgcgaggagtagagcattcgagatgtgaaggcattgtgccttgaatggtagcatagcatatgattggccacgaataggcattgccaccttgttagtatagtatagttcgatccaatgcaaataagaatgctgacattcattctttggttccttcttgcgttgaacatggatctgttgtcgtggaagaaatttgcttgctcggctaggcaaaagtctgcctacactgtatttgtttgccgatcgaaaaccaaagcaagtcaccatctataactcttcacttccatgagactgtgactgacagttcgtcatccatccagaaacaga

SEQ ID NO: 42957 - DNA, 3323 bp, Zea Mays
cgaaggcaaggggtgggaaaaaacacgaggcgggggtgggggatagaaatacgagagcgagcgagcgagcgagcgagcctgcagcagcgagagggacgagaggcgagagagataagcaagcggcgcgcgttaaccctagcccccgtctccgctccgctccgctccgctagcgctcccgcccgccgcctcgctcgccggaggattcgtacgcgcgccgggcccgacgacctgccgcgccaccttcgcgccgccgccgccgcgcgcgggcgcgcctcggtcgttgcagttgtccttcaccacagcggagtgatggctgttgtcaacccaaccaaccttgctattgacgacgatgacgacgatactcccatttcattcaagaggacgagtaactctacgaagactgccaggcccaccccttccaagcatgaggggtcgtcaggaggtaatggtgcacctgttaggatccccaaacctgtgtctcccaatccgcagaagaacggagccaccggggcttcaaggccgttgcatatgaagccaccgtcatccagtccaaaccatcgtccttctggatctggccagccaaacagtttggcacaacatagttcaaaggctaatagcattgacatgagtaaactgaaaagacctctcgtcaaagatgagagatctgatgactcagatgacgaggtgccgattgggttaaggagaaaggttgaggagaagaagttgaagggagttgatactcgggttcagaagacagatgactcagatgacgatgataagccattgggtctcaagatcaactcatccagaatgtcttccaacagagtgaataagcctgttctgcagagaactgtaccaaaggttgagcagcctgatgaagattcagatgatgataaaccattggcaagcaggttgcccagtaatgccggtccaaaaagtggaggtgatgtctctgaggattcagaggatgagaagccactggctgccagattttcaaaagttgctggtagtggaaacccaaaaatagcttcttccagcaaagggttaaccagtgatacaaatggccaacaaagtttgggtaaaaggcctctagacaatagtaatcaaacaagttcagctcttaagaaggctaaaccttcaaacgtttcagcttctgcaatcgttagaagagaaatcaagacagatgacaacacacctcttgcacaaaggctgaaaatgggagagtcttcgaaaggcaagtcatctgcaaagagtgtctttaagaagagtcctgcttctgtgaagaaggacatcaagaaaatgaaagggaaagggaaattaaagaagaacatgaaaaattctcagttctcaaagataatgaaggtcccccctggatctggtggaggaaagaaatggactaccttggagcacaatggtgttattttccctcccccatacaagcctcatggtgtcaaaatgctttacaatgggaaacctatcgatctgacaccagaacaagaggaggttgcaacaatgtttgctgttatgaaagacacagactatgcggccaagccaacattcattgataactttttcactgattggagaaaagttcttggtaaaaatcatattattaagaacttcgagctttgtgatttcacaccaatatatgaatggcacctcagagagaaggagaggaagaagcagatgacaacagaggagaaaaaaacattgcgggaagacaaattgaaacaagaggagaagtacatgtgggctgttgtagatggtgttaaagaaaaggtcggaaatttcagagtagaaccgcctggcttgttcaggggacgtggagaacatccaaagatggggaaacttaagcgccgcattctaccaagtgatattacaataaatattggaaaaggagctccagtccctgagtgcccgatacctggagaaagttggaaagaagtcaaacatgacaatactgttacatggttggccttttggaacgatccaattaacccaaaggatttcaagtatgttttcctggcagcaagcagctcactgaaggggcaaagtgacaaagagaagtatgagaagtccagaaaattgaagggtcatatacaaagaattcgtgagaattatacaaaagatttcaaaaacaaagatgtgacgaggaggcaaatagctgtggcaacataccttatcgataaactagcccttagggctggcaatgaaaaggacgacgatgaagctgatactgttggttgctgtacgctgaaggttgataatgttacatgtatgcctccaaatcagattcagtttgactttctgggtaaagattcaataagatactttaacaccgtagaggttgaagagcttgtgtacaaggcaattgagggtttccgtgctggaaagaagccaggacaagatctatttgacaagattgatacatctaggctaaatgctcacttgaaggatctaatgcctgggctcactgcaaaagtgttccgtacatataatgcttccataacattggacggaatcttgcatgaagaaacagaagatggaactgttttagaaaaaatcgctgtctatcagcgggcaaacaaagaggttgccatcatctgtaaccatcagcgtagtgtctcgaaatcacatgagtcccagatgactagaatgaacgaaaagattgatgagttgaagtcccagatggaggagctgaaagcagacttgaacaaagcaaagaaagggaagcctctaggctatgattcagaggggaagccaaagaggaacttggctcctgaagcaaggttgcaacacttgaaggcaagatagagaagatggagatggataagaggataaaagaggatctgaagacagttgcgcttggaacgtcaaagatcaactatcttgatcctagaataaccgtggcatggtgcaaacgccatgaagtccctattgagaagattttcaacaaatctctcctcgcgaaatttgtatgggcaatggacgttgacccggaattcagattctaggagaccattggctaccatgtgccagccagtttggtccagtttccagcccttctccctggacactaattgcagctaggaaaggaaagagctcggtgtttgttttttcaaagtccccaccccccctgctcgtggaacgaaggaaagcacccgtcattctctttgtaggcccttcttttttttttcttttggttcaattgcgctaagttcaatatgtattctgctgagaaatctgagctcgtttgagaacggttggacattgaattcatagtgagttttaatcttgaatatagatgacttgttgagggatga

SEQ ID NO: 42958 - DNA, 3327 bp, Zea Mays
cgaaggcaaggggtgggaaaaaacacgaggcgggggtgggggatagaaatacgagagcgagcgagcgagcgagcgagcctgcagcagcgagagggacgagaggcgagagagataagcaagcggcgcgcgttaaccctagcccccgtctccgctccgctccgctccgctagcgctcccgcccgccgcctcgctcgccggaggattcgtacgcgcgccgggcccgacgacctgccgcgccaccttcgcgccgccgccgccgcgcgcgggcgcgcctcggtcgttgtccttcaccacagcggagtgatggctgttgtcaacccaaccaaccttgctattgacgacgatgacgacgatactcccatttcattcaagaggacgagtaactctacgaagactgccaggcccaccccttccaagcatgaggggtcgtcaggaggtaatggtgcacctgttaggatccccaaacctgtgtctcccaatccgcagaagaacggagccaccggggcttcaaggccgttgcatatgaagccaccgtcatccagtccaaaccatcgtccttctggatctggccagccaaacagtttggcacaacatagttcaaaggctaatagcattgacatgagtaaactgaaaagacctctcgtcaaagatgagagatctgatgactcagatgacgaggtgccgattgggttaaggagaaaggttgaggagaagaagttgaagggagttgatactcgggttcagaagacagatgactcagatgacgatgataagccattgggtctcaagatcaactcatccagaatgtcttccaacagagtgaataagcctgttctgcagagaactgtaccaaaggttgagcagcctgatgaagattcagatgatgataaaccattggcaagcaggttgcccagtaatgccggtccaaaaagtggaggtgatgtctctgaggattcagaggatgagaagccactggctgccagattttcaaaagttgctggtagtggaaacccaaaaatagcttcttccagcaaagggttaaccagtgatacaaatggccaacaaagtttgggtaaaaggcctctagacaatagtaatcaaacaagttcagctcttaagaaggctaaaccttcaaacgtttcagcttctgcaatcgttagaagagaaatcaagacagatgacaacacacctcttgcacaaaggctgaaaatgggagagtcttcgaaaggcaagtcatctgcaaagagtgtctttaagaagagtcctgcttctgtgaagaaggacatcaagaaaatgaaagggaaagggaaattaaagaagaacatgaaaaattctcagttctcaaagataatgaaggtcccccctggatctggtggaggaaagaaatggactaccttggagcacaatggtgttattttccctcccccatacaagcctcatggtgtcaaaatgctttacaatgggaaacctatcgatctgacaccagaacaagaggaggttgcaacaatgtttgctgttatgaaagacacagactatgcggccaagccaacattcattgataactttttcactgattggagaaaagttcttggtaaaaatcatattattaagaacttcgagctttgtgatttcacaccaatatatgaatggcacctcagagagaaggagaggaagaagcagatgacaacagaggagaaaaaaacattgcgggaagacaaattgaaacaagaggagaagtacatgtgggctgttgtagatggtgttaaagaaaaggtcggaaatttcagagtagaaccgcctggcttgttcaggggacgtggagaacatccaaagatggggaaacttaagcgccgcattctaccaagtgatattacaataaatattggaaaaggagctccagtccctgagtgcccgatacctggagaaagttggaaagaagtcaaacatgacaatactgttacatggttggccttttggaacgatccaattaacccaaaggatttcaagtatgttttcctggcagcaagcagctcactgaaggggcaaagtgacaaagagaagtatgagaagtccagaaaattgaagggtcatatacaaagaattcgtgagaattatacaaaagatttcaaaaacaaagatgtgacgaggaggcaaatagctgtggcaacataccttatcgataaactagcccttagggctggcaatgaaaaggacgacgatgaagctgatactgttggttgctgtacgctgaaggttgataatgttacatgtatgcctccaaatcagattcagtttgactttctgggtaaagattcaataagatactttaacaccgtagaggttgaagagcttgtgtacaaggcaattgagggtttccgtgctggaaagaagccaggacaagatctatttgacaagattgatacatctaggctaaatgctcacttgaaggatctaatgcctgggctcactgcaaaagtgttccgtacatataatgcttccataacattggacggaatcttgcatgaagaaacagaagatggaactgttttagaaaaaatcgctgtctatcagcgggcaaacaaagaggttgccatcatctgtaaccatcagcgtagtgtctcgaaatcacatgagtcccagatgactagaatgaacgaaaagattgatgagttgaagtcccagatggaggagctgaaagcagacttgaacaaagcaaagaaagggaagcctctaggctatgattcagaggggaagccaaagaggaacttggctcctgaagcgattcaaaagaaggttgcaacacttgaaggcaagatagagaagatggagatggataagaggataaaagaggatctgaagacagttgcgcttggaacgtcaaagatcaactatcttgatcctagaataaccgtggcatggtgcaaacgccatgaagtccctattgagaagattttcaacaaatctctcctcgcgaaatttgtatgggcaatggacgttgacccggaattcagattctaggagaccattggctaccatgtgccagccagtttggtccagtttccagcccttctccctggacactaattgcagctaggaaaggaaagagctcggtgtttgttttttcaaagtccccaccccccctgctcgtggaacgaaggaaagcacccgtcattctctttgtaggcccttcttttttttttcttttggttcaattgcgctaagttcaatatgtattctgctgagaaatctgagctcgtttgagaacggttggacattgaattcatagtgagttttaatcttgaatatagatgacttgttgagggatga

SEQ ID NO: 42959 - DNA, 3333 bp, Zea Mays
cgaaggcaaggggtgggaaaaaacacgaggcgggggtgggggatagaaatacgagagcgagcgagcgagcgagcgagcctgcagcagcgagagggacgagaggcgagagagataagcaagcggcgcgcgttaaccctagcccccgtctccgctccgctccgctccgctagcgctcccgcccgccgcctcgctcgccggaggattcgtacgcgcgccgggcccgacgacctgccgcgccaccttcgcgccgccgccgccgcgcgcgggcgcgcctcggtcgttgcagttgtccttcaccacagcggagtgatggctgttgtcaacccaaccaaccttgctattgacgacgatgacgacgatactcccatttcattcaagaggacgagtaactctacgaagactgccaggcccaccccttccaagcatgaggggtcgtcaggaggtaatggtgcacctgttaggatccccaaacctgtgtctcccaatccgcagaagaacggagccaccggggcttcaaggccgttgcatatgaagccaccgtcatccagtccaaaccatcgtccttctggatctggccagccaaacagtttggcacaacatagttcaaaggctaatagcattgacatgagtaaactgaaaagacctctcgtcaaagatgagagatctgatgactcagatgacgaggtgccgattgggttaaggagaaaggttgaggagaagaagttgaagggagttgatactcgggttcagaagacagatgactcagatgacgatgataagccattgggtctcaagatcaactcatccagaatgtcttccaacagagtgaataagcctgttctgcagagaactgtaccaaaggttgagcagcctgatgaagattcagatgatgataaaccattggcaagcaggttgcccagtaatgccggtccaaaaagtggaggtgatgtctctgaggattcagaggatgagaagccactggctgccagattttcaaaagttgctggtagtggaaacccaaaaatagcttcttccagcaaagggttaaccagtgatacaaatggccaacaaagtttgggtaaaaggcctctagacaatagtaatcaaacaagttcagctcttaagaaggctaaaccttcaaacgtttcagcttctgcaatcgttagaagagaaatcaagacagatgacaacacacctcttgcacaaaggctgaaaatgggagagtcttcgaaaggcaagtcatctgcaaagagtgtctttaagaagagtcctgcttctgtgaagaaggacatcaagaaaatgaaagggaaagggaaattaaagaagaacatgaaaaattctcagttctcaaagataatgaaggtcccccctggatctggtggaggaaagaaatggactaccttggagcacaatggtgttattttccctcccccatacaagcctcatggtgtcaaaatgctttacaatgggaaacctatcgatctgacaccagaacaagaggaggttgcaacaatgtttgctgttatgaaagacacagactatgcggccaagccaacattcattgataactttttcactgattggagaaaagttcttggtaaaaatcatattattaagaacttcgagctttgtgatttcacaccaatatatgaatggcacctcagagagaaggagaggaagaagcagatgacaacagaggagaaaaaaacattgcgggaagacaaattgaaacaagaggagaagtacatgtgggctgttgtagatggtgttaaagaaaaggtcggaaatttcagagtagaaccgcctggcttgttcaggggacgtggagaacatccaaagatggggaaacttaagcgccgcattctaccaagtgatattacaataaatattggaaaaggagctccagtccctgagtgcccgatacctggagaaagttggaaagaagtcaaacatgacaatactgttacatggttggccttttggaacgatccaattaacccaaaggatttcaagtatgttttcctggcagcaagcagctcactgaaggggcaaagtgacaaagagaagtatgagaagtccagaaaattgaagggtcatatacaaagaattcgtgagaattatacaaaagatttcaaaaacaaagatgtgacgaggaggcaaatagctgtggcaacataccttatcgataaactagcccttagggctggcaatgaaaaggacgacgatgaagctgatactgttggttgctgtacgctgaaggttgataatgttacatgtatgcctccaaatcagattcagtttgactttctgggtaaagattcaataagatactttaacaccgtagaggttgaagagcttgtgtacaaggcaattgagggtttccgtgctggaaagaagccaggacaagatctatttgacaagattgatacatctaggctaaatgctcacttgaaggatctaatgcctgggctcactgcaaaagtgttccgtacatataatgcttccataacattggacggaatcttgcatgaagaaacagaagatggaactgttttagaaaaaatcgctgtctatcagcgggcaaacaaagaggttgccatcatctgtaaccatcagcgtagtgtctcgaaatcacatgagtcccagatgactagaatgaacgaaaagattgatgagttgaagtcccagatggaggagctgaaagcagacttgaacaaagcaaagaaagggaagcctctaggctatgattcagaggggaagccaaagaggaacttggctcctgaagcgattcaaaagaaggttgcaacacttgaaggcaagatagagaagatggagatggataagaggataaaagaggatctgaagacagttgcgcttggaacgtcaaagatcaactatcttgatcctagaataaccgtggcatggtgcaaacgccatgaagtccctattgagaagattttcaacaaatctctcctcgcgaaatttgtatgggcaatggacgttgacccggaattcagattctaggagaccattggctaccatgtgccagccagtttggtccagtttccagcccttctccctggacactaattgcagctaggaaaggaaagagctcggtgtttgttttttcaaagtccccaccccccctgctcgtggaacgaaggaaagcacccgtcattctctttgtaggcccttcttttttttttcttttggttcaattgcgctaagttcaatatgtattctgctgagaaatctgagctcgtttgagaacggttggacattgaattcatagtgagttttaatcttgaatatagatgacttgttgagggatga

SEQ ID NO: 42960 - DNA, 3329 bp, Zea Mays
cgaaggcaaggggtgggaaaaaacacgaggcgggggtgggggatagaaatacgagagcgagcgagcgagcgagcgagcctgcagcagcgagagggacgagaggcgagagagataagcaagcggcgcgcgttaaccctagcccccgtctccgctccgctccgctccgctagcgctcccgcccgccgcctcgctcgccggaggattcgtacgcgcgccgggcccgacgacctgccgcgccaccttcgcgccgccgccgccgcgcgcgggcgcgcctcgttgcagttgtccttcaccacagcggagtgatggctgttgtcaacccaaccaaccttgctattgacgacgatgacgacgatactcccatttcattcaagaggacgagtaactctacgaagactgccaggcccaccccttccaagcatgaggggtcgtcaggaggtaatggtgcacctgttaggatccccaaacctgtgtctcccaatccgcagaagaacggagccaccggggcttcaaggccgttgcatatgaagccaccgtcatccagtccaaaccatcgtccttctggatctggccagccaaacagtttggcacaacatagttcaaaggctaatagcattgacatgagtaaactgaaaagacctctcgtcaaagatgagagatctgatgactcagatgacgaggtgccgattgggttaaggagaaaggttgaggagaagaagttgaagggagttgatactcgggttcagaagacagatgactcagatgacgatgataagccattgggtctcaagatcaactcatccagaatgtcttccaacagagtgaataagcctgttctgcagagaactgtaccaaaggttgagcagcctgatgaagattcagatgatgataaaccattggcaagcaggttgcccagtaatgccggtccaaaaagtggaggtgatgtctctgaggattcagaggatgagaagccactggctgccagattttcaaaagttgctggtagtggaaacccaaaaatagcttcttccagcaaagggttaaccagtgatacaaatggccaacaaagtttgggtaaaaggcctctagacaatagtaatcaaacaagttcagctcttaagaaggctaaaccttcaaacgtttcagcttctgcaatcgttagaagagaaatcaagacagatgacaacacacctcttgcacaaaggctgaaaatgggagagtcttcgaaaggcaagtcatctgcaaagagtgtctttaagaagagtcctgcttctgtgaagaaggacatcaagaaaatgaaagggaaagggaaattaaagaagaacatgaaaaattctcagttctcaaagataatgaaggtcccccctggatctggtggaggaaagaaatggactaccttggagcacaatggtgttattttccctcccccatacaagcctcatggtgtcaaaatgctttacaatgggaaacctatcgatctgacaccagaacaagaggaggttgcaacaatgtttgctgttatgaaagacacagactatgcggccaagccaacattcattgataactttttcactgattggagaaaagttcttggtaaaaatcatattattaagaacttcgagctttgtgatttcacaccaatatatgaatggcacctcagagagaaggagaggaagaagcagatgacaacagaggagaaaaaaacattgcgggaagacaaattgaaacaagaggagaagtacatgtgggctgttgtagatggtgttaaagaaaaggtcggaaatttcagagtagaaccgcctggcttgttcaggggacgtggagaacatccaaagatggggaaacttaagcgccgcattctaccaagtgatattacaataaatattggaaaaggagctccagtccctgagtgcccgatacctggagaaagttggaaagaagtcaaacatgacaatactgttacatggttggccttttggaacgatccaattaacccaaaggatttcaagtatgttttcctggcagcaagcagctcactgaaggggcaaagtgacaaagagaagtatgagaagtccagaaaattgaagggtcatatacaaagaattcgtgagaattatacaaaagatttcaaaaacaaagatgtgacgaggaggcaaatagctgtggcaacataccttatcgataaactagcccttagggctggcaatgaaaaggacgacgatgaagctgatactgttggttgctgtacgctgaaggttgataatgttacatgtatgcctccaaatcagattcagtttgactttctgggtaaagattcaataagatactttaacaccgtagaggttgaagagcttgtgtacaaggcaattgagggtttccgtgctggaaagaagccaggacaagatctatttgacaagattgatacatctaggctaaatgctcacttgaaggatctaatgcctgggctcactgcaaaagtgttccgtacatataatgcttccataacattggacggaatcttgcatgaagaaacagaagatggaactgttttagaaaaaatcgctgtctatcagcgggcaaacaaagaggttgccatcatctgtaaccatcagcgtagtgtctcgaaatcacatgagtcccagatgactagaatgaacgaaaagattgatgagttgaagtcccagatggaggagctgaaagcagacttgaacaaagcaaagaaagggaagcctctaggctatgattcagaggggaagccaaagaggaacttggctcctgaagcgattcaaaagaaggttgcaacacttgaaggcaagatagagaagatggagatggataagaggataaaagaggatctgaagacagttgcgcttggaacgtcaaagatcaactatcttgatcctagaataaccgtggcatggtgcaaacgccatgaagtccctattgagaagattttcaacaaatctctcctcgcgaaatttgtatgggcaatggacgttgacccggaattcagattctaggagaccattggctaccatgtgccagccagtttggtccagtttccagcccttctccctggacactaattgcagctaggaaaggaaagagctcggtgtttgttttttcaaagtccccaccccccctgctcgtggaacgaaggaaagcacccgtcattctctttgtaggcccttcttttttttttcttttggttcaattgcgctaagttcaatatgtattctgctgagaaatctgagctcgtttgagaacggttggacattgaattcatagtgagttttaatcttgaatatagatgacttgttgagggatga

SEQ ID NO: 42961 - DNA, 3667 bp, Zea Mays
aaaaaaccccaaccccgaaggcaaggggtgggaaaaaacacgaggcgggggtgggggatagaaatacgagagcgagcgagcgagcgagcgagcctgcagcagcgagagggacgagaggcgagagagataagcaagcggcgcgcgttaaccctagcccccgtctccgctccgctccgctccgctagcgctcccgcccgccgcctcgctcgccggaggattcgtacgcgcgccgggcccgacgacctgccgcgccaccttcgcgccgccgccgccgcgcgcgggcgcgcctcgttgcagttgtccttcaccacagcggagtgatggctgttgtcaacccaaccaaccttgctattgacgacgatgacgacgatactcccatttcattcaagaggacgagtaactctacgaagactgccaggcccaccccttccaagcatgaggggtcgtcaggaggtaatggtgcacctgttaggatccccaaacctgtgtctcccaatccgcagaagaacggagccaccggggcttcaaggccgttgcatatgaagccaccgtcatccagtccaaaccatcgtccttctggatctggccagccaaacagtttggcacaacatagttcaaaggctaatagcattgacatgagtaaactgaaaagacctctcgtcaaagatgagagatctgatgactcagatgacgaggtgccgattgggttaaggagaaaggttgaggagaagaagttgaagggagttgatactcgggttcagaagacagatgactcagatgacgatgataagccattgggtctcaagatcaactcatccagaatgtcttccaacagagtgaataagcctgttctgcagagaactgtaccaaaggttgagcagcctgatgaagattcagatgatgataaaccattggcaagcaggttgcccagtaatgccggtccaaaaagtggaggtgatgtctctgaggattcagaggatgagaagccactggctgccagattttcaaaagttgctggtagtggaaacccaaaaatagcttcttccagcaaagggttaaccagtgatacaaatggccaacaaagtttgggtaaaaggcctctagacaatagtaatcaaacaagttcagctcttaagaaggctaaaccttcaaacgtttcagcttctgcaatcgttagaagagaaatcaagacagatgacaacacacctcttgcacaaaggctgaaaatgggagagtcttcgaaaggcaagtcatctgcaaagagtgtctttaagaagagtcctgcttctgtgaagaaggacatcaagaaaatgaaagggaaagggaaattaaagaagaacatgaaaaattctcagttctcaaagataatgaaggtcccccctggatctggtggaggaaagaaatggactaccttggagcacaatggtgttattttccctcccccatacaagcctcatggtgtcaaaatgctttacaatgggaaacctatcgatctgacaccagaacaagaggaggttgcaacaatgtttgctgttatgaaagacacagactatgcggccaagccaacattcattgataactttttcactgattggagaaaagttcttggtaaaaatcatattattaagaacttcgagctttgtgatttcacaccaatatatgaatggcacctcagagagaaggagaggaagaagcagatgacaacagaggagaaaaaaacattgcgggaagacaaattgaaacaagaggagaagtacatgtgggctgttgtagatggtgttaaagaaaaggtcggaaatttcagagtagaaccgcctggcttgttcaggggacgtggagaacatccaaagatggggaaacttaagcgccgcattctaccaagtgatattacaataaatattggaaaaggagctccagtccctgagtgcccgatacctggagaaagttggaaagaagtcaaacatgacaatactgttacatggttggccttttggaacgatccaattaacccaaaggatttcaagtatgttttcctggcagcaagcagctcactgaaggggcaaagtgacaaagagaagtatgagaagtccagaaaattgaagggtcatatacaaagaattcgtgagaattatacaaaagatttcaaaaacaaagatgtgacgaggaggcaaatagctgtggcaacataccttatcgataaactagcccttagggctggcaatgaaaaggacgacgatgaagctgatactgttggttgctgtacgctgaaggttgataatgttacatgtatgcctccaaatcagattcagtttgactttctgggtaaagattcaataagatactttaacaccgtagaggttgaagagcttgtgtacaaggcaattgagggtttccgtgctggaaagaagccaggacaagatctatttgacaagattgatacatctaggctaaatgctcacttgaaggatctaatgcctgggctcactgcaaaagtgttccgtacatataatgcttccataacattggacggaatcgtgagttgaaaagaatcttgtcttactgggtttcatttgtccattctttcgaacttcttaggtttgcatggacacttagagctgttgatgtagatgtattgttttcttctggtattttaatgtttataaatgttacttgttctacagctcaacttaatgcaaataagtaattggtcaatgttacacagtttgtcatatcttcattttttgcacctctgattttttactttctgatagcatgtaagcatgctattgacttattacgcatgttcatgtgactatcctgttagaatggtctaagtgtatatatacttgtgctgatattacagttgcatgaagaaacagaagatggaactgttttagaaaaaatcgctgtctatcagcgggcaaacaaagaggttgccatcatctgtaaccatcagcgtagtgtctcgaaatcacatgagtcccagatgactagaatgaacgaaaagattgatgagttgaagatggaggagctgaaagcagacttgaacaaagcaaagaaagggaagcctctaggctatgattcagaggggaagccaaagaggaacttggctcctgaagcgattcaaaagaaggttgcaacacttgaaggcaagatagagaagatggagatggataagaggataaaagaggatctgaagacagttgcgcttggaacgtcaaagatcaactatcttgatcctagaataaccgtggcatggtgcaaacgccatgaagtccctattgagaagattttcaacaaatctctcctcgcgaaatttgtatgggcaatggacgttgacccggaattcagattctaggagaccattggctaccatgtgccagccagtttggtccagtttccagcccttctccctggacactaattgcagctaggaaaggaaagagctcggtgtttgttttttcaaagtccccaccccccctgctcgtggaacgaaggaaagcacccgtcattctctttgtaggcccttcttttttttttcttttggttcaattgcgctaagttcaatatgtattctgctgagaaatctgagctcgtttgagaacggttggacattgaattcatagtgagttttaatcttgaatatagatgacttgttgagggatga

SEQ ID NO: 42962 - DNA, 3434 bp, Zea Mays
aaaaaaccccaaccccgaaggcaaggggtgggaaaaaacacgaggcgggggtgggggatagaaatacgagagcgagcgagcgagcgagcgagcctgcagcagcgagagggacgagaggcgagagagataagcaagcggcgcgcgttaaccctagcccccgtctccgctccgctccgctccgctagcgctcccgcccgccgcctcgctcgccggaggattcgtacgcgcgccgggcccgacgacctgccgcgccaccttcgcgccgccgccgccgcgcgcgggcgcgcctcgttgcagttgtccttcaccacagcggagtgatggctgttgtcaacccaaccaaccttgctattgacgacgatgacgacgatactcccatttcattcaagaggacgagtaactctacgaagactgccaggcccaccccttccaagcatgaggggtcgtcaggaggtaatggtgcacctgttaggatccccaaacctgtgtctcccaatccgcagaagaacggagccaccggggcttcaaggccgttgcatatgaagccaccgtcatccagtccaaaccatcgtccttctggatctggccagccaaacagtttggcacaacatagttcaaaggctaatagcattgacatgagtaaactgaaaagacctctcgtcaaagatgagagatctgatgactcagatgacgaggtgccgattgggttaaggagaaaggttgaggagaagaagttgaagggagttgatactcgggttcagaagacagatgactcagatgacgatgataagccattgggtctcaagatcaactcatccagaatgtcttccaacagagtgaataagcctgttctgcagagaactgtaccaaaggttgagcagcctgatgaagattcagatgatgataaaccattggcaagcaggttgcccagtaatgccggtccaaaaagtggaggtgatgtctctgaggattcagaggatgagaagccactggctgccagattttcaaaagttgctggtagtggaaacccaaaaatagcttcttccagcaaagggttaaccagtgatacaaatggccaacaaagtttgggtaaaaggcctctagacaatagtaatcaaacaagttcagctcttaagaaggctaaaccttcaaacgtttcagcttctgcaatcgttagaagagaaatcaagacagatgacaacacacctcttgcacaaaggctgaaaatgggagagtcttcgaaaggcaagtcatctgcaaagagtgtctttaagaagagtcctgcttctgtgaagaaggacatcaagaaaatgaaagggaaagggaaattaaagaagaacatgaaaaattctcagttctcaaagataatgaaggtcccccctggatctggtggaggaaagaaatggactaccttggagcacaatggtgttattttccctcccccatacaagcctcatggtgtcaaaatgctttacaatgggaaacctatcgatctgacaccagaacaagaggaggttgcaacaatgtttgctgttatgaaagacacagactatgcggccaagccaacattcattgataactttttcactgattggagaaaagttcttggtaaaaatcatattattaagaacttcgagctttgtgatttcacaccaatatatgaatggcacctcagagagaaggagaggaagaagcagatgacaacagaggagaaaaaaacattgcgggaagacaaattgaaacaagaggagaagtacatgtgggctgttgtagatggtgttaaagaaaaggtcggaaatttcagagtagaaccgcctggcttgttcaggggacgtggagaacatccaaagatggggaaacttaagcgccgcattctaccaagtgatattacaataaatattggaaaaggagctccagtccctgagtgcccgatacctggagaaagttggaaagaagtcaaacatgacaatactgttacatggttggccttttggaacgatccaattaacccaaaggatttcaagtatgttttcctggcagcaagcagctcactgaaggggcaaagtgacaaagagaagtatgagaagtccagaaaattgaagggtcatatacaaagaattcgtgagaattatacaaaagatttcaaaaacaaagatgtgacgaggaggcaaatagctgtggcaacataccttatcgataaactagcccttagggctggcaatgaaaaggacgacgatgaagctgatactgttggttgctgtacgctgaaggttgataatgttacatgtatgcctccaaatcagattcagtttgactttctgggtaaagattcaataagatactttaacaccgtagaggttgaagagcttgtgtacaaggcaattgagggtttccgtgctggaaagaagccaggacaagatctatttgacaagattgatacatctaggctaaatgctcacttgaaggatctaatgcctgggctcactgcaaaagtgttccgtacatataatgcttccataacattggacggaatcttgcatgaagaaacagaagatggaactgttttagaaaaaatcgctgtctatcagcgggcaaacaaagaggttgccatcatctgtaaccatcagcgtagtgtctcgaaatcacatgagtcccagatgactagaatgaacgaaaagattgatgagttgaagatggaggagctgaaagcagacttgaacaaagcaaagaaagggaagcctctaggctatgattcagaggggaagccaaagaggaacttggctcctgaagcgtaacacatctcaaccaccaatacattttgttgtattttgtttttgtgtgttagaacaaagagtagggtaggcaacctgacaaaacctacttgcaggattcaaaagaaggttgcaacacttgaaggcaagatagagaagatggagatggataagaggataaaagaggatctgaagacagttgcgcttggaacgtcaaagatcaactatcttgatcctagaataaccgtggcatggtgcaaacgccatgaagtccctattgagaagattttcaacaaatctctcctcgcgaaatttgtatgggcaatggacgttgacccggaattcagattctaggagaccattggctaccatgtgccagccagtttggtccagtttccagcccttctccctggacactaattgcagctaggaaaggaaagagctcggtgtttgttttttcaaagtccccaccccccctgctcgtggaacgaaggaaagcacccgtcattctctttgtaggcccttcttttttttttcttttggttcaattgcgctaagttcaatatgtattctgctgagaaatctgagctcgtttgagaacggttggacattgaattcatagtgagttttaatcttgaatatagatgacttgttgagggatga

SEQ ID NO: 42963 - DNA, 3673 bp, Zea Mays
aaaaaaccccaaccccgaaggcaaggggtgggaaaaaacacgaggcgggggtgggggatagaaatacgagagcgagcgagcgagcgagcgagcctgcagcagcgagagggacgagaggcgagagagataagcaagcggcgcgcgttaaccctagcccccgtctccgctccgctccgctccgctagcgctcccgcccgccgcctcgctcgccggaggattcgtacgcgcgccgggcccgacgacctgccgcgccaccttcgcgccgccgccgccgcgcgcgggcgcgcctcgttgcagttgtccttcaccacagcggagtgatggctgttgtcaacccaaccaaccttgctattgacgacgatgacgacgatactcccatttcattcaagaggacgagtaactctacgaagactgccaggcccaccccttccaagcatgaggggtcgtcaggaggtaatggtgcacctgttaggatccccaaacctgtgtctcccaatccgcagaagaacggagccaccggggcttcaaggccgttgcatatgaagccaccgtcatccagtccaaaccatcgtccttctggatctggccagccaaacagtttggcacaacatagttcaaaggctaatagcattgacatgagtaaactgaaaagacctctcgtcaaagatgagagatctgatgactcagatgacgaggtgccgattgggttaaggagaaaggttgaggagaagaagttgaagggagttgatactcgggttcagaagacagatgactcagatgacgatgataagccattgggtctcaagatcaactcatccagaatgtcttccaacagagtgaataagcctgttctgcagagaactgtaccaaaggttgagcagcctgatgaagattcagatgatgataaaccattggcaagcaggttgcccagtaatgccggtccaaaaagtggaggtgatgtctctgaggattcagaggatgagaagccactggctgccagattttcaaaagttgctggtagtggaaacccaaaaatagcttcttccagcaaagggttaaccagtgatacaaatggccaacaaagtttgggtaaaaggcctctagacaatagtaatcaaacaagttcagctcttaagaaggctaaaccttcaaacgtttcagcttctgcaatcgttagaagagaaatcaagacagatgacaacacacctcttgcacaaaggctgaaaatgggagagtcttcgaaaggcaagtcatctgcaaagagtgtctttaagaagagtcctgcttctgtgaagaaggacatcaagaaaatgaaagggaaagggaaattaaagaagaacatgaaaaattctcagttctcaaagataatgaaggtcccccctggatctggtggaggaaagaaatggactaccttggagcacaatggtgttattttccctcccccatacaagcctcatggtgtcaaaatgctttacaatgggaaacctatcgatctgacaccagaacaagaggaggttgcaacaatgtttgctgttatgaaagacacagactatgcggccaagccaacattcattgataactttttcactgattggagaaaagttcttggtaaaaatcatattattaagaacttcgagctttgtgatttcacaccaatatatgaatggcacctcagagagaaggagaggaagaagcagatgacaacagaggagaaaaaaacattgcgggaagacaaattgaaacaagaggagaagtacatgtgggctgttgtagatggtgttaaagaaaaggtcggaaatttcagagtagaaccgcctggcttgttcaggggacgtggagaacatccaaagatggggaaacttaagcgccgcattctaccaagtgatattacaataaatattggaaaaggagctccagtccctgagtgcccgatacctggagaaagttggaaagaagtcaaacatgacaatactgttacatggttggccttttggaacgatccaattaacccaaaggatttcaagtatgttttcctggcagcaagcagctcactgaaggggcaaagtgacaaagagaagtatgagaagtccagaaaattgaagggtcatatacaaagaattcgtgagaattatacaaaagatttcaaaaacaaagatgtgacgaggaggcaaatagctgtggcaacataccttatcgataaactagcccttagggctggcaatgaaaaggacgacgatgaagctgatactgttggttgctgtacgctgaaggttgataatgttacatgtatgcctccaaatcagattcagtttgactttctgggtaaagattcaataagatactttaacaccgtagaggttgaagagcttgtgtacaaggcaattgagggtttccgtgctggaaagaagccaggacaagatctatttgacaagattgatacatctaggctaaatgctcacttgaaggatctaatgcctgggctcactgcaaaagtgttccgtacatataatgcttccataacattggacggaatcgtgagttgaaaagaatcttgtcttactgggtttcatttgtccattctttcgaacttcttaggtttgcatggacacttagagctgttgatgtagatgtattgttttcttctggtattttaatgtttataaatgttacttgttctacagctcaacttaatgcaaataagtaattggtcaatgttacacagtttgtcatatcttcattttttgcacctctgattttttactttctgatagcatgtaagcatgctattgacttattacgcatgttcatgtgactatcctgttagaatggtctaagtgtatatatacttgtgctgatattacagttgcatgaagaaacagaagatggaactgttttagaaaaaatcgctgtctatcagcgggcaaacaaagaggttgccatcatctgtaaccatcagcgtagtgtctcgaaatcacatgagtcccagatgactagaatgaacgaaaagattgatgagttgaagtcccagatggaggagctgaaagcagacttgaacaaagcaaagaaagggaagcctctaggctatgattcagaggggaagccaaagaggaacttggctcctgaagcgattcaaaagaaggttgcaacacttgaaggcaagatagagaagatggagatggataagaggataaaagaggatctgaagacagttgcgcttggaacgtcaaagatcaactatcttgatcctagaataaccgtggcatggtgcaaacgccatgaagtccctattgagaagattttcaacaaatctctcctcgcgaaatttgtatgggcaatggacgttgacccggaattcagattctaggagaccattggctaccatgtgccagccagtttggtccagtttccagcccttctccctggacactaattgcagctaggaaaggaaagagctcggtgtttgttttttcaaagtccccaccccccctgctcgtggaacgaaggaaagcacccgtcattctctttgtaggcccttcttttttttttcttttggttcaattgcgctaagttcaatatgtattctgctgagaaatctgagctcgtttgagaacggttggacattgaattcatagtgagttttaatcttgaatatagatgacttgttgagggatga

SEQ ID NO: 42964 - DNA, 2908 bp, Zea Mays
gcaccttcggcttttgctccgacgccggcgagcgagaccgagaggcgaggcgagccaccgcggcggcggttgcagcgatggggtccatgacgatcggtgccaagtacaagaccacgatcaaggaccccggcaccccgggcatcctccgcatgaacggtgataggttcaccttcacccctaatgatccacgatcggcaatgaagttcaatgttgatttccgaaccatcaaaggtcacaagttcaataaagtagagggtaacaaagcagcattattgaacctttcaaaagaagacaaggctggaggctacatatttgagtttgacaatgttggtaaccgtgaccaatgtcgagactttgtagctagggttttaggcaaacatcaagggatagtgcctcctagaccaactgtggctcctgaaaactcagttgcttctgctgctctggaacaactcagtgccgcagaagtggagagacgggttaaactgttgcgagaagacagaaattacataagaagtttgttcttggaaatattctgcaagaatctgaattttgggcaacaagaaagaatttacttgatgatgaagcaaataagagatcaaaacaaaagccaggtttcaagagtgcacttgtagatattaggccaacaactgatggtcggacaaacaaggttactttccagatcacacctgagatgatacatcaggtccacctttccactctgcttctttatcatgaactaatacatatatactgcttggtatcatcaatttttctgttgtctcaactgttataattgcaaaatttatatactatgctgtaaaatgaaaaagtacgtcattttgtgggttatggagtttctgaacattgttgttggtaaaaggcttccaaagatttttttaatctgtatatgaatgtgtagcaagccctgtaccttctctgtctccttagtagctttcatgcatgatgcagtgatcctctattgaactatttttatatcttgaaattatagttttcattgtgtgcatgtgactttgatgcgaccaaagggaattaatgagcaggaacactgaaaattatgcttccaccctagccagttaggttaggcttagtccatagctgcaaagaccatcttacttgctttgaaccctacctgcgctgggccctgtttgctcaagaatactccattatgcctgaggcatatattattcatggaaacaggtgctgaattctatgattctatatctgatgtactttcaacttgttaacaccatatatcctattttacagatttttgcagaaaagcctgctgtccgtagagcatatttagattttgttccaaaaaagatgtcagaaacccgattttgggaaaaatactgtagagctgagtatctagtcaggacaaaaaacactgcagcagcaacagctgaggcagctggagatgaggaattagctatcttcctgaagaatgatgatatactggccaaggaggcaaagttgaagataaaacgagtcgatccaacattagacatggaggcagacactggagatgattacattcatcttccggaccatgggattcaccgtgatggtagcaaagagacagtcgatgctgacagtgagttggcgaggaggacgctgtctcaggacctgaaccgtcatgcagctgttgttcttgaagggagatctcttgatgttgagtcaactgatccaaagactttagctgaagcccttgcaagatccaagaaagaaccaccttctacttctaatgttgatgatgataatcatgagagactaatgaaggtggctagaatgacagagatagaggatctgcaagctccacgaagtcttctgtatgcaccactttgtataaaggatcctagagaatattttgattcccaacaagcaaatgctctgagatctctaggtggcagcaatggtggaagaaaagcccatagttgcagcttgagcactgaagaagtgttccatcatttaatggatcaaatgtcttctgttaaagttaataggcttaactgtccgattgttcagtctgatatggctcttaaggttcttaatgaattaaacgaagggatttctcgttcaaggagacttaacctcaagaatcctcaagaaggtctccttggtcagctgcctcaacatacacgggacgagcttatggatcattggacggctatccaggaattgctacgccatttttggtcatcgtatccaataacaagtgcagtactttataacaaggttcaaagagttaaagaagctatgacacagatatatcaaaagctgcagcttataaaggaattggcacagcctgatgtaagacatgaaatatctcggctagtaaagcccatgactcaggccttggatgccgccttcaaccatgatttggaacagcagcagaaatcgtccaaggccggaaacaggcacaacgggttttgagcctaggagattggtttgaccaacacatgaagcgagacggacggacgggctgtgcccgaatacacaagagctgctgcagaattcttgaggcttgtacgattttgttcttttccccctcgcttattaatagctgccggaggagcctgctgtttgcagccccggaatcttgatctatgcatcaattgtttgtaactgactgaatagtgaagactcgcaacgcatgatgctgccgacgcgttgtacttgtacatggcagtaatggctattcgagatagaaccaaagctttaccattttgttttatgcggttcgttcatggccgccgggcagaattatacacatgtatgtcatctacagcgttacaaacataccattatatatcacagtaccgatgacatctgtcagctcccacccaggagttgctgtaaactatatggatcccggtgtcgtgttttg

SEQ ID NO: 42965 - DNA, 2900 bp, Zea Mays
gcaccttcggcttttgctccgacgccggcgagcgagaccgagaggcgaggcgagccaccgcggcggcggttgcagcgatggggtccatgacgatcggtgccaagtacaagaccacgatcaaggaccccggcaccccgggcatcctccgcatgaacggtgataggttcaccttcacccctaatgatccacgatcggcaatgaagttcaatgttgatttccgaaccatcaaaggtcacaagttcaataaagtagagggtaacaaagcagcattattgaacctttcaaaagaagacaaggctggaggctacatatttgagtttgacaatgttggtaaccgtgaccaatgtcgagactttgtagctagggttttaggcaaacatcaagggatagtgcctcctagaccaactgtggctcctgaaaactcagttgcttctgctgctctggaacaactcagtgccgcagaagtggagagacgggttaaactgttgcgagaagacagcgaattgcagaaattacataagaagtttgttcttggaaatattctgcaagaatctgaattttgggcaacaagaaagaatttacttgatgatgaagcaaataagagatcaaaacaaaagccaggtttcaagagtgcacttgtagatattaggccaacaactgatggtcggacaaacaaggttactttccagatcacacctgagatgatacatcaggtccacctttccactctgcttctttatcatgaactaatacatatatactgcttggtatcatcaatttttctgttgtctcaactgttataattgcaaaatttatatactatgctgtaaaatgaaaaagtacgtcattttgtgggttatggagtttctgaacattgttgttggtaaaaggcttccaaagatttttttaatctgtatatgaatgtgtagcaagccctgtaccttctctgtctccttagtagctttcatgcatgatgcagtgatcctctattgaactatttttatatcttgaaattatagttttcattgtgtgcatgtgactttgatgcgaccaaagggaattaatgagcaggaacactgaaaattatgcttccaccctagccagttaggttaggcttagtccatagctgcaaagaccatcttacttgctttgaaccctacctgcgctgggccctgtttgctcaagaatactccattatgcctgaggcatatattattcatggaaacaggtgctgaattctatgattctatatctgatgtactttcaacttgttaacaccatatatcctattttacagatttttgcagaaaagcctgctgtccgtagagcatatttagattttgttccaaaaaagatgtcagaaacccgattttgggaaaaatactgtagagctgagtatctagtcaggacaaaaaacactgcagcagcaacagctgaggcagctggagatgaggaattagctatcttcctgaagaatgatgatatactggccaaggaggcaaagttgaagataaaacgagtcgatccaacattagacatggaggcagacactggagatgattacattcatcttccggaccatgggattcaccgtgatggtagcaaagagacagtcgatgctgacagtgagttggcgaggaggacgctgtctcaggacctgaaccgtcatgcagctgttgttcttgaagggagatctcttgatgttgagtcaactgatccaaagactttagctgaagcccttgcaagatccaagaaagaaccaccttctacttctaatgttgatgatgataatcatgagagactaatgaaggtggctagaatgacagagatagaggatctgcaagctccacgaagtcttctgtatgcaccactttgtataaaggatcctagagaatattttgattcccaacaagcaaatgctctgagatctctaggtggcagcaatggtggaagaaaagcccatagttgcagcttgagcactgaagaagtgttccatcatttaatggatcaaatgtcttctgttaaagttaataggcttaactgtccgattgttcagtctgatatggctcttaaggttcttaatgaattaaacgaagggatttctcgttcaaggagacttaacctcaagaatcctcaagaaggtctccttggtcagctgcctcaacatacacgggacgagcttatggatgaattgctacgccatttttggtcatcgtatccaataacaagtgcagtactttataacaaggttcaaagagttaaagaagctatgacacagatatatcaaaagctgcagcttataaaggaattggcacagcctgatgtaagacatgaaatatctcggctagtaaagcccatgactcaggccttggatgccgccttcaaccatgatttggaacagcagcagaaatcgtccaaggccggaaacaggcacaacgggttttgagcctaggagattggtttgaccaacacatgaagcgagacggacggacgggctgtgcccgaatacacaagagctgctgcagaattcttgaggcttgtacgattttgttcttttccccctcgcttattaatagctgccggaggagcctgctgtttgcagccccggaatcttgatctatgcatcaattgtttgtaactgactgaatagtgaagactcgcaacgcatgatgctgccgacgcgttgtacttgtacatggcagtaatggctattcgagatagaaccaaagctttaccattttgttttatgcggttcgttcatggccgccgggcagaattatacacatgtatgtcatctacagcgttacaaacataccattatatatcacagtaccgatgacatctgtcagctcccacccaggagttgctgtaaactatatggatcccggtgtcgtgttttg

SEQ ID NO: 42966 - DNA, 2933 bp, Zea Mays
gcaccttcggcttttgctccgacgccggcgagcgagaccgagaggcgaggcgagccaccgcggcggcggttgcagcgatggggtccatgacgatcggtgccaagtacaagaccacgatcaaggaccccggcaccccgggcatcctccgcatgaacggtgataggttcaccttcacccctaatgatccacgatcggcaatgaagttcaatgttgatttccgaaccatcaaaggtcacaagttcaataaagtagagggtaacaaagcagcattattgaacctttcaaaagaagacaaggctggaggctacatatttgagtttgacaatgttggtaaccgtgaccaatgtcgagactttgtagctagggttttaggcaaacatcaagggatagtgcctcctagaccaactgtggctcctgaaaactcagttgcttctgctgctctggaacaactcagtgccgcagaagtggagagacgggttaaactgttgcgagaagacagcgaattgcagaaattacataagaagtttgttcttggaaatattctgcaagaatctgaattttgggcaacaagaaagaatttacttgatgatgaagcaaataagagatcaaaacaaaagccaggtttcaagagtgcacttgtagatattaggccaacaactgatggtcggacaaacaaggttactttccagatcacacctgagatgatacatcaggtccacctttccactctgcttctttatcatgaactaatacatatatactgcttggtatcatcaatttttctgttgtctcaactgttataattgcaaaatttatatactatgctgtaaaatgaaaaagtacgtcattttgtgggttatggagtttctgaacattgttgttggtaaaaggcttccaaagatttttttaatctgtatatgaatgtgtagcaagccctgtaccttctctgtctccttagtagctttcatgcatgatgcagtgatcctctattgaactatttttatatcttgaaattatagttttcattgtgtgcatgtgactttgatgcgaccaaagggaattaatgagcaggaacactgaaaattatgcttccaccctagccagttaggttaggcttagtccatagctgcaaagaccatcttacttgctttgaaccctacctgcgctgggccctgtttgctcaagaatactccattatgcctgaggcatatattattcatggaaacaggtgctgaattctatgattctatatctgatgtactttcaacttgttaacaccatatatcctattttacagatttttgcagaaaagcctgctgtccgtagagcatatttagattttgttccaaaaaagatgtcagaaacccgattttgggaaaaatactgtagagctgagtatctagtcaggacaaaaaacactgcagcagcaacagctgaggcagctggagatgaggaattagctatcttcctgaagaatgatgatatactggccaaggaggcaaagttgaagataaaacgagtcgatccaacattagacatggaggcagacactggagatgattacattcatcttccggaccatgggattcaccgtgatggtagcaaagagacagtcgatgctgacagtgagttggcgaggaggacgctgtctcaggacctgaaccgtcatgcagctgttgttcttgaagggagatctcttgatgttgagtcaactgatccaaagactttagctgaagcccttgcaagatccaagaaagaaccaccttctacttctaatgttgatgatgataatcatgagagactaatgaaggtggctagaatgacagagatagaggatctgcaagctccacgaagtcttctgtatgcaccactttgtataaaggatcctagagaatattttgattcccaacaagcaaatgctctgagatctctaggtggcagcaatggtggaagaaaagcccatagttgcagcttgagcactgaagaagtgttccatcatttaatggatcaaatgtcttctgttaaagttaataggcttaactgtccgattgttcagtctgatatggctcttaaggaaatcctaactacctaaatggtatgggcctaggttcttaatgaattaaacgaagggatttctcgttcaaggagacttaacctcaagaatcctcaagaaggtctccttggtcagctgcctcaacatacacgggacgagcttatggatgaattgctacgccatttttggtcatcgtatccaataacaagtgcagtactttataacaaggttcaaagagttaaagaagctatgacacagatatatcaaaagctgcagcttataaaggaattggcacagcctgatgtaagacatgaaatatctcggctagtaaagcccatgactcaggccttggatgccgccttcaaccatgatttggaacagcagcagaaatcgtccaaggccggaaacaggcacaacgggttttgagcctaggagattggtttgaccaacacatgaagcgagacggacggacgggctgtgcccgaatacacaagagctgctgcagaattcttgaggcttgtacgattttgttcttttccccctcgcttattaatagctgccggaggagcctgctgtttgcagccccggaatcttgatctatgcatcaattgtttgtaactgactgaatagtgaagactcgcaacgcatgatgctgccgacgcgttgtacttgtacatggcagtaatggctattcgagatagaaccaaagctttaccattttgttttatgcggttcgttcatggccgccgggcagaattatacacatgtatgtcatctacagcgttacaaacataccattatatatcacagtaccgatgacatctgtcagctcccacccaggagttgctgtaaactatatggatcccggtgtcgtgttttg

SEQ ID NO: 42967 - DNA, 3052 bp, Zea Mays
gcaccttcggcttttgctccgacgccggcgagcgagaccgagaggcgaggcgagccaccgcggcggcggttgcagcgatggggtccatgacgatcggtgccaagtacaagaccacgatcaaggaccccggcaccccgggcatcctccgcatgaacggtgataggttcaccttcacccctaatgatccacgatcggcaatgaagttcaatgttgatttccgaaccatcaaagggtcattttaaataattgatcactagggtcaatacaacaatttaagctgcgatagagttttatgcacactgaaacagttggatttgttgcctgtgctctaggtcacaagttcaataaagtagagggtaacaaagcagcattattgaacctttcaaaagaagacaaggctggaggctacatatttgagtttgacaatgttggtaaccgtgaccaatgtcgagactttgtagctagggttttaggcaaacatcaagggatagtgcctcctagaccaactgtggctcctgaaaactcagttgcttctgctgctctggaacaactcagtgccgcagaagtggagagacgggttaaactgttgcgagaagacagcgaattgcagaaattacataagaagtttgttcttggaaatattctgcaagaatctgaattttgggcaacaagaaagaatttacttgatgatgaagcaaataagagatcaaaacaaaagccaggtttcaagagtgcacttgtagatattaggccaacaactgatggtcggacaaacaaggttactttccagatcacacctgagatgatacatcaggtccacctttccactctgcttctttatcatgaactaatacatatatactgcttggtatcatcaatttttctgttgtctcaactgttataattgcaaaatttatatactatgctgtaaaatgaaaaagtacgtcattttgtgggttatggagtttctgaacattgttgttggtaaaaggcttccaaagatttttttaatctgtatatgaatgtgtagcaagccctgtaccttctctgtctccttagtagctttcatgcatgatgcagtgatcctctattgaactatttttatatcttgaaattatagttttcattgtgtgcatgtgactttgatgcgaccaaagggaattaatgagcaggaacactgaaaattatgcttccaccctagccagttaggttaggcttagtccatagctgcaaagaccatcttacttgctttgaaccctacctgcgctgggccctgtttgctcaagaatactccattatgcctgaggcatatattattcatggaaacaggtgctgaattctatgattctatatctgatgtactttcaacttgttaacaccatatatcctattttacagatttttgcagaaaagcctgctgtccgtagagcatatttagattttgttccaaaaaagatgtcagaaacccgattttgggaaaaatactgtagagctgagtatctagtcaggacaaaaaacactgcagcagcaacagctgaggcagctggagatgaggaattagctatcttcctgaagaatgatgatatactggccaaggaggcaaagttgaagataaaacgagtcgatccaacattagacatggaggcagacactggagatgattacattcatcttccggaccatgggattcaccgtgatggtagcaaagagacagtcgatgctgacagtgagttggcgaggaggacgctgtctcaggacctgaaccgtcatgcagctgttgttcttgaagggagatctcttgatgttgagtcaactgatccaaagactttagctgaagcccttgcaagatccaagaaagaaccaccttctacttctaatgttgatgatgataatcatgagagactaatgaaggtggctagaatgacagagatagaggatctgcaagctccacgaagtcttctgtatgcaccactttgtataaaggatcctagagaatattttgattcccaacaagcaaatgctctgagatctctaggtggcagcaatggtggaagaaaagcccatagttgcagcttgagcactgaagaagtgttccatcatttaatggatcaaatgtcttctgttaaagttaataggcttaactgtccgattgttcagtctgatatggctcttaaggaaatcctaactacctaaatggtatgggcctaggttcttaatgaattaaacgaagggatttctcgttcaaggagacttaacctcaagaatcctcaagaaggtctccttggtcagctgcctcaacatacacgggacgagcttatggatcattggacggctatccaggaattgctacgccatttttggtcatcgtatccaataacaagtgcagtactttataacaaggttcaaagagttaaagaagctatgacacagatatatcaaaagctgcagcttataaaggaattggcacagcctgatgtaagacatgaaatatctcggctagtaaagcccatgactcaggccttggatgccgccttcaaccatgatttggaacagcagcagaaatcgtccaaggccggaaacaggcacaacgggttttgagcctaggagattggtttgaccaacacatgaagcgagacggacggacgggctgtgcccgaatacacaagagctgctgcagaattcttgaggcttgtacgattttgttcttttccccctcgcttattaatagctgccggaggagcctgctgtttgcagccccggaatcttgatctatgcatcaattgtttgtaactgactgaatagtgaagactcgcaacgcatgatgctgccgacgcgttgtacttgtacatggcagtaatggctattcgagatagaaccaaagctttaccattttgttttatgcggttcgttcatggccgccgggcagaattatacacatgtatgtcatctacagcgttacaaacataccattatatatcacagtaccgatgacatctgtcagctcccacccaggagttgctgtaaactatatggatcccggtgtcgtgttttg

SEQ ID NO: 42968 - DNA, 2358 bp, Zea Mays
gcaccttcggcttttgctccgacgccggcgagcgagaccgagaggcgaggcgagccaccgcggcggcggttgcagcgatggggtccatgacgatcggtgccaagtacaagaccacgatcaaggaccccggcaccccgggcatcctccgcatgaacggtgataggttcaccttcacccctaatgatccacgatcggcaatgaagttcaatgttgatttccgaaccatcaaagttggatttgttgcctgtgctctaggtcacaagttcaataaagtagagggtaacaaagcagcattattgaacctttcaaaagaagacaaggctggaggctacatatttgagtttgacaatgttggtaaccgtgaccaatgtcgagactttgtagctagggttttaggcaaacatcaagggatagtgcctcctagaccaactgtggctcctgaaaactcagttgcttctgctgctctggaacaactcagtgccgcagaagtggagagacgggttaaactgttgcgagaagacagcgaattgcagaaattacataagaagtttgttcttggaaatattctgcaagaatctgaattttgggcaacaagaaagaatttacttgatgatgaagcaaataagagatcaaaacaaaagccaggtttcaagagtgcacttgtagatattaggccaacaactgatggtcggacaaacaaggttactttccagatcacacctgagatgatacatcagatttttgcagaaaagcctgctgtccgtagagcatatttagattttgttccaaaaaagatgtcagaaacccgattttgggaaaaatactgtagagctgagtatctagtcaggacaaaaaacactgcagcagcaacagctgaggcagctggagatgaggaattagctatcttcctgaagaatgatgatatactggccaaggaggcaaagttgaagataaaacgagtcgatccaacattagacatggaggcagacactggagatgattacattcatcttccggaccatgggattcaccgtgatggtagcaaagagacagtcgatgctgacagtgagttggcgaggaggacgctgtctcaggacctgaaccgtcatgcagctgttgttcttgaagggagatctcttgatgttgagtcaactgatccaaagactttagctgaagcccttgcaagatccaagaaagaaccaccttctacttctaatgttgatgatgataatcatgagagactaatgaaggtggctagaatgacagagatagaggatctgcaagctccacgaagtcttctgtatgcaccactttgtataaaggatcctagagaatattttgattcccaacaagcaaatgctctgagatctctaggtggcagcaatggtggaagaaaagcccatagttgcagcttgagcactgaagaagtgttccatcatttaatggatcaaatgtcttctgttaaagttaataggcttaactgtccgattgttcagtctgatatggctcttaaggttcttaatgaattaaacgaagggatttctcgttcaaggagacttaacctcaagaatcctcaagaaggtctccttggtcagctgcctcaacatacacgggacgagcttatggatcattggacggctatccaggaattgctacgccatttttggtcatcgtatccaataacaagtgcagtactttataacaaggttcaaagagttaaagaagctatgacacagatatatcaaaagctgcagcttataaaggaattggcacagcctgatgtaagacatgaaatatctcggctagtaaagcccatgactcaggccttggatgccgccttcaaccatgatttggaacagcagcagaaatcgtccaaggccggaaacaggcacaacgggttttgagcctaggagattggtttgaccaacacatgaagcgagacggacggacgggctgtgcccgaatacacaagagctgctgcagaattcttgaggcttgtacgattttgttcttttccccctcgcttattaatagctgccggaggagcctgctgtttgcagccccggaatcttgatctatgcatcaattgtttgtaactgactgaatagtgaagactcgcaacgcatgatgctgccgacgcgttgtacttgtacatggcagtaatggctattcgagatagaaccaaagctttaccattttgttttatgcggttcgttcatggccgccgggcagaattatacacatgtatgtcatctacagcgttacaaacataccattatatatcacagtaccgatgacatctgtcagctcccacccaggagttgctgtaaactatatggatcccggtgtcgtgttttg

SEQ ID NO: 42969 - DNA, 3044 bp, Zea Mays
gcaccttcggcttttgctccgacgccggcgagcgagaccgagaggcgaggcgagccaccgcggcggcggttgcagcgatggggtccatgacgatcggtgccaagtacaagaccacgatcaaggaccccggcaccccgggcatcctccgcatgaacggtgataggttcaccttcacccctaatgatccacgatcggcaatgaagttcaatgttgatttccgaaccatcaaaggtcacaagttcaataaagtagagggtaacaaagcagcattattgaacctttcaaaagaagacaaggctggaggctacatatttgagtttgacaatgttggtaaccgtgaccaatgtcgagactttgtagctagggttttaggcaaacatcaagggatagtgcctcctagaccaactgtggctcctgaaaactcagttgcttctgctgctctggaacaactcagtgccgcagaagtggagagacgggttaaactgttgcgagaagacagaaattacataagaagtttgttcttggaaatattctgcaagaatctgaattttgggcaacaagaaagaatttacttgatgatgaagcaaataagagatcaaaacaaaagccaggtttcaagagtgcacttgtagatattaggccaacaactgatggtcgggtatgtcactgaaatactattgttgtagctgtagaccataattctgtaccagagtattgataagttatgttatttgttatgttctattatgaaacactgaatttgctaatggctgatggtagttatttttttatttctatgttgagcatttcagacaaacaaggttactttccagatcacacctgagatgatacatcaggtccacctttccactctgcttctttatcatgaactaatacatatatactgcttggtatcatcaatttttctgttgtctcaactgttataattgcaaaatttatatactatgctgtaaaatgaaaaagtacgtcattttgtgggttatggagtttctgaacattgttgttggtaaaaggcttccaaagatttttttaatctgtatatgaatgtgtagcaagccctgtaccttctctgtctccttagtagctttcatgcatgatgcagtgatcctctattgaactatttttatatcttgaaattatagttttcattgtgtgcatgtgactttgatgcgaccaaagggaattaatgagcaggaacactgaaaattatgcttccaccctagccagttaggttaggcttagtccatagctgcaaagaccatcttacttgctttgaaccctacctgcgctgggccctgtttgctcaagaatactccattatgcctgaggcatatattattcatggaaacaggtgctgaattctatgattctatatctgatgtactttcaacttgttaacaccatatatcctattttacagatttttgcagaaaagcctgctgtccgtagagcatatttagattttgttccaaaaaagatgtcagaaacccgattttgggaaaaatactgtagagctgagtatctagtcaggacaaaaaacactgcagcagcaacagctgaggcagctggagatgaggaattagctatcttcctgaagaatgatgatatactggccaaggaggcaaagttgaagataaaacgagtcgatccaacattagacatggaggcagacactggagatgattacattcatcttccggaccatgggattcaccgtgatggtagcaaagagacagtcgatgctgacagtgagttggcgaggaggacgctgtctcaggacctgaaccgtcatgcagctgttgttcttgaagggagatctcttgatgttgagtcaactgatccaaagactttagctgaagcccttgcaagatccaagaaagaaccaccttctacttctaatgttgatgatgataatcatgagagactaatgaaggtggctagaatgacagagatagaggatctgcaagctccacgaagtcttctgtatgcaccactttgtataaaggatcctagagaatattttgattcccaacaagcaaatgctctgagatctctaggtggcagcaatggtggaagaaaagcccatagttgcagcttgagcactgaagaagtgttccatcatttaatggatcaaatgtcttctgttaaagttaataggcttaactgtccgattgttcagtctgatatggctcttaaggttcttaatgaattaaacgaagggatttctcgttcaaggagacttaacctcaagaatcctcaagaaggtctccttggtcagctgcctcaacatacacgggacgagcttatggatgaattgctacgccatttttggtcatcgtatccaataacaagtgcagtactttataacaaggttcaaagagttaaagaagctatgacacagatatatcaaaagctgcagcttataaaggaattggcacagcctgatgtaagacatgaaatatctcggctagtaaagcccatgactcaggccttggatgccgccttcaaccatgatttggaacagcagcagaaatcgtccaaggccggaaacaggcacaacgggttttgagcctaggagattggtttgaccaacacatgaagcgagacggacggacgggctgtgcccgaatacacaagagctgctgcagaattcttgaggcttgtacgattttgttcttttccccctcgcttattaatagctgccggaggagcctgctgtttgcagccccggaatcttgatctatgcatcaattgtttgtaactgactgaatagtgaagactcgcaacgcatgatgctgccgacgcgttgtacttgtacatggcagtaatggctattcgagatagaaccaaagctttaccattttgttttatgcggttcgttcatggccgccgggcagaattatacacatgtatgtcatctacagcgttacaaacataccattatatatcacagtaccgatgacatctgtcagctcccacccaggagttgctgtaaactatatggatcccggtgtcgtgttttg

SEQ ID NO: 42970 - DNA, 2325 bp, Zea Mays
cgcaccttcggcttttgctccgacgccggcgagcgagaccgagaggcgaggcgagccaccgcggcggcggttgcagcgatggggtccatgacgatcggtgccaagtacaagaccacgatcaaggaccccggcaccccgggcatcctccgcatgaacggtgataggttcaccttcacccctaatgatccacgatcggcaatgaagttcaatgttgatttccgaaccatcaaaggtcacaagttcaataaagtagagggtaacaaagcagcattattgaacctttcaaaagaagacaaggctggaggctacatatttgagtttgacaatgttggtaaccgtgaccaatgtcgagactttgtagctagggttttaggcaaacatcaagggatagtgcctcctagaccaactgtggctcctgaaaactcagttgcttctgctgctctggaacaactcagtgccgcagaagtggagagacgggttaaactgttgcgagaagacagaaattacataagaagtttgttcttggaaatattctgcaagaatctgaattttgggcaacaagaaagaatttacttgatgatgaagcaaataagagatcaaaacaaaagccaggtttcaagagtgcacttgtagatattaggccaacaactgatggtcggacaaacaaggttactttccagatcacacctgagatgatacatcagatttttgcagaaaagcctgctgtccgtagagcatatttagattttgttccaaaaaagatgtcagaaacccgattttgggaaaaatactgtagagctgagtatctagtcaggacaaaaaacactgcagcagcaacagctgaggcagctggagatgaggaattagctatcttcctgaagaatgatgatatactggccaaggaggcaaagttgaagataaaacgagtcgatccaacattagacatggaggcagacactggagatgattacattcatcttccggaccatgggattcaccgtgatggtagcaaagagacagtcgatgctgacagtgagttggcgaggaggacgctgtctcaggacctgaaccgtcatgcagctgttgttcttgaagggagatctcttgatgttgagtcaactgatccaaagactttagctgaagcccttgcaagatccaagaaagaaccaccttctacttctaatgttgatgatgataatcatgagagactaatgaaggtggctagaatgacagagatagaggatctgcaagctccacgaagtcttctgtatgcaccactttgtataaaggatcctagagaatattttgattcccaacaagcaaatgctctgagatctctaggtggcagcaatggtggaagaaaagcccatagttgcagcttgagcactgaagaagtgttccatcatttaatggatcaaatgtcttctgttaaagttaataggcttaactgtccgattgttcagtctgatatggctcttaaggttcttaatgaattaaacgaagggatttctcgttcaaggagacttaacctcaagaatcctcaagaaggtctccttggtcagctgcctcaacatacacgggacgagcttatggatcattggacggctatccaggaattgctacgccatttttggtcatcgtatccaataacaagtgcagtactttataacaaggttcaaagagttaaagaagctatgacacagatatatcaaaagctgcagcttataaaggaattggcacagcctgatgtaagacatgaaatatctcggctagtaaagcccatgactcaggccttggatgccgccttcaaccatgatttggaacagcagcagaaatcgtccaaggccggaaacaggcacaacgggttttgagcctaggagattggtttgaccaacacatgaagcgagacggacggacgggctgtgcccgaatacacaagagctgctgcagaattcttgaggcttgtacgattttgttcttttccccctcgcttattaatagctgccggaggagcctgctgtttgcagccccggaatcttgatctatgcatcaattgtttgtaactgactgaatagtgaagactcgcaacgcatgatgctgccgacgcgttgtacttgtacatggcagtaatggctattcgagatagaaccaaagctttaccattttgttttatgcggttcgttcatggccgccgggcagaattatacacatgtatgtcatctacagcgttacaaacataccattatatatcacagtaccgatgacatctgtcagctcccacccaggagttgctgtaaactatatggatcccggtgtcgtgttttg

SEQ ID NO: 42971 - DNA, 2934 bp, Zea Mays
cttttctccgcaccttcggcttttgctccgacgccggcgagcgagaccgagaggcgaggcgagccaccgcggcggcggttgcagcgatggggtccatgacgatcggtgccaagtacaagaccacgatcaaggaccccggcaccccgggcatcctccgcatgaacggtgataggttcaccttcacccctaatgatccacgatcggcaatgaagttcaatgttgatttccgaaccatcaaaggtcacaagttcaataaagtagagggtaacaaagcagcattattgaacctttcaaaagaagacaaggctggaggctacatatttgagtttgacaatgttggtaaccgtgaccaatgtcgagactttgtagctagggttttaggcaaacatcaagggatagtgcctcctagaccaactgtggctcctgaaaactcagttgcttctgctgctctggaacaactcagtgccgcagaagtggagagacgggttaaactgttgcgagaagacagcgaattgcagaaattacataagaagtttgttcttggaaatattctgcaagaatctgaattttgggcaacaagaaagaatttacttgatgatgaagcaaataagagatcaaaacaaaagccaggtttcaagagtgcacttgtagatattaggccaacaactgatggtcggacaaacaaggttactttccagatcacacctgagatgatacatcaggtccacctttccactctgcttctttatcatgaactaatacatatatactgcttggtatcatcaatttttctgttgtctcaactgttataattgcaaaatttatatactatgctgtaaaatgaaaaagtacgtcattttgtgggttatggagtttctgaacattgttgttggtaaaaggcttccaaagatttttttaatctgtatatgaatgtgtagcaagccctgtaccttctctgtctccttagtagctttcatgcatgatgcagtgatcctctattgaactatttttatatcttgaaattatagttttcattgtgtgcatgtgactttgatgcgaccaaagggaattaatgagcaggaacactgaaaattatgcttccaccctagccagttaggttaggcttagtccatagctgcaaagaccatcttacttgctttgaaccctacctgcgctgggccctgtttgctcaagaatactccattatgcctgaggcatatattattcatggaaacaggtgctgaattctatgattctatatctgatgtactttcaacttgttaacaccatatatcctattttacagatttttgcagaaaagcctgctgtccgtagagcatatttagattttgttccaaaaaagatgtcagaaacccgattttgggaaaaatactgtagagctgagtatctagtcaggacaaaaaacactgcagcagcaacagctgaggcagctggagatgaggaattagctatcttcctgaagaatgatgatatactggccaaggaggcaaagttgaagataaaacgagtcgatccaacattagacatggaggcagacactggagatgattacattcatcttccggaccatgggattcaccgtgatggtagcaaagagacagtcgatgctgacagtgagttggcgaggaggacgctgtctcaggacctgaaccgtcatgcagctgttgttcttgaagggagatctcttgatgttgagtcaactgatccaaagactttagctgaagcccttgcaagatccaagaaagagatagaggatctgcaagctccacgaagtcttctgtatgcaccactttgtataaaggatcctagagaatattttgattcccaacaagcaaatgctctgagatctctaggtggcagcaatggtggaagaaaagcccatagttgcagcttgagcactgaagaagtgttccatcatttaatggatcaaatgtcttctgttaaagttaataggcttaactgtccgattgttcagtctgatatggctcttaaggttcttaatgaattaaacgaagggatttctcgttcaaggagacttaacctcaagaatcctcaagaaggtctccttggtcagctgcctcaacatacacgggacgagcttatggatgtgagatgctgtattcactactggttttgtttatatgtgttgtcaatggaactctgtaaactatctattttctcagcattggacggctatccaggaattgctacgccatttttggtcatcgtatccaataacaagtgcagtactttataacaaggttcaaagagttaaagaagctatgacacagatatatcaaaagctgcagcttataaaggaattggcacagcctgatgtaagacatgaaatatctcggctagtaaagcccatgactcaggccttggatgccgccttcaaccatgatttggaacagcagcagaaatcgtccaaggccggaaacaggcacaacgggttttgagcctaggagattggtttgaccaacacatgaagcgagacggacggacgggctgtgcccgaatacacaagagctgctgcagaattcttgaggcttgtacgattttgttcttttccccctcgcttattaatagctgccggaggagcctgctgtttgcagccccggaatcttgatctatgcatcaattgtttgtaactgactgaatagtgaagactcgcaacgcatgatgctgccgacgcgttgtacttgtacatggcagtaatggctattcgagatagaaccaaagctttaccattttgttttatgcggttcgttcatggccgccgggcagaattatacacatgtatgtcatctacagcgttacaaacataccattatatatcacagtaccgatgacatctgtcagctcccacccaggagttgctgtaaactatatggatcccggtgtcgtgttttg

SEQ ID NO: 42972 - DNA, 2327 bp, Zea Mays
cccttttctccgcaccttcggcttttgctccgacgccggcgagcgagaccgagaggcgaggcgagccaccgcggcggcggttgcagcgatggggtccatgacgatcggtgccaagtacaagaccacgatcaaggaccccggcaccccgggcatcctccgcatgaacggtgataggttcaccttcacccctaatgatccacgatcggcaatgaagttcaatgttgatttccgaaccatcaaaggtcacaagttcaataaagtagagggtaacaaagcagcattattgaacctttcaaaagaagacaaggctggaggctacatatttgagtttgacaatgttggtaaccgtgaccaatgtcgagactttgtagctagggttttaggcaaacatcaagggatagtgcctcctagaccaactgtggctcctgaaaactcagttgcttctgctgctctggaacaactcagtgccgcagaagtggagagacgggttaaactgttgcgagaagacagcgaattgcagaaattacataagaagtttgttcttggaaatattctgcaagaatctgaattttgggcaacaagaaagaatttacttgatgatgaagcaaataagagatcaaaacaaaagccaggtttcaagagtgcacttgtagatattaggccaacaactgatggtcggacaaacaaggttactttccagatcacacctgagatgatacatcagatttttgcagaaaagcctgctgtccgtagagcatatttagattttgttccaaaaaagatgtcagaaacccgattttgggaaaaatactgtagagctgagtatctagtcaggacaaaaaacactgcagcagcaacagctgaggcagctggagatgaggaattagctatcttcctgaagaatgatgatatactggccaaggaggcaaagttgaagataaaacgagtcgatccaacattagacatggaggcagacactggagatgattacattcatcttccggaccatgggattcaccgtgatggtagcaaagagacagtcgatgctgacagtgagttggcgaggaggacgctgtctcaggacctgaaccgtcatgcagctgttgttcttgaagggagatctcttgatgttgagtcaactgatccaaagactttagctgaagcccttgcaagatccaagaaagaaccaccttctacttctaatgttgatgatgataatcatgagagactaatgaaggtggctagaatgacagagatagaggatctgcaagctccacgaagtcttctgtatgcaccactttgtataaaggatcctagagaatattttgattcccaacaagcaaatgctctgagatctctaggtggcagcaatggtggaagaaaagcccatagttgcagcttgagcactgaagaagtgttccatcatttaatggatcaaatgtcttctgttaaagttaataggcttaactgtccgattgttcagtctgatatggctcttaaggttcttaatgaattaaacgaagggatttctcgttcaaggagacttaacctcaagaatcctcaagaaggtctccttggtcagctgcctcaacatacacgggacgagcttatggatgaattgctacgccatttttggtcatcgtatccaataacaagtgcagtactttataacaaggttcaaagagttaaagaagctatgacacagatatatcaaaagctgcagcttataaaggaattggcacagcctgatgtaagacatgaaatatctcggctagtaaagcccatgactcaggccttggatgccgccttcaaccatgatttggaacagcagcagaaatcgtccaaggccggaaacaggcacaacgggttttgagcctaggagattggtttgaccaacacatgaagcgagacggacggacgggctgtgcccgaatacacaagagctgctgcagaattcttgaggcttgtacgattttgttcttttccccctcgcttattaatagctgccggaggagcctgctgtttgcagccccggaatcttgatctatgcatcaattgtttgtaactgactgaatagtgaagactcgcaacgcatgatgctgccgacgcgttgtacttgtacatggcagtaatggctattcgagatagaaccaaagctttaccattttgttttatgcggttcgttcatggccgccgggcagaattatacacatgtatgtcatctacagcgttacaaacataccattatatatcacagtaccgatgacatctgtcagctcccacccaggagttgctgtaaactatatggatcccggtgtcgtgttttg

SEQ ID NO: 42973 - DNA, 2921 bp, Zea Mays
atgggcgtcgttgctcgtgctcggtcctcccagtgcgcgagggcgtggcggcgaccttgcttgagcaggcgcagagtccgctcgtcggctctgccccgacccgcagtgcgcgagggcgcgggggtgaccgcctctcgctcttctgccatttcgctgtgtccggcgagaggcccagcggtgaagctgctgggcaggtgggaccttgagacgtgggcgccgacggtgtcggtgcacatgtatgacttcttgtccggcatggcgggcgccttcgggcgtcgtgagcgaggcaggggtgcttgcggttgccgtggagcgcagtggccgagactaaacattagatgcaacccccaagatgttcttgtttgcattcagataatgaatgaaaggcaacgccaagctgtagtgaggaaagggttcttcaacatacttgacatgaccatcgatgcacttggaagccgaacacacctttgttggctgatggagaagctagacccgaaagacatgactcttcgcattggtccaggcaaagagctgaaaatcaccaaggagaccgtccatctcatcctgggtttacccaatactggtggtgggaagcctctaaacattgatgaagtaaatgcagctgttaaccttaggtcatcacttggcatcagcaaagatgagtttggagttgcaaagctgcaagaacgattaagattaggaggcgatgatgacctctcaattcgatgttttttcttgatccttttcaaccggctgctattcccaactgctagctggtctatatccaacaatgaggtgctcttgacagaacaattggatcgtttccctcatattgattggtgtcatctcatattcaacgacttatgtgaagctgcccataaatggcataacagaagcactacaaatgtgtcggcgacgatatatgggtgttccattgtcgttcttgtgtactacctggaccacctccaccacgctgtagcccccaacaacaaaagcgacacaccgcgtatcaaatattttgacaagaaaaccataaaagcattgtcaatggctgataagaggaagccacgtcagggcggtgaaccatttggccactgtgattttcggagcagctcagagacctgttacgcccctacacctgaatttcatggtcaattcgagttcagttcagatgcatttgatgtagcccaaaatgcaccctgtggacatcacaccatctctattcaagttccacttatcaaagacatgatttcaagcaagattcagcaactccctgcatatcaccatcccaaatttgaagcaaagctgcgtgcttacgactcagaggttggcaagtcatttgccactatcaaccaacgtcttagcaagattgtcaaaaagcagtacgacctagcagacacatttggagagttgattgacgaggttcttcgtgctgagataaatagtccagacaacaaagatgacatgatagaaccttccaatccctcagcatcagagcattgcacacagtctactgaccaattcatctcagatccactaatgacagccacgcagctggagtcgcagatgatagtcactcaggtggaggccatatataaaagacaacaggaaatgtgccgagccttcgagagttctcgtgatgaatcagtcacacctcaaaacatccggggtgacacgacggaagatgatgctcttcaacttgactctggcctagttttggaccagattctaagtggcaatgagacatatatgatgcacaaaacacgacacgactctgtgccactcacacaaatggactgtgttcgcgcccttcgacaattcctgtgtgctaaggtcatggatttgaacagaaatgtcattgattttggtgaatatgtcggtacttgtcgtgatatacaacgatcgtttgccgatggggagtgccttgacaatgttttcatgcaatgcttcattgattgtgttcgtgatgacgccacaaatcatatccctccactaactgctcatcaacttatcctagacgccattgttggggctatattgaacttcgaggagcaggaacaacacagtaacactcatcggccgtatgacccagccatcctagagaattacttgtcaaagacactgccttcgttcaagcagttggacgaatacaaatcgatcatggtccctatgctccgcgcgggacattggacgttgtatgttatcaattttcagaatcgatgcatacacattctagactccaatccatacggaccagaacttggtgagactacatgggaaagttaccattatgttcaaatggacatcgggaaaaggaagttaccatgggccagactaataatggttagactaaacatggctctccaacatgttcgaccaagatcaaacctacctagatttgacaactttccaatcgacatggctccaaactgtcccacaatgaaagcagggtctaacgactgtggcttctttgctatgaggtacatacaatattatgactatatggatggtgctatcaatgtagttatagactcggataattcaggtgacctccgcgctcttgccttgtattacctgatcttccatcgactaaacaagaatcgctcattgtctccagaattagaaagattcaagttcccccattattagattagtctagagcaatatcatcagattgatcgttgcactcaaaggtgtgctagcatgtatttagtgtatatgtttgtccatatgtatagtgatctagtgcctaaaactgttttacaacctttacacgttataaacttctgtcacttcttatggatccatgctgatcaagtgcttaccaccagtttttactacattttgttatgttgctatgtttcaatgatgtggtgtgcaattgttatgttgttatgctcaaatattgttcattttttgtt

SEQ ID NO: 42974 - DNA, 2876 bp, Zea Mays
atgggcgtcgttgctcgtgctcggtcctcccagtgcgcgagggcgtggcggcgaccttgcttgagcaggcgcagagtccgctcgtcggctctgccccgacccgcagtgcgcgagggcgcgggggtgaccgcctctcgctcttctgccatttcgctgtgtccggcgagaggcccagcggtgaagctgctgggcaggtgggaccttgagacgtgggcgccgacggtgtcggtgcacatgtatgacttcttgtccggcatggcgggcgccttcgggcgtcgtgagcgaggcaggggtgcttgcggttgccgtggagcgcagtggccgagactaaacattagatgcaacccccaagatgttcttgtttgcattcagataatgaatgaaaggcaacgccaagctgtagtgaggaaagggttcttcaacatacttgacatgaccatcgatgcacttggaagccgaacacacctttgttggctgatggagaagctagacccgaaagacatgactcttcgcattggtccaggcaaagagctgaaaatcaccaaggagaccgtccatctcatcctgggtttacccaatactggtggtgggaagcctctaaacattgatgaagtaaatgcagctgttaaccttaggtcatcacttggcatcagcaaagatgagtttggagttgcaaagctgcaagaacgattaagattaggaggcgatgatgacctctcaattcgatgttttttcttgatccttttcaaccggctgctattcccaactgctagctggtctatatccaacaatgaggtgctcttgacagaacaattggatcgtttccctcatattgattggtgtcatctcatattcaacgacttatgtgaagctgcccataaatggcataacagaagcactacaaatgtgtcggcgacgatatatgggtgttccattgtcgttcttgtgtactacctggaccacctccaccacgctgtagcccccaacaacaaaagcgacacaccgcgtatcaaatattttgacaagaaaaccataaaagcattgtcaatggctgataagaggaagccacgtcagggcggtgaaccatttggccactgtgattttcggagcagctcagagacctgttacgcccctacacctgaatttcatggtcaattcgagtttcagttcagttcagatgcatttgatgtagcccaaaatgcaccctgtggacatcacaccatctctattcaagttccacttatcaaagacatgatttcaagcaagattcagcaactccctgcatatcaccatcccaaatttgaagcaaagctgcgtgcttacgactcagaggttggcaagtcatttgccactatcaaccaacgtcttagcaagattgtcaaaaagcagtacgacctagcagacacatttggagagttgattgacgaggttcttcgtgctgagataaatagtccagacaacaaagatgacatgatagaaccttccaatccctcagcatcagccacgcagctggagtcgcagatgatagtcactcaggtggaggccatatataaaagacaacaggaaatgtgccgagccttcgagagttctcgtgatgaatcagtcacacctcaaaacatccggggtgacacgacggaagatgatgctcttcaacttgactctggcctagttttggaccagattctaagtggcaatgagacatatatgatgcacaaaacacgacacgactctgtgccactcacacaaatggactgtgttcgcgcccttcgacaattcctgtgtgctaaggtcatggatttgaacagaaatgtcattgattttggtgaatatgtcggtacttgtcgtgatatacaacgatcgtttgccgatggggagtgccttgacaatgttttcatgcaatgcttcattgattgtgttcgtgatgacgccacaaatcatatccctccactaactgctcatcaacttatcctagacgccattgttggggctatattgaacttcgaggagcaggaacaacacagtaacactcatcggccgtatgacccagccatcctagagaattacttgtcaaagacactgccttcgttcaagcagttggacgaatacaaatcgatcatggtccctatgctccgcgcgggacattggacgttgtatgttatcaattttcagaatcgatgcatacacattctagactccaatccatacggaccagaacttggtgagactacatgggaaagttaccattatgttcaaatggacatcgggaaaaggaagttaccatgggccagactaataatggttagactaaacatggctctccaacatgttcgaccaagatcaaacctacctagatttgacaactttccaatcgacatggctccaaactgtcccacaatgaaagcagggtctaacgactgtggcttctttgctatgaggtacatacaatattatgactatatggatggtgctatcaatgtagttatagactcggataattcaggtgacctccgcgctcttgccttgtattacctgatcttccatcgactaaacaagaatcgctcattgtctccagaattagaaagattcaagttcccccattattagattagtctagagcaatatcatcagattgatcgttgcactcaaaggtgtgctagcatgtatttagtgtatatgtttgtccatatgtatagtgatctagtgcctaaaactgttttacaacctttacacgttataaacttctgtcacttcttatggatccatgctgatcaagtgcttaccaccagtttttactacattttgttatgttgctatgtttcaatgatgtggtgtgcaattgttatgttgttatgctcaaatattgttcattttttgtt

SEQ ID NO: 42975 - DNA, 3072 bp, Zea Mays
ccgtaggtatatcgccttcggcgccggctactcctttcgccttgtgttgcatgacccggccgccgcctcatgggcgtcgttgctcgtgctcggtcctcccagtgcgcgagggcgtggcggcgaccttgcttgagcaggcgcagagtccgctcgtcggctctgccccgacccgcagtgcgcgagggcgcgggggtgaccgcctctcgctcttctgccatttcgctgtgtccggcgagaggcccagcggtgaagctgctgggcaggtgggaccttgagacgtgggcgccgacggtgtcggtgcacatgtatgacttcttgtccggcatggcgggcgccttcgggcgtcgtgagcgaggcaggggtgcttgcggttgccgtggagcgcagtggccgagactaaacattagatgcaacccccaagatgttcttgtttgcattcagataatgaatgaaaggcaacgccaagctgtagtgaggaaagggttcttcaacatacttgacatgaccatcgatgcacttggaagccgaacacacctttgttggctgatggagaagctagacccgaaagacatgactcttcgcattggtccaggcaaagagctgaaaatcaccaaggagaccgtccatctcatcctgggtttacccaatactggtggtgggaagcctctaaacattgatgaagtaaatgcagctgttaaccttaggtcatcacttggcatcagcaaagatgagtttggagttgcaaagctgcaagaacgattaagattaggaggcgatgatgacctctcaattcgatgttttttcttgatccttttcaaccggctgctattcccaactgctagctggtctatatccaacaatgaggtgctcttgacagaacaattggatcgtttccctcatattgattggtgtcatctcatattcaacgacttatgtgaagctgcccataaatggcataacagaagcactacaaatgtgtcggcgacgatatatgggtgttccattgtcgttcttgtgtactacctggaccacctccaccacgctgtagcccccaacaacaaaagcgacacaccgcgtatcaaatattttgacaagaaaaccataaaagcattgtcaatggctgataagaggaagccacgtcagggcggtgaaccatttggccactgtgattttcggagcagctcagagacctgttacgcccctacacctgaatttcatggtcaattcgagtttcagttcagttcagatgcatttgatgtagcccaaaatgcaccctgtggacatcacaccatctctattcaagttccacttatcaaagacatgatttcaagcaagattcagcaactccctgcatatcaccatcccaaatttgaagcaaagctgcgtgcttacgactcagaggttggcaagtcatttgccactatcaaccaacgtcttagcaagattgtcaaaaagcagtacgacctagcagacacatttggagagttgattgacgaggttcttcgtgctgagataaatagtccagacaacaaagatgacatgatagaaccttccaatccctcagcatcagccacgcagctggagtcgcagatgatagtcactcaggtggaggccatatataaaagacaacaggaaatgtgccgagccttcgagagttctcgtgatgaatcagtcacacctcaaaacatcgtttgtttctacctttaactttatgatttcttattctttaatttctgtacgaccgttttcatacttaaccaaccgaagcaacattatgagggccacaatgtttgcaattggctaggtttgttactttgtttatcaattgtgcattttattctgtttttaaattgtcatattgttttgtgaagcggggtgacacgacggaagatgatgctcttcaacttgactctggcctagttttggaccagattctaagtggcaatgagacatatatgatgcacaaaacacgacacgactctgtgccactcacacaaatggactgtgttcgcgcccttcgacaattcctgtgtgctaaggtcatggatttgaacagaaatgtcattgattttggtgaatatgtcggtacttgtcgtgatatacaacgatcgtttgccgatggggagtgccttgacaatgttttcatgcaatgcttcattgattgtgttcgtgatgacgccacaaatcatatccctccactaactgctcatcaacttatcctagacgccattgttggggctatattgaacttcgaggagcaggaacaacacagtaacactcatcggccgtatgacccagccatcctagagaattacttgtcaaagacactgccttcgttcaagcagttggacgaatacaaatcgatcatggtccctatgctccgcgcgggacattggacgttgtatgttatcaattttcagaatcgatgcatacacattctagactccaatccatacggaccagaacttggtgagactacatgggaaagttaccattatgttcaaatggacatcgggaaaaggaagttaccatgggccagactaataatggttagactaaacatggctctccaacatgttcgaccaagatcaaacctacctagatttgacaactttccaatcgacatggctccaaactgtcccacaatgaaagcagggtctaacgactgtggcttctttgctatgaggataattcaggtgacctccgcgctcttgccttgtattacctgatcttccatcgactaaacaagaatcgctcattgtctccagaattagaaagattcaagttcccccattattagattagtctagagcaatatcatcagattgatcgttgcactcaaaggtgtgctagcatgtatttagtgtatatgtttgtccatatgtatagtgatctagtgcctaaaactgttttacaacctttacacgttataaacttctgtcacttcttatggatccatgctgatcaagtgcttaccaccagtttttactacattttgttatgttgctatgtttcaatgatgtggtgtgcaattgttatgttgttatgctcaaatattgttcattttttgtt

SEQ ID NO: 42976 - DNA, 6988 bp, Zea Mays
ccgaagccgagtacattgccgcaggacattgttgcgcgcaattgctttggatgaggcaaaccctgcgggactacggttacaaattaaccaaagttcctttgctatgtgataatgagagtgcaatcaaaatggccgacaatcccgtcgagcacagccgcactaaacacatagccattcggtatcattttcttagggatcaccaacaaaagggagatatcgagatttcttacattaacactaaagatcaattagccgatatctttaccaagcctcttgatgaacaatcttttaccagacttaggcatgagctcaatattcttgattctagaaatttcttttgctagcttgcacacatagctcattagaatacctttgatcatatctcttttatatgctatgactaatgtgttttcaagtctattttcaaaccaagtcataggtatattgaaagggaatcggagtcttcggcgaagacaaaggcttccactccgtaactcatgcctcgccatcactccgagcaactctctattccttggggagaaatgagcatcaaagaaaaggacttcatccttgggggagagagtaaaagctcaaaagcaaaaggaccgaacttcgtttttggtataatcttaactcattcatttatgaccaaagaggaagaacttacttcgagggctctaatgattccgtttttggcgattcatgccaaaaagggggagaaatgagcccaaagcaaaaggaccgcaccaccaccaatttcaaaaacttagtgttttcaaagaagtatttatcaattggtatcctattgtgttcaaagggggagcaagtagtatttcaaaatgatatatcaaaaccctcttgaacactaagaggtggatctcttttagggggagttttgtttagtcaaaggaaaagcatttgattcagggggagaaaatttcaaatcttgaaaatgctttgcaaactcttattcatttacctttgactatttgcaaaagatctttgaaatggatttacaaaaagaatttgcaaaaacaaaactcgtggtgcaaacgtggtccaaaatgttatataagaaagaaacattccatggatatcttgtaagtagttatattggcattaattccaagcaacctttacacttacattatgcaaactagttcaattatgcacttctctatttgctttggtttgtgttggcatcaatcaccaaaaagggggagattgaaagggaattaggcttacacctagttcctaaataattttggtggttgaattgcccaacacaaatctttggactaactagtttgcccaagtgtatagattatacaggtgtaaaaggttcacactcagccaataaaaagaccaagttttggattcaacaaaggagcaaaggggcaaccgaaggcacccctggtctggcgcaccggactgtccggtgtgccaccggacagtgcacagtacctgtccggtgcaccaggggactcagactcaaactcttcaccttcgggaattccagaggcgactcggctaaaattcaccggactgtccggtgtacaccggacagtgtccggtgcgccaaaggaggtcggcctcaggaactcgccagcttcgggaaaagccaacggctcgtccgctataaatcaccggactgtccggtgtgcaccggactgtccggtgcaactccgggacaacggtcgtctccgcgccaacggctctctgccgcgcattcaatgcgccgtctgcgcgcgcagaagtcagaatcgcccatgctggcacaccggacatcaaacagtacctgtccggtgtgcaccggacacccaggcgggcccacatgtcaggagctccaacggctagaatccaacggcagtgatgacgtggcagggggcaccggactgtccggtgtgcaccggactgtccggtgcgccatcgcgcagaagcctccagccaacggtcaagtttggtggttggggctataaataccccaaccacccctccattccttgcatccaagttttccacttctcaaccacttacaagagctaggcattcaattctagacacattcaaagagatcaaatcctctccaattccacacaaaaccctagtgactggagagagtgatttgccgtgttcatttgagctcttgcgcttggattgcttcttttctgtctcatttgttcttgtgatcaaaactccattgtaatcaaggcaagaggcaccaattgtgtggtggcccttgcggggaagttttgttcccggctttgattagagaagagaagctcactcggtccgagggaccgtttgagagagggaagggttgaaagagacccggcctttgtggcctcctcaacggggagtaggtttgcaagaaccgaacctcggtaaaacaaatctccgtgtctcacttgcttattcgcttgggatttgttttgcgccctctcttgcggactcgtttattattactaacgctaaccccggcttgtagttgtgtttatatttgtaaatttcagtttcgccctattcaccccccctctaggcgactatcagagacgcagtcatgactccctcgaggccaaccctaggcgggagacgcagtcacgacttgcccgaggccaaccccaggcgggagacacagtcacgactcgcccgaggctaatctcgggcggcagtcggtcacgactcccctgaggccaacctcgggcgggagacgagcacaactcgcccgaggccaaccccgggcgggagacgcaatcacgactcacccgaggccaacctcaggcgagagacgcagtcacaactcgcccaaggccaaccccaggagggagacggtcacgacacgcccaaggccaacatcgggcgggagacacagtcacggctcgcccgaggccaaccccaggcgggagacgatttcacggctcgcccgaggccaacctcgggcgggagacggtcacaactcgcccgaggccaaccccgagcgggagacgtagtcacaactcacccgaggccaacctcaggcgggagacgcagtcacgactcgcctaaggccaaccctaggcgggagacggtcacgacacgcccgaggcgaacctcgggcgggcgacacagtcacagcttgcccgaggccaacctcgggcgggcgacgcagtcacggctcgtccgagaccaacctcgggcgggcgacgcagtcacggctcgtctgaggccaacctcgggcgggagacgcagtcacggctcgcccgtggccaatcccggacgggagacgcagtcacggctcgcccgaggccaaccccgggcgggagacggtttcacggctcgcccgaggccaacctcggttgggagacgcagtcaccgctcacacgaggccaactccgggcgcgagacgtagtcatggctcgcccgaggccaaccccgagcaggagacggtttcacggctcgctcgaggccaaccttgggcgggcgacgcagccacggcttgttcgaggccaacctcgtgtgggagacggtttcacagctcgcctgaggccaacctcgagcggtagacgcagtcacggcttgcccgaggctaactccaggcgggagacgcagtcacggcttgcccgaggccaaccccgggcgggagacggtttcacggctcgcccggggccaacctcggtcgggagacgcagtcatgggtcgcccgaggccaaccctgggcgggagacgcagtcacgctcgcccgaggccaacctcgggagggaggcgcagtcatggctcgtctgaggccaaccccggacaggagacgcagcacgactcgtccgaggccaacctcgaggcgggaacgcagtcatgactcgcccggggccaacctcgggcgggagatccagttacgactcgcccgaggccaacccccgggtgggagacacagtcgtctccacgctcctcgtgctcgtgcgggtgcggactctgctcgctggctctgccccgacccgtaggtatatcgccttcggcgccggctactcctttcgccttgtgttgcatgacccggccgccgcctcatgggcgtcgttgctcgtgctcggtcctcccagtgcgcgagggcgtggcggcgaccttgcttgagcaggcgcagagtccgctcgtcggctctgccccgacccgcagtgcgcgagggcgcgggggtgaccgcctctcgctcttctgccatttcgctgtgtccggcgagaggcccagcggtgaagctgctgggcaggtgggaccttgagacgtgggcgccgacggtgtcggtgcacatgtatgacttcttgtccggcatggcgggcgccttcgggcgtcgtgagcgaggcaggggtgcttgcggttgccgtggagcgcagtggccgagactaaacattagatgcaacccccaagatgttcttgtttgcattcagataatgaatgaaaggcaacgccaagctgtagtgaggaaagggttcttcaacatacttgacatgaccatcgatgcacttggaagccgaacacacctttgttggctgatggagaagctagacccgaaagacatgactcttcgcattggtccaggcaaagagctgaaaatcaccaaggagaccgtccatctcatcctgggtttacccaatactggtggtgggaagcctctaaacattgatgaagtaaatgcagctgttaaccttaggtcatcacttggcatcagcaaagatgagtttggagttgcaaagctgcaagaacgattaagattaggaggcgatgatgacctctcaattcgatgttttttcttgatccttttcaaccggctgctattcccaactgctagctggtctatatccaacaatgaggtgctcttgacagaacaattggatcgtttccctcatattgattggtgtcatctcatattcaacgacttatgtgaagctgcccataaatggcataacagaagcactacaaatgtgtcggcgacgatatatgggtgttccattgtcgttcttgtgtactacctggaccacctccaccacgctgtagcccccaacaacaaaagcgacacaccgcgtatcaaatattttgacaagaaaaccataaaagcattgtcaatggctgataagaggaagccacgtcagggcggtgaaccatttggccactgtgattttcggagcagctcagagacctgttacgcccctacacctgaatttcatggtcaattcgagtttcagttcagttcagatgcatttgatgtagcccaaaatgcaccctgtggacatcacaccatctctattcaagttccacttatcaaagacatgatttcaagcaagattcagcaactccctgcatatcaccatcccaaatttgaagcaaagctgcgtgcttacgactcagaggttggcaagtcatttgccactatcaaccaacgtcttagcaagattgtcaaaaagcagtacgacctagcagacacatttggagagttgattgacgaggttcttcgtgctgagataaatagtccagacaacaaagatgacatgatagaaccttccaatccctcagcatcagatccactaatgacagccacgcagctggagtcgcagatgatagtcactcaggtggaggccatatataaaagacaacaggaaatgtgccgagccttcgagagttctcgtgatgaatcagtcacacctcaaaacatcgtttgtttctacctttaactttatgatttcttattctttaatttctgtacgaccgttttcatacttaaccaaccgaagcaacattatgagggccacaatgtttgcaattggctagcggggtgacacgacggaagatgatgctcttcaacttgactctggcctagttttggaccagattctaagtggcaatgagacatatatgatgcacaaaacacgacacgactctgtgccactcacacaaatggactgtgttcgcgcccttcgacaattcctgtgtgctaaggtcatggatttgaacagaaatgtcattgattttggtgaatatgtcggtacttgtcgtgatatacaacgatcgtttgccgatggggagtgccttgacaatgttttcatgcaatgcttcattgattgtgttcgtgatgacgccacaaatcatatccctccactaactgctcatcaacttatcctagacgccattgttggggctatattgaacttcgaggagcaggaacaacacagtaacactcatcggccgtatgacccagccatcctagagaattacttgtcaaagacactgccttcgttcaagcagttggacgaatacaaatcgatcatggtccctatgctccgcgcgggacattggacgttgtatgttatcaattttcagaatcgatgcatacacattctagactccaatccatacggaccagaacttggtgagactacatgggaaagttaccattatgttcaaatggacatcgggaaaaggaagttaccatgggccagactaataatggttagactaaacatggctctccaacatgttcgaccaagatcaaacctacctagatttgacaactttccaatcgacatggctccaaactgtcccacaatgaaagcagggtctaacgactgtggcttctttgctatgaggataattcaggtgacctccgcgctcttgccttgtattacctgatcttccatcgactaaacaagaatcgctcattgtctccagaattagaaagattcaagttcccccattattagattagtctagagcaatatcatcagattgatcgttgcactcaaaggtgtgctagcatgtatttagtgtatatgtttgtccatatgtatagtgatctagtgcctaaaactgttttacaacctttacacgttataaacttctgtcacttcttatggatccatgctgatcaagtgcttaccaccagtttttactacattttgttatgttgctatgtttcaatgatgtggtgtgcaattgttatgttgttatgctcaaatattgttcattttttgtt

SEQ ID NO: 42977 - DNA, 6928 bp, Zea Mays
ccgaagccgagtacattgccgcaggacattgttgcgcgcaattgctttggatgaggcaaaccctgcgggactacggttacaaattaaccaaagttcctttgctatgtgataatgagagtgcaatcaaaatggccgacaatcccgtcgagcacagccgcactaaacacatagccattcggtatcattttcttagggatcaccaacaaaagggagatatcgagatttcttacattaacactaaagatcaattagccgatatctttaccaagcctcttgatgaacaatcttttaccagacttaggcatgagctcaatattcttgattctagaaatttcttttgctagcttgcacacatagctcattagaatacctttgatcatatctcttttatatgctatgactaatgtgttttcaagtctattttcaaaccaagtcataggtatattgaaagggaatcggagtcttcggcgaagacaaaggcttccactccgtaactcatgcctcgccatcactccgagcaactctctattccttggggagaaatgagcatcaaagaaaaggacttcatccttgggggagagagtaaaagctcaaaagcaaaaggaccgaacttcgtttttggtataatcttaactcattcatttatgaccaaagaggaagaacttacttcgagggctctaatgattccgtttttggcgattcatgccaaaaagggggagaaatgagcccaaagcaaaaggaccgcaccaccaccaatttcaaaaacttagtgttttcaaagaagtatttatcaattggtatcctattgtgttcaaagggggagcaagtagtatttcaaaatgatatatcaaaaccctcttgaacactaagaggtggatctcttttagggggagttttgtttagtcaaaggaaaagcatttgattcagggggagaaaatttcaaatcttgaaaatgctttgcaaactcttattcatttacctttgactatttgcaaaagatctttgaaatggatttacaaaaagaatttgcaaaaacaaaactcgtggtgcaaacgtggtccaaaatgttatataagaaagaaacattccatggatatcttgtaagtagttatattggcattaattccaagcaacctttacacttacattatgcaaactagttcaattatgcacttctctatttgctttggtttgtgttggcatcaatcaccaaaaagggggagattgaaagggaattaggcttacacctagttcctaaataattttggtggttgaattgcccaacacaaatctttggactaactagtttgcccaagtgtatagattatacaggtgtaaaaggttcacactcagccaataaaaagaccaagttttggattcaacaaaggagcaaaggggcaaccgaaggcacccctggtctggcgcaccggactgtccggtgtgccaccggacagtgcacagtacctgtccggtgcaccaggggactcagactcaaactcttcaccttcgggaattccagaggcgactcggctaaaattcaccggactgtccggtgtacaccggacagtgtccggtgcgccaaaggaggtcggcctcaggaactcgccagcttcgggaaaagccaacggctcgtccgctataaatcaccggactgtccggtgtgcaccggactgtccggtgcaactccgggacaacggtcgtctccgcgccaacggctctctgccgcgcattcaatgcgccgtctgcgcgcgcagaagtcagaatcgcccatgctggcacaccggacatcaaacagtacctgtccggtgtgcaccggacacccaggcgggcccacatgtcaggagctccaacggctagaatccaacggcagtgatgacgtggcagggggcaccggactgtccggtgtgcaccggactgtccggtgcgccatcgcgcagaagcctccagccaacggtcaagtttggtggttggggctataaataccccaaccacccctccattccttgcatccaagttttccacttctcaaccacttacaagagctaggcattcaattctagacacattcaaagagatcaaatcctctccaattccacacaaaaccctagtgactggagagagtgatttgccgtgttcatttgagctcttgcgcttggattgcttcttttctgtctcatttgttcttgtgatcaaaactccattgtaatcaaggcaagaggcaccaattgtgtggtggcccttgcggggaagttttgttcccggctttgattagagaagagaagctcactcggtccgagggaccgtttgagagagggaagggttgaaagagacccggcctttgtggcctcctcaacggggagtaggtttgcaagaaccgaacctcggtaaaacaaatctccgtgtctcacttgcttattcgcttgggatttgttttgcgccctctcttgcggactcgtttattattactaacgctaaccccggcttgtagttgtgtttatatttgtaaatttcagtttcgccctattcaccccccctctaggcgactatcagagacgcagtcatgactccctcgaggccaaccctaggcgggagacgcagtcacgacttgcccgaggccaaccccaggcgggagacacagtcacgactcgcccgaggctaatctcgggcggcagtcggtcacgactcccctgaggccaacctcgggcgggagacgagcacaactcgcccgaggccaaccccgggcgggagacgcaatcacgactcacccgaggccaacctcaggcgagagacgcagtcacaactcgcccaaggccaaccccaggagggagacggtcacgacacgcccaaggccaacatcgggcgggagacacagtcacggctcgcccgaggccaaccccaggcgggagacgatttcacggctcgcccgaggccaacctcgggcgggagacggtcacaactcgcccgaggccaaccccgagcgggagacgtagtcacaactcacccgaggccaacctcaggcgggagacgcagtcacgactcgcctaaggccaaccctaggcgggagacggtcacgacacgcccgaggcgaacctcgggcgggcgacacagtcacagcttgcccgaggccaacctcgggcgggcgacgcagtcacggctcgtccgagaccaacctcgggcgggcgacgcagtcacggctcgtctgaggccaacctcgggcgggagacgcagtcacggctcgcccgtggccaatcccggacgggagacgcagtcacggctcgcccgaggccaaccccgggcgggagacggtttcacggctcgcccgaggccaacctcggttgggagacgcagtcaccgctcacacgaggccaactccgggcgcgagacgtagtcatggctcgcccgaggccaaccccgagcaggagacggtttcacggctcgctcgaggccaaccttgggcgggcgacgcagccacggcttgttcgaggccaacctcgtgtgggagacggtttcacagctcgcctgaggccaacctcgagcggtagacgcagtcacggcttgcccgaggctaactccaggcgggagacgcagtcacggcttgcccgaggccaaccccgggcgggagacggtttcacggctcgcccggggccaacctcggtcgggagacgcagtcatgggtcgcccgaggccaaccctgggcgggagacgcagtcacgctcgcccgaggccaacctcgggagggaggcgcagtcatggctcgtctgaggccaaccccggacaggagacgcagcacgactcgtccgaggccaacctcgaggcgggaacgcagtcatgactcgcccggggccaacctcgggcgggagatccagttacgactcgcccgaggccaacccccgggtgggagacacagtcgtctccacgctcctcgtgctcgtgcgggtgcggactctgctcgctggctctgccccgacccgtaggtatatcgccttcggcgccggctactcctttcgccttgtgttgcatgacccggccgccgcctcatgggcgtcgttgctcgtgctcggtcctcccagtgcgcgagggcgtggcggcgaccttgcttgagcaggcgcagagtccgctcgtcggctctgccccgacccgcagtgcgcgagggcgcgggggtgaccgcctctcgctcttctgccatttcgctgtgtccggcgagaggcccagcggtgaagctgctgggcaggtgggaccttgagacgtgggcgccgacggtgtcggtgcacatgtatgacttcttgtccggcatggcgggcgccttcgggcgtcgtgagcgaggcaggggtgcttgcggttgccgtggagcgcagtggccgagactaaacattagatgcaacccccaagatgttcttgtttgcattcagataatgaatgaaaggcaacgccaagctgtagtgaggaaagggttcttcaacatacttgacatgaccatcgatgcacttggaagccgaacacacctttgttggctgatggagaagctagacccgaaagacatgactcttcgcattggtccaggcaaagagctgaaaatcaccaaggagaccgtccatctcatcctgggtttacccaatactggtggtgggaagcctctaaacattgatgaagtaaatgcagctgttaaccttaggtcatcacttggcatcagcaaagatgagtttggagttgcaaagctgcaagaacgattaagattaggaggcgatgatgacctctcaattcgatgttttttcttgatccttttcaaccggctgctattcccaactgctagctggtctatatccaacaatgaggtgctcttgacagaacaattggatcgtttccctcatattgattggtgtcatctcatattcaacgacttatgtgaagctgcccataaatggcataacagaagcactacaaatgtgtcggcgacgatatatgggtgttccattgtcgttcttgtgtactacctggaccacctccaccacgctgtagcccccaacaacaaaagcgacacaccgcgtatcaaatattttgacaagaaaaccataaaagcattgtcaatggctgataagaggaagccacgtcagggcggtgaaccatttggccactgtgattttcggagcagctcagagacctgttacgcccctacacctgaatttcatggtcaattcgagtttcagttcagttcagatgcatttgatgtagcccaaaatgcaccctgtggacatcacaccatctctattcaagttccacttatcaaagacatgatttcaagcaagattcagcaactccctgcatatcaccatcccaaatttgaagcaaagctgcgtgcttacgactcagaggttggcaagtcatttgccactatcaaccaacgtcttagcaagattgtcaaaaagcagtacgacctagcagacacatttggagagttgattgacgaggttcttcgtgctgagataaatagtccagacaacaaagatgacatgatagaaccttccaatccctcagcatcagatccactaatgacagccacgcagctggagtcgcagatgatagtcactcaggtggaggccatatataaaagacaacaggaaatgtgccgagccttcgagagttctcgtgatgaatcagtcacacctcaaaacatccggggtgacacgacggaagatgatgctcttcaacttgactctggcctagttttggaccagattctaagtggcaatgagacatatatgatgcacaaaacacgacacgactctgtgccactcacacaaatggactgtgttcgcgcccttcgacaattcctgtgtgctaaggtcatggatttgaacagaaatgtcattgattttggtgaatatgtcggtacttgtcgtgatatacaacgatcgtttgccgatggggagtgccttgacaatgttttcatgcaatgcttcattgattgtgttcgtgatgacgccacaaatcatatccctccactaactgctcatcaacttatcctagacgccattgttggggctatattgaacttcgaggagcaggaacaacacagtaacactcatcggccgtatgacccagccatcctagagaattacttgtcaaagacactgccttcgttcaagcagttggacgaatacaaatcgatcatggtccctatgctccgcgcgggacattggacgttgtatgttatcaattttcagaatcgatgcatacacattctagactccaatccatacggaccagaacttggtgagactacatgggaaagttaccattatgttcaaatggacatcgggaaaaggaagttaccatgggccagactaataatggttagactaaacatggctctccaacatgttcgaccaagatcaaacctacctagatttgacaactttccaatcgacatggctccaaactgtcccacaatgaaagcagggtctaacgactgtggcttctttgctatgaggtacatacaatattatgactatatggatggtgctatcaatgtagttatagactcggataattcaggtgacctccgcgctcttgccttgtattacctgatcttccatcgactaaacaagaatcgctcattgtctccagaattagaaagattcaagttcccccattattagattagtctagagcaatatcatcagattgatcgttgcactcaaaggtgtgctagcatgtatttagtgtatatgtttgtccatatgtatagtgatctagtgcctaaaactgttttacaacctttacacgttataaacttctgtcacttcttatggatccatgctgatcaagtgcttaccaccagtttttactacattttgttatgttgctatgtttcaatgatgtggtgtgcaattgttatgttgttatgctcaaatattgttcattttttgtt

SEQ ID NO: 42978 - DNA, 6922 bp, Zea Mays
ccgaagccgagtacattgccgcaggacattgttgcgcgcaattgctttggatgaggcaaaccctgcgggactacggttacaaattaaccaaagttcctttgctatgtgataatgagagtgcaatcaaaatggccgacaatcccgtcgagcacagccgcactaaacacatagccattcggtatcattttcttagggatcaccaacaaaagggagatatcgagatttcttacattaacactaaagatcaattagccgatatctttaccaagcctcttgatgaacaatcttttaccagacttaggcatgagctcaatattcttgattctagaaatttcttttgctagcttgcacacatagctcattagaatacctttgatcatatctcttttatatgctatgactaatgtgttttcaagtctattttcaaaccaagtcataggtatattgaaagggaatcggagtcttcggcgaagacaaaggcttccactccgtaactcatgcctcgccatcactccgagcaactctctattccttggggagaaatgagcatcaaagaaaaggacttcatccttgggggagagagtaaaagctcaaaagcaaaaggaccgaacttcgtttttggtataatcttaactcattcatttatgaccaaagaggaagaacttacttcgagggctctaatgattccgtttttggcgattcatgccaaaaagggggagaaatgagcccaaagcaaaaggaccgcaccaccaccaatttcaaaaacttagtgttttcaaagaagtatttatcaattggtatcctattgtgttcaaagggggagcaagtagtatttcaaaatgatatatcaaaaccctcttgaacactaagaggtggatctcttttagggggagttttgtttagtcaaaggaaaagcatttgattcagggggagaaaatttcaaatcttgaaaatgctttgcaaactcttattcatttacctttgactatttgcaaaagatctttgaaatggatttacaaaaagaatttgcaaaaacaaaactcgtggtgcaaacgtggtccaaaatgttatataagaaagaaacattccatggatatcttgtaagtagttatattggcattaattccaagcaacctttacacttacattatgcaaactagttcaattatgcacttctctatttgctttggtttgtgttggcatcaatcaccaaaaagggggagattgaaagggaattaggcttacacctagttcctaaataattttggtggttgaattgcccaacacaaatctttggactaactagtttgcccaagtgtatagattatacaggtgtaaaaggttcacactcagccaataaaaagaccaagttttggattcaacaaaggagcaaaggggcaaccgaaggcacccctggtctggcgcaccggactgtccggtgtgccaccggacagtgcacagtacctgtccggtgcaccaggggactcagactcaaactcttcaccttcgggaattccagaggcgactcggctaaaattcaccggactgtccggtgtacaccggacagtgtccggtgcgccaaaggaggtcggcctcaggaactcgccagcttcgggaaaagccaacggctcgtccgctataaatcaccggactgtccggtgtgcaccggactgtccggtgcaactccgggacaacggtcgtctccgcgccaacggctctctgccgcgcattcaatgcgccgtctgcgcgcgcagaagtcagaatcgcccatgctggcacaccggacatcaaacagtacctgtccggtgtgcaccggacacccaggcgggcccacatgtcaggagctccaacggctagaatccaacggcagtgatgacgtggcagggggcaccggactgtccggtgtgcaccggactgtccggtgcgccatcgcgcagaagcctccagccaacggtcaagtttggtggttggggctataaataccccaaccacccctccattccttgcatccaagttttccacttctcaaccacttacaagagctaggcattcaattctagacacattcaaagagatcaaatcctctccaattccacacaaaaccctagtgactggagagagtgatttgccgtgttcatttgagctcttgcgcttggattgcttcttttctgtctcatttgttcttgtgatcaaaactccattgtaatcaaggcaagaggcaccaattgtgtggtggcccttgcggggaagttttgttcccggctttgattagagaagagaagctcactcggtccgagggaccgtttgagagagggaagggttgaaagagacccggcctttgtggcctcctcaacggggagtaggtttgcaagaaccgaacctcggtaaaacaaatctccgtgtctcacttgcttattcgcttgggatttgttttgcgccctctcttgcggactcgtttattattactaacgctaaccccggcttgtagttgtgtttatatttgtaaatttcagtttcgccctattcaccccccctctaggcgactatcagagacgcagtcatgactccctcgaggccaaccctaggcgggagacgcagtcacgacttgcccgaggccaaccccaggcgggagacacagtcacgactcgcccgaggctaatctcgggcggcagtcggtcacgactcccctgaggccaacctcgggcgggagacgagcacaactcgcccgaggccaaccccgggcgggagacgcaatcacgactcacccgaggccaacctcaggcgagagacgcagtcacaactcgcccaaggccaaccccaggagggagacggtcacgacacgcccaaggccaacatcgggcgggagacacagtcacggctcgcccgaggccaaccccaggcgggagacgatttcacggctcgcccgaggccaacctcgggcgggagacggtcacaactcgcccgaggccaaccccgagcgggagacgtagtcacaactcacccgaggccaacctcaggcgggagacgcagtcacgactcgcctaaggccaaccctaggcgggagacggtcacgacacgcccgaggcgaacctcgggcgggcgacacagtcacagcttgcccgaggccaacctcgggcgggcgacgcagtcacggctcgtccgagaccaacctcgggcgggcgacgcagtcacggctcgtctgaggccaacctcgggcgggagacgcagtcacggctcgcccgtggccaatcccggacgggagacgcagtcacggctcgcccgaggccaaccccgggcgggagacggtttcacggctcgcccgaggccaacctcggttgggagacgcagtcaccgctcacacgaggccaactccgggcgcgagacgtagtcatggctcgcccgaggccaaccccgagcaggagacggtttcacggctcgctcgaggccaaccttgggcgggcgacgcagccacggcttgttcgaggccaacctcgtgtgggagacggtttcacagctcgcctgaggccaacctcgagcggtagacgcagtcacggcttgcccgaggctaactccaggcgggagacgcagtcacggcttgcccgaggccaaccccgggcgggagacggtttcacggctcgcccggggccaacctcggtcgggagacgcagtcatgggtcgcccgaggccaaccctgggcgggagacgcagtcacgctcgcccgaggccaacctcgggagggaggcgcagtcatggctcgtctgaggccaaccccggacaggagacgcagcacgactcgtccgaggccaacctcgaggcgggaacgcagtcatgactcgcccggggccaacctcgggcgggagatccagttacgactcgcccgaggccaacccccgggtgggagacacagtcgtctccacgctcctcgtgctcgtgcgggtgcggactctgctcgctggctctgccccgacccgtaggtatatcgccttcggcgccggctactcctttcgccttgtgttgcatgacccggccgccgcctcatgggcgtcgttgctcgtgctcggtcctcccagtgcgcgagggcgtggcggcgaccttgcttgagcaggcgcagagtccgctcgtcggctctgccccgacccgcagtgcgcgagggcgcgggggtgaccgcctctcgctcttctgccatttcgctgtgtccggcgagaggcccagcggtgaagctgctgggcaggtgggaccttgagacgtgggcgccgacggtgtcggtgcacatgtatgacttcttgtccggcatggcgggcgccttcgggcgtcgtgagcgaggcaggggtgcttgcggttgccgtggagcgcagtggccgagactaaacattagatgcaacccccaagatgttcttgtttgcattcagataatgaatgaaaggcaacgccaagctgtagtgaggaaagggttcttcaacatacttgacatgaccatcgatgcacttggaagccgaacacacctttgttggctgatggagaagctagacccgaaagacatgactcttcgcattggtccaggcaaagagctgaaaatcaccaaggagaccgtccatctcatcctgggtttacccaatactggtggtgggaagcctctaaacattgatgaagtaaatgcagctgttaaccttaggtcatcacttggcatcagcaaagatgagtttggagttgcaaagctgcaagaacgattaagattaggaggcgatgatgacctctcaattcgatgttttttcttgatccttttcaaccggctgctattcccaactgctagctggtctatatccaacaatgaggtgctcttgacagaacaattggatcgtttccctcatattgattggtgtcatctcatattcaacgacttatgtgaagctgcccataaatggcataacagaagcactacaaatgtgtcggcgacgatatatgggtgttccattgtcgttcttgtgtactacctggaccacctccaccacgctgtagcccccaacaacaaaagcgacacaccgcgtatcaaatattttgacaagaaaaccataaaagcattgtcaatggctgataagaggaagccacgtcagggcggtgaaccatttggccactgtgattttcggagcagctcagagacctgttacgcccctacacctgaatttcatggtcaattcgagttcagttcagatgcatttgatgtagcccaaaatgcaccctgtggacatcacaccatctctattcaagttccacttatcaaagacatgatttcaagcaagattcagcaactccctgcatatcaccatcccaaatttgaagcaaagctgcgtgcttacgactcagaggttggcaagtcatttgccactatcaaccaacgtcttagcaagattgtcaaaaagcagtacgacctagcagacacatttggagagttgattgacgaggttcttcgtgctgagataaatagtccagacaacaaagatgacatgatagaaccttccaatccctcagcatcagatccactaatgacagccacgcagctggagtcgcagatgatagtcactcaggtggaggccatatataaaagacaacaggaaatgtgccgagccttcgagagttctcgtgatgaatcagtcacacctcaaaacatccggggtgacacgacggaagatgatgctcttcaacttgactctggcctagttttggaccagattctaagtggcaatgagacatatatgatgcacaaaacacgacacgactctgtgccactcacacaaatggactgtgttcgcgcccttcgacaattcctgtgtgctaaggtcatggatttgaacagaaatgtcattgattttggtgaatatgtcggtacttgtcgtgatatacaacgatcgtttgccgatggggagtgccttgacaatgttttcatgcaatgcttcattgattgtgttcgtgatgacgccacaaatcatatccctccactaactgctcatcaacttatcctagacgccattgttggggctatattgaacttcgaggagcaggaacaacacagtaacactcatcggccgtatgacccagccatcctagagaattacttgtcaaagacactgccttcgttcaagcagttggacgaatacaaatcgatcatggtccctatgctccgcgcgggacattggacgttgtatgttatcaattttcagaatcgatgcatacacattctagactccaatccatacggaccagaacttggtgagactacatgggaaagttaccattatgttcaaatggacatcgggaaaaggaagttaccatgggccagactaataatggttagactaaacatggctctccaacatgttcgaccaagatcaaacctacctagatttgacaactttccaatcgacatggctccaaactgtcccacaatgaaagcagggtctaacgactgtggcttctttgctatgaggtacatacaatattatgactatatggatggtgctatcaatgtagttatagactcggataattcaggtgacctccgcgctcttgccttgtattacctgatcttccatcgactaaacaagaatcgctcattgtctccagaattagaaagattcaagttcccccattattagattagtctagagcaatatcatcagattgatcgttgcactcaaaggtgtgctagcatgtatttagtgtatatgtttgtccatatgtatagtgatctagtgcctaaaactgttttacaacctttacacgttataaacttctgtcacttcttatggatccatgctgatcaagtgcttaccaccagtttttactacattttgttatgttgctatgtttcaatgatgtggtgtgcaattgttatgttgttatgctcaaatattgttcattttttgtt

SEQ ID NO: 42979 - DNA, 1733 bp, Zea Mays
gtttgcttttttaagtctgataatatttgtaccaacattttcacagagccattgtaatgtttcctgtagtgctgctgttgatggagtcaatggatgcctcacctacagtacatgtcgttcaagaaactactactatcagtattctcataccactaacttgcaaatttcaccagtagaccagatgcctttgcctcggaaattaaagaaatcaattcagcgaaacgcttactttttaacccagaagaggaagctcgtaccacactgttcatcagaccttagtacctcctgcagaggagtgcccaactatttatcaatcaatgttttgcaagaccaatcaaatacaaaacagggagctattcgtaaagcgcttgtcattttgaatcctaattctggattccgcagctctcgggatgttttctaccagaaagtgcaatcaacattgaaggcttcaagatggaagtcattgaaacagcatatgccgggcatgcaaaggttctttcttctactgttgacctcaaaaaattccctgatggtattatatgtgttggtggcgatgggatcgtcaatgaggttttgaatggattacttagtagagacgattttgacgtggcaattcgatttcccattgggataatacctgctggttctgataattcattggtgtggactgttcttggcatcagggatcctgtttctgcggcaatcgctttagctaagggggatttcacaccaatagatgtgtttgccgtaaagtggatccaagctggagtgactcattttggtttgacagcttcctactatggtttcgtagctgatgttctgcaactgtcagaaaagttccgcgtgcagctcggtcccttccgttacgttgttgctggccttctgaagtttctttcattaccccagtacagatttgaggtggactatctcccttcatcgctgcaggggagaagttctgaatcaagaccactggctgaaaaacgtcacgaacagctttctgatgacggcaaggttaggagaggcacacagaccaacggtaggatcaaagacgactgggttaccaggaacggggagtttcttggcatttttgtttgcaatcacttctgcaagcctgcccaggggttactttctcctgttatcgcaccgaaagcgcggcacgacgacggcagcctggacctgattctcgtccatggaagcggcaggctgagactgttttgcttctttgttgcctatcagctctgctggcatcttctactcccctacgtggaatatgtcaagataaaagaagtgaaggttaggccagttggcagtacccacagtggttgtggcgtcgacggtgagcttcttgatggagagcgcggtgctgaatggcagtgctcgctgcttccagcacaaggcaggctgcttggccaggatcccggtgctttcaactagttagggctcgttcggttagctctcaatccatgtagattgagtgagattagatgagtttgaatcccaaacaagtcaaacttcttaattttttccaatcccatctaatccatgtgtattgggaataaccgaacaaggcttactgttttatctgtccagcagtaccgaggttgttggttaatttcatgataagagagcgagtttcagcaatgttcgtatactgattatacagtattctgtctctatagattgtagctgcagcagtctgaacaactgattttaatttttggccactattttcg

SEQ ID NO: 42980 - DNA, 1808 bp, Zea Mays
cttgccttatgaatacccccagcatgagtatcggatgcacatttcaattgaatattcggggcatatacgtttgcttttttaagtctgataatatttgtaccaacattttcacagagccattgtaatgtttcctgtagtgctgctgttgatggagtcaatggatgcctcacctacagtacatgtcgttcaagaaactactactatcagtattctcataccactaacttgcaaatttcaccagtagaccagatgcctttgcctcggaaattaaagaaatcaattcagcgaaacgcttactttttaacccagaagaggaagctcgtaccacactgttcatcagaccttagtacctcctgcagaggagtgcccaactatttatcaatcaatgttttgcaagaccaatcaaatacaaaacagggagctattcgtaaagcgcttgtcattttgaatcctaattctggattccgcagctctcgggatgttttctaccagaaagtgcaatcaacattgaagctttcaggcttcaagatggaagtcattgaaacagcatatgccgggcatgcaaaggttctttcttctactgttgacctcaaaaaattccctgatggtattatatgtgttggtggcgatgggatcgtcaatgaggttttgaatggattacttagtagagacgattttgacgtggcaattcgatttcccattgggataatacctgctggttctgataattcattggtgtggactgttcttggcatcagggatcctgtttctgcggcaatcgctttagctaagggggatttcacaccaatagatgtgtttgccgtaaagtggatccaagctggagtgactcattttggtttgacagcttcctactatggtttcgtagctgatgttctgcaactgtcagaaaagttccgcgtgcagctcggtcccttccgttacgttgttgctggccttctgaagtttctttcattaccccagtacagatttgaggtggactatctcccttcatcgctgcaggggagaagttctgaatcaagaccactggctgaaaaacgtcacgaacagctttctgatgacggcaaggttaggagaggcacacagaccaacggtaggatcaaagacgactgggttaccaggaacggggagtttcttggcatttttgtttgcaatcacttctgcaagcctgcccaggggttactttctcctgttatcgcaccgaaagcgcggcacgacgacggcagcctggacctgattctcgtccatggaagcggcaggctgagactgttttgcttctttgttgcctatcagctctgctggcatcttctactcccctacgtggaatatgtcaagataaaagaagtgaaggttaggccagttggcagtacccacagtggttgtggcgtcgacggtgagcttcttgatggagagcgcggtgctgaatggcagtgctcgctgcttccagcacaaggcaggctgcttggccaggatcccggtgctttcaactagttagggctcgttcggttagctctcaatccatgtagattgagtgagattagatgagtttgaatcccaaacaagtcaaacttcttaattttttccaatcccatctaatccatgtgtattgggaataaccgaacaaggcttactgttttatctgtccagcagtaccgaggttgttggttaatttcatgataagagagcgagtttcagcaatgttcgtatactgattatacagtattctgtctctatagattgtagctgcagcagtctgaacaactgattttaatttttggccactattttcg

SEQ ID NO: 42981 - DNA, 1715 bp, Zea Mays
attttcttgccttatgaatacccccagcatgagtatcggagtttcctgtagtgctgctgttgatggagtcaatggatgcctcacctacagtacatgtcgttcaagaaactactactatcagtattctcataccactaacttgcaaatttcaccagtagaccagatgcctttgcctcggaaattaaagaaatcaattcagcgaaacgcttactttttaacccagaagaggaagctcgtaccacactgttcatcagaccttagtacctcctgcagaggagtgcccaactatttatcaatcaatgttttgcaagaccaatcaaatacaaaacagggagctattcgtaaagcgcttgtcattttgaatcctaattctggattccgcagctctcgggatgttttctaccagaaagtgcaatcaacattgaaggcttcaagatggaagtcattgaaacagcatatgccgggcatgcaaaggttctttcttctactgttgacctcaaaaaattccctgatggtattatatgtgttggtggcgatgggatcgtcaatgaggttttgaatggattacttagtagagacgattttgacgtggcaattcgatttcccattgggataatacctgctggttctgataattcattggtgtggactgttcttggcatcagggatcctgtttctgcggcaatcgctttagctaagggggatttcacaccaatagatgtgtttgccgtaaagtggatccaagctggagtgactcattttggtttgacagcttcctactatggtttcgtagctgatgttctgcaactgtcagaaaagttccgcgtgcagctcggtcccttccgttacgttgttgctggccttctgaagtttctttcattaccccagtacagatttgaggtggactatctcccttcatcgctgcaggggagaagttctgaatcaagaccactggctgaaaaacgtcacgaacagctttctgatgacggcaaggttaggagaggcacacagaccaacggtaggatcaaagacgactgggttaccaggaacggggagtttcttggcatttttgtttgcaatcacttctgcaagcctgcccaggggttactttctcctgttatcgcaccgaaagcgcggcacgacgacggcagcctggacctgattctcgtccatggaagcggcaggctgagactgttttgcttctttgttgcctatcagctctgctggcatcttctactcccctacgtggaatatgtcaagataaaagaagtgaaggttaggccagttggcagtacccacagtggttgtggcgtcgacggtgagcttcttgatggagagcgcggtgctgaatggcagtgctcgctgcttccagcacaaggcaggctgcttggccaggatcccggtgctttcaactagttagggctcgttcggttagctctcaatccatgtagattgagtgagattagatgagtttgaatcccaaacaagtcaaacttcttaattttttccaatcccatctaatccatgtgtattgggaataaccgaacaaggcttactgttttatctgtccagcagtaccgaggttgttggttaatttcatgataagagagcgagtttcagcaatgttcgtatactgattatacagtattctgtctctatagattgtagctgcagcagtctgaacaactgattttaatttttggccactattttcg

SEQ ID NO: 42982 - DNA, 1882 bp, Zea Mays
agctgaggagaaaggacttgattgggaagccgcctcagaaaggacgctcctccccaaccccatccccgcccccgcgggctcggaaagctgaggagaaaggacttgattgggaagccgcctcagaaaggacgctcctccccaaccccatccccgcccccgcgggctcggcgggttgcgctgctgcggtgcggtgagacgcgggggcacggacggaggccgccactggatctcgtggagctggcccgcgccgagagcgatcatgagctctagaggccttgtccgcctcccggtttcctgtagtgctgctgttgatggagtcaatggatgcctcacctacagtacatgtcgttcaagaaactactactatcagtattctcataccactaacttgcaaatttcaccagtagaccagatgcctttgcctcggaaattaaagaaatcaattcagcgaaacgcttactttttaacccagaagaggaagctcgtaccacactgttcatcagaccttagtacctcctgcagaggagtgcccaactatttatcaatcaatgttttgcaagaccaatcaaatacaaaacagggagctattcgtaaagcgcttgtcattttgaatcctaattctggattccgcagctctcgggatgttttctaccagaaagtgcaatcaacattgaagctttcaggcttcaagatggaagtcattgaaacagcatatgccgggcatgcaaaggttctttcttctactgttgacctcaaaaaattccctgatggtattatatgtgttggtggcgatgggatcgtcaatgaggttttgaatggattacttagtagagacgattttgacgtggcaattcgatttcccattgggataatacctgctggttctgataattcattggtgtggactgttcttggcatcagggatcctgtttctgcggcaatcgctttagctaagggggatttcacaccaatagatgtgtttgccgtaaagtggatccaagctggagtgactcattttggtttgacagcttcctactatggtttcgtagctgatgtacagatttgaggtggactatctcccttcatcgctgcaggggagaagttctgaatcaagaccactggctgaaaaacgtcacgaacagctttctgatgacggcaaggttaggagaggcacacagaccaacggtaggatcaaagacgactgggttaccaggaacggggagtttcttggcatttttgtttgcaatcacttctgcaagcctgcccaggggttactttctcctgttatcgcaccgaaagcgcggcacgacgacggcagcctggacctgattctcgtccatggaagcggcaggctgagactgttttgcttctttgttgcctatcagctctgctggcatcttctactcccctacgtggaatatgtcaagataaaagaagtgaaggttaggccagttggcagtacccacagtggttgtggcgtcgacggtgagcttcttgatggagagcgcggtgctgaatggcagtgctcgctgcttccagcacaaggcaggctgcttggccaggatcccggtgctttcaactagttagggctcgttcggttagctctcaatccatgtagattgagtgagattagatgagtttgaatcccaaacaagtcaaacttcttaattttttccaatcccatctaatccatgtgtattgggaataaccgaacaaggcttactgttttatctgtccagcagtaccgaggttgttggttaatttcatgataagagagcgagtttcagcaatgttcgtatactgattatacagtattctgtctctatagattgtagctgcagcagtctgaacaactgattttaatttttggccactattttcg

SEQ ID NO: 42983 - DNA, 3501 bp, Zea Mays
agctgaggagaaaggacttgattgggaagccgcctcagaaaggacgctcctccccaaccccatccccgcccccgcgggctcggaaagctgaggagaaaggacttgattgggaagccgcctcagaaaggacgctcctccccaaccccatccccgcccccgcgggctcggcgggttgcgctgctgcggtgcggtgagacgcgggggcacggacggaggccgccactggatctcgtggagctggcccgcgccgagagcgatcatgagctctagaggccttgtccgcctcccggtttcctgtagtgctgctgttgatggagtcaatggatgcctcacctacagtacatgtcgttcaagaaactactactatcagtattctcataccactaacttgcaaatttcaccagtagaccagatgcctttgcctcggaaattaaagaaatcaattcagcgaaacgcttactttttaacccagaagaggaagctcgtaccacactgttcatcagaccttagtacctcctgcagaggagtgcccaactatttatcaatcaatgttttgcaagaccaatcaaatacaaaacagggagctattcgtaaagcgcttgtcattttgaatcctaattctggattccgcagctctcgggatgttttctaccagaaagtgcaatcaacattgaaggcttcaagatggaagtcattgaaacagcatatgccgggcatgcaaaggttctttcttctactgttgacctcaaaaaattccctgatggtattatatgtgttggtggcgatgggatcgtcaatgaggttttgaatggattacttagtagagacgattttgacgtggcaattcgatttcccattgggataatacctgctggttctgataattcattggtgtggactgttcttggcatcagggatcctgtttctgcggcaatcgctttagctaaggtaccttgattatgttaacactcaacaacaaaaaacaacaaggctttttagtctgaagtaaagcaagttgggataggctaaagttaaaacccgactaaaaccactagtcaatgttcagccacctggatctgttctccatgcactcttattcaaggttaaatctttgggtatattctatcatttcaagtctccttttaccgcattttcccatatcaccttcggtctttccttgcctctcttctcattgctatcgtgccttaggatcccactacacactggtacctcaatatgtcttcgtttggatatgttcaaaccatctcaaacggtgttagataagtttttctgcaattggtggctggtgctatctctagtctatcacatatatcatcgttccggattcgatcccttctttgtatggccataaatccaacatagcatatgtatttccgcaacacttatctgttaaacatgttgtcttttttagactgacattctgcaccatacaacatagcaggtctaacagttgtcctataaaacttgccttttagcttccgtggtatcctcttgtcacataaaacggtagatgtttgatgtcactttatccaccctgcttttattccatggctaatatcttcatcaatattcccatctctctgtagcattcatcctaaataccgaaagatattctttataagcactacttagtcttacaaattagcatctcatttttcatgtatagtagtgccgaagtcacatctcatatatttgattttaattctatagttttactgtgtctaaaacctttagaatctagagtctcctgccataacttcaatttcttatttactcctgctcgactttcaccaatcaatactacactgtctgcaaaaatgcatacaccaagggatatcctcctgtatgtcccgtatgatatcatgcattaccaaagcaaaaaggtaagggcttaaagttgactcttattgtagttctattcttatcaggaagtcatccgtgtccccatcacttgttcgaacactagtcacaacattggtgtacatgttttaaatgagtctaacatacttttttggaactttatgtttgtttaaagcccaccacataatattcattggtattttgttataagccttttccaaatcaatgaaaaccttatgtgggtccttttgctccctatactgttccatcacttgtctttttaagaaaatggcttacatggttgatcttttgagtatgaaaacaaattagttcatagagatccttgttatttctcttagacaatgctcaataattcttccatagcttcatgtatggctcgtcaactttactgcctggtaactagtacagctttgaatgtctcccttattttttgtagattggtactgatatacttctccactcgttagccatcttgttttcatgttcacttatttgatactagatcgtacaactaagattttctctgaatcggtatatcatcaaacttaacggcacatattaatctgaggccattcttctgcagggggatttcacaccaatagatgtgtttgccgtaaagtggatccaagctggagtgactcattttggtttgacagcttcctactatggtttcgtagctgatgttctgcaactgtcagaaaagttccgcgtgcagctcggtcccttccgttacgttgttgctggccttctgaagtttctttcattaccccagtacagatttgaggtggactatctcccttcatcgctgcaggggagaagttctgaatcaagaccactggctgaaaaacgtcacgaacagctttctgatgacggcaaggttaggagaggcacacagaccaacggtaggatcaaagacgactgggttaccaggaacggggagtttcttggcatttttgtttgcaatcacttctgcaagcctgcccaggggttactttctcctgttatcgcaccgaaagcgcggcacgacgacggcagcctggacctgattctcgtccatggaagcggcaggctgagactgttttgcttctttgttgcctatcagctctgctggcatcttctactcccctacgtggaatatgtcaagataaaagaagtgaaggttaggccagttggcagtacccacagtggttgtggcgtcgacggtgagcttcttgatggagagcgcggtgctgaatggcagtgctcgctgcttccagcacaaggcaggctgcttggccaggatcccggtgctttcaactagttagggctcgttcggttagctctcaatccatgtagattgagtgagattagatgagtttgaatcccaaacaagtcaaacttcttaattttttccaatcccatctaatccatgtgtattgggaataaccgaacaaggcttactgttttatctgtccagcagtaccgaggttgttggttaatttcatgataagagagcgagtttcagcaatgttcgtatactgattatacagtattctgtctctatagattgtagctgcagcagtctgaacaactgattttaatttttggccactattttcg

SEQ ID NO: 42984 - DNA, 3508 bp, Zea Mays
agctgaggagaaaggacttgattgggaagccgcctcagaaaggacgctcctccccaaccccatccccgcccccgcgggctcggaaagctgaggagaaaggacttgattgggaagccgcctcagaaaggacgctcctccccaaccccatccccgcccccgcgggctcggcgggttgcgctgctgcggtgcggtgagacgcgggggcacggacggaggccgccactggatctcgtggagctggcccgcgccgagagcgatcatgagctctagaggccttgtccgcctcccggtttcctgtagtgctgctgttgatggagtcaatggatgcctcacctacagtacatgtcgttcaagaaactactactatcagtattctcataccactaacttgcaaatttcaccagtagaccagatgcctttgcctcggaaattaaagaaatcaattcagcgaaacgcttactttttaacccagaagaggaagctcgtaccacactgttcatcagaccttagtacctcctgcagaggagtgcccaactatttatcaatcaatgttttgcaagaccaatcaaatacaaaacagggagctattcgtaaagcgcttgtcattttgaatcctaattctggattccgcagctctcgggatgttttctaccagaaagtgcaatcaacattgaagctttcaggcttcaagatggaagtcattgaaacagcatatgccgggcatgcaaaggttctttcttctactgttgacctcaaaaaattccctgatggtattatatgtgttggtggcgatgggatcgtcaatgaggttttgaatggattacttagtagagacgattttgacgtggcaattcgatttcccattgggataatacctgctggttctgataattcattggtgtggactgttcttggcatcagggatcctgtttctgcggcaatcgctttagctaaggtaccttgattatgttaacactcaacaacaaaaaacaacaaggctttttagtctgaagtaaagcaagttgggataggctaaagttaaaacccgactaaaaccactagtcaatgttcagccacctggatctgttctccatgcactcttattcaaggttaaatctttgggtatattctatcatttcaagtctccttttaccgcattttcccatatcaccttcggtctttccttgcctctcttctcattgctatcgtgccttaggatcccactacacactggtacctcaatatgtcttcgtttggatatgttcaaaccatctcaaacggtgttagataagtttttctgcaattggtggctggtgctatctctagtctatcacatatatcatcgttccggattcgatcccttctttgtatggccataaatccaacatagcatatgtatttccgcaacacttatctgttaaacatgttgtcttttttagactgacattctgcaccatacaacatagcaggtctaacagttgtcctataaaacttgccttttagcttccgtggtatcctcttgtcacataaaacggtagatgtttgatgtcactttatccaccctgcttttattccatggctaatatcttcatcaatattcccatctctctgtagcattcatcctaaataccgaaagatattctttataagcactacttagtcttacaaattagcatctcatttttcatgtatagtagtgccgaagtcacatctcatatatttgattttaattctatagttttactgtgtctaaaacctttagaatctagagtctcctgccataacttcaatttcttatttactcctgctcgactttcaccaatcaatactacactgtctgcaaaaatgcatacaccaagggatatcctcctgtatgtcccgtatgatatcatgcattaccaaagcaaaaaggtaagggcttaaagttgactcttattgtagttctattcttatcaggaagtcatccgtgtccccatcacttgttcgaacactagtcacaacattggtgtacatgttttaaatgagtctaacatacttttttggaactttatgtttgtttaaagcccaccacataatattcattggtattttgttataagccttttccaaatcaatgaaaaccttatgtgggtccttttgctccctatactgttccatcacttgtctttttaagaaaatggcttacatggttgatcttttgagtatgaaaacaaattagttcatagagatccttgttatttctcttagacaatgctcaataattcttccatagcttcatgtatggctcgtcaactttactgcctggtaactagtacagctttgaatgtctcccttattttttgtagattggtactgatatacttctccactcgttagccatcttgttttcatgttcacttatttgatactagatcgtacaactaagattttctctgaatcggtatatcatcaaacttaacggcacatattaatctgaggccattcttctgcagggggatttcacaccaatagatgtgtttgccgtaaagtggatccaagctggagtgactcattttggtttgacagcttcctactatggtttcgtagctgatgttctgcaactgtcagaaaagttccgcgtgcagctcggtcccttccgttacgttgttgctggccttctgaagtttctttcattaccccagtacagatttgaggtggactatctcccttcatcgctgcaggggagaagttctgaatcaagaccactggctgaaaaacgtcacgaacagctttctgatgacggcaaggttaggagaggcacacagaccaacggtaggatcaaagacgactgggttaccaggaacggggagtttcttggcatttttgtttgcaatcacttctgcaagcctgcccaggggttactttctcctgttatcgcaccgaaagcgcggcacgacgacggcagcctggacctgattctcgtccatggaagcggcaggctgagactgttttgcttctttgttgcctatcagctctgctggcatcttctactcccctacgtggaatatgtcaagataaaagaagtgaaggttaggccagttggcagtacccacagtggttgtggcgtcgacggtgagcttcttgatggagagcgcggtgctgaatggcagtgctcgctgcttccagcacaaggcaggctgcttggccaggatcccggtgctttcaactagttagggctcgttcggttagctctcaatccatgtagattgagtgagattagatgagtttgaatcccaaacaagtcaaacttcttaattttttccaatcccatctaatccatgtgtattgggaataaccgaacaaggcttactgttttatctgtccagcagtaccgaggttgttggttaatttcatgataagagagcgagtttcagcaatgttcgtatactgattatacagtattctgtctctatagattgtagctgcagcagtctgaacaactgattttaatttttggccactattttcg

SEQ ID NO: 42985 - DNA, 1897 bp, Zea Mays
aaaaaagctgaggagaaaggacttgattgggaagccgcctcagaaaggacgctcctccccaaccccatccccgcccccgcgggctcggaaagctgaggagaaaggacttgattgggaagccgcctcagaaaggacgctcctccccaaccccatccccgcccccgcgggctcggcgggttgcgctgctgcggtgcggtgagacgcgggggcacggacggaggccgccactggatctcgtggagctggcccgcgccgagagcgatcatgagctctagaggccttgtccgcctcccggtttcctgtagtgctgctgttgatggagtcaatggatgcctcacctacagtacatgtcgttcaagaaactactactatcacgaaacgcttactttttaacccagaagaggaagctcgtaccacactgttcatcagaccttagtacctcctgcagaggagtgcccaactatttatcaatcaatgttttgcaagaccaatcaaatacaaaacagggagctattcgtaaagcgcttgtcattttgaatcctaattctggattccgcagctctcgggatgttttctaccagaaagtgcaatcaacattgaagctttcaggcttcaagatggaagtcattgaaacagcatatgccgggcatgcaaaggttctttcttctactgttgacctcaaaaaattccctgatggtattatatgtgttggtggcgatgggatcgtcaatgaggttttgaatggattacttagtagagacgattttgacgtggcaattcgatttcccattgggataatacctgctggttctgataattcattggtgtggactgttcttggcatcagggatcctgtttctgcggcaatcgctttagctaagggggatttcacaccaatagatgtgtttgccgtaaagtggatccaagctggagtgactcattttggtttgacagcttcctactatggtttcgtagctgatgttctgcaactgtcagaaaagttccgcgtgcagctcggtcccttccgttacgttgttgctggccttctgaagtttctttcattaccccagtacagatttgaggtggactatctcccttcatcgctgcaggggagaagttctgaatcaagaccactggctgaaaaacgtcacgaacagctttctgatgacggcaaggttaggagaggcacacagaccaacggtaggatcaaagacgactgggttaccaggaacggggagtttcttggcatttttgtttgcaatcacttctgcaagcctgcccaggggttactttctcctgttatcgcaccgaaagcgcggcacgacgacggcagcctggacctgattctcgtccatggaagcggcaggctgagactgttttgcttctttgttgcctatcagctctgctggcatcttctactcccctacgtggaatatgtcaagataaaagaagtgaaggttaggccagttggcagtacccacagtggttgtggcgtcgacggtgagcttcttgatggagagcgcggtgctgaatggcagtgctcgctgcttccagcacaaggcaggctgcttggccaggatcccggtgctttcaactagttagggctcgttcggttagctctcaatccatgtagattgagtgagattagatgagtttgaatcccaaacaagtcaaacttcttaattttttccaatcccatctaatccatgtgtattgggaataaccgaacaaggcttactgttttatctgtccagcagtaccgaggttgttggttaatttcatgataagagagcgagtttcagcaatgttcgtatactgattatacagtattctgtctctatagattgtagctgcagcagtctgaacaactgattttaatttttggccactattttcg

SEQ ID NO: 42986 - DNA, 554 bp, Zea Mays
gcgacacagacaaacaggtcattattggtagtaccaaccatgaccgaggagtatttgaagcacaccagcatccatggacgactcaccaccatgctgcttttcatgattcttttggcatcctccgacgtcgtccgtgcacaaacaataagcggggaaaccaaagagggcgtcaccactcctaggagcatgaggacagcgagcaacataattagcaccgatggagaagaagcagctcctagggggtggtgctttcatgacattgtttcaggattttactactgcaggaagactgataagtactttaggagcttctgtgattgcttgaagcattgcctttcttgacgcaacaggggttgaaattaaggactagtatttgatttcatttgaggccgtgctttctttctttctccggttaattttgtggaaggagatcaccatgcatgatgttctaccttctaatcatggccgcctggctggacctaatctgacttatccatgattatgtgtttattgtttcaagaaatatcacagccgttacaaaacacttgtatttg

SEQ ID NO: 42987 - DNA, 2499 bp, Zea Mays
aaaagtaccctcgatctccaaccggttcaccactcaccactcaacagccctcccctctcatcatctcctccccccgcacctgcacagcctctcccgccgcgcgccgcctccgcgcgccatccagacgccagtgcgcgtcgcggtccgctgcccgcgttcaatggtgccttgcttccccaactcggtgaaaaacctcggccgctatcctcgccgcctgcagttgcaagggctacctatgccgatgcaaggttcctggcaccgaaaaccagttcaagaggtagaggtaaacacctgctatcacctagttatagtttgcattcacagacctcttctgaacaaataaaccatgtaccgtcgtcaagatctcgccagaaaaggggctcaagttttgtcgtcagagctgaagctgatttctataacgtacttggtgtctcaagaaatgctagtaaatctgaaatcaagagcggttggtatcttctgtttagttgatcatgctgttgatgttttccacttgatcgttatgtgttagaggaattcattaccttgattttatctggttgtggttgtcatgtaatatgccatgcaaaaacttgcgacttttcactttgtcagaacccagatttactcaaagtccatcttccatactcccacttcaatgctgctccaataatacagtgcacttttaaaaataaaaccaatgctgatttaagatatgatgatatcacttgtaacaaaatggtcctgaatccttttattttccagcctatcggaagcttgctaggagctatcatccagatgtaaacaaagatcctggtgctgaacaaaagttcaaggaaatcagcaatgcttatgaggttttgtctgatgatgagaagcgatcaatctatgataaatatggagaagcaggtctgaaaggtgctggcatgggcacaggagattactcaaacccgtttgatctattcgagtccctgtttgaaggattcggtgggatgggtggaatgggtggcggtcgtgctgcccgtaacagaccaatgcaaggtgatgatgagagctacaatctggtactcaatttcaaggatgcggtgtttggtgtggagaaagagattgagataaccagattggaaggctgtaacacctgcgatggaagtggtgctaagccaggtacaaaggcaacgacatgtaaaacttgtggaggccagggccaggtggtctcctccacaagaacaccactcggaatattccagcaagtctccacctgcaatacctgtggtggcaccggcgaattctccacgccttgcaacacctgttcgggcgatggccgagtgcgaaggacaaagaggatcagtctaaaggttcctgccggagtggattctggaagcaggctgagggttcggtctgagggtaatgctggccggagaggaggccctcctggggacctttatgtcttcattgacgttctctctgatcctgttcttaagcgagatgggacaaacattctctacacgtgcaaggtttcttacatcgacgcaatccttgggacaaccgtcaaagtccccactgtcgatggaatggttgacctcaagataccttcagggactcagccaggcacaactctggtgatggccaagaaaggtgttccgcttcttgggaagtcgaatgctcgcggagaccagcttgtgcgcgtacaggttgagatcccgaaacggctgagcagcgacgagaagaagctagttgaggagcttgcaaacctgaacaaggctcagacagccaatagcaggagttgatttattgagcaaatctttttaggacaccatgcttgtggtcacaggcaattttgatgcaaattgcagtgatgaaaagagttggtagtggttcaacacttctacgaactaaagaggtacactggagcgaagcgtgtcatgctcatgccatatctgtggcctcgtttctaagctattggaaaccaagtcggtgaccactggacgtcttgcaatagcttaacatatacgactttattagccattttttgttacacggctttttgtattcttgagagccttaggcaaaatctctggtagtggaatcaggcttagacttttacatttcttgcagaaatgctgcaccattgatggaatatgtaagctgcaccatggaaatgtgactgcagttttatggtttgtgatgcgtcgggggtttattgttttgctcttcaagttcgttatctaaacaatacatttatttgcccctggcaggggcagctgttgatttgaagctgcctctgcgcagagcaggtgcatttttgtggtctaggcagctgttgacatgaagctggttgttctgtgtttgcaactacttgggactctaatttaattttgttcctgtatgatgtttttaataaaatcgcaaatgctttttttctgcatgcacatgcgtaaaggcatccgcatgcacagtaggcattacaaatccggttggaaaggacgaaaatttgtccaaaaa

SEQ ID NO: 42988 - DNA, 2545 bp, Zea Mays
aaaagtaccctcgatctccaaccggttcaccactcaccactcaacagccctcccctctcatcatctcctccccccgcacctgcacagcctctcccgccgcgcgccgcctccgcgcgccatccagacgccagtgcgcgtcgcggtccgctgcccgcgctggtgttacacacgtgtaacaatacattacatggcgctagtacagttcaatggtgccttgcttccccaactcggtgaaaaacctcggccgctatcctcgccgcctgcagttgcaagggctacctatgccgatgcaaggttcctggcaccgaaaaccagttcaagaggtagaggtaaacacctgctatcacctagttatagtttgcattcacagacctcttctgaacaaataaaccatgtaccgtcgtcaagatctcgccagaaaaggggctcaagttttgtcgtcagagctgaagctgatttctataacgtacttggtgtctcaagaaatgctagtaaatctgaaatcaagagcggttggtatcttctgtttagttgatcatgctgttgatgttttccacttgatcgttatgtgttagaggaattcattaccttgattttatctggttgtggttgtcatgtaatatgccatgcaaaaacttgcgacttttcactttgtcagaacccagatttactcaaagtccatcttccatactcccacttcaatgctgctccaataatacagtgcacttttaaaaataaaaccaatgctgatttaagatatgatgatatcacttgtaacaaaatggtcctgaatccttttattttccagcctatcggaagcttgctaggagctatcatccagatgtaaacaaagatcctggtgctgaacaaaagttcaaggaaatcagcaatgcttatgaggttttgtctgatgatgagaagcgatcaatctatgataaatatggagaagcaggtctgaaaggtgctggcatgggcacaggagattactcaaacccgtttgatctattcgagtccctgtttgaaggattcggtgggatgggtggaatgggtggcggtcgtgctgcccgtaacagaccaatgcaaggtgatgatgagagctacaatctggtactcaatttcaaggatgcggtgtttggtgtggagaaagagattgagataaccagattggaaggctgtaacacctgcgatggaagtggtgctaagccaggtacaaaggcaacgacatgtaaaacttgtggaggccagggccaggtggtctcctccacaagaacaccactcggaatattccagcaagtctccacctgcaatacctgtggtggcaccggcgaattctccacgccttgcaacacctgttcgggcgatggccgagtgcgaaggacaaagaggatcagtctaaaggttcctgccggagtggattctggaagcaggctgagggttcggtctgagggtaatgctggccggagaggaggccctcctggggacctttatgtcttcattgacgttctctctgatcctgttcttaagcgagatgggacaaacattctctacacgtgcaaggtttcttacatcgacgcaatccttgggacaaccgtcaaagtccccactgtcgatggaatggttgacctcaagataccttcagggactcagccaggcacaactctggtgatggccaagaaaggtgttccgcttcttgggaagtcgaatgctcgcggagaccagcttgtgcgcgtacaggttgagatcccgaaacggctgagcagcgacgagaagaagctagttgaggagcttgcaaacctgaacaaggctcagacagccaatagcaggagttgatttattgagcaaatctttttaggacaccatgcttgtggtcacaggcaattttgatgcaaattgcagtgatgaaaagagttggtagtggttcaacacttctacgaactaaagaggtacactggagcgaagcgtgtcatgctcatgccatatctgtggcctcgtttctaagctattggaaaccaagtcggtgaccactggacgtcttgcaatagcttaacatatacgactttattagccattttttgttacacggctttttgtattcttgagagccttaggcaaaatctctggtagtggaatcaggcttagacttttacatttcttgcagaaatgctgcaccattgatggaatatgtaagctgcaccatggaaatgtgactgcagttttatggtttgtgatgcgtcgggggtttattgttttgctcttcaagttcgttatctaaacaatacatttatttgcccctggcaggggcagctgttgatttgaagctgcctctgcgcagagcaggtgcatttttgtggtctaggcagctgttgacatgaagctggttgttctgtgtttgcaactacttgggactctaatttaattttgttcctgtatgatgtttttaataaaatcgcaaatgctttttttctgcatgcacatgcgtaaaggcatccgcatgcacagtaggcattacaaatccggttggaaaggacgaaaatttgtccaaaaa

SEQ ID NO: 42989 - DNA, 2629 bp, Zea Mays
aaaagtaccctcgatctccaaccggttcaccactcaccactcaacagccctcccctctcatcatctcctccccccgcacctgcacagcctctcccgccgcgcgccgcctccgcgcgccatccagacgccagtgcgcgtcgcggtccgctgcccgcggtgcgttcaccctctccccatctcccttttcctctcccgcgcgcccttccctacgcgcctccgccggcgacgagtgcccaccagctggtgttacacacgtgtaacaatacattacatggcgctagtacagttcaatggtgccttgcttccccaactcggtgaaaaacctcggccgctatcctcgccgcctgcagttgcaagggctacctatgccgatgcaaggttcctggcaccgaaaaccagttcaagaggtagaggtaaacacctgctatcacctagttatagtttgcattcacagacctcttctgaacaaataaaccatgtaccgtcgtcaagatctcgccagaaaaggggctcaagttttgtcgtcagagctgaagctgatttctataacgtacttggtgtctcaagaaatgctagtaaatctgaaatcaagagcggttggtatcttctgtttagttgatcatgctgttgatgttttccacttgatcgttatgtgttagaggaattcattaccttgattttatctggttgtggttgtcatgtaatatgccatgcaaaaacttgcgacttttcactttgtcagaacccagatttactcaaagtccatcttccatactcccacttcaatgctgctccaataatacagtgcacttttaaaaataaaaccaatgctgatttaagatatgatgatatcacttgtaacaaaatggtcctgaatccttttattttccagcctatcggaagcttgctaggagctatcatccagatgtaaacaaagatcctggtgctgaacaaaagttcaaggaaatcagcaatgcttatgaggttttgtctgatgatgagaagcgatcaatctatgataaatatggagaagcaggtctgaaaggtgctggcatgggcacaggagattactcaaacccgtttgatctattcgagtccctgtttgaaggattcggtgggatgggtggaatgggtggcggtcgtgctgcccgtaacagaccaatgcaaggtgatgatgagagctacaatctggtactcaatttcaaggatgcggtgtttggtgtggagaaagagattgagataaccagattggaaggctgtaacacctgcgatggaagtggtgctaagccaggtacaaaggcaacgacatgtaaaacttgtggaggccagggccaggtggtctcctccacaagaacaccactcggaatattccagcaagtctccacctgcaatacctgtggtggcaccggcgaattctccacgccttgcaacacctgttcgggcgatggccgagtgcgaaggacaaagaggatcagtctaaaggttcctgccggagtggattctggaagcaggctgagggttcggtctgagggtaatgctggccggagaggaggccctcctggggacctttatgtcttcattgacgttctctctgatcctgttcttaagcgagatgggacaaacattctctacacgtgcaaggtttcttacatcgacgcaatccttgggacaaccgtcaaagtccccactgtcgatggaatggttgacctcaagataccttcagggactcagccaggcacaactctggtgatggccaagaaaggtgttccgcttcttgggaagtcgaatgctcgcggagaccagcttgtgcgcgtacaggttgagatcccgaaacggctgagcagcgacgagaagaagctagttgaggagcttgcaaacctgaacaaggctcagacagccaatagcaggagttgatttattgagcaaatctttttaggacaccatgcttgtggtcacaggcaattttgatgcaaattgcagtgatgaaaagagttggtagtggttcaacacttctacgaactaaagaggtacactggagcgaagcgtgtcatgctcatgccatatctgtggcctcgtttctaagctattggaaaccaagtcggtgaccactggacgtcttgcaatagcttaacatatacgactttattagccattttttgttacacggctttttgtattcttgagagccttaggcaaaatctctggtagtggaatcaggcttagacttttacatttcttgcagaaatgctgcaccattgatggaatatgtaagctgcaccatggaaatgtgactgcagttttatggtttgtgatgcgtcgggggtttattgttttgctcttcaagttcgttatctaaacaatacatttatttgcccctggcaggggcagctgttgatttgaagctgcctctgcgcagagcaggtgcatttttgtggtctaggcagctgttgacatgaagctggttgttctgtgtttgcaactacttgggactctaatttaattttgttcctgtatgatgtttttaataaaatcgcaaatgctttttttctgcatgcacatgcgtaaaggcatccgcatgcacagtaggcattacaaatccggttggaaaggacgaaaatttgtccaaaaa

SEQ ID NO: 42990 - DNA, 2234 bp, Zea Mays
aaaagtaccctcgatctccaaccggttcaccactcaccactcaacagccctcccctctcatcatctcctccccccgcacctgcacagcctctcccgccgcgcgccgcctccgcgcgccatccagacgccagtgcgcgtcgcggtccgctgcccgcggtgcgttcaccctctccccatctcccttttcctctcccgcgcgcccttccctacgcgcctccgccggcgacgagtgcccaccagtacagttcaatggtgccttgcttccccaactcggtgaaaaacctcggccgctatcctcgccgcctgcagttgcaagggctacctatgccgatgcaaggttcctggcaccgaaaaccagttcaagaggtagaggtaaacacctgctatcacctagttatagtttgcattcacagacctcttctgaacaaataaaccatgtaccgtcgtcaagatctcgccagaaaaggggctcaagttttgtcgtcagagctgaagctcctatcggaagcttgctaggagctatcatccagatgtaaacaaagatcctggtgctgaacaaaagttcaaggaaatcagcaatgcttatgaggttttgtctgatgatgagaagcgatcaatctatgataaatatggagaagcaggtctgaaaggtgctggcatgggcacaggagattactcaaacccgtttgatctattcgagtccctgtttgaaggattcggtgggatgggtggaatgggtggcggtcgtgctgcccgtaacagaccaatgcaaggtgatgatgagagctacaatctggtactcaatttcaaggatgcggtgtttggtgtggagaaagagattgagataaccagattggaaggctgtaacacctgcgatggaagtggtgctaagccaggtacaaaggcaacgacatgtaaaacttgtggaggccagggccaggtggtctcctccacaagaacaccactcggaatattccagcaagtctccacctgcaatacctgtggtggcaccggcgaattctccacgccttgcaacacctgttcgggcgatggccgagtgcgaaggacaaagaggatcagtctaaaggttcctgccggagtggattctggaagcaggctgagggttcggtctgagggtaatgctggccggagaggaggccctcctggggacctttatgtcttcattgacgttctctctgatcctgttcttaagcgagatgggacaaacattctctacacgtgcaaggtttcttacatcgacgcaatccttgggacaaccgtcaaagtccccactgtcgatggaatggttgacctcaagataccttcagggactcagccaggcacaactctggtgatggccaagaaaggtgttccgcttcttgggaagtcgaatgctcgcggagaccagcttgtgcgcgtacaggttgagatcccgaaacggctgagcagcgacgagaagaagctagttgaggagcttgcaaacctgaacaaggctcagacagccaatagcaggagttgatttattgagcaaatctttttaggacaccatgcttgtggtcacaggcaattttgatgcaaattgcagtgatgaaaagagttggtagtggttcaacacttctacgaactaaagaggtacactggagcgaagcgtgtcatgctcatgccatatctgtggcctcgtttctaagctattggaaaccaagtcggtgaccactggacgtcttgcaatagcttaacatatacgactttattagccattttttgttacacggctttttgtattcttgagagccttaggcaaaatctctggtagtggaatcaggcttagacttttacatttcttgcagaaatgctgcaccattgatggaatatgtaagctgcaccatggaaatgtgactgcagttttatggtttgtgatgcgtcgggggtttattgttttgctcttcaagttcgttatctaaacaatacatttatttgcccctggcaggggcagctgttgatttgaagctgcctctgcgcagagcaggtgcatttttgtggtctaggcagctgttgacatgaagctggttgttctgtgtttgcaactacttgggactctaatttaattttgttcctgtatgatgtttttaataaaatcgcaaatgctttttttctgcatgcacatgcgtaaaggcatccgcatgcacagtaggcattacaaatccggttggaaaggacgaaaatttgtccaaaaa

SEQ ID NO: 42991 - DNA, 2078 bp, Zea Mays
aaacgtttgtaacaacgaaggcgatgccctcaaggtgatctccaaggtgaaggtcaaaaacatctaaacaacctcggtagctctttgaaaaaaaagactcaagtaggaaagaaaaatataatttgcaacaaagactgacgacagaaaaaggcatggagttcacgcttatcccagatttagttccacaaaacagacatgctgttataaaggtgtatgtctcaagaaaatggattttccgtggtgcaatggacaacggacccatacatcacattgatcttgtgttgatagacaaagagggtcatggcatctgcgctgaaatccctagaaatctagctgaagaaaaaggatccatcatcgaagaaaataaaatatatgagatcagcagattcagaatatcttcagcaagactaatgttcaaacctgttcacatggacaaaatgatccactttacgtatcacacaattattaatgcatcacttgatactccaccggcattttcaagatatgtctaccatctaactccattcgatcaacttgaatcttatattcaaaagaatgaatacttccttgatgtactcggagttataactcaagtgagtgcattgaaaccagtcggaacacatacccaggaaagctcaaatgtcataaaagagatcataataaaagatatcaatgatatcacaatgagagtaaccctatgggcagaaagggctagagcttttaaattagaaaatgtttacgaccctctagagcaaaagccaattgtcacactctttgtgggttgcctagccaaaaatttccaaggtatatacttaaatggtggaacagcatgtagatggtatttcaatccagatatcagagaagctgctccttattatcaaaggtttgaatctcagaaaatcaaactacatatatcatcagaacaggaacaactatatgttacaaaagaaacaaatgtagaacacaagaccttgcatgagcttcttgagttgcatccatatgcttttccgaaacaaggatatcaatgcacagctacaatcatagaagtacctacaacaagtcgttggtggtttccagcttgcacaaaatgcggtcgagcatgcaaaccgcaaaatggtggttactattgcccctactgcaaatcagaagcgtacatactaaggtataaattaacatttatgggatccgatggaacagcaacagcacaaatgttctgctttgatactgtagcacaacatgtagttggcagatcctgtgaaacagttctaaaacaagtcactgaagcagcgccaatacctccagatcttgcacaaatagtatccttaaaatttacatttcgtgtaacagtatcaaaccagaccttctctcaacgagagcagcgacccactgtgttacaaataaattctatagtcgctgtacatggaagacagcgctctctaccaaaaggaattcaaaccatcatagatcaaggtccctcaacaccaaacaaagaagctacactcaaattattaaaagaatcaccttctacttctatggaaagattatcgacaaaattattaacagatgttggcagaaaactcacatattcaacacaggctgaagacatcacaaagtctcaaatcttggatgcaccacaagaaaccaatgcagacaaggaagttcctgctgacaaggacaaagagatcgaacctaatcttcggtctcctccaaaaaggcacaaacaagaaccactaataatcaaggattccacggaaccagaacaccgccaagaatgatatgtgcaagcgtatagaattagttcaaagaatagctaatgtctacattctgtgcaacctcttttataaccctaaaattgtagtactaacaacaatacaatcagttcgtatggcctggctcgtttctctgtagggtagattgtctttctaaaagagccattaagactaaatattattagcttgtataattaatactcagaacctaatgactgcttagtgctctaattattgtatatattttattaaatctggcttcatctctgttaaaaaaaataccatgtgatgaaatgcataaattaattt

SEQ ID NO: 42992 - DNA, 1393 bp, Zea Mays
accgcttgtacatttcccctcccccccccccacacacgccggtgcgtcgcctgcgcaatcatacttcctaccctccccacctcttccacggttccaccccgtccctctcctctcgagaagcacccgcaccatacatcttccggcgcccgacgcggacggcgagccgctgctgctgctgccgccggaggaggaagggcaccagggccacagcaggccgccggccgcttggggctgtgccacatgccgctctggggggccgccgcgtccgcggcgccggcagccgacggcgacgccgcccgcgcgccgtcgggatccggcggcggcgtcaaggtgatccggtcgctgctccccacccggcgccgcctccgcctagatccgcccgccaagctctacttcccatatgagcccggcaagcaagtccggagcgcggtcaggatcaagaacatcagcaagtcccatgtggccttcaagttccaaacgactgcaccaaagagttgcttcatgaggcctccgggcggtgtgcttgctccaggggaaagcatcatagcaacagttttcaagtttgtggagcatccggagaacaacgagaagccgatggacaagtgcaaggttaagtttaagattgtcagcctgaaagtcaaagggccggtggagtacgtccctgaactgtttgatgagcagaaggaccaggtcgcggtcgagcaaatattgcgggtagtattcttggatgctgagcgcccaagcccacaaatggacaaactcaagcgccagctagctgaagcagaagcagcccttgaggcacgcaagaaacctccagaggacaatggtccccgtattgttggtgaaggccttgtgattgacgaatggaaggaacgaagagagaggtaccttgctcgccagcagatcgaaggtgttgattcggtgtagacacgaggcagccctgtaaactatgcagaatgaacataccgttttatgggcacgcactccagctgtcaaatggatttggagcttgattttgcgaaggttcggatttggagcaatcaagcaacaatgaggcttttgtgtatttggggttcacgctgaacttctgtcctgggtttgggtgtgtgtagataagcagccactgcttggtaatagtaatagtacgtccttcagccatgtactcgtgttgtggaatgtgggtctctatgtgaatgtgatgcattctctagctgctgtcccgtcaacattaaaagtgtaattgtaatgtcaaaaggcacactccaaggtgattcagtggtagttctgccatcatgttagttgttacagtaattcttccatcacttgtttgtacaactcatacatgtcatgccaccctgagatttatgtcattcagttgtcagtcaaaaaaata

SEQ ID NO: 42993 - DNA, 1093 bp, Zea Mays
aaaagtccctttttcatagacgaactttgcacgactgtttcttatatagagatttaagtctatagatgatgagcccggcaagcaagtccggagcgcggtcaggatcaagaacatcagcaagtcccatgtggccttcaagttccaaacgactgcaccaaagagttgcttcatgaggcctccgggcggtgtgcttgctccaggggaaagcatcatagcaacagttttcaagtttgtggagcatccggagaacaacgagaagccgatggacaagtgcaaggttaagtttaagattgtcagcctgaaagtcaaagggccggtggagtacgtccctgaactgtttgatgagcagaaggaccaggtcgcggtcgagcaaatattgcgggtagtattcttggatgctgagcgcccaagcccacaaatggacaaactcaagcgccagctagctgaagcagaagcagcccttgaggcacgcaagaaacctccagaggacaatggtccccgtattgttggtgaaggccttgtgattgacgaatggaaggaacgaagagagaggtaccttgctcgccagcagatcgaaggtgttgattcggtgtagacacgaggcagccctgtaaactatgcagaatgaacataccgttttatgggcacgcactccagctgtcaaatggatttggagcttgattttgcgaaggttcggatttggagcaatcaagcaacaatgaggcttttgtgtatttggggttcacgctgaacttctgtcctgggtttgggtgtgtgtagataagcagccactgcttggtaatagtaatagtacgtccttcagccatgtactcgtgttgtggaatgtgggtctctatgtgaatgtgatgcattctctagctgctgtcccgtcaacattaaaagtgtaattgtaatgtcaaaaggcacactccaaggtgattcagtggtagttctgccatcatgttagttgttacagtaattcttccatcacttgtttgtacaactcatacatgtcatgccaccctgagatttatgtcattcagttgtcagtcagttgcttggtcccaatgaaacattctggactaggcttagc

SEQ ID NO: 42994 - DNA, 1085 bp, Zea Mays
cgcgtttcccgctggccgctgctatccgatttcttgattcggtcgctctgtctcgtcaagatgagcccggcaagcaagtccggagcgcggtcaggatcaagaacatcagcaagtcccatgtggccttcaagttccaaacgactgcaccaaagagttgcttcatgaggcctccgggcggtgtgcttgctccaggggaaagcatcatagcaacagttttcaagtttgtggagcatccggagaacaacgagaagccgatggacaagtgcaaggttaagtttaagattgtcagcctgaaagtcaaagggccggtggagtacgtccctgaactgtttgatgagcagaaggaccaggtcgcggtcgagcaaatattgcgggtagtattcttggatgctgagcgcccaagcccacaaatggacaaactcaagcgccagctagctgaagcagaagcagcccttgaggcacgcaagaaacctccagaggacaatggtccccgtattgttggtgaaggccttgtgattgacgaatggaaggaacgaagagagaggtaccttgctcgccagcagatcgaaggtgttgattcggtgtagacacgaggcagccctgtaaactatgcagaatgaacataccgttttatgggcacgcactccagctgtcaaatggatttggagcttgattttgcgaaggttcggatttggagcaatcaagcaacaatgaggcttttgtgtatttggggttcacgctgaacttctgtcctgggtttgggtgtgtgtagataagcagccactgcttggtaatagtaatagtacgtccttcagccatgtactcgtgttgtggaatgtgggtctctatgtgaatgtgatgcattctctagctgctgtcccgtcaacattaaaagtgtaattgtaatgtcaaaaggcacactccaaggtgattcagtggtagttctgccatcatgttagttgttacagtaattcttccatcacttgtttgtacaactcatacatgtcatgccaccctgagatttatgtcattcagttgtcagtcagttgcttggtcccaatgaaacattctggactaggcttagc

SEQ ID NO: 42995 - DNA, 743 bp, Zea Mays
cctgcctttacatgtaaaagtacaaaaggtcgatacttcattctttacctgcacaactttagatacgatgtcagctcttttaccatgttactggtaacccacaactgtcattagctccctccctcttctgatctgaattaatttagacacttgctagcagaattggaccaattaacattattgccacttgttttgttcgtggggcttttcgtgttcctgtgcaccaatgtagttgtcctgggtgacgtgcacgccattggagatggaccttacatcccatcttcccatccatttgttttaagagctgctggtggtagagctaatggtgatggatccaagaagatagagaacatgtgatcgacctaaggtagtttcagctccagagaagaaggtccattactcatgcaaatgctaagagcaagagtgaaaagttccctaccctcacatcaaggtggtacggttggtgtctccttggatgcttcagtacccttttcctctgtacctttttgatgctcctggtgtggtatatatggaatcaaacatttccgaaggcgaagaatgatgggttcaaagtgacaaatgtgaatgctagcaacatcaaatgtgtgctctatttaatggaagaaggaatgatggaggacaagctgaatatacttgccccaattgctacgtcgaggagatcaaatgtgggctgcgcaaacctttaccacagtgtgctcttcttggagaaaagttttacgaat

SEQ ID NO: 42996 - DNA, 1344 bp, Zea Mays
atgtcggaatgggacggcgtgggaactcgctgctggggccaatgcgacgtggggaggcgatgccggagccgagaaggcgtagggaagccgctgccggggggcaaggatgagctaggggggacgagatcgccattgcaaggaccgggaggccagggtgacatagttctcaatggtggcgcagcttgccattggtacttcaatccaaccattgaagaggctcaaccatactataacaggatttcaacacaagaaatggtactacaattgccgctgcttacaaatgacgacattgttccatttgacgtcccaaaacgtcaacacaaaactatcaaagaactactagaatttgatccctacactataccgaaagaaggttgtgaatgcactgtgactattgttcgaatttctgaaaaaaataaatggtggtatccaccatgcaccaaatgtccaaagaaaccagcaatgaaccgtaagacaatgcaatgtcgcgaatgtggatccattgactactgtttcagctattgtctccctcaaatttacatttgttgtcacttacgacaatgaatcttatggaggccatagcaagatattccttatcagatcaattctagcaacatatggaagagactctttactgccacaaatacaaggaaatgtggacattacctatccaaacactccaatgcaactcacagctaaagaacacaagtctccatctacagcaatgtcaaatctgacaaccaactcaccacctcatgccaagtgtgtgctaacgtatcttagctcacaaacctctgctttggaaaaggatgacttttcaaaacaaaaggcgccacagatgccagaaaaaactttagaggactctaatcctacaaaagctacttttgaatctccacaaaaaggtttgctctaccaactttagctcatacctttcaaaacaatcatacctatgtacactgcctaattactagccaaaaaagtagataatgctagacacatgaaagtagtctttaattgttttttacaaacaagatttgcttctattatataactataaatcttattgtccctccttaccaaacaactgttattttctctattacaacaatacttccaataaaactgctcaaatacaaatccaattataataacaatatgtacatagggaagctctaatcttcccctctctgttcattaatgattttaaatgcaaaactagatcttctcaatattaattatttaataacaatatgtattatgttactagaaatatggtagtgttgcttttcatttctttcttattacgcttcctttttattcatctaagtactactgatggcactg

SEQ ID NO: 42997 - DNA, 1487 bp, Zea Mays
atgtcggaatgggacggcgtgggaactcgctgctggggccaatgcgacgtggggaggcgatgccggagccgagaaggcgtagggaagccgctgccggggggcaaggatgagctaggggggacgagatcgccattgcaaggaccgggaggccagggtgacatagttctcaatggtggcgcagcttgccattggtacttcaatccaaccattgaagaggctcaaccatactataacaggatttcaacacaagaaatggtactacaattgccgctgcttacaaatgacgacattgttccatttgacgtcccaaaacgtcaacacaaaactatcaaagaactactagaatttgatccctacactataccgaaagaaggttgtgaatgcactgtgactattgttcgaatttctgaaaaaaataaatggtggtatccaccatgcaccaaatgtccaaagaaaccagcaatgaaccgtaagacaatgcaatgtcgcgaatgtggatccattgactactgtttcagattaagttttattgcatctgatggaaccgctgaagcaaatatgttctgcttcgaaaatgtcgctacaaaaattgttggaaaatcatcagcttcactcttagcttctgcagcagatccagaaataactccaccggatattgcagctattgtctccctcaaatttacatttgttgtcacttacgacaatgaatcttatggaggccatagcaagatattccttatcagatcaattctagcaacatatggaagagactctttactgccacaaatacaaggaaatgtggacattacctatccaaacactccaatgcaactcacagctaaagaacacaagtctccatctacagcaatgtcaaatctgacaaccaactcaccacctcatgccaagtgtgtgctaacgtatcttagctcacaaacctctgctttggaaaaggatgacttttcaaaacaaaaggcgccacagatgccagaaaaaactttagaggactctaatcctacaaaagctacttttgaatctccacaaaaaggtttgctctaccaactttagctcatacctttcaaaacaatcatacctatgtacactgcctaattactagccaaaaaagtagataatgctagacacatgaaagtagtctttaattgttttttacaaacaagatttgcttctattatataactataaatcttattgtccctccttaccaaacaactgttattttctctattacaacaatacttccaataaaactgctcaaatacaaatccaattataataacaatatgtacatagggaagctctaatcttcccctctctgttcattaatgattttaaatgcaaaactagatcttctcaatattaattatttaataacaatatgtattatgttactagaaatatggtagtgttgcttttcatttctttcttattacgcttcctttttattcatctaagtactactgatggcactg

SEQ ID NO: 42998 - DNA, 1148 bp, Zea Mays
gtttcaagccaattatctggaaattactttgattaatgaggataaagcagattggtcgaccatgatgctccaatgtttcagtgctacatgcaggcttggaaggaataaagctctgatgtaaacgaaggatcaaagggaagtataaaactttgagcatcttgggacagctagtttcttcttgcttcatgactgcatcctggtgatcttccattcagcaaccttctcagctggtacaagtccgagagcacgctacaatggcgaggatgggagttgctattctggtctgcgtagtggttttagccctggacgtcacagctggcatactaggaattgaggcgcaggctgctcagaacaagactaagaaggtgacgatcctcttcatccagtgcgagaaaccagtgtacagagcgtaccagcttggcctcgcagctgcagtgctcctggtagttgcccacgcggtagccaacttcctcggcggctgtgcctgcatctgctcccagctggagttcatcaaggcgtccatcaacaggaagctggcagccaccaccataattctctcatggatcgccctgattgccggattctcgctgctgctcgccggcgccatgtccaactccaagtccaagacgtcgtgcgggttcactcacggacacaccttggccctcggagggatcatgtgcttcgtccacggcgggatcaccgtcgcctactatgtcaccgccactgccgcagcgcacgaggttccttagtcgagcattttgcccgagagatcaccgctgttctttccttggtccagctgctccttgcttttctccttgtgatttgacatctacaagcatccgaagatatatgccttttttccgttcaaaaaaaaagaatacatgcctgttgtttgatttgttgctattgctgaggaaaaaacatgtcaaagttagcgtcagtgtgccacagtaatttaatttacgttgttgagaaagacaataacgccgctccatcttgtctcctggtgagggaggctacctcaagcagaccgtatatacggacagtgtataaaagaccacactgttttgcactgtagtagagtataatgtttgcatagtgaaatttaaaatactgagtgagtgagataggaaatgggatatggaggc

SEQ ID NO: 42999 - DNA, 3215 bp, Zea Mays
aattccaattttctcctacctaccactgccggactgcggaatccggaggtatatccgcaaaacccaaggagaacccccacccgcttggctcgccatggacctgcagctcgcgccaccaccccacgctaacctccgcctcctcccccgccgccccaaggccgcctccgcctccgcctccacctccgctgtcaccgccgcgccctccacctcctgctcctcttccgcggagcccctcaagccccgcccacgcctcccgcgccagagccccgcgcccaggcccaggcccaaccccgctcgcctccccgccctctgcgctgccatcgagcggcacgcggcggctggccgccacgctgaggccctcgacctgttccgcctcgcccgcgcggcggctcccttcacgcccctcccggcccgcacctaccacgccctgctccgcgccgctgccgcgctgcgggagcccggcgcggccgcggcggtggcctggcacgtcgagagctccggcttcgagctcgacctgtacacgcacaaccacgtcctgaggatgtacctcgagtgcgggatgctcgccgaggcgcgccaggcgttcgacgggatgcccgaccggaacggcgtcacgtgggggatcatgatgggcggcctcgtcgaccggggccgcccccgggccgcactggcgctgttccgggagatgtgggcggaggccggtggggacgctccgccgaggtccctcgtggtggctgtccgtgcggctgcgtcctcggggtcggcgcgagccgggcggcagctgcactgctgtgttgtcaaggcgggggcgtgtggtgacgtcgctgaccggtacctgacgtgcgcgctgctcgacatgtacagcaagtgtggccggattgacgaggcgaggcgggtgtttgacgggctgccacgtcctcatcggacgactgtcgtggcatggaactccatgttggcggcgtatgttctccatggccacagcgaggaggcgctggagctgtaccaaaagatgtgcagcactcatgtcgccatggaccagttcacgttctcgaccatgctaggggtgttctctaggctggggctgctggagcacgcgaagcaggcgcacgctggcttgatccagagaggattgccactggacattgttgggaacacggcgcttgtggacctgtactgcaaatggggaagaatggaggacgcgagaaatgtcttcgagaggatgcctaggaggaacttgatctcatggaacgctctgatagctggatacggctaccatggcatgggagataaggcgatcgagatgttcgagaggctgatagctgagggtgctgtgccaaaccatgtaacttttctggcagtgctgaatgcatgtaggttttcaggtcttgttgacgaagggaagaggattttccagttgatgactgaaaatctgaggataaaaccacgggccatgcattatgcatgtgttattgagctttttggtagagaaggtctacttgatgaatcctattcaatgataagaagagcaccgttcactccaactgcaaacatgtggggagccttgcttactgctagcaggatccacaagagcatgcatcttgcaaaattttctgccgagcagctattggcaatggaacctgagaaaataaacagctatgttgtgctcctcaacttgtatgttagctctggtagacaggacagcgcctgcaaggtagttgaaacactgaagaggaaaggtttatatattggtaatgcctgtagctggatcacagtcaagaaaacggatcacaggtttttctttaaagatactttgcatccacaaagtgctgaaatatacaggaggctggacacattaatgaaggaggtacgagaagctggctttgttgctgaggagaatgaattgctccctgatattcatcctgacgagcaaaagatatcaagagcttaccacagtgagagactggcaattgcttttggccttatcagcacagccccacagactcccttgaggatcagtcaaagccatcgtttgtgcagtgactgccacaatttaattaagtttgtgtcaagagttaccaagagggaaatcattgttagggatggtagcaggttccaccactttaaactcggggtctgctcttgtggtgactactgctaatgactccaatgtttcaagccaattatctggaaattactttgattaatgaggataaagcagattggtcgaccatgatgctccaatgtttcagtgctacatgcaggcttggtgatcttccattcagcaaccttctcagctggtacaagtccgagagcacgctacaatggcgaggatgggagttgctattctggtctgcgtagtggttttagccctggacgtcacagctggcatactaggaattgaggcgcaggctgctcagaacaagactaagaaggtgacgatcctcttcatccagtgcgagaaaccagtgtacagagcgtaccagcttggcctcgcagctgcagtgctcctggtagttgcccacgcggtagccaacttcctcggcggctgtgcctgcatctgctcccagctggagttcatcaaggcgtccatcaacaggaagctggcagccaccaccataattctctcatggatcgccctgattgccggattctcgctgctgctcgccggcgccatgtccaactccaagtccaagacgtcgtgcgggttcactcacggacacaccttggccctcggagggatcatgtgcttcgtccacggcgggatcaccgtcgcctactatgtcaccgccactgccgcagcgcacgaggttccttagtcgagcattttgcccgagagatcaccgctgttctttccttggtccagctgctccttgcttttctccttgtgatttgacatctacaagcatccgaagatatatgccttttttccgttcaaaaaaaaagaatacatgcctgttgtttgatttgttgctattgctgaggaaaaaacatgtcaaagttagcgtcagtgtgccacagtaatttaatttacgttgttgagaaagacaataacgccgctccatcttgtctcctggtgagggaggctacctcaagcagaccgtatatacggacagtgtataaaagaccacactgttttgcactgtagtagagtataatgtttgcatagtgaaatttaaaatactgagtgagtgagataggaaatgggatatggaggc

SEQ ID NO: 43000 - DNA, 3223 bp, Zea Mays
aattccaattttctcctacctaccactgccggactgcggaatccggaggtatatccgcaaaacccaaggagaacccccacccgcttggctcgccatggacctgcagctcgcgccaccaccccacgctaacctccgcctcctcccccgccgccccaaggccgcctccgcctccgcctccacctccgctgtcaccgccgcgccctccacctcctgctcctcttccgcggagcccctcaagccccgcccacgcctcccgcgccagagccccgcgcccaggcccaggcccaaccccgctcgcctccccgccctctgcgctgccatcgagcggcacgcggcggctggccgccacgctgaggccctcgacctgttccgcctcgcccgcgcggcggctcccttcacgcccctcccggcccgcacctaccacgccctgctccgcgccgctgccgcgctgcgggagcccggcgcggccgcggcggtggcctggcacgtcgagagctccggcttcgagctcgacctgtacacgcacaaccacgtcctgaggatgtacctcgagtgcgggatgctcgccgaggcgcgccaggcgttcgacgggatgcccgaccggaacggcgtcacgtgggggatcatgatgggcggcctcgtcgaccggggccgcccccgggccgcactggcgctgttccgggagatgtgggcggaggccggtggggacgctccgccgaggtccctcgtggtggctgtccgtgcggctgcgtcctcggggtcggcgcgagccgggcggcagctgcactgctgtgttgtcaaggcgggggcgtgtggtgacgtcgctgaccggtacctgacgtgcgcgctgctcgacatgtacagcaagtgtggccggattgacgaggcgaggcgggtgtttgacgggctgccacgtcctcatcggacgactgtcgtggcatggaactccatgttggcggcgtatgttctccatggccacagcgaggaggcgctggagctgtaccaaaagatgtgcagcactcatgtcgccatggaccagttcacgttctcgaccatgctaggggtgttctctaggctggggctgctggagcacgcgaagcaggcgcacgctggcttgatccagagaggattgccactggacattgttgggaacacggcgcttgtggacctgtactgcaaatggggaagaatggaggacgcgagaaatgtcttcgagaggatgcctaggaggaacttgatctcatggaacgctctgatagctggatacggctaccatggcatgggagataaggcgatcgagatgttcgagaggctgatagctgagggtgctgtgccaaaccatgtaacttttctggcagtgctgaatgcatgtaggttttcaggtcttgttgacgaagggaagaggattttccagttgatgactgaaaatctgaggataaaaccacgggccatgcattatgcatgtgttattgagctttttggtagagaaggtctacttgatgaatcctattcaatgataagaagagcaccgttcactccaactgcaaacatgtggggagccttgcttactgctagcaggatccacaagagcatgcatcttgcaaaattttctgccgagcagctattggcaatggaacctgagaaaataaacagctatgttgtgctcctcaacttgtatgttagctctggtagacaggacagcgcctgcaaggtagttgaaacactgaagaggaaaggtttatatattggtaatgcctgtagctggatcacagtcaagaaaacggatcacaggtttttctttaaagatactttgcatccacaaagtgctgaaatatacaggaggctggacacattaatgaaggaggtacgagaagctggctttgttgctgaggagaatgaattgctccctgatattcatcctgacgagcaaaagatatcaagagcttaccacagtgagagactggcaattgcttttggccttatcagcacagccccacagactcccttgaggatcagtcaaagccatcgtttgtgcagtgactgccacaatttaattaagtttgtgtcaagagttaccaagagggaaatcattgttagggatggtagcaggttccaccactttaaactcggggtctgctcttgtggtgactactggtaattggctaatgactccaatgtttcaagccaattatctggaaattactttgattaatgaggataaagcagattggtcgaccatgatgctccaatgtttcagtgctacatgcaggcttggtgatcttccattcagcaaccttctcagctggtacaagtccgagagcacgctacaatggcgaggatgggagttgctattctggtctgcgtagtggttttagccctggacgtcacagctggcatactaggaattgaggcgcaggctgctcagaacaagactaagaaggtgacgatcctcttcatccagtgcgagaaaccagtgtacagagcgtaccagcttggcctcgcagctgcagtgctcctggtagttgcccacgcggtagccaacttcctcggcggctgtgcctgcatctgctcccagctggagttcatcaaggcgtccatcaacaggaagctggcagccaccaccataattctctcatggatcgccctgattgccggattctcgctgctgctcgccggcgccatgtccaactccaagtccaagacgtcgtgcgggttcactcacggacacaccttggccctcggagggatcatgtgcttcgtccacggcgggatcaccgtcgcctactatgtcaccgccactgccgcagcgcacgaggttccttagtcgagcattttgcccgagagatcaccgctgttctttccttggtccagctgctccttgcttttctccttgtgatttgacatctacaagcatccgaagatatatgccttttttccgttcaaaaaaaaagaatacatgcctgttgtttgatttgttgctattgctgaggaaaaaacatgtcaaagttagcgtcagtgtgccacagtaatttaatttacgttgttgagaaagacaataacgccgctccatcttgtctcctggtgagggaggctacctcaagcagaccgtatatacggacagtgtataaaagaccacactgttttgcactgtagtagagtataatgtttgcatagtgaaatttaaaatactgagtgagtgagataggaaatgggatatggaggc

SEQ ID NO: 43001 - DNA, 3405 bp, Zea Mays
aattccaattttctcctacctaccactgccggactgcggaatccggaggtatatccgcaaaacccaaggagaacccccacccgcttggctcgccatggacctgcagctcgcgccaccaccccacgctaacctccgcctcctcccccgccgccccaaggccgcctccgcctccgcctccacctccgctgtcaccgccgcgccctccacctcctgctcctcttccgcggagcccctcaagccccgcccacgcctcccgcgccagagccccgcgcccaggcccaggcccaaccccgctcgcctccccgccctctgcgctgccatcgagcggcacgcggcggctggccgccacgctgaggccctcgacctgttccgcctcgcccgcgcggcggctcccttcacgcccctcccggcccgcacctaccacgccctgctccgcgccgctgccgcgctgcgggagcccggcgcggccgcggcggtggcctggcacgtcgagagctccggcttcgagctcgacctgtacacgcacaaccacgtcctgaggatgtacctcgagtgcgggatgctcgccgaggcgcgccaggcgttcgacgggatgcccgaccggaacggcgtcacgtgggggatcatgatgggcggcctcgtcgaccggggccgcccccgggccgcactggcgctgttccgggagatgtgggcggaggccggtggggacgctccgccgaggtccctcgtggtggctgtccgtgcggctgcgtcctcggggtcggcgcgagccgggcggcagctgcactgctgtgttgtcaaggcgggggcgtgtggtgacgtcgctgaccggtacctgacgtgcgcgctgctcgacatgtacagcaagtgtggccggattgacgaggcgaggcgggtgtttgacgggctgccacgtcctcatcggacgactgtcgtggcatggaactccatgttggcggcgtatgttctccatggccacagcgaggaggcgctggagctgtaccaaaagatgtgcagcactcatgtcgccatggaccagttcacgttctcgaccatgctaggggtgttctctaggctggggctgctggagcacgcgaagcaggcgcacgctggcttgatccagagaggattgccactggacattgttgggaacacggcgcttgtggacctgtactgcaaatggggaagaatggaggacgcgagaaatgtcttcgagaggatgcctaggaggaacttgatctcatggaacgctctgatagctggatacggctaccatggcatgggagataaggcgatcgagatgttcgagaggctgatagctgagggtgctgtgccaaaccatgtaacttttctggcagtgctgaatgcatgtaggttttcaggtcttgttgacgaagggaagaggattttccagttgatgactgaaaatctgaggataaaaccacgggccatgcattatgcatgtgttattgagctttttggtagagaaggtctacttgatgaatcctattcaatgataagaagagcaccgttcactccaactgcaaacatgtggggagccttgcttactgctagcaggatccacaagagcatgcatcttgcaaaattttctgccgagcagctattggcaatggaacctgagaaaataaacagctatgttgtgctcctcaacttgtatgttagctctggtagacaggacagcgcctgcaaggtagttgaaacactgaagaggaaaggtttatatattggtaatgcctgtagctggatcacagtcaagaaaacggatcacaggtttttctttaaagatactttgcatccacaaagtgctgaaatatacaggaggctggacacattaatgaaggaggtacgagaagctggctttgttgctgaggagaatgaattgctccctgatattcatcctgacgagcaaaagatatcaagagcttaccacagtgagagactggcaattgcttttggccttatcagcacagccccacagactcccttgaggatcagtcaaagccatcgtttgtgcagtgactgccacaatttaattaagtttgtgtcaagagttaccaagagggaaatcattgttagggatggtagcaggttccaccactttaaactcggggtctgctcttgtggtgactactggtaattggctaatgactccaatgtttcaagccaattatctggaaattactttgattaatgaggataaagcagattggtcgaccatgatgctccaatgtttcagtgctacatgcaggcttgatctttaaaagtaggctgaatatgtgtcatgtcatgtggctttcacattggagataccaatccttaattgtgtcctataaggaaggaataaagctctgatgtaaacgaaggatcaaagggaagtataaaactttgagcatcttgggacagctagtttcttcttgcttcatgactgcatcctggtgatcttccattcagcaaccttctcagctggtacaagtccgagagcacgctacaatggcgaggatgggagttgctattctggtctgcgtagtggttttagccctggacgtcacagctggcatactaggaattgaggcgcaggctgctcagaacaagactaagaaggtgacgatcctcttcatccagtgcgagaaaccagtgtacagagcgtaccagcttggcctcgcagctgcagtgctcctggtagttgcccacgcggtagccaacttcctcggcggctgtgcctgcatctgctcccagctggagttcatcaaggcgtccatcaacaggaagctggcagccaccaccataattctctcatggatcgccctgattgccggattctcgctgctgctcgccggcgccatgtccaactccaagtccaagacgtcgtgcgggttcactcacggacacaccttggccctcggagggatcatgtgcttcgtccacggcgggatcaccgtcgcctactatgtcaccgccactgccgcagcgcacgaggttccttagtcgagcattttgcccgagagatcaccgctgttctttccttggtccagctgctccttgcttttctccttgtgatttgacatctacaagcatccgaagatatatgccttttttccgttcaaaaaaaaagaatacatgcctgttgtttgatttgttgctattgctgaggaaaaaacatgtcaaagttagcgtcagtgtgccacagtaatttaatttacgttgttgagaaagacaataacgccgctccatcttgtctcctggtgagggaggctacctcaagcagaccgtatatacggacagtgtataaaagaccacactgttttgcactgtagtagagtataatgtttgcatagtgaaatttaaaatactgagtgagtgagataggaaatgggatatggaggc

SEQ ID NO: 43002 - DNA, 3754 bp, Zea Mays
aattccaattttctcctacctaccactgccggactgcggaatccggaggtatatccgcaaaacccaaggagaacccccacccgcttggctcgccatggacctgcagctcgcgccaccaccccacgctaacctccgcctcctcccccgccgccccaaggccgcctccgcctccgcctccacctccgctgtcaccgccgcgccctccacctcctgctcctcttccgcggagcccctcaagccccgcccacgcctcccgcgccagagccccgcgcccaggcccaggcccaaccccgctcgcctccccgccctctgcgctgccatcgagcggcacgcggcggctggccgccacgctgaggccctcgacctgttccgcctcgcccgcgcggcggctcccttcacgcccctcccggcccgcacctaccacgccctgctccgcgccgctgccgcgctgcgggagcccggcgcggccgcggcggtggcctggcacgtcgagagctccggcttcgagctcgacctgtacacgcacaaccacgtcctgaggatgtacctcgagtgcgggatgctcgccgaggcgcgccaggcgttcgacgggatgcccgaccggaacggcgtcacgtgggggatcatgatgggcggcctcgtcgaccggggccgcccccgggccgcactggcgctgttccgggagatgtgggcggaggccggtggggacgctccgccgaggtccctcgtggtggctgtccgtgcggctgcgtcctcggggtcggcgcgagccgggcggcagctgcactgctgtgttgtcaaggcgggggcgtgtggtgacgtcgctgaccggtacctgacgtgcgcgctgctcgacatgtacagcaagtgtggccggattgacgaggcgaggcgggtgtttgacgggctgccacgtcctcatcggacgactgtcgtggcatggaactccatgttggcggcgtatgttctccatggccacagcgaggaggcgctggagctgtaccaaaagatgtgcagcactcatgtcgccatggaccagttcacgttctcgaccatgctaggggtgttctctaggctggggctgctggagcacgcgaagcaggcgcacgctggcttgatccagagaggattgccactggacattgttgggaacacggcgcttgtggacctgtactgcaaatggggaagaatggaggacgcgagaaatgtcttcgagaggatgcctaggaggaacttgatctcatggaacgctctgatagctggatacggctaccatggcatgggagataaggcgatcgagatgttcgagaggctgatagctgagggtgctgtgccaaaccatgtaacttttctggcagtgctgaatgcatgtaggttttcaggtcttgttgacgaagggaagaggattttccagttgatgactgaaaatctgaggataaaaccacgggccatgcattatgcatgtgttattgagctttttggtagagaaggtctacttgatgaatcctattcaatgataagaagagcaccgttcactccaactgcaaacatgtggggagccttgcttactgctagcaggatccacaagagcatgcatcttgcaaaattttctgccgagcagctattggcaatggaacctgagaaaataaacagctatgttgtgctcctcaacttgtatgttagctctggtagacaggacagcgcctgcaaggtagttgaaacactgaagaggaaaggtttatatattggtaatgcctgtagctggatcacagtcaagaaaacggatcacaggtttttctttaaagatactttgcatccacaaagtgctgaaatatacaggaggctggacacattaatgaaggaggtacgagaagctggctttgttgctgaggagaatgaattgctccctgatattcatcctgacgagcaaaagatatcaagagcttaccacagtgagagactggcaattgcttttggccttatcagcacagccccacagactcccttgaggatcagtcaaagccatcgtttgtgcagtgactgccacaatttaattaagtttgtgtcaagagttaccaagagggaaatcattgttagggatggtagcaggttccaccactttaaactcggggtctgctcttgtggtgactactggtaattggctaatgactccaatgtttcaagccaattatctggaaattactttgattaatgaggataaagcagattggtcgaccatgatgctccaatgtttcagtgctacatgcaggcttggggcagaacgaatgttggaggctctcacatgagtagggtctagagaagggataaaccgaggcaaatctttccctgccaaatgcagagagactgcttcgaatccgtgacctggccatttagcgagacagctctccccacacaactaagcttgcccttctccttttcctgttaactgtcggcaaaaagttttagtgtctttattttgataagcaacatcttgcgtgcctttatctcggtagaaaagatggcttctgtgatgtgttcagtagaaatgtttttttatatgacaatcagatagattgcttttccctgcgcttccactctctttacaaaccttgtgtaaaagcagatctttaaaagtaggctgaatatgtgtcatgtcatgtggctttcacattggagataccaatccttaattgtgtcctataaggaaggaataaagctctgatgtaaacgaaggatcaaagggaagtataaaactttgagcatcttgggacagctagtttcttcttgcttcatgactgcatcctggtgatcttccattcagcaaccttctcagctggtacaagtccgagagcacgctacaatggcgaggatgggagttgctattctggtctgcgtagtggttttagccctggacgtcacagctggcatactaggaattgaggcgcaggctgctcagaacaagactaagaaggtgacgatcctcttcatccagtgcgagaaaccagtgtacagagcgtaccagcttggcctcgcagctgcagtgctcctggtagttgcccacgcggtagccaacttcctcggcggctgtgcctgcatctgctcccagctggagttcatcaaggcgtccatcaacaggaagctggcagccaccaccataattctctcatggatcgccctgattgccggattctcgctgctgctcgccggcgccatgtccaactccaagtccaagacgtcgtgcgggttcactcacggacacaccttggccctcggagggatcatgtgcttcgtccacggcgggatcaccgtcgcctactatgtcaccgccactgccgcagcgcacgaggttccttagtcgagcattttgcccgagagatcaccgctgttctttccttggtccagctgctccttgcttttctccttgtgatttgacatctacaagcatccgaagatatatgccttttttccgttcaaaaaaaaagaatacatgcctgttgtttgatttgttgctattgctgaggaaaaaacatgtcaaagttagcgtcagtgtgccacagtaatttaatttacgttgttgagaaagacaataacgccgctccatcttgtctcctggtgagggaggctacctcaagcagaccgtatatacggacagtgtataaaagaccacactgttttgcactgtagtagagtataatgtttgcatagtgaaatttaaaatactgagtgagtgagataggaaatgggatatggaggc

SEQ ID NO: 43003 - DNA, 1883 bp, Zea Mays
gccgccctccggccttccacttcccacgcaaaccgccgccgccacctcctcgggctcggcggcgccggcgcccatggcgaccccgtcccacggcatccccctccgcgcgctcctcctcctcgcgctgtctcttctctccatccccatcgtgttccagctcctccaccgcccgactcccagtcccatgccccctccgctcctccgaataacctgcgccgacgcggcgtcgcagtcgccccgcgcgaaccctcctccactcgcctccgacgtacacgtaccaccaccggcgcctaagccggaggaggcgtcggagccgacgtccctgcgccacgtggtattcgggatcgcctcctcccggcgcacgctgccgctccgtctccctctgctccggctctggctgcgcgcccccgcgcgcgccttcctcttcctggacgcgccggcgccggacgcccgcgacctcccaccgggcctcgccctccgcgtctccgccgacgcgtcgcgcttcccctacacccaccggcgcggcctcccctcggccgtccgcgtcgcgcgcatcgccggggagctcgtctccgcgctgaatcagcaggaggaggaggatgtgcggtggctcgtgctcgccgacgacgacaccgccttcgtcctcccgaacctgctccacacgctgcgcaggtacgaccacggcgagccctggtacctcggcgcgcgctccgagtccgcggcgcagaacgcgttgcacggcttcgccatggcgtacggcggcgccggcatcgcggtcagctggccgctcgcgcgccgcctcgcgcccgcgctcgactcgtgcgtgctcaggtatccgcacctctacggcagcgacggcaggatctacgcctgcctcgccgagctcggcgtcgagctcacccacgagccgggcttccaccagatcgacctccacggggacatctcggggctgctgaggtcgcaccctctgtcccctctagtctcgctacaccacctcgaccacgtccacccgctctacccgggaacggaccgggcggggtcggcgcagcgtctgttccgggctgccgacgccgacccggccagggtcctgcagcagacggtgtgctacgaccgcgcaaggtctctcacggcgtcggtctcgtgggggtacgcggtccaggtgctcagcggcaacgtgccgctccccgacctcctcgccgcgcagaggaccttcgcgccgtggaggaggtccggcggccgcggccgcggccgcaacgccacggacgtgctgtacatgttcgacaccaggcggtaccctggagacgagtgcagacggggggcgctgttcttcctcgagagcgtcgccgttgctccggccggggaggaaggcgggacggcgacggtgaccacgtacgggagactggcgcccaggaagtgcccgcctggcttggtcccgctgaagagcctgcgtctggtcaaggtcacgtcagaaccactgcagctggctcctgggaaggcgttaagacgccattgctgcgacatcgcgccttcttcgtctgatgctagcatggacatcaacatcagaaggtgcaaagacgatgagctgatcgccatgcattcataggcattcttcgttcgttcatagcaggtcatcatcgtctgccccggtaatgtcattttgatctgggtgttttcccagctgcgaccaggtagtagtacagacaggagagagagagaaaggatacatataaaaaaaacagacagacaggagagagagagaaaggatacatataaaaaaaacagacagacagacatacacggatcaggtagcatcttttgttttgtttagctccctttcaaatcaaaaaggcagagctggaggggcatcaggatgtatccttagt

SEQ ID NO: 43004 - DNA, 1464 bp, Zea Mays
gttaaacacaaaatgtgcatcgccgccgccaccatatagaaccacttatcatgaaccgccgccatcacatccactgcctcaactagtgttaccacctatggttcattgttgtgtctgcttcttgtagcactgttggtctacaaacattcatatttctctcaacatctggcacagcatgccgccttccaaagcacgccgaaagaggtcacttcgtgatatcactgccaccgttgccactgggactgttgccaactcgaaacctggctcatcatcgacgaacgaggggaagcaacaggacaagaaaaaggagggtccacaggaaccggacatcccaccattaccgccggtggtggtgaatatagtcccacgacaaggattaggatgtgaagtagtggaagggctactcgtgcctagtcggaagcgagagtacaagcccaatagcaagtatactgtgggaaatcacccgatctatgccatcgggttcaatttcattgacatgcgctactatgatgtctttgccatcgccagttgcaatagtgtgataatttaccgatgccttgagaatggtggttttggtcttctacaaaattatgttgatgaggataaggatgagtcattctacactctaagctggaccatcgatcaagttgatagctcaccgctgttggtggccgcaggaagcaatcggatcattcgggtcatcaattgtgctaccgaaaagttagataagagcttagttggccatggtggttcaatacatgagataaggactcatgcctcgaagccatcactcatcatttctgccagcaaggatgaatctattaggctatggaatgtccatactgggatttgcatcttagtctttgcaggggctggaggccatcgacatgatgtgttgagtgttgacttccaccctaccgaggttgggatttttgcaagttgtggcatggacaatactgtgaaaatttggtcaatgaaagaattttggatatatgttgaaaaatcatattcatggactggccatccatcaaagtttccaacgaggaatatccagtttccggtcttgactgctgcagtacactctgactatgttgattgtacaagatggcttggtgacttcatcctatcaaagagtgtaaagaatgcagttttgctttgggaaccaaaaccagacaagcgtaggcctggggaggggagtgttgatgttcttcagaagtacccggtgccaaagtgttcattatggtttatgaaattttcatgtgatttttactccaaccagatggcaataggcaacaataaaggcgagatctatgtctgggaagtgcagtccagcccgcccgtcttaattgaccggctgtgcaaccaggaatgcaagtcgccgataaggcagaccgcagtgtcattcgacggaaggctacaaggaatgccacatcagatttttggtgacgttgaaggaagaaaaat

SEQ ID NO: 43005 - DNA, 1901 bp, Zea Mays
taaacacaaaatgtgcatcgccgccgccaccatatagaaccacttatcatgaaccgccgccatcacatccactgcctcaactagtgttaccacctatggttcattgttgtgtctgcttcttgtagcactgttggtctacaaacattcatatttctctcaacatctggcacagcatgccgccttccaaagcacgccgaaagaggtcacttcgtgatatcactgccaccgttgccactgggactgttgccaactcgaaacctggctcatcatcgacgaacgaggggaagcaacaggacaagaaaaaggagggtccacaggaaccggacatcccaccattaccgccggtggtggtgaatatagtcccacgacaaggattaggatgtgaagtagtggaagggctactcgtgcctagtcggaagcgagagtacaagcccaatagcaagtatactgtgggaaatcacccgatctatgccatcgggttcaatttcattgacatgcgctactatgatgtctttgccatcgccagttgcaatagtgtgataatttaccgatgccttgagaatggtggttttggtcttctacaaaattatgttgatgaggataaggatgagtcattctacactctaagctggaccatcgatcaagttgatagctcaccgctgttggtggccgcaggaagcaatcggatcattcgggtcatcaattgtgctaccgaaaagttagataagagcttagttggccatggtggttcaatacatgagataaggactcatgcctcgaagccatcactcatcatttctgccagcaagtctttgcaggggctggaggccatcgacatgatgtgttgagtgttgacttccaccctaccgaggttgggatttttgcaagttgtggcatggacaatactgtgaaaatttggtcaatgaaagaattttggatatatgttgaaaaatcatattcatggactggccatccatcaaagtttccaacgaggaatatccagtttccggtcttgactgctgcagtacactctgactatgttgattgtacaagatggcttggtgacttcatcctatcaaagagtgtaaagaatgcagttttgctttgggaaccaaaaccagacaagcgtaggcctggggaggggagtgttgatgttcttcagaagtacccggtgccaaagtgttcattatggtttatgaaattttcatgtgatttttactccaaccagatggcaataggcaacaataaaggcgagatctatgtctgggaagtgcagtccagcccgcccgtcttaattgaccggctgtgcaaccaggaatgcaagtcgccgataaggcagaccgcagtgtcattcgacggaagcacgatccttggagccgccgacgacggcgcgatctggcggtgggacgaagtggaccctgctgcttccagctccaaacctgatcaagctgctgcgcccgccgccggtgtcggtgccggtgccggtgccgacgccgacgccgacgcctgagcgagaggaccgtcgccgcccgccggttcacatcgatcgtactccgtgctggttgattagctttacccattggtatgttttggttcagagtcgccagatctagtgtgtggctgaacgttgaatgttaggatgctgctgtttgttatgctctgagtcttgagttcactttgttaatttgcaccgtggatgagatgaataacttgacgttgcaactttgcatcccatatatgccgtaaatctgccgtctgttgtttgttctgcgttgtctagaattagtggagatgctgtgctggatggaatgtatgctagtctattaaaccgtgctccactctgagataatcgaccaacttgtcttattattgaaagaactgtggaaaaaaccaaaaaaaaa

SEQ ID NO: 43006 - DNA, 1888 bp, Zea Mays
ccactttgcttctcactctcccttattaggttaaacacaaaatgtgcatcgccgccgccaccatatagaaccacttatcatgaaccgccgccatcacatccactgcctcaactagtgttaccacctatggttcattgttgtgtctgcttcttgtagcactgttggtctacaaacattcatatttctctcaacatctggcacagcatgccgccttccaaagcacgccgaaagaggtcacttcgtgatatcactgccaccgttgccactgggactgttgccaactcgaaacctggctcatcatcgacgaacgaggggaagcaacaggacaagaaaaaggagggtccacaggaaccggacatcccaccattaccgccggtggtggtgaatatagtcccacgacaaggattaggatgtgaagtagtggaagggctactcgtgcctagtcggaagcgagagtacaagcccaatagcaagtatactgtgggaaatcacccgatctatgccatcgggttcaatttcattgacatgcgctactatgatgtctttgccatcgccagttgcaatagtgtgataatttaccgatgccttgagaatggtggttttggtcttctacaaaattatgttgatgaggataaggatgagtcattctacactctaagctggaccatcgatcaagttgatagctcaccgctgttggtggccgcaggaagcaatcggatcattcgggtcatcaattgtgctaccgaaaagttagataagagcttagttggccatggtggttcaatacatgagataaggactcatgcctcgaagccatcactcatcatttctgccagcaaggacttccaccctaccgaggttgggatttttgcaagttgtggcatggacaatactgtgaaaatttggtcaatgaaagaattttggatatatgttgaaaaatcatattcatggactggccatccatcaaagtttccaacgaggaatatccagtttccggtcttgactgctgcagtacactctgactatgttgattgtacaagatggcttggtgacttcatcctatcaaagagtgtaaagaatgcagttttgctttgggaaccaaaaccagacaagcgtaggcctggggaggggagtgttgatgttcttcagaagtacccggtgccaaagtgttcattatggtttatgaaattttcatgtgatttttactccaaccagatggcaataggcaacaataaaggcgagatctatgtctgggaagtgcagtccagcccgcccgtcttaattgaccggctgtgcaaccaggaatgcaagtcgccgataaggcagaccgcagtgtcattcgacggaagcacgatccttggagccgccgacgacggcgcgatctggcggtgggacgaagtggaccctgctgcttccagctccaaacctgatcaagctgctgcgcccgccgccggtgtcggtgccggtgccggtgccgacgccgacgccgacgcctgagcgagaggaccgtcgccgcccgccggttcacatcgatcgtactccgtgctggttgattagctttacccattggtatgttttggttcagagtcgccagatctagtgtgtggctgaacgttgaatgttaggatgctgctgtttgttatgctctgagtcttgagttcactttgttaatttgcaccgtggatgagatgaataacttgacgttgcaactttgcatcccatatatgccgtaaatctgccgtctgttgtttgttctgcgttgtctagaattagtggagatgctgtgctggatggaatgtatgctagtctattaaaccgtgctccactctgagataatcgaccaacttgtcttattattgaaagaactgtggaaaaaaccaaaaaaaaa

SEQ ID NO: 43007 - DNA, 1797 bp, Zea Mays
ggctcagctcaacgagcggctggcctcccacgcagtccgcctgcacgatccggtgggcccggcgcgacccgcccgtccccgcgcccggtccaccagcgccagcgcaagcgaggcagcccgggcgcggagccctgtccgtgcaccgggtctagcctcctcctcctccgcccgcccgcgcaggggcgccgtggcagaggccgcaatgcagccggccaaggcggtcgccgcggaggcggcctcccccgctgccgcgctggagatggggaacggcgccgcggtcgcggggctgcagcggcccgacgccatggggaggtttgggaggttcggcggcaagtacgtccccgagacgctcatgcacgcgctcaccgagctcgagaacgccttccacgcactcgccaccgacgacgagttccaaaagaacttgacggtattctcaaggactacgttggacgtgagagccccctttacttcgcggagcgcctgacggagcactacaagcgcgctgatggcacaggcccgctcatctacctcaagagggaggacctcaaccacacgggcgcccacaagatcaacaatgctgtggcgcaggccctgctcgccaagcgacttgggaagcagcgcatcattgccgagacaggggctggccagcacggtgtcgccaccgccaccgtgtgcgcccgtttcgggctgcagtgcatcatctacatgggcgcgcaagacatggagaggcaggcactcaatgttttccggatgaagcttcttggtgcagaggtgagggctgtacattctgggacagcaaccctgaaggatgctacttcagaggctatccgtgactgggtcactaacgtggagaccacacactatatattgggctctgttgctggcccgcacccgtacccgatgatggtgagggagttccacaaggttatcggcaaggagacccggaggcaggccatgcacaagtggggtggcaagccggacgtcttggtcgcttgcgtcgggggtggatcaaacgccatgggcctgttccacgagttcgttgaggatcaggatgtgaggctgatcggagtggaggcagctggccatggcgtagacaccgacaagcatgcggcgactttgacaaagggccaagttggagttctccatggatctatgagctatttgctgcaggacgacgatgggcaagttatcgagccccactccatcagtgctggactggattaccctggcgttggacctgagcacagtttcttgaaggacatcggacgcgctgaatatgacagcgtgactgatcaggaggcactggatgctttcaagcgcgtctcccgtctggagggcatcatcccggccctggagacctcccacgcgctcgcctacctggagaagctgtgcccgaccctgccggacggcgtgagggtggtgctgaactgcagtgggcgaggcgacaaggacgtgcacaccgccagcaagtacctggacgtctagaacaccggagaggagggctgaatgagagttttgcatgccaatttttgaagggttcagcagttatgtagcgctgttttttttgtgataagagtacaaataacctggaagctaaagctagtattgttgtagccgccctttgttctttttttgagttgttgttctgtatctgaaatgttttggagtgcataatgatcaataaacaagtaaataccaaaatctttgtccatgatttgtttggccgaggagtggagaagaataaagtggctctatccattttttggatgttcggttttcaataaaataagagtggag

SEQ ID NO: 43008 - DNA, 1005 bp, Zea Mays
agaacatttagttgccatccggaacctgtccagaacttgactgctgcaaacatcatgaaatgtgacgatgatacatttgtgagagtagatgtagttctgagacgcatcaagttgaacaatggtgacaaaccattatatatggggaaccttaacctcctgcacagaccattgaggactggaaaatgggcagttacagacgaggagtggcctgaggatatctacccgccatatgcaaacggaccaggctatgtgatttctggtgacatagcaaaattcatcgtgtcacagcatgccaatcagagtttaagactgtttaagatggaagatgtaagcatgggcctatgggtcgagaagttcaattcaacaaatcctgtccaatattcccacagctggaagttctgccagtacggttgcctggagaactactacacggcccactatcagtcacccaggcagatgctgtgcttgtgggataagttggttcgtggtcaggcatcctgctgtaactacagatagcagagtgaagctaaggattgctggacgctgtcctctcttcatcataccccagccaggtttaggtcggttggctggtattttctttttcgacacaatcgtagtgtagtaggtgttgttgctcctccgtcgctggctcaaatatgagctaaatgcatgggtgtgcggtaggagattgaagatttaggaagccccaaccagttggttattgttttttacacgatctgtattggtccaattgtggcgttggcgtccttgttcttgtaattgatccaattttgatgtagtaggccagattagagggaatattccagatcagatgtacgtctccgttcttttcttatagtaataactagacacaatttgccctgatctttgcaggatcctgctgctgaagatcttcagcattcctttgttttagtcactttgtgttgactttagttttagtaatcttgtggcaggactgaaatacagattatcgttgaagtttcc

SEQ ID NO: 43009 - DNA, 3357 bp, Zea Mays
tgttagagacgttcttttaataaaatgctgtctcttatatttttttattattctcttataatagtccttttaagatacaagacatttacgtacatgccctgataacgtgaagcgagcaagcctgggctgcagccgatgggctgtatcacgcagctgcagcccaaacagctgaccgattgccgcggacccgggaggccgggacgagagagacgagcgggagcagccagcacgacgcctgtccgtctcccactctccctccattcccctctctctccttctgcctgtgcccgcgtggccgcgtctgtacctgtacggccaccaccatttccatctccgatccccgcgaccccccacccagccccaggcgcccgggctagatccggcccacgcgtctactcgccccctccggctccccttctccctaatcgccgtcgccgggggtgcaggcacagcggctgcttccgctcccgctcccgaggggggaggcggcaggcaatggcgcggcgggtgcggccgtcgcacctggtgctggcgctggcggcagcctacctcctcctcatctccctcaagttccgccgcgtgctggacctggccgccaccgacctcgcggacgaccctgccgccgccgccgccgccgccttctcttctccgtcctccgccgaccacctgcccccgcccgggtccgcttccgccacctcctcctcctcctcgcccccgttcccggtccgccccttctggcaccgctacgaccgtgtgtccctccccgacctcgcgtcccgcaaccgctccgcgctcgaccgcatggccgacgacgcctgggcgctcggcctcaccgcctgggaggacgccgccgccttcgcaggggacccctgggcgctgctcgccgccgccacctcccgcgcctccgacgccgccaagtgcccctccgcggtctcccagcgcgcgcggggccgggtcgtcttcctcccctgcggcctcgccgcgggctcgtccatcaccgtcgtcggcacgccgcgcgcctcgcacagggagtacgtgccgcagctcgcgcggatgcgccagggggacggcaccgtcatggtgtcccagttcatggtcgagctccagggcctgcgcgccgtcgacggcgaggacccgcccaggatactccacctcaaccccaggctcaggggggattggagccagcaccctatcctcgagcacaacacctgctacaggatgcagtggggcgccgcgcagcgctgtgacggcacaccacccgacgacaatgacgacaaaggtcctctgcttcttgttgcttcttagcatgtcatgtttctgttttaactaaaaatagtacgagatggtttgcaatgacttccgttcgactatggcaacatattcttaactaacagacctggtagtaattacggtaacttttgagtcgcgattgccccttcacccaattagcttctactgaatttgacatttatggccactatggatggtttggtttcaatgcataggagtagatagcaaaccaccaacaattctctgcacgttcacacacttgcattttttacttcgtgttcctgttacataattgataaagagctgtctgcgggactgctctgtttatgtggtctaatgagagactagcttatttggctaaaagctacagtttcatcccccccccccccctccgacagtcgatggattccccaaatgtgagaagtggatacgcaatgacattgttgacaccaaggagtccaagacgacatcatggttgaagagattcatcgggcgtgcgaagaagcctgcaatgacatggccattcccctttgtagaggagaggctatttgttctgactatacaagctggagttgaaggtttccacatttatgttggtggtcgacatgtgacatcttttccttatcggccggggttcactcttgaagatgcaacagggttatttgtcaagggtgatgtagatatacattcagtttatgccactgcacttccttcgtcgcatcctagtttttctcttcaacaagtccttgagatgtcagaaaagtggaggtctcggccactaccaaaaggccccgtttcccttttcattggaatactgtctgcatcaaatcatttcgctgagcgcatggctgtgaggaaaacatggatgcaggctccagaaataaagtcttctgaagccgtggctcgattctttgttgcactgagagtatttgcttctacgtgataaaattgtgtttgcagaattcaaggaaagaggtcaatgtaatgttgaagaaagaagcagaatactttggagacattgtcattttgccatttatagaccgctatgagctggttgttcttaagacaattgctatctgtgagtatggggtccagaacttgactgctgcaaacatcatgaaatgtgacgatgatacatttgtgagagtagatgtagttctgagacgcatcaagttgaacaatggtgacaaaccattatatatggggaaccttaacctcctgcacagaccattgaggactggaaaatgggcagttacagacgaggagtggcctgaggatatctacccgccatatgcaaacggaccaggctatgtgatttctggtgacatagcaaaattcatcgtgtcacagcatgccaatcagagtttaagactgtttaagatggaagatgtaagcatgggcctatgggtcgagaagttcaattcaacaaatcctgtccaatattcccacagctggaagttctgccagtacggttgcctggagaactactacacggcccactatcagtcacccaggcagatgctgtgcttgtgggataagttggttcgtggtcaggcatcctgctgtaactacagatagcagagtgaagctaaggattgctggacgctgtcctctcttcatcataccccagccaggtttaggtcggttggctggtattttctttttcgacacaatcgtagtgtagtaggtgttgttgctcctccgtcgctggctcaaatatgagctaaatgcatgggtgtgcggtaggagattgaagatttaggaagccccaaccagttggttattgttttttacacgatctgtattggtccaattgtggcgttggcgtccttgttcttgtaattgatccaattttgatgtagtaggccagattagagggaatattccagatcagatgtacgtctccgttcttttcttatagtaataactagacacaatttgccctgatctttgcaggatcctgctgctgaagatcttcagcattcctttgttttagtcactttgtgttgactttagttttagtaatcttgtggcaggactgaaatacagattatcgttgaagtttcc

SEQ ID NO: 43010 - DNA, 3308 bp, Zea Mays
tgttagagacgttcttttaataaaatgctgtctcttatatttttttattattctcttataatagtccttttaagatacaagacatttacgtacatgccctgataacgtgaagcgagcaagcctgggctgcagccgatgggctgtatcacgcagctgcagcccaaacagctgaccgattgccgcggacccgggaggccgggacgagagagacgagcgggagcagccagcacgacgcctgtccgtctcccactctccctccattcccctctctctccttctgcctgtgcccgcgtggccgcgtctgtacctgtacggccaccaccatttccatctccgatccccgcgaccccccacccagccccaggcgcccgggctagatccggcccacgcgtctactcgccccctccggctccccttctccctaatcgccgtcgccgggggtgcaggcacagcggctgcttccgctcccgctcccgaggggggaggcggcaggcaatggcgcggcgggtgcggccgtcgcacctggtgctggcgctggcggcagcctacctcctcctcatctccctcaagttccgccgcgtgctggacctggccgccaccgacctcgcggacgaccctgccgccgccgccgccgccgccttctcttctccgtcctccgccgaccacctgcccccgcccgggtccgcttccgccacctcctcctcctcctcgcccccgttcccggtccgccccttctggcaccgctacgaccgtgtgtccctccccgacctcgcgtcccgcaaccgctccgcgctcgaccgcatggccgacgacgcctgggcgctcggcctcaccgcctgggaggacgccgccgccttcgcaggggacccctgggcgctgctcgccgccgccacctcccgcgcctccgacgccgccaagtgcccctccgcggtctcccagcgcgcgcggggccgggtcgtcttcctcccctgcggcctcgccgcgggctcgtccatcaccgtcgtcggcacgccgcgcgcctcgcacagggagtacgtgccgcagctcgcgcggatgcgccagggggacggcaccgtcatggtgtcccagttcatggtcgagctccagggcctgcgcgccgtcgacggcgaggacccgcccaggatactccacctcaaccccaggctcaggggggattggagccagcaccctatcctcgagcacaacacctgctacaggatgcagtggggcgccgcgcagcgctgtgacggcacaccacccgacgacaatgacgacaaaggtcctctgcttcttgttgcttcttagcatgtcatgtttctgttttaactaaaaatagtacgagatggtttgcaatgacttccgttcgactatggcaacatattcttaactaacagacctggtagtaattacggtaacttttgagtcgcgattgccccttcacccaattagcttctactgaatttgacatttatggccactatggatggtttggtttcaatgcataggagtagatagcaaaccaccaacaattctctgcacgttcacacacttgcattttttacttcgtgttcctgttacataattgataaagagctgtctgcgggactgctctgtttatgtggtctaatgagagactagcttatttggctaaaagctacagtttcatcccccccccccccctccgacagtcgatggattccccaaatgtgagaagtggatacgcaatgacattgttgacaccaaggagtccaagacgacatcatggttgaagagattcatcgggcgtgcgaagaagcctgcaatgacatggccattcccctttgtagaggagaggctatttgttctgactatacaagctggagttgaaggtttccacatttatgttggtggtcgacatgtgacatcttttccttatcggccggggttcactcttgaagatgcaacagggttatttgtcaagggtgatgtagatatacattcagtttatgccactgcacttccttcgtcgcatcctagtttttctcttcaacaagtccttgagatgtcagaaaagtggaggtctcggccactaccaaaaggccccgtttcccttttcattggaatactgtctgcatcaaatcatttcgctgagcgcatggctgtgaggaaaacatggatgcaggctccagaaataaagtcttctgaagccgtggctcgattctttgttgcactgaattcaaggaaagaggtcaatgtaatgttgaagaaagaagcagaatactttggagacattgtcattttgccatttatagaccgctatgagctggttgttcttaagacaattgctatctgtccagaacttgactgctgcaaacatcatgaaatgtgacgatgatacatttgtgagagtagatgtagttctgagacgcatcaagttgaacaatggtgacaaaccattatatatggggaaccttaacctcctgcacagaccattgaggactggaaaatgggcagttacagacgaggagtggcctgaggatatctacccgccatatgcaaacggaccaggctatgtgatttctggtgacatagcaaaattcatcgtgtcacagcatgccaatcagagtttaagactgtttaagatggaagatgtaagcatgggcctatgggtcgagaagttcaattcaacaaatcctgtccaatattcccacagctggaagttctgccagtacggttgcctggagaactactacacggcccactatcagtcacccaggcagatgctgtgcttgtgggataagttggttcgtggtcaggcatcctgctgtaactacagatagcagagtgaagctaaggattgctggacgctgtcctctcttcatcataccccagccaggtttaggtcggttggctggtattttctttttcgacacaatcgtagtgtagtaggtgttgttgctcctccgtcgctggctcaaatatgagctaaatgcatgggtgtgcggtaggagattgaagatttaggaagccccaaccagttggttattgttttttacacgatctgtattggtccaattgtggcgttggcgtccttgttcttgtaattgatccaattttgatgtagtaggccagattagagggaatattccagatcagatgtacgtctccgttcttttcttatagtaataactagacacaatttgccctgatctttgcaggatcctgctgctgaagatcttcagcattcctttgttttagtcactttgtgttgactttagttttagtaatcttgtggcaggactgaaatacagattatcgttgaagtttcc

SEQ ID NO: 43011 - DNA, 3319 bp, Zea Mays
tgttagagacgttcttttaataaaatgctgtctcttatatttttttattattctcttataatagtccttttaagatacaagacatttacgtacatgccctgataacgtgaagcgagcaagcctgggctgcagccgatgggctgtatcacgcagctgcagcccaaacagctgaccgattgccgcggacccgggaggccgggacgagagagacgagcgggagcagccagcacgacgcctgtccgtctcccactctccctccattcccctctctctccttctgcctgtgcccgcgtggccgcgtctgtacctgtacggccaccaccatttccatctccgatccccgcgaccccccacccagccccaggcgcccgggctagatccggcccacgcgtctactcgccccctccggctccccttctccctaatcgccgtcgccgggggtgcaggcacagcggctgcttccgctcccgctcccgaggggggaggcggcaggcaatggcgcggcgggtgcggccgtcgcacctggtgctggcgctggcggcagcctacctcctcctcatctccctcaagttccgccgcgtgctggacctggccgccaccgacctcgcggacgaccctgccgccgccgccgccgccgccttctcttctccgtcctccgccgaccacctgcccccgcccgggtccgcttccgccacctcctcctcctcctcgcccccgttcccggtccgccccttctggcaccgctacgaccgtgtgtccctccccgacctcgcgtcccgcaaccgctccgcgctcgaccgcatggccgacgacgcctgggcgctcggcctcaccgcctgggaggacgccgccgccttcgcaggggacccctgggcgctgctcgccgccgccacctcccgcgcctccgacgccgccaagtgcccctccgcggtctcccagcgcgcgcggggccgggtcgtcttcctcccctgcggcctcgccgcgggctcgtccatcaccgtcgtcggcacgccgcgcgcctcgcacagggagtacgtgccgcagctcgcgcggatgcgccagggggacggcaccgtcatggtgtcccagttcatggtcgagctccagggcctgcgcgccgtcgacggcgaggacccgcccaggatactccacctcaaccccaggctcaggggggattggagccagcaccctatcctcgagcacaacacctgctacaggatgcagtggggcgccgcgcagcgctgtgacggcacaccacccgacgacaatgacgacaaaggtcctctgcttcttgttgcttcttagcatgtcatgtttctgttttaactaaaaatagtacgagatggtttgcaatgacttccgttcgactatggcaacatattcttaactaacagacctggtagtaattacggtaacttttgagtcgcgattgccccttcacccaattagcttctactgaatttgacatttatggccactatggatggtttggtttcaatgcataggagtagatagcaaaccaccaacaattctctgcacgttcacacacttgcattttttacttcgtgttcctgttacataattgataaagagctgtctgcgggactgctctgtttatgtggtctaatgagagactagcttatttggctaaaagctacagtttcatcccccccccccccctccgacagtcgatggattccccaaatgtgagaagtggatacgcaatgacattgttgacaccaaggagtccaagacgacatcatggttgaagagattcatcgggcgtgcgaagaagcctgcaatgacatggccattcccctttgtagaggagaggctatttgttctgactatacaagctggagttgaaggtttccacatttatgttggtggtcgacatgtgacatcttttccttatcggccggggttcactcttgaagatgcaacagggttatttgtcaagggtgatgtagatatacattcagtttatgccactgcacttccttcgtcgcatcctagtttttctcttcaacaagtccttgagatgtcagaaaagtggaggtctcggccactaccaaaaggccccgtttcccttttcattggaatactgtctgcatcaaatcatttcgctgagcgcatggctgtgaggaaaacatggatgcaggctccagaaataaagtcttctgaagccgtggctcgattctttgttgcactgaattcaaggaaagaggtcaatgtaatgttgaagaaagaagcagaatactttggagacattgtcattttgccatttatagaccgctatgagctggttgttcttaagacaattgctatctgtgagtatggggtccagaacttgactgctgcaaacatcatgaaatgtgacgatgatacatttgtgagagtagatgtagttctgagacgcatcaagttgaacaatggtgacaaaccattatatatggggaaccttaacctcctgcacagaccattgaggactggaaaatgggcagttacagacgaggagtggcctgaggatatctacccgccatatgcaaacggaccaggctatgtgatttctggtgacatagcaaaattcatcgtgtcacagcatgccaatcagagtttaagactgtttaagatggaagatgtaagcatgggcctatgggtcgagaagttcaattcaacaaatcctgtccaatattcccacagctggaagttctgccagtacggttgcctggagaactactacacggcccactatcagtcacccaggcagatgctgtgcttgtgggataagttggttcgtggtcaggcatcctgctgtaactacagatagcagagtgaagctaaggattgctggacgctgtcctctcttcatcataccccagccaggtttaggtcggttggctggtattttctttttcgacacaatcgtagtgtagtaggtgttgttgctcctccgtcgctggctcaaatatgagctaaatgcatgggtgtgcggtaggagattgaagatttaggaagccccaaccagttggttattgttttttacacgatctgtattggtccaattgtggcgttggcgtccttgttcttgtaattgatccaattttgatgtagtaggccagattagagggaatattccagatcagatgtacgtctccgttcttttcttatagtaataactagacacaatttgccctgatctttgcaggatcctgctgctgaagatcttcagcattcctttgttttagtcactttgtgttgactttagttttagtaatcttgtggcaggactgaaatacagattatcgttgaagtttcc

SEQ ID NO: 43012 - DNA, 477 bp, Zea Mays
gcccgttttagattaagggggtgtttgaatacactaaagataatagttattggctaaaattagttagagacatccaaacaacctagctaatagttcagctattacctaaaatagtaaattagctactagttagctaactatttgttagctagctaattctactagtatatttttagctaactaatagtgcattcaaacatattctaaagtcagttaaacaccttgaaaaaagattacgtaataataaactactcgtaagttgcttgctgaagctgaccacgaccagtggaccaatccaccattttcaagcggtaaactatacgagctccagattcatatatgaaccattttcaagcagactttgctttggccttgagctcctcagctttcgtcttccttgcatcccctgctccccattcaatcctccatccatcagcatacccagtgctcgcttcacctgctccatccccacatctg

SEQ ID NO: 43013 - DNA, 2059 bp, Zea Mays
gctaattccaatgccaatggcggccgcggccggcgcgggcgagcccggtccgcgctcggaggcgtccggcttcggctctggctgcaaccacctgcggccgcggcgggggcctccacccccgtccccgtcccccgcggtcgggaagccgctcccgtccggcgcggtgccgcgccatgcgttcgtgttcgacggcgagggcggcttctccgaggcaccctggggccttgcggtgtccggttcgtcgcggaccggggagttcacgtggcaccacgtggagctcccgcgctccgcgggcgccgcggcggccaagccgctccaccacgcgcaggcgctcatcgagctcctctgcccgccgctcacgctgcaggagatcctcgcgttcgtcgccacgggcccgcactgcgcctcctcgggcgacggcgcgctcctgctccgcgtcagcgcgccgggccccgtcggcagcgcgtacgcgctccgcctcgccgcgcgcgtcaccgagagctccgtcgtcaccgtgtccgtcggcggggtcccgcgcctcgcgttcgggaccaggcaggcgtcgctcctctcggaggttccgctcggcgtcgccgcctcgctctccgacgagggccatggcgggggccgcgccgtcgacggcggcgtgatcatcgatgagcgcctgctcgagtcgctgctggccatgaaccacgcggacggcgcgcacacggacaacccggtgccgcggacggtgtccaacctcctcgtgcacgtcctcggcacgcacgtagaccacgtccacgacattgtcacgcgcctcgagatggacctggacgccgtcgagctgcagctcgacaaaggtggtcactttttgaggaagcttttgctggatggcaggagattcccaaaaatgcatctggatctacagcggttgcttcaggtatgagttctctctcaagtttctgggaaatacattgggaacctggaatgctattttataatttgcactgatttagccaaaatggcaacttgcatgaagtgactgttgatgtgacattgaggtttattggcatgctgtgttgctcatagtttggctttcaggttctaaaagtgcaggtacttgatttcagttaatctatcgagatggaacagaagtcacaggctcgattctactgtttttgtttgtgtaggttgtttctcactgtgaacaagtattcccccgcgtgaaggaaaaatgtgcgagcaagagttggttcgcaacaggagatatagcagcccttgaagatctgataggtcgtctcagaaggctcaaagaaaacctagggttcattacaaatagaatcaccacacttcaggctagtctggacagttggcaatcggagcagataaacaaaagcttgtactacctttcatttctctccataatattcctgcctctttccattgtcactggagttttcgggatgaacgtcggtggtgtgccgtggacagggcagaacaagaaccctaaaaaccgggatggcttcatgaatgtcatgctaatatgtgttgcaatcttgttacttctgttgctgtgtttcttgtttccttcattatattctcatgtgacgtcatggagaacccgccgtgagctgacccggagcaactctcagaacagaagacatctgaaactcttcaaaggtcacaaggaaggttacatgcgcctatgacgacaatacagttgcaaactacggtgtccatttcagctgtaaggtgattgtcagtgatgttgtaagtgtaagatttgtggggaaagatcctagatagccaacacatgtacaggtttgaaggagaccctccatggctccatttgaggttcataccttgttcattgcttagtttgtttttgttgtagattcatggctgtcactgcaccttttatttattctgaaaatgtgttagttcttcaatgaagaccacccacgacaatttgtcattgttgttccaggtggacgtgtttcatagttgtacgcagcgaattcctgcctgttttcagcgtattgaaataaatagtcggagcaacagctatggcttttat

SEQ ID NO: 43014 - DNA, 1065 bp, Zea Mays
ccaagaccccggcacctctctctctctccatccagctgcttctccaatctccaccgtccctctctctcgtttgcttgctagctcttgttgcacaccacagccagctctagcttgcattggggttcttgcccttggcaaagccctcatttttcttggtgtgcatatagcttgcatgcatttgattgggtttaggtttgccagcagcagcaatttaaacgaataaacaggatccctttctttctccaattttcgtgtgcgtattaattagcttgcatgcttgggccggcgatgtctgagctcgtgtgtggcggctgcttcaccatgctggtgcactcccgcagcgcaactaacgtacggtgccctcactgcggcaggctcggctcgacaagatcaggaaaccagatggggcacctgtcgtgcgggcaatgccggacaaccctggcatacccgccgggagcgacgacagtcgggtgcccgacatgccgcaacgtcaatccagttccaaccagggtacgtatggatgctcggccgcagcagacgatggttctggtggagaatcctaagacgctggatgaaaagggcaaactggtgagcagtgttgccgttggtgtcacctcgtggaaaagatgaccaacaactcacttcattccggctaatctcgtcatcatcgacaacgacgacagctaatgtaaaatcaagtgtgttttgaagcgcttgatgtttttcatataaggaaaaaaagaaaagaggcagagtagcagtagctgttgagcagcaaaagatctgaaaattgtaaatacattacatgctatagccacccgtgtgcgcctttgtgcccctggaattgtattcttgccctgccaaggtcagacacgctgagtcgactctgcactctagcgctttatctgcaaattcggattctccggctgaaaaaaaaaaaccgagagaaaggatagtgctgcccatgataagattctgcagcctaaactctctaggcagtttatgcagaaactgcgctggtcgttttcagttttttttttcacagtgcgctgaactgaaaagtgc

SEQ ID NO: 43015 - DNA, 1736 bp, Zea Mays
ctacttgcgaggcggacgaccatccctcgcggacacgtgacacgtgggtccggactccggagccccctttcgcacgtgcgcgctgaaaccggtcgccgtcacgcccgtgccgtcgccgctgtttcgcgttcgcgcggccgcccaccatttctgcgccccgcccccacagaaaagcttcgcccatgccgtcgctgccgacgcgctgctctcttcttctctgcccctcctcctcctccactcgttcgaacccgccatggccgcctccaagcccctgcggctacgcctcgcggtgccgctcgccctcgccctcctcctcgcgctcgccctcgtcaccaacttcctctgggcctcctcctcccgacgagtctccccgctgtcggccccgtcttcttccagaacggtgatggggaagagcgccaaggcagtgtggcgcctcaacgcgacgtacgcagacttgccggcgccgcactgggactgggaggagatgcccgcggcgcctgtgccacgcctcgacggggcgtcggtgcagattggggatctcctctacgtcttcgccgggtccattctcatgttgatgtttataatttcacctctaacacatggacccaaaggtttcatatgcccaaggagatggcacattctcatttaggaatggcctcagatggcagatacatctatgcagtttcaggacagtatggaccacagtgccgcgcctcgattaatcgcaactttgtttttgacactgagactagagagtggcatgggttgccccctttaccacttcctaggtatgcaccagctactcagctttggcgtgggcggctccatgtgatgggtggaggcaaagaggaccgccatgaacctggattggagcattggagccttgctgtcaaggatggcaaggcactggagaacgagtggcgagctgaagtacccataccacgtggtggacctcatagggcgtgtattgtagctaatgataaactatttgtgattggtggacaagagggagactttatggctaaaccaggatcacctatttttaaatgtgtacggaggcatgagaatttcactcttgcaggttgtgtatggcgatgtgtatatgctagatgatggagccaagtggaaggaactgtctccaatgccaaagccagattcccacattgaatttgcatgggttgtcgttaacaactccatagtaattgttggtggaactacagagaagcatcctatcaccaaaaagatgattcttgttggtgaagtcttccgttttgatttggaagcactgacctggtcagtcattgggcgcatgcctttccgaatcaagacagccttagctgggtactgggaggggtggctctattttacttctgggcagcgggatcgtgggcctgataatccagctccaaagaaagttgttggaagtatgtggaggacgaggctacacttgtgacggtagaagaagtgaaagtttttctgaaaattgtagatttgcgtctgatttctagtccaacagctaggtccctctcagagaattgcttttatcctgtattttgttgtttggaatgcatattatctattttttactagatattttaaatttaacatttaggctttcagcttgtaaattgccttaatactaacagcaaaacaatgtaaataccgccttttgaacagagatttgcctaatcaaagcaagggtctgtttggaagtaaagtattttttatagtttcta

SEQ ID NO: 43016 - DNA, 2009 bp, Zea Mays
accattcactcacattcaccctgcccaccccgaacaataaacaacagcttcaccctcctcctccagtgcaggccgtcggcggctggcggcgtcatttctcctccttcctctggcctgccctgccctgccctgcccgcgcgataaccatctctcgcaactcctcttcgtactcctcgtctccaacgccggcaacaactacagagcttcagcttcccaagcgcgagacatgcgtgcggaaacacagacggcggagtagcgtagcgccacgatgggattgccaagctggttaattactctatctattaaatttctggaggtgcaggtaggtagccaagaagacatgagatgggggcgtccttgggctccgccgccagcaaggaccggcagcaggagcacggcggcgaggctccgcgaccagatccctgcaagaagacgcggctctcgtcccctctctgcactatccacggtagccacggccacccgaggctgatcccagggctcccggatgaggtctctctgcagatcctcgcgaggatgccgcggatggggtacctcaaggccaagatggtctcgcggagctggaaggcggcggtgaccggcgcggagctgtaccggctgaggaaggagctcggcgtggccgaagagtggctgtacatactgacgaaggcggcggcaggagtggcggcgtgtacgggctgggcttgcgggacctggtgagcgtcggcgtaggtatcttcgacgtcatcagaggctggctcgggcagaaggaactgtcaggcggcgtaccaccgttctgtggctgcgccgtcggcgccgctggtggctgcctctatgtcctgggcggcttctccggagcttccgcgtcgaagcgcgtgtggaggtacgacccctccgccaactcatggcgggaggtgagcccgatgcgcgccgggcgcgccttctgcaaggcgagcctgctgaacgacaagctgtacgtcgtgggcggcgtcagcaagggcgagaacgggctaatagctccgctccggtccgccgaggtgttcgacccggcgactggggcctgggccgagctgccggacatgctgttctccaagtcgcaggccatgccgacggccatagctgacctgctcaagcccgtcgccgccggagtgacctcgtacggggggaagctgcacgttccccagagcttctattcctggccattcgccgtcgacgtcggcggagaggtgttcgatccggagacgaactcgtgggagcagatgcctgcgggcatgggcgagggctggcctgcgaggcaggctgggacgaggctgagcgccgttgtggaaggggatctgtatgccctggagccgacgacctcctcttccggcggttgtgagatcaagatgtacgacgcgcaggaggatgcttggaaggtcgctgtgagccaggttcgtgctggggcatttgacgagtcggacagcccttgcttgcttgctgcgtttcttggaaagctccatttggtcgtcaaggatatgggcagcaggatcagtgtcgtgcagatggactctctgatgaagccagtggattcgccagccctttcggctgccacgacatgccgaaccccggatgtctcctcggagcagacacatgtctggaaagccattgcatcgaagaacattgcagctgctgaacttgtcagctgtcaggttctcagcatctgagttcgtaaaatcgagcttctctggaacttctttgtgtaagtctgtgcagtagatgtgtttctgccacacatctgaacatcagagactatttctttctttcagcaatgcacaattgtttgtgcaatctgcgtaattgttatctgtgtatataacatcacatagaactgaataaggttgacgcagctttgtccaatcccaaaggcaacggcgccgactcaatcaatcaccggaccaatctgaaccctgttcattgttcagactgctgtgcattcctgttttcacacacctagtttggttttcttcatagaa

SEQ ID NO: 43017 - DNA, 1972 bp, Zea Mays
accattcactcacattcaccctgcccaccccgaacaataaacaacagcttcaccctcctcctccagtgcaggccgtcggcggctggcggcgtcatttctcctccttcctctggcctgccctgccctgccctgcccgcgcgataaccatctctcgcaactcctcttcgtactcctcgtctccaacgccggcaacaactacagagcttcagcttcccaagcgcgagacatgcgtgcggaaacacagacggcggagtagcgtagcgccacgatgggattgccaagctggtaggtagccaagaagacatgagatgggggcgtccttgggctccgccgccagcaaggaccggcagcaggagcacggcggcgaggctccgcgaccagatccctgcaagaagacgcggctctcgtcccctctctgcactatccacggtagccacggccacccgaggctgatcccagggctcccggatgaggtctctctgcagatcctcgcgaggatgccgcggatggggtacctcaaggccaagatggtctcgcggagctggaaggcggcggtgaccggcgcggagctgtaccggctgaggaaggagctcggcgtggccgaagagtggctgtacatactgacgaaggcggcggcaggagtggcggcgtgtacgggctgggcttgcgggacctggtgagcgtcggcgtaggtatcttcgacgtcatcagaggctggctcgggcagaaggaactgtcaggcggcgtaccaccgttctgtggctgcgccgtcggcgccgctggtggctgcctctatgtcctgggcggcttctccggagcttccgcgtcgaagcgcgtgtggaggtacgacccctccgccaactcatggcgggaggtgagcccgatgcgcgccgggcgcgccttctgcaaggcgagcctgctgaacgacaagctgtacgtcgtgggcggcgtcagcaagggcgagaacgggctaatagctccgctccggtccgccgaggtgttcgacccggcgactggggcctgggccgagctgccggacatgctgttctccaagtcgcaggccatgccgacggccatagctgacctgctcaagcccgtcgccgccggagtgacctcgtacggggggaagctgcacgttccccagagcttctattcctggccattcgccgtcgacgtcggcggagaggtgttcgatccggagacgaactcgtgggagcagatgcctgcgggcatgggcgagggctggcctgcgaggcaggctgggacgaggctgagcgccgttgtggaaggggatctgtatgccctggagccgacgacctcctcttccggcggttgtgagatcaagatgtacgacgcgcaggaggatgcttggaaggtcgctgtgagccaggttcgtgctggggcatttgacgagtcggacagcccttgcttgcttgctgcgtttcttggaaagctccatttggtcgtcaaggatatgggcagcaggatcagtgtcgtgcagatggactctctgatgaagccagtggattcgccagccctttcggctgccacgacatgccgaaccccggatgtctcctcggagcagacacatgtctggaaagccattgcatcgaagaacattgcagctgctgaacttgtcagctgtcaggttctcagcatctgagttcgtaaaatcgagcttctctggaacttctttgtgtaagtctgtgcagtagatgtgtttctgccacacatctgaacatcagagactatttctttctttcagcaatgcacaattgtttgtgcaatctgcgtaattgttatctgtgtatataacatcacatagaactgaataaggttgacgcagctttgtccaatcccaaaggcaacggcgccgactcaatcaatcaccggaccaatctgaaccctgttcattgttcagactgctgtgcattcctgttttcacacacctagtttggttttcttcatagaa

SEQ ID NO: 43018 - DNA, 1294 bp, Zea Mays
caacaaggaccataaaaaagattatacggaagtaaaaggttattaatagtgccaacaatactaaaaggagaacgttatcctagatcatggttcagcacatgtattctatcatagttatcacaagctaggagcacatgcaaagatcgtgagttaactatatgtttggatgcaattaagaaatactaagaactgtatcctcctttgctttgggtgcattataattttgtgtcttgactggatgccaccaatccagtctaattgttgggctgttagcatcgcttcaatgttaggtatggtctgagtactaaatgctagtgagtaaccttaatttatatctacaggatgtagctcttcccaagagcaaatacgaagaggatgtattcattaataaccacacgagtgtgtggggttcatggtggaaagatcatcaatggggctacaagtgctgcaagcagactatcaagaatagttactgcacaggcttggctggaatagaagctgccgaggcctcagcagatctaatgaaggccaatatggcccgcaaggaggctgcagaagatgaacctgtacagcatgaagagaagcgactagccacttggggaaccgacgtgcctcaggatcttgttcttaatgagaagaagctggaggaatctctaaagaaggagactgcaaggagaaaagaggagaaggatgaaagaaagaggaagtataacgtgaagtggaacgacgaggtgactgcagaagacatggaggcttaccgaatgaagaggattcaccatgacgatcctatgaaagattttctcaactgaaaagtgtggtagataactagatgttcatggcactgtatcacattggttgcaccgtgccttgcatcagtgttgtgttactgtagggtggctacgcctgtcctaaggatatggccagcagaccgtgcatgtggcagtgtgtgttgcacttaaattatgatatgggaggggtaaggctggagatagcttaaccagagtggtggtggtgctgtgatctagtggcagaatgtaagaaactggctacaccttttacaagctgcgtgttggagatgtatggggctgtttgcgttggattgaccgctgcagttgtaatctatagagacaaaaatattgtagaagcagttgtaatctatatgtaatctatagagacaaaaatattgtagaagcagttgtaatctatagaggcaaaaatattgtagaagctgtagaagtcgatacgaattaaagccagcctgtttctgatattataatccttgctttcatagttt

SEQ ID NO: 43019 - DNA, 2097 bp, Zea Mays
ctaacttggggattaggatttcttgactttcaagtcacgggaggatcaccggaagcagctcgagcttgaggaggcgcgcaaggcggggcttgcgcctgcggaggtcgatgaggatgggaacgagatcaatccccatatcccccagtacatgtcctcggccccatggtatcttaatgctgagaagccgagtttgaagcatcaacggaagtggaagtcagatccgaactacaccaagtcgtggtatgataggggtgcgaagcttttccaggccaacaagtacaggaaaggtgcctgcgagaactgtggagccatgactcatgacaagaagtcttgcatggagcggcctcgaaatgtgggagctaagtggacaaatgttaacatagcacctgatgagaaagttgaatcatttgaactggactatgatgggaagcgtgatcgctggaatggttatgacgcttcaacctacactcgtgttatcgctgactatgaagctagagaagaggccaggaaaaagtatctgaaagagcagcagctgaagaaacttgaggagaaggataccgagaaggatgatgagaatgcgggtagtgaagacgaagaagatgacctgaggatagatgaggccaaagttgatgagagtgcccagatggactttgctaaggtagagaagcgtgtgcgcacaacaggtggtggaagcactggtactgttaggaatttgcgtatcagagaagacacggcaaaatatcttttaaaccttgatgtcaactctgcatactatgatccaaaaacccgctccatgagggaagaccccttgccagatgcagatccaaatgataagttctatgtgggtgacaaccaaaatcgtcttagtggtcaagcgctggagttcaagcaactcaacatccatgcatgggaagcttttgaaaaagggcaggatatccatatgcaagcagccccatctcaagcagaactgctgtacaagagtttcaagatcaagaaagaaatgttgaagtctgaacataaggataaaattattgagaagtatgggaatgctgcgtcagaagatacaattcctcgggagctgcttcttgggcaaagtgagagagagattgagtatgaccgtaccggtcgaataattaaaggacaggatgtagctcttcccaagagcaaatacgaagaggatgtattcattaataaccacacgagtgtgtggggttcatggtggaaagatcatcaatggggctacaagtgctgcaagcagactatcaagaatagttactgcacaggcttggctggaatagaagctgccgaggcctcagcagatctaatgaaggccaatatggcccgcaaggaggctgcagaagatgaacctgtacagcatgaagagaagcgactagccacttggggaaccgacgtgcctcaggatcttgttcttaatgagaagaagctggaggaatctctaaagaaggagactgcaaggagaaaagaggagaaggatgaaagaaagaggaagtataacgtgaagtggaacgacgaggtgactgcagaagacatggaggcttaccgaatgaagaggattcaccatgacgatcctatgaaagattttctcaactgaaaagtgtggtagataactagatgttcatggcactgtatcacattggttgcaccgtgccttgcatcagtgttgtgttactgtagggtggctacgcctgtcctaaggatatggccagcagaccgtgcatgtggcagtgtgtgttgcacttaaattatgatatgggaggggtaaggctggagatagcttaaccagagtggtggtggtgctgtgatctagtggcagaatgtaagaaactggctacaccttttacaagctgcgtgttggagatgtatggggctgtttgcgttggattgaccgctgcagttgtaatctatagagacaaaaatattgtagaagcagttgtaatctatatgtaatctatagagacaaaaatattgtagaagcagttgtaatctatagaggcaaaaatattgtagaagctgtagaagtcgatacgaattaaagccagcctgtttctgatattataatccttgctttcatagttt

SEQ ID NO: 43020 - DNA, 2249 bp, Zea Mays
aaagatgagaaaccggccataggcccaaccgtttagttatcaacattatcttccctgtttcattatttcgccgccgttcgcagtcgaaccgccgcgcggccgtcgagttgaagaggcgaggcaaaggcaaggagagcggcaaggagaggaaaggacgccatggcgaccgcttcagtgactttcaagtcacgggaggatcaccggaagcagctcgagcttgaggaggcgcgcaaggcggggcttgcgcctgcggaggtcgatgaggatgggaacgagatcaatccccatatcccccagtacatgtcctcggccccatggtatcttaatgctgagaagccgagtttgaagcatcaacggaagtggaagtcagatccgaactacaccaagtcgtggtatgataggggtgcgaagcttttccaggccaacaagtacaggaaaggtgcctgcgagaactgtggagccatgactcatgacaagaagtcttgcatggagcggcctcgaaatgtgggagctaagtggacaaatgttaacatagcacctgatgagaaagttgaatcatttgaactggactatgatgggaagcgtgatcgctggaatggttatgacgcttcaacctacactcgtgttatcgctgactatgaagctagagaagaggccaggaaaaagtatctgaaagagcagcagctgaagaaacttgaggagaaggataccgagaaggatgatgagaatgcgggtagtgaagacgaagaagatgacctgaggatagatgaggccaaagttgatgagagtgcccagatggactttgctaaggtagagaagcgtgtgcgcacaacaggtggtggaagcactggtactgttaggaatttgcgtatcagagaagacacggcaaaatatcttttaaaccttgatgtcaactctgcatactatgatccaaaaacccgctccatgagggaagaccccttgccagatgcagatccaaatgataagttctatgtgggtgacaaccaaaatcgtcttagtggtcaagcgctggagttcaagcaactcaacatccatgcatgggaagcttttgaaaaagggcaggatatccatatgcaagcagccccatctcaagcagaactgctgtacaagagtttcaagatcaagaaagaaatgttgaagtctgaacataaggataaaattattgagaagtatgggaatgctgcgtcagaagatacaattcctcgggagctgcttcttgggcaaagtgagagagagattgagtatgaccgtaccggtcgaataattaaaggacaggatgtagctcttcccaagagcaaatacgaagaggatgtattcattaataaccacacgagtgtgtggggttcatggtggaaagatcatcaatggggctacaagtgctgcaagcagactatcaagaatagttactgcacaggcttggctggaatagaagctgccgaggcctcagcagatctaatgaaggccaatatggcccgcaaggaggctgcagaagatgaacctgtacagcatgaagagaagcgactagccacttggggaaccgacgtgcctcaggatcttgttcttaatgagaagaagctggaggaatctctaaagaaggagactgcaaggagaaaagaggagaaggatgaaagaaagaggaagtataacgtgaagtggaacgacgaggtgactgcagaagacatggaggcttaccgaatgaagaggattcaccatgacgatcctatgaaagattttctcaactgaaaagtgtggtagataactagatgttcatggcactgtatcacattggttgcaccgtgccttgcatcagtgttgtgttactgtagggtggctacgcctgtcctaaggatatggccagcagaccgtgcatgtggcagtgtgtgttgcacttaaattatgatatgggaggggtaaggctggagatagcttaaccagagtggtggtggtgctgtgatctagtggcagaatgtaagaaactggctacaccttttacaagctgcgtgttggagatgtatggggctgtttgcgttggattgaccgctgcagttgtaatctatagagacaaaaatattgtagaagcagttgtaatctatatgtaatctatagagacaaaaatattgtagaagcagttgtaatctatagaggcaaaaatattgtagaagctgtagaagtcgatacgaattaaagccagcctgtttctgatattataatccttgctttcatagttt

SEQ ID NO: 43021 - DNA, 312 bp, Zea Mays
cctcgattcgaggggcggggcacctcgagcggacgctccgcggcgaggtgatcgagcgaactcaccgagcaccaccagcgccgcacccccaacacaccacccggcgggcggcgccgccgcgagatctcgtggccttccacaggcgccggcgcctccgtccgcggcacgaaccccctagggctttcttcctcactactcgcgctgcgcggaggcgatcaggcggaggcggcgatcaggcgaggcggctggagactaagggtttctctctcctctgcccctctcttatctctcccctcgcggtcggctcggtaa

SEQ ID NO: 43022 - DNA, 431 bp, Zea Mays
catacatgacaagctacataccaaaatttctgtgccaaaacaatactactacgcaacaggatcccatagcaatacgagaaatgtgcaacgtctcataagaacaggcactgcataaattgaaggaaagaatgatttccatcgtctaactagctaacttttgtacagtttccgatattacattcacgacacggaaatggctctaaaactacccctcaaaaacggctggcaccagctcaagagccatcaccatcactccttgtgccttctccccactaccccatctcttctcccatttcatccgaatttatggcctcatcatatatatcactccttgtgccttctcctcccttttcatccgcttttatggcctcatcatatatgcagtaaactcgccattccattttagggcttattcagttgctacctctgtt

SEQ ID NO: 43023 - DNA, 857 bp, Zea Mays
gagggtttgatgacaactgttcatgccatcactgaaaactgttgacggaccctcagccaaggactggagaggtggcagggctgccagctttaacatcattcctagcagcaccggtgctgccaaggctgttggtaaagttcttcctgatctgaatggcaagctcactggtatgtccttccgtgttcctactgtggatgtctcggttgttgacctcaccgtcagaatcgagaagggggcctcctatgaggatatcaagaaagctattaaggctgcttccgagggtccactcaagggtatcatgggttatgcggaggaggatctggtttctaccgacttccttggtgacagcaggtcgagcatcttcgacgccaaggccgggatcgctctgaacgaccacttcgtcaagctcgtctcgtggtacgacaacgagtggggctacagcaaccgcgtcgtcgacctgatccgccacatgttcaagacccagtagaggggttttttccccctgcttctcatggatggttgctgcttgtgtatgccgagaataaatgtggatggcgcgtgcctctgggtcgccaggttcatgctgagtctggacatgttttgcacttttgcttcccttcctgctaccatctgtgacagaaccgctcgctaatatgggacctgagattagctttttgctgcttgtggtgaggttgcagttttgttctgtgtttctgtgttgttagcaatcctatgattcaggtgttcgaatgaagaagataggctgctgcagaggaattgggtgttagctctttcttacccagttggaactgtaaatagtaattaatgaagaaagtagatgtcgcgtacctggtagc

SEQ ID NO: 43024 - DNA, 1779 bp, Zea Mays
agggagctgggctagtctggtgctccggttgccaaatctacgacgaccgagacgttatcgggaacgtgaagcccaggacggacggggcgggcaggagcggccacatctcatctcatccttccaccgcggccggcagcacatcacgggcctgccgtgccgccaccgtggcgttttattgtctgttcgaaaccaccactgcctgcgccttcttctggagaaaggcaggcggaggcggacaggccacccccgcacctcattccacaattatttgcgcccgtcccatggtttatattcattattattattaaaatcacgctttctgtagcatccgctgcctccgcctctcgagtctcgtccacccgtcatcctcctagctcctctactcgccagtcgccatgggcaagattaagatcggaatcaacggcttcggaaggatcggcaggctcgtggccagggtcgccctccagagcgaggatgtcgagctcgtcgccgtcaacgaccccttcatcaccacggactacatgacctacatgttcaagtacgacaccgtccacggccactggaagcacagcgacatcacactcaaggactccaagacccttctcttcggtgacaagccggtcaccgtctttggcatcaggaaccctgaggaaatcccgtggggtgaggctggcgctgagtatgtcgtggagtccaccggcgtcttcactgacaaggacaaggctgctgcacatctcaagggtggtgccaagaaggttgttatctctgccccaagcaaagacgcacccatgtttgttgttggtgtcaatgaggacaagtacacctcggatgttaacattgtttccaatgctagctgcaccacaaactgccttgctccccttgctaaggtcattcatgacaacttcggcattgttgagggtttgatgacaactgttcatgccatcactgccacccagaaaactgttgacggaccctcagccaaggactggagaggtggcagggctgccagctttaacatcattcctagcagcaccggtgctgccaaggctgttggtaaagttcttcctgatctgaatggcaagctcactggtatgtccttccgtgttcctactgtggatgtctcggttgttgacctcaccgtcagaatcgagaagggggcctcctatgaggatatcaagaaagctattaaggctgcttccgagggtccactcaagggtatcatgggttatgcggaggaggatctggtttctaccgacttccttggtgacagcaggtcgagcatcttcgacgccaaggccgggatcgctctgaacgaccacttcgtcaagctcgtctcgtggtacgacaacgagtggggctacagcaaccgcgtcgtcgacctgatccgccacatgttcaagacccagtagaggggttttttccccctgcttctcatggatggttgctgcttgtgtatgccgagaataaatgtggatggcgcgtgcctctgggtcgccaggttcatgctgagtctggacatgttttgcacttttgcttcccttcctgctaccatctgtgacagaaccgctcgctaatatgggacctgagattagctttttgctgcttgtggtgaggttgcagttttgttctgtgtttctgtgttgttagcaatcctatgattcaggtgttcgaatgaagaagataggctgctgcagaggaattgggtgttagctctttcttacccagttggaactgtaaatagtaattaatgaagaaagtagatgtcgcgtacctggtagc

SEQ ID NO: 43025 - DNA, 2029 bp, Zea Mays
ctttgattgatacgtttacacaattaacagatcgttgttgtagacatcatgtagaggtaatagaattaattgaactgcagtattaaaatgtcttggtctagaaatatatagcatgggcagcttatatgatatattacaacggttttgtatataagcatatgagtgtatattggaaacttaaatatctcttctgtggcccctatgcttcaacgacgaatgcacttttagacatcacgtcgatatgcaaaagaagggaataacattgaagcatggtattggttgagcgtgtagcattatttgggcatctgtatacaactgctggacgatgatgatgcatccacagagatcaatgattaatgcacttacatcacatattgtattgcagcctggcaacatccttttgaaaacgcaaccaaatcctcctttgccaagtttttcagagttaccacgaaacttgcatggtcactcaccgttcagcattgtaaaatttgcttgtgtctcaacaaaagaatcagagaaataacaataagggttgtcacatgaatcatccatccaagaaacacttttttctagaaagaaaatagaggtacagttctagaacttgactgttgtctggttgccatatgtacatacatatggatgatatttagatcagagtccagaactattgttctgcagctccgaaaaccatagtaggcaacctgcactaaaaagcaaaggcagtacaggtacaatccctttagcaagcagattcacattcatttatgtttgtaacttccaagttccgatgtgaaagcttccaagggatatctatggatgctatattggataaaatgtcacttctccattttcacattttagaggaccatttatcaaacaatcagcaacaatccattcatatgtcgatagtgaattaaaaccaactgggcatagacaagggcctaacaatgagcaaaggctgtaagatccacaatatgaataaaaaatcacacgaacttttctggggtagacaacaaaatagaaccacaacccccttgcttaccgaatctaatcgtatgttaatttgaagtgttaatttgaagcaaggaaacacaagactgatcaaggagggaagtaataatgcaaaggaagatgagcatacgtacctcaaactgtctgtgcacaccattttaggggatactcttcttgtcaatccccaacgaagtatgtgcttagtccctcctaaccaaattggtataagaaaaagatctactggtcagtcaaaagcgtgaatcgcaatgctctactgtgcaagtccaacaaggttgctcgcctgccaggcatatggattctatcatgacacgttatgcagtcaacatgatgctgatctgttgggcatctatctttcagtgaccttggtaaaccaatttttgtctccacaaatgaacgtaactgatgtgaagagtccgacaatacccgttgcctcgtcaatgccaacatgcttctcagttctcatggaaccaagaggctttgatagacaacgggctcttggggtgaggcatttcgccgaacgccttcagctcgtccagcatgcccggtgcacctgatgtgagccacgcagcacacacttgcgtctaggcatctgaagcatctcgctcaccttgtcttgtcctcccctgcttgcttttctatgtcatgcctaatcttggagcagctagtctgtgacggaaattgttacacataacacaaaaataataacacaaaaataataggaggacagacaaatggcaagaagaagaaaggcaccttgagggctatccgtaggcggtgaaagggaggaggtaggcgaaggggaagggaatggagaagagctatcaatgagattgacgtactcgcggtggacactcagtttagggtccgtgcctgatgttgacgagatttcagacagttaggttgaagacgatcttgttgacctcgtcgaggaggcagacggcggcgacgctgggctggccacagtctagcgaggacaaggcagtcgatgtgcgccaag

SEQ ID NO: 43026 - DNA, 1025 bp, Zea Mays
cttctacaaacatcccgtcccttcgccggcgggcacgaccatcactccaccatgtccgccgccacctcggcggcagcggccgtctcctcgtcgcgcccgtatcccctcctccaacccgcctccagacccgccctcgtttccttccctcggcgacagcttccatccacctcggttgccctgtccgcgtcctcccagctgtcgtcgcggggctcgccgctggcgccggcggccaacccgaagtaccacaacgcgaaggtggacgcgggagacgaggacgcggacggtgaggagctcctgcggcggttccgttggcaggtgtcccgcgcgggtgtcatggaggagatcaggcggcggcgcaggcacgaggacgcccgggacaagcgcaagcgcaaggcgcggtcggcgtcgctgcggtaccgccggaggcgcttcaagggcccatatccttccatcgatgaccaggggctcaaggagcaggacgaggagaacgacaactgggagctccctgcaggagagttgcctccttacattacaggcaggtgaaggtggtccgacaaattgaagcgtggttttgtctgacggagaatttcggcggctaaatcttcagttctttctgttagtcgagtaggtgttgccaaattgttcttgtggatggattgtacaatggctggtgtgttctcacgagaattctgatgctttctggtggggagaaaatgatttctgatgcagatgcagttgacacttttaaatttataatgaataatttttcgccttatatgcatccccactctgtgatgtctatgtacccataagacagccacaccctcttcaggtttgctttaacttcgaaactgctcaattatgttgcaaaattcaggtttgaaaacgttatacaatgatgtatcattgaacacgtgccagaagtgaccagaaacgacatggagatctcaggcgaaaggagaagagctggacaggctaataaagctacaaaatgagggattattgaacatgtgccagaattgtcc

SEQ ID NO: 43027 - DNA, 176 bp, Zea Mays
tctatggatcgctctcctgattagtgaacttgatcgccatgcgcttcaagggcccatatccttccatcgatgaccaggggctcaaggagcaggacgaggagaacgacaactgggagctccctgcaggagagttgcctccttacattacaggcaggtttgaaaacgttatacaatga

SEQ ID NO: 43028 - DNA, 1471 bp, Zea Mays
cttctacaaacatcccgtcccttcgccggcgggcacgaccatcactccaccatgtccgccgccacctcggcggcagcggccgtctcctcgtcgcgcccgtatcccctcctccaacccgcctccagacccgccctcgtttccttccctcggcgacagcttccatccacctcggttgccctgtccgcgtcctcccagctgtcgtcgcggggctcgccgctggcgccggcggccaacccgaagtaccacaacgcgaaggtggacgcgggagacgaggacgcggacggtgaggagctcctgcggcggttccgttggcaggtgtcccgcgcgggtgtcatggaggagatcaggcggcggcgcaggcacgaggacgcccgggacaagcgcaagcgcaaggcgcggtcggcgtcgctgcggtaccgccggaggtgcgtcccccactgctctatggatcgctctcctgattagtgaacttgatcgccatgtacgtatagttgcttggattgttgctctgctgttccttgtctccgaatttgaggtgctataaatgacatgattgctgatttatagccgtgttgcctgattgtatttgtagggcaaattctaagtgttggcggctcatttgaccttcatgtgcaagttgtgctatattaacttattaaggtgatatgtggtcatatatgtgaccacagttgtttgattgccaaattcatcagcccataattctttggcaatgaaccaaccgaggtctcgttttgatgccctagtatctatctcgattcaaatccacttgtattcaagtggattcggatgtaataaactagtgtaagttccaccccaatacgcccaccacatatagactgaggtgagcaggccctggtagtcatgatcctgaaggtgggacagctagattatgtcactgcagatcatttctgattggaaatagctgcacatgtgaaatggtcctatttttgtctttggtatttaatctggtttgccagaccatcatcataatactgtgaccatgtttataactctttgatcgcttttttttttaaaaaaaaagaggggtgctactctttgatcatgaatacatgagtgtgcatctctggcacgtccaggtgcaaggacatgcctaatcaagaacccatcgggcggaatgatcatctagctttgcactgaactatgtggaacctatcatcaaggacatctcccctttctggggaggagagaccattgtttttggcaattttcaaagctcctcgagagttcagtagcgctgtagcaacaatattgagaactcctgactgactcctgagcccgaccgttcctttgcaggcgcttcaagggcccatatccttccatcgatgaccaggggctcaaggagcaggacgaggagaacgacaactgggagctccctgcaggagagttgcctccttacattacaggcaggtttgaaaacgttatacaatga

SEQ ID NO: 43029 - DNA, 1479 bp, Zea Mays
atgggggtgcaccttgcattgctaggcatcaaatattgcctatgccagtttggactgcatgcattcggtgtggcggttgctgagctacagttctgccatcctgaggttgtcccaacgtcaaagaacttctggaagccactatgtgcatctctgcagaatctgctgaggtgcagcgtcgacatccgaatcaacctatctcctatctccggcaacggggcgggatccaaggactcgtccgtcagccttgtcatggagtcaagagaagaagaccgcgaggcacaggacccagccacctcaaactgcagaaccgtggtgtcatccgggagagactgcccttccccacccttggggcaggccaaggagagatcgtcccacatcctggggtgcctccatggcggcgcgggtggcgacgccgtggacaccgagccgaggatcctgagctaccagaagatctccgttgtccctgcagcatccaccccaggaaacactcccctgaaagccgctgccgccgctgccggagacgagtcaaaggttgatgatggcggggttcgtcctggctgctgctcgcacattttaccctgtggtgcttgcgctccccgtcagaagccccggacgcgggagaaacgccgtgccaagctgttcagctgctgcttctgcaagatcggaccggactgcaaggcgaagggggaagcagggtagtttgcagcagattagggacagagcaatcctctgctgttagttcaagctggagatgggggcagtagttcagactgtcaagtgtgaccacctgtttactgtagctcgcctccgatggggtggtcaaagacacagttacatgtgcatcggtcgctaacataaaggttattttgtagtcggatgcttaaattttcttggtagcataccatatttataattgtatgtttgatggcgcgcgttagttttaccgaaagcttaaatggacaggtctcgctatttaaggataatttgagaacttaaatcccctctgagattattagaggggttgaggagaattcatatctcaatcccggagaagatttaagtttttaaactagcccttagaacgtgtttatgttttcaattccggaggagatttaagtttttaaactagcccttagaacgtgtttatgtttgtgtttgcttcggggataggaagataagataccattttgtcttgttgataggtctagagacaatggggttggtcgaatggaaccatcaggagatgagagaatatctttcaagatgacaattttaggccttgtttgtttgtgtcggattgcacctggaatcgttccagctaatcaaagtttatataaattagagaagcaattcggttaggaatcgttctgacccaccaatctggcacaaacgaacaaggccttaagcgtccccaaactagagagaacctttcaagatggtgatcttaaacgtcccttcctaatgcaatgtagtgtatgg

SEQ ID NO: 43030 - DNA, 3759 bp, Zea Mays
ggatcaacgcgggtgtgccacgccgcggcccgcgggcacgccgcacgaggtttctcccaccgtcccgcccgccaggcgccagccagctcgagcgccgcacgccatcgtttccgtttccacccccaggccgtgccagggagtcgagtcgagtcgagtcgggcgcggcgcggcgcgggcgctgggacggcgacgagacgagacaccgcccgtgaggaggagtgcaggaccaggcagcgccagcggctccgggctcggctcttgcgtgcgccgctcgtcgtgaaggattcgtcggtggaggtagcaggagtccgcagcaacaagatgattgatggcaggcggcattcggtggacatccccgtctcgagggccctgttggccatcatgcggtccagatccctgagggacccggacaccaactcactggccaagttctccgccaagaaaaccatctgggagggcagctccctcgacgaggacgaaatggagggggcgaacaacaagaatgcctacggcaggcacagcttcagctacaacgcgtacgatcacctccagcggaggagggaggagttcggtgacggcctcaggtctggccggctcgccgactcgcccatcaacatcatcaaggccaatgccatggccaaggcggcgctccacaaccagagctgttgctcggccatttccgggatgtcgaggagcacaaaggacagggcctttggcttggtgggtgatggggaggagattggccggagggaggccagcacgttccaggagagctccaggagtttgcttcagaagtaccggcccagatctttctccgagcttgttgggcatggtgttattgctcagtctctttcgggtgccgttttgaaaggaaagcttgctcctatctacctcttccatggtccgcacggcgtgggcaagacgtccacggctagaacgtttgcagcagcgctgaattgccgttccccaggtgagaaccagccatgtggacgctgtgacgagtgcatgcccatattctcgggaagcagcagcagtgtggtagagattgatgcttccaaacttgattgcaagtctagggtcgcggccttgctcaggaatgcctgtgaagtccttgcctcttcacacttcaaggttctgatcgttgatgattgccagcacatggacaaggagggatggtactctatctacaatagccttgaagggattcctgagagcacaatctttgttatgatcacatctgatattgaaaagctaccaagcaattccatagggtggtgccagagctacaggttttgcaagatagatgacgcagagattgcccgcaggttgatcaagatttgtacaaaagaagggatggaattcgaagcggaggcattggaccttcttgctcgcaaggctaacggttccattcgagatgcaattcaaatgcttgaccaactaactctacttggaaagagaatcagcaaatcagtgacacatgagctgataggtgatgtgtcagacgatgaattgcttgatcttctcaatctggccatgtcatcagatgctgctacaattgtgaggagggccagggagcttttgagctcaaaagtcgaccctttgcagctattagctcagcttgcgaatcatatcatggatattttagctgggaagcacccgtcagattcttcagaagttagaagagttaccggcaaacatacatgtatgctttcttccttcttaatcttgaaaattatgcatctacattttaaatagccgcaagtgttttgtgcagttgttgacaagctttgctgaagtataagatagagtatcatttctactgaatactcttgctgaacataagattatgtttttttatttatgagttagccacataatactgtttaataccccatccattctataatacaacgtttacagttccgtctctctctttctatcaattttgcagctgctgatgtggatgtacacaaacttaggaatgcattggaaatactctctgaaactgaaaagcaattgaagaccacaaaaaaccagtctacatggctcactgctgcactgttacagtttaatatgagagaaccctactgtctagatgatactgcggtttcaagcatgtttactgaaagtcatacagatgatgggactgcagcactgaaagatgaaagcttagacacgagttcccatctttgttcccagaacaaaatcagttctctagacatgaatctgggagatccagatgtactggagacgatatggatgaaagctcttgaaaactgctcgtcccctccacttcaaaatctactactcaaggatggaaagctgtcatctctgtacacaacccaaggtgtggcggttgctgagctacagttctgccatcctgaggttgtcccaacgtcaaagaacttctggaagccactatgtgcatctctgcagaatctgctgaggtgcagcgtcgacatccgaatcaacctatctcctatctccggcaacggggcgggatccaaggactcgtccgtcagccttgtcatggagtcaagagaagaagaccgcgaggcacaggacccagccacctcaaactgcagaaccgtggtgtcatccgggagagactgcccttccccacccttggggcaggccaaggagagatcgtcccacatcctggggtgcctccatggcggcgcgggtggcgacgccgtggacaccgagccgaggatcctgagctaccagaagatctccgttgtccctgcagcatccaccccaggaaacactcccctgaaagccgctgccgccgctgccggagacgagtcaaaggttgatgatggcggggttcgtcctggctgctgctcgcacattttaccctgtggtgcttgcgctccccgtcagaagccccggacgcgggagaaacgccgtgccaagctgttcagctgctgcttctgcaagatcggaccggactgcaaggcgaagggggaagcagggtagtttgcagcagattagggacagagcaatcctctgctgttagttcaagctggagatgggggcagtagttcagactgtcaagtgtgaccacctgtttactgtagctcgcctccgatggggtggtcaaagacacagttacatgtgcatcggtcgctaacataaaggttattttgtagtcggatgcttaaattttcttggtagcataccatatttataattgtatgtttgatggcgcgcgttagttttaccgaaagcttaaatggacaggtctcgctatttaaggataatttgagaacttaaatcccctctgagattattagaggggttgaggagaattcatatctcaatcccggagaagatttaagtttttaaactagcccttagaacgtgtttatgttttcaattccggaggagatttaagtttttaaactagcccttagaacgtgtttatgtttgtgtttgcttcggggataggaagataagataccattttgtcttgttgataggtctagagacaatggggttggtcgaatggaaccatcaggagatgagagaatatctttcaagatgacaattttaggccttgtttgtttgtgtcggattgcacctggaatcgttccagctaatcaaagtttatataaattagagaagcaattcggttaggaatcgttctgacccaccaatctggcacaaacgaacaaggccttaagcgtccccaaactagagagaacctttcaagatggtgatcttaaacgtcccttcctaatgcaatgtagtgtatgg

SEQ ID NO: 43031 - DNA, 3513 bp, Zea Mays
cacggatcaacgcgggtgtgccacgccgcggcccgcgggcacgccgcacgaggtttctcccaccgtcccgcccgccaggcgccagccagctcgagcgccgcacgccatcgtttccgtttccacccccaggccgtgccagggagtcgagtcgagtcgagtcgggcgcggcgcggcgcgggcgctgggacggcgacgagacgagacaccgcccgtgaggaggagtgcaggaccaggcagcgccagcggctccgggctcggctcttgcgtgcgccgctcgtcgtgaaggattcgtcggtggaggtagcaggagtccgcagcaacaagatgattgatggcaggcggcattcggtggacatccccgtctcgagggccctgttggccatcatgcggtccagatccctgagggacccggacaccaactcactggccaagttctccgccaagaaaaccatctgggagggcagctccctcgacgaggacgaaatggagggggcgaacaacaagaatgcctacggcaggcacagcttcagctacaacgcgtacgatcacctccagcggaggagggaggagttcggtgacggcctcaggtctggccggctcgccgactcgcccatcaacatcatcaaggccaatgccatggccaaggcggcgctccacaaccagagctgttgctcggccatttccgggatgtcgaggagcacaaaggacagggcctttggcttggtgggtgatggggaggagattggccggagggaggccagcacgttccaggagagctccaggagtttgcttcagaagtaccggcccagatctttctccgagcttgttgggcatggtgttattgctcagtctctttcgggtgccgttttgaaaggaaagcttgctcctatctacctcttccatggtccgcacggcgtgggcaagacgtccacggctagaacgtttgcagcagcgctgaattgccgttccccaggtgagaaccagccatgtggacgctgtgacgagtgcatgcccatattctcgggaagcagcagcagtgtggtagagattgatgcttccaaacttgattgcaagtctagggtcgcggccttgctcaggaatgcctgtgaagtccttgcctcttcacacttcaaggttctgatcgttgatgattgccagcacatggacaaggagggatggtactctatctacaatagccttgaagggattcctgagagcacaatctttgttatgatcacatctgatattgaaaagctaccaagcaattccatagggtggtgccagagctacaggttttgcaagatagatgacgcagagattgcccgcaggttgatcaagatttgtacaaaagaagggatggaattcgaagcggaggcattggaccttcttgctcgcaaggctaacggttccattcgagatgcaattcaaatgcttgaccaactaactctacttggaaagagaatcagcaaatcagtgacacatgagctgataggtgatgtgtcagacgatgaattgcttgatcttctcaatctggccatgtcatcagatgctgctacaattgtgaggagggccagggagcttttgagctcaaaagtcgaccctttgcagctattagctcagcttgcgaatcatatcatggatattttagctgggaagcacccgtcagattcttcagaagttagaagagttaccggcaaacatacatctgctgatgtggatgtacacaaacttaggaatgcattggaaatactctctgaaactgaaaagcaattgaagaccacaaaaaaccagtctacatggctcactgctgcactgttacagtttaatatgagagaaccctactgtctagatgatactgcggtttcaagcatgtttactgaaagtcatacagatgatgggactgcagcactgaaagatgaaagcttagacacgagttcccatctttgttcccagaacaaaatcagttctctagacatgaatctgggagatccagatgtactggagacgatatggatgaaagctcttgaaaactgctcgtcccctccacttcaaaatctactactcaaggatggaaagctgtcatctctgtacacaacccaaggtgtggcggttgctgagctacagttctgccatcctgaggttgtcccaacgtcaaagaacttctggaagccactatgtgcatctctgcagaatctgctgaggtgcagcgtcgacatccgaatcaacctatctcctatctccggcaacggggcgggatccaaggactcgtccgtcagccttgtcatggagtcaagagaagaagaccgcgaggcacaggacccagccacctcaaactgcagaaccgtggtgtcatccgggagagactgcccttccccacccttggggcaggccaaggagagatcgtcccacatcctggggtgcctccatggcggcgcgggtggcgacgccgtggacaccgagccgaggatcctgagctaccagaagatctccgttgtccctgcagcatccaccccaggaaacactcccctgaaagccgctgccgccgctgccggagacgagtcaaaggttgatgatggcggggttcgtcctggctgctgctcgcacattttaccctgtggtgcttgcgctccccgtcagaagccccggacgcgggagaaacgccgtgccaagctgttcagctgctgcttctgcaagatcggaccggactgcaaggcgaagggggaagcagggtagtttgcagcagattagggacagagcaatcctctgctgttagttcaagctggagatgggggcagtagttcagactgtcaagtgtgaccacctgtttactgtagctcgcctccgatggggtggtcaaagacacagttacatgtgcatcggtcgctaacataaaggttattttgtagtcggatgcttaaattttcttggtagcataccatatttataattgtatgtttgatggcgcgcgttagttttaccgaaagcttaaatggacaggtctcgctatttaaggataatttgagaacttaaatcccctctgagattattagaggggttgaggagaattcatatctcaatcccggagaagatttaagtttttaaactagcccttagaacgtgtttatgttttcaattccggaggagatttaagtttttaaactagcccttagaacgtgtttatgtttgtgtttgcttcggggataggaagataagataccattttgtcttgttgataggtctagagacaatggggttggtcgaatggaaccatcaggagatgagagaatatctttcaagatgacaattttaggccttgtttgtttgtgtcggattgcacctggaatcgttccagctaatcaaagtttatataaattagagaagcaattcggttaggaatcgttctgacccaccaatctggcacaaacgaacaaggccttaagcgtccccaaactagagagaacctttcaagatggtgatcttaaacgtcccttcctaatgcaatgtagtgtatgg

SEQ ID NO: 43032 - DNA, 1327 bp, Zea Mays
cgaactgctgttgtgtgtgtgtgtgtgttttttttttaaaaaaacatgttgaccgtgctaacatgttcacagtgacatggcatcaatcggaagtgcaaaagtctgggatctcacatgagtcctaaacttttatttcctttcagtaccactagctactgtacgctcttctcatgcaaatgcgcgcaaggacaactgatggggcacggcaaaacacgcatcactccaaagtacaaatgggtcgttcgctttggactagacgcgacttgtgatctagctagcttaactagaatgtcatatgctagggtctccctgtccctactatgctatatgatctatggtcaccacaagctataccagcagcagtggatgatgatgcgatcgtttcaccttcttccttgtctgtttgtttctctgctcatgggccgggtcggcatgggcccgcccgataaaaataaaaaaaagtggcgcgtttgtttcagcagcccagtccagccagtggagttgaccaacggtgattagtgagcaaaagatggaatcataatcaccctacgactgctaaccaacggtgatcagtgagcatgtgttaacactataatactagctctacaagacggctagggagcagcgtggtgtatttgaatttaaatttcgaggtaaaaattaaaaaaaaagaacaggtcgccggacgccaactagcgttggtctggtcccccaccgccggttactgctgtcggttcccaccggatcctcgttaaaagaagcgtgataaacaatggcagagattagaagggaaggtcccggacatggaacggctatctatccatccatctgtgcacgagaaacaatttttttaagagaaaagcactatcagcacaaaagcaaaggcggccacactttgcttggaggttggagcgatgctaggagtgggatgggagtaggaggagtagtagtattaacctaaaccaccgccttgactcttgtgacaggggcaggagatgattggctgcaaccgaaaagggggcacaggataccatcgctactgatttcttaatcattcttcactcatcaatcatcatcagcggcagcagattgtcaggaagaaaacaagtactaactaccaataataatgatagagagaaataacagacgatttccatagtgttttcctccccgtcccaaaattaaattctgatttgtgcttaagatctgttaggttcaccttactatactttatctaactctttctgtctaaagttttttatttaattcgaacaactaactttagacaaagtatagcgcagtcaccagccgcgagccaaacaaaacc

SEQ ID NO: 43033 - DNA, 936 bp, Zea Mays
aaaaaagcaggcgtacttgataagggtcccaccatttcctaagtatacatccatatcagctcaaaggagtatgagaaatcatgcccagatttatgctgagctatctacaagctatagcaatggtagcaaaactgatttagagacattcatccaatcaaattcagcagcatttcaatctgacaacaaccttgggctggtgaagcaagtgctctcctcgatgtacaaacggaacatccaaaggctgacccagacttacttgactctttcacttgaagatattgctaggtctgttcaacttgaaacaccaagggatgctgaaatgcatgtacttcgcatgatcgaagacggagagatccatgcatccataaaccaaaaggatggaatggtcagctttcatgaagatcctgaacaatataaaagtgttgagatggtggagcatattgacacctctatccatagattgacggcattgtccaagaagttggcttcaattgatcagaacatgtcatgtgatactgcatatttgatgacgggaagggatcgtggaagattcgactacgacgacttcgactctgttccacacaagtatttttgagttgatctgagccttatgtgattctgaagtacgatcgtcaacgtagcagccattccctaaagttataattagtttgatcggccaatggcttttgaaaattgaaatgctgtaaattctggtttaaagaatgggtctgtgaaggcagagacttaagacaatagggctgttcactttggatttaagtcaactattttgtttgactactgcagctataatatataaagacaaaaacattgtataagtagtagaagctgatacggattaaagccaaccgaatatgccgaataatcggtaacccaccataaggttatcatcttcaatgatatctacatcctcttgta

SEQ ID NO: 43034 - DNA, 1238 bp, Zea Mays
caatggtgtcttctcggttgtggtttgcctctatatataacgaaatgaactgatgaagtggcatcgctgacctgctagacagcaagaatcgaataagacaatgaggtgtgtgctgttgcaaacaagccagctatctccaattctccatgacaagctaatgccttttcttttagtttattccacttgagaggcattttgagctgcattggagcttattatccacgtatcatgtctcaaacagaggaaacaaactcatctgcatgagtgtgtactttaatgttagatccagattgcttgataggtgagtaagctccgcatgattcttcatgccggagtgcattttttggttgatgcatgctagtagcaggagcacttgacttcagagttcatggttctttatgtgggattgcattgctggcatgttccgcctgcctactatgattacagcatataggatctgaattttgcacttccaagatgatgtgcatgccatcaaatttattatgcattgagtctgactaaattgcaccatcatgtttcaagtattactaacaagaatctgcgttgaagcttacgctactactggctaccatcacgctctctggcatgctatcaggtgttgatacttgagagcaacatccagtttgcaaggatcttgtgcctgttattgagccacatcccatccggtcctctaaaaggcagatgctaatcataggtcatacttggatgatctatctacaagctaagaatgttcagaagagaaactctgctctggatcaatataaggaactatctggtggaacttgtcatcacaatttccctcgacaggagatgcaatgaggattccagcattgaggaggcaatctctttggtttgagacaacatcttgatcaccctgcaactctgttgatctgctgcagtggacttcttcctgtttttcctgaatcgtttttgtgccttcttggcaacacggatataggactagatcttggtttggacaatggaaatacttagcatacacaataatgagctaactactaagctagaaaacattggtagcaccccagggacatctttagttcaaatttctgaaattattaagaaagatgcttctacttcctgtcttcccgtgcaaccaagttctcgttgagaatattgttgtagaaacatgttcggatgaggttgcaaaggaaaatgagaaattaaggcaagaagtggatcgccttggaaaagctttg

SEQ ID NO: 43035 - DNA, 1577 bp, Zea Mays
aaaaaaggaagacaatcagaagaggagaaaccttcaatggtgtcttctcggttgtggtttgcctctatatataacgaaatgaactgatgaagtggcatcgctgacctgctagacagcaagaatcgaataagacaatgaggtgtgtgctgttgcaaacaagccagctatctccaattctccatgacaagctaatgccttttcttttagtttattccacttgagaggcattttgagctgcattggagcttattatccacgtatcatgtctcaaacagaggaaacaaactcatctgcatgagtgtgtactttaatgttagatccagattgcttgataggtgagtaagctccgcatgattcttcatgccggagtgcattttttggttgatgcatgctagtagcaggagcacttgacttcagagttcatggttctttatgtgggattgcattgctggcatgttccgcctgcctactatgattacagcatataggatctgaattttgcacttccaagatgatgtgcatgccatcaaatttattatgcattgagtctgactaaattgcaccatcatgtttcaagtattactaacaagaatctgcgttgaagcttacgctactactggctaccatcacgctctctggcatgctatcaggtgttgatacttgagagcaacatccagtttgcaaggatcttgtgcctgttattgagccacatcccatgtaaatattcaaaatggtcctctcatttgttgttttgatatacatacatgaatcactactataattgcttcatggtgcaaataatgattaacatcttcaaagtaatttacttgtttcatgatcaaacttcaaatgaagctcccaattttaggtgattattttacttggtaccatgtcaagttatgagaaatctggaagaaataaaatagttgaccgcatgaaatggataaaaataattttggtttatctaaactgactttctttctatactctcatatgtacatcaaaactgtttgcatgatcagccggtcctctaaaaggcagatgctaatcataggtcatacttggatgatctatctacaagctaagaatgttcagaagagaaactctgctctggatcaatataaggaactatctggtggaacttgtcatcacaatttccctcgacaggagatgcaatgaggattccagcattgaggaggcaatctctttggtttgagacaacatcttgatcaccctgcaactctgttgatctgctgcagtggacttcttcctgtttttcctgaatcgtttttgtgccttcttggcaacacggatataggactagatcttggtttggacaatggaaatacttagcatacacaataatgagctaactactaagctagaaaacattggtagcaccccagggacatctttagttcaaatttctgaaattattaagaaagatgcttctacttcctgtcttcccgtgcaaccaagttctcgttgagaatattgttgtagaaacatgttcggatgaggttgcaaaggaaaatgagaaattaaggcaagaagtggatcgccttggaaaagctttg

SEQ ID NO: 43036 - DNA, 1381 bp, Zea Mays
ctgtacgtctgtacgtgagcgccttgccgatctggtgattccactgccacgccctcactctatttctgtctccttaattgtttatactacatatttactacttttccacctttcagctatttcgtgtttgtatttctggatctgtgattaatgatctttctaattcaatatctatgtgcacaaactcaggctacataaataccacaccctgtaccctcccgttctccaatttcatatagaacaagttgttgcttgatattagcgtcccacttgaatgagtctctgtcaactttgtttgtctcttggtttctccgttataatgcttatatgctcccaagtcagttcatgtcaaccatgaagagattagaaaagctcccagccgccgaggtcctgcagcggggacaggtcgacaagaatgttataaatcttagattttgagtgatcccaacaatctcgctgcccccagtactcctgatttgattactcaaaatacgatatgctgttgggaaaacaagcatggtggtgtcgcttgctgttgctaaccatgatgaaaggtcatttcaaactatttgcttaacttcagcttccacttatagcctcaactgatagaggtatatgcatgttgcaaaaaaaacttctttttttgcaaaataactttgtaagatacatttgcttctagagtctgctggttaggcgcggtggcggccatccctatcagtcacgcaggtatatttgggagttgagacctccggtggttggctcgcaaataaaggccccccaaagagacgcaactaggaccaaccgcgaaggctccatgggacctttgctcgacctcgacgacaacagcaaagcctttcgagccaaaggctacatgcaaaagatgacgggacgggacaagcaaagggcctagaacgtgactaaagccactccgagggccttttgggaaaacttcaagggctatgtgatggagggcccttggaccaggatgcagtttagccttcgcctttgaggatctgatggccctgtaaccctggtaacggctcaactagggcccattcagtgaggctattgtaatgaagaatgactcttgagcccttgtgaggtatttatatactccctccgttcacatgaattattcgttttgggtttatcctaacactacaggaaaactgggaacaaacgccgaccttgtatacatattaaaaaaaggaactccagacagctgcacacggcctgctgctgtgcatgcagtggccgtactgcaatcacgcacgcatgcagccgattctgtgcatggtctgcctgccccctggtggtgagtgcagcagtgagcagtgactgagtcgcacttgtgttgtctcagtgattgcgcaaagaaaag

SEQ ID NO: 43037 - DNA, 1769 bp, Zea Mays
gtgccctgtacgtctgtacgtgagcgccttgccgatctggaggcttccaaaacgattctttcaaaacaattctggatacgtttgatcctcccccaaatatcactgtaatgtatgttatcatacatttatgctatgtatttcagttttcacctccacatgaatatcaatagtccctgtacatattggattgcgattatgcacttttatttactgtatataatattaatagacattctatattctgttacagagctgtatttttagataatggaaacatttccagccttcccttcaatagaagttagggccgagtacaaaagcatgacactaccatccacaaacagacacacgcaataggaaagccattagatcgcctattacatgataatgattgcaaaccaccaaccatccttacatgtgtttctgttttatgctgggctatctgtacatgtaggaatgatctaatctttgacaaaaaaaaaaccctctctcacttatttgcgagttcttttttgagttacctattggctaaggttttggagtaatctgcaaaggaaggatgaagataaggatttaataaaagcaagttgcaggtccttggagacagttgctatgcagatttttgcacacttaggttacatttttcttttgcgtatgattttgtttattttcatttcgaatatttaaaaaatatctatagtcattgtgcatattaaattgcgattatgcacctttatttaatatatacaatgttaattgacattgtatattctgttatagagttgtatagacctccttttttttcttttgcatatggttttgtttattttcattgcaaatatgtgaactttgtatacctattatccagtgaagagattagaaaagctcccagccgccgaggtcctgcagcggggacaggtcgacaagaatgttataaatcttagattttgagtgatcccaacaatctcgctgcccccagtactcctgatttgattactcaaaatacgatatgctgttgggaaaacaagcatggtggtgtcgcttgctgttgctaaccatgatgaaagagtctgctggttaggcgcggtggcggccatccctatcagtcacgcaggtatatttgggagttgagacctccggtggttggctcgcaaataaaggccccccaaagagacgcaactaggaccaaccgcgaaggctccatgggacctttgctcgacctcgacgacaacagcaaagcctttcgagccaaaggctacatgcaaaagatgacgggacgggacaagcaaagggcctagaacgtgactaaagccactccgagggccttttgggaaaacttcaagggctatgtgatggagggcccttggaccaggatgcagtttagccttcgcctttgaggatctgatggccctgtaaccctggtaacggctcaactagggcccattcagtgaggctattgtaatgaagaatgactcttgagcccttgtgaggtatttatatactccctccgttcacatgaattattcgttttgggtttatcctaacactacaggaaaactgggaacaaacgccgaccttgtatacatattaaaaaaaggaactccagacagctgcacacggcctgctgctgtgcatgcagtggccgtactgcaatcacgcacgcatgcagccgattctgtgcatggtctgcctgccccctggtggtgagtgcagcagtgagcagtgactgagtcgcacttgtgttgtctcagtgattgcgcaaagaaaag

SEQ ID NO: 43038 - DNA, 1078 bp, Zea Mays
gtcccgatgcggtgccctgtacgtctgtacgtgagcgccttgccgatctgagtgaagagattagaaaagctcccagccgccgaggtcctgcagcggggacaggtcgacaagaatgttataaatcttagattttgagtgatcccaacaatctcgctgcccccagtactcctgatttgattactcaaaatacgatatgctgttgggaaaacaagcatggtggtgtcgcttgctgttgctaaccatgatgaaaggtcatttcaaactatttgcttaacttcagcttccacttatagcctcaactgatagaggtatatgcatgttgcaaaaaaaacttctttttttgcaaaataactttgtaagatacatttgcttctagagtctgctggttaggcgcggtggcggccatccctatcagtcacgcaggtatatttgggagttgagacctccggtggttggctcgcaaataaaggccccccaaagagacgcaactaggaccaaccgcgaaggctccatgggacctttgctcgacctcgacgacaacagcaaagcctttcgagccaaaggctacatgcaaaagatgacgggacgggacaagcaaagggcctagaacgtgactaaagccactccgagggccttttgggaaaacttcaagggctatgtgatggagggcccttggaccaggatgcagtttagccttcgcctttgaggatctgatggccctgtaaccctggtaacggctcaactagggcccattcagtgaggctattgtaatgaagaatgactcttgagcccttgtgaggtatttatatactccctccgttcacatgaattattcgttttgggtttatcctaacactacaggaaaactgggaacaaacgccgaccttgtatacatattaaaaaaaggaactccagacagctgcacacggcctgctgctgtgcatgcagtggccgtactgcaatcacgcacgcatgcagccgattctgtgcatggtctgcctgccccctggtggtgagtgcagcagtgagcagtgactgagtcgcacttgtgttgtctcagtgattgcgcaaagaaaag

SEQ ID NO: 43039 - DNA, 1720 bp, Zea Mays
cgaagatgccacacgacaccactgactgccacatcccatgtgctcgacctgcttgctagcttctcggcgcctcggcggccacttgcaagttgcaacgaaaccatgcatccatccaggctagcaattcaaagctaagcgcaaagcaggcctgtgagagggtccacgtcatctcctatgttctcagccgtccgatctttttccaacggccaccaaacaacgatcatgagcttctcaaaatccgaagaacagtgtcgacgcctctcctccctcacatcagcaccgcaccaccgccattcccacctcgcccagctctgcccctggcccaacgcttctcctctctcacctcatcgccgcaccaccactgcaccacctctcccagctctgctcctggcctcgcccgcagcgatgccaagccctcgacgacgccactgctcgccacgaccccgctgcagcgctgctccagcctctcctgtcgtaccagcacaggcgaccacagtgacggcccctctgcccctggacctgcccgcggcaacactaagtcctcggcgcagccgctgctccatcatctcctgccccccggcacatgcgacccccccccccccccccccccctccctgtgaccgggccgagccgatgtttcagtcgtcccgatgcggtgccctgtacgtctgtacgtgagcgccttgccgatctgtgaagagattagaaaagctcccagccgccgaggtcctgcagcggggacaggtcgacaagaatgttataaatcttagattttgagtgatcccaacaatctcgctgcccccagtactcctgatttgattactcaaaatacgatatgctgttgggaaaacaagcatggtggtgtcgcttgctgttgctaaccatgatgaaaggtcatttcaaactatttgcttaacttcagcttccacttatagcctcaactgatagaggtatatgcatgttgcaaaaaaaacttctttttttgcaaaataactttgtaagatacatttgcttctagagtctgctggttaggcgcggtggcggccatccctatcagtcacgcaggtatatttgggagttgagacctccggtggttggctcgcaaataaaggccccccaaagagacgcaactaggaccaaccgcgaaggctccatgggacctttgctcgacctcgacgacaacagcaaagcctttcgagccaaaggctacatgcaaaagatgacgggacgggacaagcaaagggcctagaacgtgactaaagccactccgagggccttttgggaaaacttcaagggctatgtgatggagggcccttggaccaggatgcagtttagccttcgcctttgaggatctgatggccctgtaaccctggtaacggctcaactagggcccattcagtgaggctattgtaatgaagaatgactcttgagcccttgtgaggtatttatatactccctccgttcacatgaattattcgttttgggtttatcctaacactacaggaaaactgggaacaaacgccgaccttgtatacatattaaaaaaaggaactccagacagctgcacacggcctgctgctgtgcatgcagtggccgtactgcaatcacgcacgcatgcagccgattctgtgcatggtctgcctgccccctggtggtgagtgcagcagtgagcagtgactgagtcgcacttgtgttgtctcagtgattgcgcaaagaaaag

SEQ ID NO: 43040 - DNA, 3472 bp, Zea Mays
cgaagatgccacacgacaccactgactgccacatcccatgtgctcgacctgcttgctagcttctcggcgcctcggcggccacttgcaagttgcaacgaaaccatgcatccatccaggctagcaattcaaagctaagcgcaaagcaggcctgtgagagggtccacgtcatctcctatgttctcagccgtccgatctttttccaacggccaccaaacaacgatcatgagcttctcaaaatccgaagaacagtgtcgacgcctctcctccctcacatcagcaccgcaccaccgccattcccacctcgcccagctctgcccctggcccaacgcttctcctctctcacctcatcgccgcaccaccactgcaccacctctcccagctctgctcctggcctcgcccgcagcgatgccaagccctcgacgacgccactgctcgccacgaccccgctgcagcgctgctccagcctctcctgtcgtaccagcacaggcgaccacagtgacggcccctctgcccctggacctgcccgcggcaacactaagtcctcggcgcagccgctgctccatcatctcctgccccccggcacatgcgacccccccccccccccccccccctccctgtgaccgggccgagccgatgtttcagtcgtcccgatgcggtgccctgtacgtctgtacgtgagcgccttgccgatctggtgattccactgccacgccctcactctatttctgtctccttaattgtttatactacatatttactacttttccacctttcagctatttcgtgtttgtatttctggatctgtgattaatgatctttctaattcaatatctatgtgcacaaactcaggctacataaataccacaccctgtaccctcccgttctccaatttcatatagaacaagttgttgcttgatattagcgtcccacttgaatgagtctctgtcaactttgtttgtctcttggtttctccgttataatgcttatatgctcccaagtcagttcatgtcaaccagtaagtgttcaataacattttgtttcaattgtgcataccatttgatatgtttggtcatctcagcacaaaattttagtttgttttggctatctgttttatggagaattaaaccttggataattatgttactttggtgtgattgggcagaatccactaacaacatatttgttcctgtcaaactgtgtatgaatgatttagtttacattttagaagtgtcatccataatttctagatcaaagaaaataaaaaaaaattggcgatggcggagcaggatggcaacgtcccccacagaacttcgcagggctccccaatattcagatattataagtgtaacttgctaaattcttcgaacagccttttgcattgaacatggatatggtatcttttacatatggttccgtttattttcactgcaaatatgtgaactttgtgtgtgtattatccagtgaatagattacaaaagcttctgtttgtaatcttctcgtggctggattcaaatttttaatcattttatatcatttgaaaataagaatatatatgtaaaacctttcaaactgtcatacattttttattatttatggcatcaggatatatatgttccctcaacaatctggaatggcatcaggattattggaaatagaagctttgttctgtctgacctttttctgcagtagtagttcttttcaagtctaactatacatatgtaataatattttacaataacacagaggcttccaaaacgattctttcaaaacaattctggatacgtttgatcctcccccaaatatcactgtaatgtatgttatcatacatttatgctatgtatttcagttttcacctccacatgaatatcaatagtccctgtacatattggattgcgattatgcacttttatttactgtatataatattaatagacattctatattctgttacagagctgtatttttagataatggaaacatttccagccttcccttcaatagaagttagggccgagtacaaaagcatgacactaccatccacaaacagacacacgcaataggaaagccattagatcgcctattacatgataatgattgcaaaccaccaaccatccttacatgtgtttctgttttatgctgggctatctgtacatgtaggaatgatctaatctttgacaaaaaaaaaaccctctctcacttatttgcgagttcttttttgagttacctattggctaaggttttggagtaatctgcaaaggaaggatgaagataaggatttaataaaagcaagttgcaggtccttggagacagttgctatgcagatttttgcacacttaggttacatttttcttttgcgtatgattttgtttattttcatttcgaatatttaaaaaatatctatagtcattgtgcatattaaattgcgattatgcacctttatttaatatatacaatgttaattgacattgtatattctgttatagagttgtatagacctccttttttttcttttgcatatggttttgtttattttcattgcaaatatgtgaactttgtatacctattatccagtgaagagattagaaaagctcccagccgccgaggtcctgcagcggggacaggtcgacaagaatgttataaatcttagattttgagtgatcccaacaatctcgctgcccccagtactcctgatttgattactcaaaatacgatatgctgttgggaaaacaagcatggtggtgtcgcttgctgttgctaaccatgatgaaagagtctgctggttaggcgcggtggcggccatccctatcagtcacgcaggtatatttgggagttgagacctccggtggttggctcgcaaataaaggccccccaaagagacgcaactaggaccaaccgcgaaggctccatgggacctttgctcgacctcgacgacaacagcaaagcctttcgagccaaaggctacatgcaaaagatgacgggacgggacaagcaaagggcctagaacgtgactaaagccactccgagggccttttgggaaaacttcaagggctatgtgatggagggcccttggaccaggatgcagtttagccttcgcctttgaggatctgatggccctgtaaccctggtaacggctcaactagggcccattcagtgaggctattgtaatgaagaatgactcttgagcccttgtgaggtatttatatactccctccgttcacatgaattattcgttttgggtttatcctaacactacaggaaaactgggaacaaacgccgaccttgtatacatattaaaaaaaggaactccagacagctgcacacggcctgctgctgtgcatgcagtggccgtactgcaatcacgcacgcatgcagccgattctgtgcatggtctgcctgccccctggtggtgagtgcagcagtgagcagtgactgagtcgcacttgtgttgtctcagtgattgcgcaaagaaaag

SEQ ID NO: 43041 - DNA, 3363 bp, Zea Mays
cgaagatgccacacgacaccactgactgccacatcccatgtgctcgacctgcttgctagcttctcggcgcctcggcggccacttgcaagttgcaacgaaaccatgcatccatccaggctagcaattcaaagctaagcgcaaagcaggcctgtgagagggtccacgtcatctcctatgttctcagccgtccgatctttttccaacggccaccaaacaacgatcatgagcttctcaaaatccgaagaacagtgtcgacgcctctcctccctcacatcagcaccgcaccaccgccattcccacctcgcccagctctgcccctggcccaacgcttctcctctctcacctcatcgccgcaccaccactgcaccacctctcccagctctgctcctggcctcgcccgcagcgatgccaagccctcgacgacgccactgctcgccacgaccccgctgcagcgctgctccagcctctcctgtcgtaccagcacaggcgaccacagtgacggcccctctgcccctggacctgcccgcggcaacactaagtcctcggcgcagccgctgctccatcatctcctgccccccggcacatgcgacccccccccccccccccccccctccctgtgaccgggccgagccgatgtttcagtcgtcccgatgcggtgccctgtacgtctgtacgtgagcgccttgccgatctggtgattccactgccacgccctcactctatttctgtctccttaattgtttatactacatatttactacttttccacctttcagctatttcgtgtttgtatttctggatctgtgattaatgatctttctaattcaatatctatgtgcacaaactcaggctacataaataccacaccctgtaccctcccgttctccaatttcatatagaacaagttgttgcttgatattagcgtcccacttgaatgagtctctgtcaactttgtttgtctcttggtttctccgttataatgcttatatgctcccaagtcagttcatgtcaaccagtaagtgttcaataacattttgtttcaattgtgcataccatttgatatgtttggtcatctcagcacaaaattttagtttgttttggctatctgttttatggagaattaaaccttggataattatgttactttggtgtgattgggcagaatccactaacaacatatttgttcctgtcaaactgtgtatgaatgatttagtttacattttagaagtgtcatccataatttctagatcaaagaaaataaaaaaaaattggcgatggcggagcaggatggcaacgtcccccacagaacttcgcagggctccccaatattcagatattataagtgtaacttgctaaattcttcgaacagccttttgcattgaacatggatatggtatcttttacatatggttccgtttattttcactgcaaatatgtgaactttgtgtgtgtattatccagtgaatagattacaaaagcttctgtttgtaatcttctcgtggctggattcaaatttttaatcattttatatcatttgaaaataagaatatatatgtaaaacctttcaaactgtcatacattttttattatttatggcatcaggatatatatgttccctcaacaatctggaatggcatcaggattattggaaatagaagctttgttctgtctgacctttttctgcagtagtagttcttttcaagtctaactatacatatgtaataatattttacaataacacagaggcttccaaaacgattctttcaaaacaattctggatacgtttgatcctcccccaaatatcactgtaatgtatgttatcatacatttatgctatgtatttcagttttcacctccacatgaatatcaatagtccctgtacatattggattgcgattatgcacttttatttactgtatataatattaatagacattctatattctgttacagagctgtatttttagataatggaaacatttccagccttcccttcaatagaagttagggccgagtacaaaagcatgacactaccatccacaaacagacacacgcaataggaaagccattagatcgcctattacatgataatgattgcaaaccaccaaccatccttacatgtgtttctgttttatgctgggctatctgtacatgtaggaatgatctaatctttgacaaaaaaaaaaccctctctcacttatttgcgagttcttttttgagttacctattggctaaggttttggagtaatctgcaaaggaaggatgaagataaggatttaataaaagcaagttgcaggtccttggagacagttgctatgcagatttttgcacacttagtgaagagattagaaaagctcccagccgccgaggtcctgcagcggggacaggtcgacaagaatgttataaatcttagattttgagtgatcccaacaatctcgctgcccccagtactcctgatttgattactcaaaatacgatatgctgttgggaaaacaagcatggtggtgtcgcttgctgttgctaaccatgatgaaaggtcatttcaaactatttgcttaacttcagcttccacttatagcctcaactgatagaggtatatgcatgttgcaaaaaaaacttctttttttgcaaaataactttgtaagatacatttgcttctagagtctgctggttaggcgcggtggcggccatccctatcagtcacgcaggtatatttgggagttgagacctccggtggttggctcgcaaataaaggccccccaaagagacgcaactaggaccaaccgcgaaggctccatgggacctttgctcgacctcgacgacaacagcaaagcctttcgagccaaaggctacatgcaaaagatgacgggacgggacaagcaaagggcctagaacgtgactaaagccactccgagggccttttgggaaaacttcaagggctatgtgatggagggcccttggaccaggatgcagtttagccttcgcctttgaggatctgatggccctgtaaccctggtaacggctcaactagggcccattcagtgaggctattgtaatgaagaatgactcttgagcccttgtgaggtatttatatactccctccgttcacatgaattattcgttttgggtttatcctaacactacaggaaaactgggaacaaacgccgaccttgtatacatattaaaaaaaggaactccagacagctgcacacggcctgctgctgtgcatgcagtggccgtactgcaatcacgcacgcatgcagccgattctgtgcatggtctgcctgccccctggtggtgagtgcagcagtgagcagtgactgagtcgcacttgtgttgtctcagtgattgcgcaaagaaaag

SEQ ID NO: 43042 - DNA, 1334 bp, Zea Mays
gtaggtctgaaggtgatcgtctgatggatatagttcagacatacggagtatctgttttttttttcgaggtgatatgggggcatgttcagctggtgcaaatttcactccacacataattacagtcgctcctggtgaggatgtgatgacgaaggtcatatcgttttcccaacaaggaccacgagctatctgtgttctctctgcaaatggtgtgatatccaccgttacactctgtcagcctgattcctctggtggcacgttaacttacgagggacgctttgagttgctgtccctgtctgggtccttcatgccaaccgaaaacggcgggacacgaagtcgatcaggtgggatgagcgtgtctctcgcgagtccagacggtcgtgttgtcggtggcggggttgccggcctgctggtggcagcgagtcctgttcagattgtggttgggagcttcctgccaagctaccagatggagcagaagaacaagaagccacgggtggacgcggcacctgctgccgccgtcccgcagacgcctcccgcagtcccgatctcgagcacagacacccgcagcagcgagcaagggcagcagagctccgcgtcccagagaggggtgaacatgacggtcccgggaggaacctacggcgcggaccagagctgggtgttgtcccctgctccgcagcagccgatggccgaggtgtccaggacgccgtcgtctggggacctgaagatgaccacgtccggatcatgagcactctgaaacccagccggagctagccacccacgcactgactgggagccaaggtccccgctggaagatggaaggatggggtcatggattggttcatttgttcctgactcttgctgcaaatctcgcactagggcggtctagtctagttgttgctgtatgatgagcgcgccaggcaggaggaggggagtctaacaactgcacttgctgccattgtcgaggagtgcgtgtgtgtagtgcagcagctattaacaccacagtttgagtgtgctagcggcgtgtgtttttatttaggcgacattgtcgattaaattcttgtgtcgggattattacctttaccttacgtgctggtttagtttggcaccctgtatctgtatctgtattggatcatgcccacccttggcttaaatcagcattagaaaattctccatgtttcctgttattctgtcactagtcgggaaatggatgaattccgtggtgcgatcgatctctctttccgaatcatgtgtgtaggtatgatggattgtgtggccaggtcatgcctacttttgtaactgttgccgtactccaaaagcacactgattatctattattc

SEQ ID NO: 43043 - DNA, 1557 bp, Zea Mays
attaaacccaaaaatctgttaatctttttgggataatccacatcctattctagagataaggattcgatttttctcccgacaaattcctcgactagaggagaatggatggatgagcggcgggggaggagccaatgacaggggtagtaattggatggcggcgtcaccggctcactccttgtccggacactgtctgtctgtccctctcttatccgaatatttcctgtctcctccactctacgcagacgcagctcgtgctgcacaacatgatcagatgctagttcgcacggtcaggtgatatgggggcatgttcagctggtgcaaatttcactccacacataattacagtcgctcctggtgaggatgtgatgacgaaggtcatatcgttttcccaacaaggaccacgagctatctgtgttctctctgcaaatggtgtgatatccaccgttacactctgtcagcctgattcctctggtggcacgttaacttacgagggacgctttgagttgctgtccctgtctgggtccttcatgccaaccgaaaacggcgggacacgaagtcgatcaggtgggatgagcgtgtctctcgcgagtccagacggtcgtgttgtcggtggcggggttgccggcctgctggtggcagcgagtcctgttcagattgtggttgggagcttcctgccaagctaccagatggagcagaagaacaagaagccacgggtggacgcggcacctgctgccgccgtcccgcagacgcctcccgcagtcccgatctcgagcacagacacccgcagcagcgagcaagggcagcagagctccgcgtcccagagaggggtgaacatgacggtcccgggaggaacctacggcgcggaccagagctgggtgttgtcccctgctccgcagcagccgatggccgaggtgtccaggacgccgtcgtctggggacctgaagatgaccacgtccggatcatgagcactctgaaacccagccggagctagccacccacgcactgactgggagccaaggtccccgctggaagatggaaggatggggtcatggattggttcatttgttcctgactcttgctgcaaatctcgcactagggcggtctagtctagttgttgctgtatgatgagcgcgccaggcaggaggaggggagtctaacaactgcacttgctgccattgtcgaggagtgcgtgtgtgtagtgcagcagctattaacaccacagtttgagtgtgctagcggcgtgtgtttttatttaggcgacattgtcgattaaattcttgtgtcgggattattacctttaccttacgtgctggtttagtttggcaccctgtatctgtatctgtattggatcatgcccacccttggcttaaatcagcattagaaaattctccatgtttcctgttattctgtcactagtcgggaaatggatgaattccgtggtgcgatcgatctctctttccgaatcatgtgtgtaggtatgatggattgtgtggccaggtcatgcctacttttgtaactgttgccgtactccaaaagcacactgattatctattattc

SEQ ID NO: 43044 - DNA, 1090 bp, Zea Mays
cttcctcttccccgagacctattcgacattaggtattcaggtatggatccggcataatttcatagatctgcaggttcttagtgatttccatgcatcctgacgtctcctccctcatctacctcctctcacctcgcgctcgttgcctcgactagttcggttcttgggagagccagtctgctgctgcttgcggtgactggcaccagcgcgcaaggcttcctagagaccatctacctgcgccgttccgatgggttgcttcgggtgcttcgcgccggaggcggacgaggaccttaggccctccaagcacgacgattcgtcaggggctgatgcgaggaggaaggtcgcgccggatgtggccagcggctacgcgcacagcttcaccttcaaggatctgcttgtggcaactggctacttcaacgaggccaatttcataggagaaggtggattcgggaaggtgtacaagggcaagatcaacggacagcagctcgctcgagacgctcgagacggagttcttggtcgaggtgctcatgctgacggtgctcaaccatcgcaaccttgtcagcttggtcgggttctacgcgtggacgagaggctgttgcctgctggtctatgagtacatgccgttcggaagcctggagagccatctgtttgacaatcctaaggtctaaggatacagccgggtggcgttatggattcacggccttatttctttctgtgagatctttagaattctttcagggaatggaatgcatatggagcttttcttccatgttaaatggcagtgactctgtcatatctttctaccatccactatttgtggacccatctatacactaaacacacttaaatgttttctagaccgcggagcacgcacaatttactagttaagatatagtttagtttcacaacaatggccgatatagcagaagccaagtgttatgatgatttgttttttcaattctatgttgtgttattggttcagcatgcacatatattgacatgatttatggcatggcatctgccatctttgttatatttatgacatcgttcttgattgatgtgtgcgacatgaatgatggatctttttaacatc

SEQ ID NO: 43045 - DNA, 1016 bp, Zea Mays
atcaaaaccggcatgcagccattagaagagatgcttcctcttccccgagacctattcgacattaggtattcagttcggttcttgggagagccagtctgctgctgcttgcggtgactggcaccagcgcgcaaggcttcctagagaccatctacctgcgccgttccgatgggttgcttcgggtgcttcgcgccggaggcggacgaggaccttaggccctccaagcacgacgattcgtcaggggctgatgcgaggaggaaggtcgcgccggatgtggccagcggctacgcgcacagcttcaccttcaaggatctgcttgtggcaactggctacttcaacgaggccaatttcataggagaaggtggattcgggaaggtgtacaagggcaagatcaacggacagtgaagcagctcgctcgagacgctcgagacggagttcttggtcgaggtgctcatgctgacggtgctcaaccatcgcaaccttgtcagcttggtcgggttctacgcgtggacgagaggctgttgcctgctggtctatgagtacatgccgttcggaagcctggagagccatctgtttgacaatcctaaggtctaaggatacagccgggtggcgttatggattcacggccttatttctttctgtgagatctttagaattctttcagggaatggaatgcatatggagcttttcttccatgttaaatggcagtgactctgtcatatctttctaccatccactatttgtggacccatctatacactaaacacacttaaatgttttctagaccgcggagcacgcacaatttactagttaagatatagtttagtttcacaacaatggccgatatagcagaagccaagtgttatgatgatttgttttttcaattctatgttgtgttattggttcagcatgcacatatattgacatgatttatggcatggcatctgccatctttgttatatttatgacatcgttcttgattgatgtgtgcgacatgaatgatggatctttttaacatc

SEQ ID NO: 43046 - DNA, 1017 bp, Zea Mays
ctcaccgccatcaaaaccggcatgcagccattagaagagatgcttcctcttccccgagacctattcgacattagttcggttcttgggagagccagtctgctgctgcttgcggtgactggcaccagcgcgcaaggcttcctagagaccatctacctgcgccgttccgatgggttgcttcgggtgcttcgcgccggaggcggacgaggaccttaggccctccaagcacgacgattcgtcaggggctgatgcgaggaggaaggtcgcgccggatgtggccagcggctacgcgcacagcttcaccttcaaggatctgcttgtggcaactggctacttcaacgaggccaatttcataggagaaggtggattcgggaaggtgtacaagggcaagatcaacggacagtgaagcagctcgctcgagacgctcgagacggagttcttggtcgaggtgctcatgctgacggtgctcaaccatcgcaaccttgtcagcttggtcgggttctacgcgtggacgagaggctgttgcctgctggtctatgagtacatgccgttcggaagcctggagagccatctgtttgacaatcctaaggtctaaggatacagccgggtggcgttatggattcacggccttatttctttctgtgagatctttagaattctttcagggaatggaatgcatatggagcttttcttccatgttaaatggcagtgactctgtcatatctttctaccatccactatttgtggacccatctatacactaaacacacttaaatgttttctagaccgcggagcacgcacaatttactagttaagatatagtttagtttcacaacaatggccgatatagcagaagccaagtgttatgatgatttgttttttcaattctatgttgtgttattggttcagcatgcacatatattgacatgatttatggcatggcatctgccatctttgttatatttatgacatcgttcttgattgatgtgtgcgacatgaatgatggatctttttaacatc

SEQ ID NO: 43047 - DNA, 1140 bp, Zea Mays
ctcgccgtcaactcaccgccatcaaaaccggcatgcagccattagaagagatgcttcctcttccccgagacctattcgacattaggtattcaggtatggatccggcataatttcatagatctgcaggttcttagtgatttccatgcatcctgacgtctcctccctcatctacctcctctcacctcgcgctcgttgcctcgactagttcggttcttgggagagccagtctgctgctgcttgcggtgactggcaccagcgcgcaaggcttcctagagaccatctacctgcgccgttccgatgggttgcttcgggtgcttcgcgccggaggcggacgaggaccttaggccctccaagcacgacgattcgtcaggggctgatgcgaggaggaaggtcgcgccggatgtggccagcggctacgcgcacagcttcaccttcaaggatctgcttgtggcaactggctacttcaacgaggccaatttcataggagaaggtggattcgggaaggtgtacaagggcaagatcaacggacagctcgctcgagacgctcgagacggagttcttggtcgaggtgctcatgctgacggtgctcaaccatcgcaaccttgtcagcttggtcgggttctacgcgtggacgagaggctgttgcctgctggtctatgagtacatgccgttcggaagcctggagagccatctgtttgacaatcctaaggtctaaggatacagccgggtggcgttatggattcacggccttatttctttctgtgagatctttagaattctttcagggaatggaatgcatatggagcttttcttccatgttaaatggcagtgactctgtcatatctttctaccatccactatttgtggacccatctatacactaaacacacttaaatgttttctagaccgcggagcacgcacaatttactagttaagatatagtttagtttcacaacaatggccgatatagcagaagccaagtgttatgatgatttgttttttcaattctatgttgtgttattggttcagcatgcacatatattgacatgatttatggcatggcatctgccatctttgttatatttatgacatcgttcttgattgatgtgtgcgacatgaatgatggatctttttaacatc

SEQ ID NO: 43048 - DNA, 872 bp, Zea Mays
ctcgccgtcaactcaccgccatcaaaaccggcatgcagccattagaagagatgcttcctcttccccgagacctattcgacattaggtattcaggtatggatccggcataatttcatagatctgcaggttcttagtgatttccatgcatcctgacgtctcctccctcatctacctcctctcacctcgcgctcgttgcctcgactagttcggttcttgggagagccagtctgctgctgcttgcggtgactggcaccagcgcgcaaggcttcctagagaccatctacctgcgccgttccgatgggttgcttcgggtgcttcgcgccggaggcggacgaggaccttaggccctccaagcacgacgattcgtcaggttcgttctcggttttccgtccgtggcacgtctcgtggcttgggttgttgtgcttgattcttgctgggaaaggaaacaggggctgatgcgaggaggaaggtcgcgccggatgtggccagcggctacgcgcacagcttcaccttcaaggatctgcttgtggcaactggctacttcaacgaggccaatttcataggagaaggtggattcgggaaggtgtacaagggcaagatcaacggacagctcgctcgagacgctcgagacggagttcttggtcgaggtgctcatgctgacggtgctcaaccatcgcaaccttgtcagcttggtcgggttctacgcgtggacgagaggctgttgcctgctggtctatgagtacatgccgttcggaagcctggagagccatctgtttgcaagttgcgaaagtgtttaaggggaaaagatctgggggcaactaattggacatttcataactctttttggagattgcataatgtaatgtacaacc

SEQ ID NO: 43049 - DNA, 1127 bp, Zea Mays
ctgccgacagggtgttgttcttggccaggagccctatgctccctgcactttcctgccatggcacgctagagatccatccccctcccatccacgtgaaccaatgcgaggagaccatcccctctttctcaaacgccccccctcccgctgttggggcaccccccgacctagggctcacgggcgagcgcccctagcgacccgagacacctccctctctccatgtggcctgactgtgatttgggcgtggcttgcagccctccttgccggtgacccgaggcttgcgtgcaagcgccgaacggatgaatcaagtgtagggccttcgccaccatgtcataaaatcaaaatctttatgagactattgaaaggtatcgtaaatcacttaagaaaagacaatctggatgacaaggatgagtacaacgaaaataggagatctgatggaaaatggggtgattcaagaagtcgactaaatggaagttactccgatcatcaaagtaataatggtacctacttgcttactagagaaaagcttcgagtgtttcctcagagtgttttggaatccttgattggatatgtcgctatatgatgaagaacatctcatctgttgcaatgttccacttccacggtcttctccctgttagctctcacgtccctttctcattccccttcatgaagagctaccatccctctgcatcgcctctttgttgagtctggttggtcgaaaggattatgaaagttgaatgtgctcaggagtcaggatatctaattgtttcttcaggtttgtaaaattacctgaacgtcagcagattacttcttaggcatgacaaaagtggaaattatattctggatggcaatacattgtgaacacataggtgtgatcaagcaaaatcacgcgcagagcgcgcgtcaaacactagtggagcataccattaccatcagggagttcgagaccagggaagtgcggaggtggccgcaagcgcttgccgctcgctcgccactgcctcatttggcatggccacatgcttaaagaaccacacgacacccacaacttttcaaaacgtatgtctgatccatattaatatttaataatagtcaatgttataggttcactttaatgttatgttgtactagta

SEQ ID NO: 43050 - DNA, 2928 bp, Zea Mays
ccaccttctaccgcaccgtcatgtattgtgaagcttccagcaggtgctccacccctcccctctctgataaacgctgtcgcccgccattcccccatccatccatttcatctaaacgctgccgacagggtgttgttcttggccaggagccctatgctccctgcactttcctgccatggcacgctagagatccatccccctcccatccacgtgaaccaatgcgaggagaccatcccctctttctcaaacgccccccctcccgctgttggggcaccccccgacctagggctcacgggcgagcgcccctagcgacccgagacacctccctctctccatgtggcctgactgtgatttgggcgtggcttgcagccctccttgccggtgacccgaggcttgcgtgcaagcgccgaacggatgaatcaagtgtagggccttcgccaccatgtcataaaatcaaaatctttatgagactattgaaaggtatcgtaaatcacttaagaaaagacaatctggatgacaaggatgagtacaacgaaaataggagatctgatggaaaatggggtgattcaagaagtcgactaaatggaagttactccgatcatcaaagtaataatggtacctacttgcttactagagaaaagcttcgagtgtttcctcagagtgttttggaatccttgattggatatgtcgctatatgatgaagaacatctcatctgttgcaatgttccacttccacggtcttctccctgttagctctcacgtccctttctcattccccttcatgaagagctaccatccctctgcatcgcctctttgttgagtctggttggtcgaaaggattatgaaagttgaatgtgctcaggagtcaggatatctaattgtttcttcaggtaagtattcttggagaccatattgtctattagtttattccctagtgtgtgggttcgaatatggtggaagctggacctgtattggtagccctcatggttctcttgcagtagataatgcagatttcatatttttccataattgttattacctaagcaccaaagctgccctcccatttagcggcattagattctcattcatgcaagagatgaccctcagtgaccaattgaaacggctatcctatcatagattaattgatccaggttgcatacatggagttccttcatggttcaagcaattaaatagccataaagttagcaaaaagaatatggttttcctatccctgcatcctggtatgcttcctgtcagactttcaaaattttcactactacagtactactacatcctagattacaagacgtttcattttttcaagatacatagcatttgctatgcacatagatatacaatacgtctacatatatagttaaagcaatgcatctagaaaattcaatttgttttatgatttggaatggaggaagtaacagtttgcagtatgaattcacatggaccacatgataattacatgaggagatttatctctgacctcgctctcctaggggaggagccgggagagagagggggatctccactcatcagcctgacactcgctccaaacgctcggtgtcggatcctccgtgctcctgcaccaccctcccctcggcagcgttcctcctcctccacccacccacccacccacccacccagtggaatgggaagagatccacccgagagttggtggattggtttcttcctctattagtaagtgattcctggtcggcctttgactggatggattagttttggttcctttgttgccaggcgaaccaaatcttgctcctcggactttccagcactatatcctacacgtgctgctctatttaagtaccttaagatgaccacaatatttttatggactactgagccctttctctgcttttaagaattggttgtcttcatgtgtcattagtggttttgagtccaaccttaaagtaattgtcgcttcaaaatatccatctagcattttgtgaaagcactcactctgttcaacaagcatcaaattggaaaatgacacatcatattacagcagtaatttcagtatttgatacaaggatctccctcaaatttgctgatatagctaagaagataatgctggtaggtaatagtttcttttattttcagtatttctggtggactttgaatggtagagcatccaaattttcccctcttttgttgcagatcctaatctttcgtagccatgatggtagataatagtttcttttatttttataatttctgttgaactttgaatggtggttcatgcagtttcccccttttgttgtagaccctaatcttttgtagccatgatggtttattttttctagggtatgttttgttatagggtactaggtcaccagatgttgcaacttgcaagtgataattgtattcttaaatgtcatccctttctgcccattgattatgtcttattgttttcattcaaagagagctgcagctgcccattaatcgatatgttgtcctctcctccatatgtttagttttgaatatggaggacaccaattctactacatgtggtgcacctaaagagagtcaaaattatattgaaacaggtttgtaaaattacctgaacgtcagcagattacttcttaggcatgacaaaagtggaaattatattctggatggcaatacattgtgaacacataggtgtgatcaagcaaaatcacgcgcagagcgcgcgtcaaacactagtggagcataccattaccatcagggagttcgagaccagggaagtgcggaggtggccgcaagcgcttgccgctcgctcgccactgcctcatttggcatggccacatgcttaaagaaccacacgacacccacaacttttcaaaacgtatgtctgatccatattaatatttaataatagtcaatgttataggttcactttaatgttatgttgtactagta

SEQ ID NO: 43051 - DNA, 1392 bp, Zea Mays
cacattcgtcgcgtgctctctcgtgcgtccgtcgttttcatcgcctctggacacttccaccttctaccgcaccgtcatgtattgtgaagcttccagcaggtgctccacccctcccctctctgataaacgctgtcgcccgccattcccccatccatccatttcatctaaacgctgccgacagggtgttgttcttggccaggagccctatgctccctgcactttcctgccatggcacgctagagatccatccccctcccatccacgtgaaccaatgcgaggagaccatcccctctttctcaaacgccccccctcccgctgttggggcaccccccgacctagggctcacgggcgagcgcccctagcgacccgagacacctccctctctccatgtggcctgactgtgatttgggcgtggcttgcagccctccttgccggtgacccgaggcttgcgtgcaagcgccgaacggatgaatcaagtaaatctttatgagactattgaaaggtatcgtaaatcacttaagaaaagacaatctggatgacaaggatgagtacaacgaaaataggagatctgatggaaaatggggtgattcaagaagtcgactaaatggaagttactccgatcatcaaagtaataatggtacctacttgcttactagagaaaagcttcgagtgtttcctcagagtgttttggaatccttgattggatatgtcgctatatgatgaagaacatctcatctgttgcaatgttccacttccacggtcttctccctgttagctctcacgtccctttctcattccccttcatgaagagctaccatccctctgcatcgcctctttgttgagtctggttggtcgaaaggattatgaaagttgaatgtgctcaggagtcaggatatctaattgtttcttcagagagctgcagctgcccattaatcgatatgttgtcctctcctccatatgtttagttttgaatatggaggacaccaattctactacatgtggtgcacctaaagagagtcaaaattatattgaaacaggtttgtaaaattacctgaacgtcagcagattacttcttaggcatgacaaaagtggaaattatattctggatggcaatacattgtgaacacataggtgtgatcaagcaaaatcacgcgcagagcgcgcgtcaaacactagtggagcataccattaccatcagggagttcgagaccagggaagtgcggaggtggccgcaagcgcttgccgctcgctcgccactgcctcatttggcatggccacatgcttaaagaaccacacgacacccacaacttttcaaaacgtatgtctgatccatattaatatttaataatagtcaatgttataggttcactttaatgttatgttgtactagta

SEQ ID NO: 43052 - DNA, 2953 bp, Zea Mays
cacattcgtcgcgtgctctctcgtgcgtccgtcgttttcatcgcctctggacacttccaccttctaccgcaccgtcatgtattgtgaagcttccagcaggtgctccacccctcccctctctgataaacgctgtcgcccgccattcccccatccatccatttcatctaaacgctgccgacagggtgttgttcttggccaggagccctatgctccctgcactttcctgccatggcacgctagagatccatccccctcccatccacgtgaaccaatgcgaggagaccatcccctctttctcaaacgccccccctcccgctgttggggcaccccccgacctagggctcacgggcgagcgcccctagcgacccgagacacctccctctctccatgtggcctgactgtgatttgggcgtggcttgcagccctccttgccggtgacccgaggcttgcgtgcaagcgccgaacggatgaatcaagtaaatctttatgagactattgaaaggtatcgtaaatcacttaagaaaagacaatctggatgacaaggatgagtacaacgaaaataggagatctgatggaaaatggggtgattcaagaagtcgactaaatggaagttactccgatcatcaaagtaataatggtacctacttgcttactagagaaaagcttcgagtgtttcctcagagtgttttggaatccttgattggatatgtcgctatatgatgaagaacatctcatctgttgcaatgttccacttccacggtcttctccctgttagctctcacgtccctttctcattccccttcatgaagagctaccatccctctgcatcgcctctttgttgagtctggttggtcgaaaggattatgaaagttgaatgtgctcaggagtcaggatatctaattgtttcttcaggtaagtattcttggagaccatattgtctattagtttattccctagtgtgtgggttcgaatatggtggaagctggacctgtattggtagccctcatggttctcttgcagtagataatgcagatttcatatttttccataattgttattacctaagcaccaaagctgccctcccatttagcggcattagattctcattcatgcaagagatgaccctcagtgaccaattgaaacggctatcctatcatagattaattgatccaggttgcatacatggagttccttcatggttcaagcaattaaatagccataaagttagcaaaaagaatatggttttcctatccctgcatcctggtatgcttcctgtcagactttcaaaattttcactactacagtactactacatcctagattacaagacgtttcattttttcaagatacatagcatttgctatgcacatagatatacaatacgtctacatatatagttaaagcaatgcatctagaaaattcaatttgttttatgatttggaatggaggaagtaacagtttgcagtatgaattcacatggaccacatgataattacatgaggagatttatctctgacctcgctctcctaggggaggagccgggagagagagggggatctccactcatcagcctgacactcgctccaaacgctcggtgtcggatcctccgtgctcctgcaccaccctcccctcggcagcgttcctcctcctccacccacccacccacccacccacccagtggaatgggaagagatccacccgagagttggtggattggtttcttcctctattagtaagtgattcctggtcggcctttgactggatggattagttttggttcctttgttgccaggcgaaccaaatcttgctcctcggactttccagcactatatcctacacgtgctgctctatttaagtaccttaagatgaccacaatatttttatggactactgagccctttctctgcttttaagaattggttgtcttcatgtgtcattagtggttttgagtccaaccttaaagtaattgtcgcttcaaaatatccatctagcattttgtgaaagcactcactctgttcaacaagcatcaaattggaaaatgacacatcatattacagcagtaatttcagtatttgatacaaggatctccctcaaatttgctgatatagctaagaagataatgctggtaggtaatagtttcttttattttcagtatttctggtggactttgaatggtagagcatccaaattttcccctcttttgttgcagatcctaatctttcgtagccatgatggtagataatagtttcttttatttttataatttctgttgaactttgaatggtggttcatgcagtttcccccttttgttgtagaccctaatcttttgtagccatgatggtttattttttctagggtatgttttgttatagggtactaggtcaccagatgttgcaacttgcaagtgataattgtattcttaaatgtcatccctttctgcccattgattatgtcttattgttttcattcaaagagagctgcagctgcccattaatcgatatgttgtcctctcctccatatgtttagttttgaatatggaggacaccaattctactacatgtggtgcacctaaagagagtcaaaattatattgaaacaggtttgtaaaattacctgaacgtcagcagattacttcttaggcatgacaaaagtggaaattatattctggatggcaatacattgtgaacacataggtgtgatcaagcaaaatcacgcgcagagcgcgcgtcaaacactagtggagcataccattaccatcagggagttcgagaccagggaagtgcggaggtggccgcaagcgcttgccgctcgctcgccactgcctcatttggcatggccacatgcttaaagaaccacacgacacccacaacttttcaaaacgtatgtctgatccatattaatatttaataatagtcaatgttataggttcactttaatgttatgttgtactagta

SEQ ID NO: 43053 - DNA, 1885 bp, Zea Mays
agccctgctgagtctctcacctgctggcggaggcggcccccaaaagccaaattccccaacccacaccacctccacactccagttttttccggcgcaaagggttagggtttgctgtcggcgatgtcggatcggcagccgtcggaggagccggaggagcaggtggacctggagggggacgacgacggcatggacgacgacgacgccgggtaccgtcgccgcggaagccgggacgactcggaggagcccgaggaggatgacgacaatgacgagcgccacggcgacgccgacgacgacgccgggatggagccggagccggccggaagtaaaggcggggatgacacgggcaaggggcccgacgtcgccggtggcgggcccgaggacgaggaggagaggagcaagtgggatgacatgctcgccctgccgccccatggctctgaggtcttcattggtggcctgccccgcgacatcacggaggaggacctccgtgagctgtgcgagccgttgggagaaatatatgaggtgaggttgaccaaggataaggacacaaaggagaacaaggggttcgcctttgtcaccttcatggacaaggaggctgcgcagcgcgccatcgaggatgtgcaagacagggagttcaaggggaggactttgcggtgctctctgtcgcaggcaaagcacaggctgtttgttgggaatgtgcccaaggggctgagcgaggaggagcttaccaacactatcaaggggaagggtccaggtgttatcaacattgagatgtttaagcatgacccaaaccgtaaccgtggcttcctctttgttgagtattacaaccatgcctgcgcagactatgccaggcagaaactttcatctccaaacttcaaggttgatgggagccagttgactgttagttgggctgaacctaagggttcaacagatgcttcatctgcagctgctcaggtgaagactatatatgtgaagaacctacctgaaaatgtttctaaagagaagataaaggacctgtttgacaaacatggagaggtcacaaaaatcgttctgcctcctgccaaggctggtcataagagagactttggctttgttcactttgcagaaagatcaagtgcattgaaggcagttaaaggaagtgaaaaatatgaaatcgatggtcaagtactggaagtgtccatggccaaaccattggcagataagaaacctgatcattcacacaggcctggaggaggccctaattatccccttcctccctatggtggtggtggctacatgggagatccatatggtgcttatggtggcggcggtcctgcatacaaccagccaatgatatatggcagaggaccagcaccggcaggaatgaggatggtgccgatggtgcttcctgatggccgccttggctatgtcctgcaacaacctggtggaatgccgcctccgcccccaccgcggaggggtagtgaccgaagagacagtggcagaggtggcgaagggcacagccggcgatatcgcccttactagcttttcccttatgggctctactcccatcatgtggtatgaagcgtttaacttatgagacgagataggagcctgtgttcttgtcccagtataagatctgcgatggcacgatgcttgtaccatctgtttacttatttttatcatgcagtgcatgtgacttgaaactgtgatggacttgtattgctttctgccttatggcacctgtagtagtgaactgatgaaggaagttcatgcggactctgaagctttgttggcttagaatggtaattttgctgtattctatttcacaggagataatctgtcccgaccttagcaattgtcgttcatcttggtgtaactgacgctagagctgaagctagcggcttgtttc

SEQ ID NO: 43054 - DNA, 2821 bp, Zea Mays
ctccgagctggtccacgttgtcctttttttcagtcgttagatcacgcaccaacggtctcctagccagcctctccattcggtgatgccccccatacgaccaggcaacctctccaagcttccagatcctcacccccgcccactcggctggaggtccacagtccgatcctcatcccacttgggtgtgccgtccccgcgcacacacacatggatggatatgaagggataggaggcagaggcggcgattgcgaagatggtcgggagcatgcaggcggcggacccagcgggtcggataagcgcactgctcgcgctgcgccaactcctcgccatgctccagtcgctggccctgctcctacccgtccagtggcgcgcgtagcgggggcgttcgatgccgcggcctccgtgctgtgactagcgggaaaaggggaaggcaacggcgtcagtggttctacgtgtgctggtcgggtcgctcatggtcgccgcgcgaagggagatagccacacaccgggcgcaggaggctgggcgagagtacgagctgatccccaggttcttggagatgggagcgagattttgaagttttaaggcctgcagtgccgtggcctagctcctcgcggcctcgcttattttcatatttcatttctctctcactctcgcaaactaagcctagggcctgagtttggtgaacaaaccactacaatgcagaccaattaactgatgatctattgtgttgtctcataccttggcgagcattgaagcactactcttgaaatgcttgttttatcatctttacatataatgcttcttttgttttatttactcctgttgtggtcaggagactaccattcatcatgtcattacttattttaatatgagtctggctactcttgttagtgcatttcctgtgaattggtgtagatttgtatgcctctcacactctcgatagaacataacaattgatgatactgcatttatgatattactggttgtccttctcatttggttagttagttgggtcatgctattgtgttatttactaacctaggggttctttgtatttcttgttaagacaagccattgttgatgagtgctatgcatctctggtttgtatcgatgtgtctttaatagcatatagcatctgctgatgtgcataaacatgcaggatgcttcatcgtattcccttgcttgtacgttgttttttagttgcttataatccattggagtgacatagtttatgtcagttctgtctatcgccagtttatcaatatcaacttgtgcggcgattccacagatttgtagctactatccaaaggacaatggtcaaaagcacagtttcctaactctaaccgttagatgtcatcatgttgatctattctgtaattgttcttctacgtttttcatttgggttccttgctgctatcagatggatgataaccaaaagaaaaacctctaaaagtatgccccttgcggacaatgaggaggtagatgtatgtgagatgatcaatagttttgataaataaattaaagtctcaactaaatggtaaatgataccgaggctcaaaaaggaaggtgttgagaagagcgtagtaaagcaccgaaagtgtttgctcagatccaacttgatttgagagaaataaaaacaggattgtgaatgagaggcgagcaaatgtatgccatgtctgagcttgttaatgaatttagttagttatatattttgttgatgtacttaaaacaatctattgttaggaagaagcaccgagggatttataaagagtgaagagggagagtgaaaagtcgaggagggatttatagagagtgaatagggagagtgaaaagtcgaggtctgaattggctgaaattagtaagatgcatcaggcccaattaaccgtggattggctaaaaacttcaatgtagaaagagcttacagctcattgaaggagtgcaaaagagcaccttctttaccctctcactactactgtattattgtacccttcttttttgaaaaaagatggcatctttgccccatcttctgagttagaactgagcaagttgtgtaatttcactgagatgcaggtttatgtatatttgaatatgcatatgcgtcctttcttttctctgctaggaaaatttgggagctaacttcaagttcaaacaaaatgaaaactgagaaatcgtgcctactaatttgtcttcagtgataaacattccctgggcctgtttcgatctcagtaaattcctgagatactttatggtcaagctatgactgctatttttgcttgctaaatttgtagagactatcttgcttgcctttgctatttttgcttgctaaatttgtatagactatcttgcttttatttccaggacatgtgccacaatgtggtttaaaggaatggtgagatgaaggaatgctatccttcaaggtccagttcgtgcatatactgtcctgttggcttaatgcagctatgagtattccaccaacgccactaccaagctgcagttgtcgctgcacagcggccccagccgaggtcgcctctgcacccacgaaagatgtttaacaccgctgcaactactagaagctattgcggttctgcgacctgactcgacaccatgtggtttacttttctatgttgttgctgatttctccccttgtatgatggtgtgatttatatgcctaggaaacccttccatataatgcatatagcctatctaatatgttgttgtgtattatagattacctgtatggctaacactgcctcactcttgtgtacagacagcctgactatgccctaacctaaatatgctaagcttacaatgtttatttgcaaat

SEQ ID NO: 43055 - DNA, 2698 bp, Zea Mays
cctcatccggttgttgttttggggatttggaattttgtggaaaacattcacagctagggcagtagaatttatttggtttgacgcttgcgttgcggtcgggagctgtcgcgtgggttagttgggccgcaattggtgtttcggcccattaaccctcccaaaccctagccgtctcccccgcacttctccccccttgtgcagccgcccccccacttctttccccttggccgccccctgcccatctcctcctctctccattgttgcagccaccaaaccctagccccccctcaatcccctcctcccaaggtgccaatccttgccgctcggatcatcgtcgcgtggtgcgagtcttcaatcgttttggtggagggaagaagggaggaaggaaagggggagaatccaaggtggtggactcccagatcgttcttagggatttgcccaaacttccggtgaaggcaagtaaaactgtgatggttattccgtctgtcagatgaggagtcttatacttgtttatgttgtgctattatgttcaaattcatagtttcttttgagtaccatcatttgaaaatgttcatgtttcatgaatttcatatgttgagtttgatgtttgattatgttactcaagtggttattatgtggaatgggtggaagtaaatgcctagcacatttttatttgggaagaactcatgaggttgtcatgcataatgcactcatcatccattgcattgaagtttcgtcgcgatcttatggtccgaccgtaccggtacattgagcatcatatgttgcccgagaaggggtatggtgcagcttcatatccttagagatatggaggcagaagtcattattgcatttgtagccatgtgcattcatgggagaggtgttgaatctattatgtggatgtggataatttggacttgtgcatggtgattctacttggcgttgagcttttagttacttgtttacttgctgcaatttactgttcaaaagaaaagaaagaagtcctgaacacgtggttgtgtaagcacagttgatttacaatatcctatttgttgttgttatgtttacttgctgagatgtgttatctcacatcttgcattgtttgatgcaggcacctaatttctgctttgggaatagaggtatgtagcagcacggccactacacctttaataaaggaaccagcatttaataatgttgttaatcagagttggacaagtctagtgaattgctttgttcttggttgagcgtttattttggggtgggctgagtttcttatcccatttgttttgcttcagttgggtcataattaagttttgccactattgcatttcagtttctactatgtgaattatatgtctttatatcttgtatgagcttcatgattcccctccttgttatgctagttttcaaaggaggtgctgccggattttgctatatattctttctttattacttctcttgtgttgagtaagtttggtgggtggggtttgtggtattatccattgtgtgtgaccagtggggtgttacagattccatgacaggggtacacccggtttttcatgtctctatgttgaggaagttcttgcgggatccggaccatcagattgagatggaaccaattgcggtgcagcaggatctgactctggagtgtcgtccggtgcgtatattggaattctcggagcgtgtgttgaggaagagatcaattaagtatgtcaaggtcttatggactaatcagtctagggatggcaacggattggattcagatcggatattggaaatatccgcccgcagtcatatccacggtcatagataatatccgcccgcgactatatccgcgggtagaaattcatatccatatccatgcccatcgggtttcggatatccattggatatccatcggatatgacaaagaaccattttcagcaattgaataacataaataatcaaacttcttcccaattcaacatcatacataacttaaaatttaataaaaatttaaacaaatatacatgtccttcaacaagcaacattctcaacatgacaaaaatacatgtctatatgtctcaacatgaaaacaaatacgtgacaacaaatacatgtctacttttaaccttaagccttttgccttgtgattctgatccgatctgagtgtagtgttgagcacttgagctaacgctatagtagctgtgtttgaatttttctagtcaatgatacatgtcttcatcctccaaacaagtcattagtgcatttataaaacaggattggttgcctaacatgtcagctcgggcccaagcttgcatacacatcaaccccgctactgtttttggagcaagtctactacgatgtgggctaattactctcccctagtactaaagacggactcagataccactgttgtaacaggaattgtcattacatctcgagcaatttttctcaaagttggatacttgatccctgcatattgccaccaattgaccagctgagggattgaggattgaggggatggagattagggtttgccctttgccagtttgggcgtttggcatttggctgaaccgctgaatggtgctttggtgggctgacgcctggcggctgggctcaatggacaatggtgggttggtgatttttccattggtgtccatgtgtgggccgacaataatggactaatggttaatttcggatatccaacggattatccgcggat

SEQ ID NO: 43056 - DNA, 5301 bp, Zea Mays
cactttaaaaaaggacatccatgggctccatctcgtcaaaatctgggcggtgaaaccctcaaaccctaatcctttggcccctcaccatggcggacgctgacgacgcgccgccaacgccgcctcctgaggtagtagcccccgaggagcatcccgcggtcgccgaatccgccgttgccgcgcagcaggagggggcagcgacggcccaagtcgataacaagcggaagctcgaggaggctggcgccgacgcggaggcgaacggcaccggcgaggacgccaagcgcccgcgcgtggatggtgagcccgacgctgccacaggcattgagcagcagaacgatgggtcctccgtgaatgtctccgtgaatgtggaggaacccgcagctgcagaggaggataaggttgctcccaccgatggggcagcgacggatggtgataatgacacggccgctcctgctacggattcgcaggcgggttctgatgacaaaccgcttgaagcagcagctgaagctccacaaccggaaagtgatgcagcagctgttgcccaggagatctctcgtatgatcgaagtacccaacagcagggtcggtgtccttattggaaaagctggtgagacaatcaggaacttgcaaatgagctcgggtgcaaagatccaaatcaccaaggacgccgatgcggactcaaatgccctgactcgtccggttgaactagttggaacccttggaagcgttgataaagcagagctgcttattaagagtgtcatagctgaggctgaggctggcggttcccctgccttaatagctagaggatttggaagtggacagcctgggtcagagcaatttgagatgacagttcctgataacaaggttggtctcattatcggaaaaggtggtgatgcaattaaaggcatgcaaaccaaatctggtgctcgtattcagttaataccccaacatcctccagagggcgttacattgactgaaagaattgtacgtgttactgggaataagaagcagattgaacttgcgaaggatttgatcaagcaagctatgaatcaggtgatgtgatcttcctttgtgcctttttgtagtctatttgtgttttcagttctaagtgttgctagatgctggcatataactactttatgcttttgattgttcattcattctgtgattttgctctgatggttgctgatgatgtgatcatgcttcacgattgattgttcttggttcatgatatggttacttttgtgattgtagatgccaaaatcatgttgtctttaatatttgtgacccaacacaaattaatgacatgcctattgagaacatggccttatttcaatcctattatggaccaattggtttcttagctttgggtttcataatacaccttctttatcattgcatgcaatttgtaccatctttctgatcaagccaagttcgagaattccctgataagctttgctgcttctgtaggtgtcccaagtgtactggtattttttgctataaacaaacacactttgcttttgtactttgttgttcatactatgaatatattgccatctctcttgtgttacggagtgttgggccctttaagatttgttataaactaatcactcctctacaattggccttgtatgaagtatctatcttgatatatagcaatgcctaattgggctggaaggtaagtttttcttcatgtttgagttttcatcttccgatgaaagacaaacgagatgccattgctgtcaagatcaatgatgtaaaatttgtaaatcagattcattacctcaacaaatatttcacttcctttcccttgccaaaatcccttatcctcggtgctagcactgtgaatatggtgtatttttctttctcgtttttactggatcatgcatgcttccattccattacctgtccattggagcaaaattcttgatttatttatttaattaataatatggattattgaagggtcaaaaggagtacatgattatacaattcagaaatgaacttttgagctgtaatacatagcaaatgatatgtctggagatctgggtactgtttagattcttgatcccattagcttgattattcttcgtaggacatacactatgagtaggactttcctcatctatcaccattaacaatgtccatgactataggtttgcaagtgctgtcttaccataccagcggattatcgagttgctagataagagatattattctgtttcctacataagcagtctgaactgacacatcaagttcactcgcttccagtttccgtcaattatttttgttgaaggtgccaattggagttggttgggcatcctaatggagatacagctagctttcttcatgggcgccatcgttcttcaacatttacttgcaccggagagggatattgaccattatcccttacccttgcatggtttatgtagttggtaactggtaaggctgtctattgtcgaaaggaaacagaaactgtatggcattggaagactgcaacaagtgtttcattgccatgacaaggctactacagcaccatgtatagacattttcaaggcatacaaaccagtctggcggatatggtccacaaggttaccgccctcagggtcaaggtgccgcttctcagtggggaccacgttctcagaatcatggctatggatacccacctagaggtatgcctccacctcaaaactacaacacaccctacggcagctacccgccgcagcagggaccaccaagaggtggcatgggctgggaccagaggcagggccctccaccccatccttcgtaccagggtggtgcttctgattactacaagcagggatctcagccatatgatagccagccaccgagctaccctcctgggccagggaattacaacagttatggtcaatcacagggtcctaactatggccaacctcaatacccgcaacatgcgcctcagcagaactacagccatgggtatggtgatcctagatacaatgctccccctccgaaccagcagtactatggtcagccgccaatgggcccgcagcaaggctatcctcaacagccagatccctatgctaggcctccatacagtggacctggtcaatggcctcccaggggtgctccggctgcagatggctcttaccaggcgccagctgcatcttatgggccgccttctcagcacccttctgcttatgggcaaacgtacagtgcagcaactggatctgatggatatgctcaacagggttacccacagcagggtgggcaggcaccagctccatatggtcagagtgcaccagcagctccaggctatcctcagcagcaaggtggctatgcacagtacccacagacccaaccagcatatggtgagcaagcagctcaaaccaatgcgagctatgggtaccagggagctccagcagatcctaactatggaagtgcctacccacagccaggatatggtcctcctggtcaggctactggtcaggctggttatgcctcctcagcagccagccagcctgcgtatggccaggcaggatacacccagccgcctacaaatcctccaggttatgagcagtctgcggcaccagcaacaacccagagcggctatgctgcgcccccagcaaatccacagcagcctgctgcagcaaaaggggtctcgccacagcctggtggtggtgctgctgcatatggtgctggtgggcagtggacagcatgaccctcctcgaacctcaaacatggctcgctggtagcaatatcgtgctcaatatttgcaccttccggatgcatccttggttatcggaagagattgtgtaactccttgattagtgatacttggcatctctgtagtagcacctactagtagttcgttggttaactgtgactataaacatcctaattcctattcacttcgaatcaaacttcgcagcttgccaagtaatttttttggatttgtgtttattcatgtaaaatagttactggtttggctcacagaatgatgattctgtttctgcagttcattcaaatttggttctgatggatgttaaacctagtgatgacaatttaacccgcaaatctgaaattcgataggtgcgtgtatgtgtgaagattttgacccgtggttgcaacccatacctaacctgaagtttcgtgggtgttagatgcgggtttttatttcaacctgtatttgacccgaaattcaacccgtatttgactccaaatttggtttactccttattttgcgcaataatgactaaagatacaatagtaattattttcaattagtgacttggttaatgattcatgaagtgttttgttggtgcttaacgtaaggtttaaatccataaatataactcaattattgctggtatttaaatacttataactaaattattgcttgaaagtgtataatgagtaaaacccacgggtgatcttaaacccactcgaaacctgatggatttggatgtgggtttaaatttgcacccgcgtgtgcgatcgcgggtgagtttaggtagatttcacgagtttgatcgcgaacatggtttttctccaccgactcaaatctgattcattgtcatccctagtcaagccgaacatactatccctagtcaagccgaacatactgttgctcttgcaatgtgagaagcgttatgtacatatggatcgattagcggttgattgcaactatagtaagatcttgtccagtagtttatccatatggtcacctaaaatactgttttgcacctaaaatattgttttgcacggtagaccgcactgttcgcagagtggagtttaaaataggagatcataaggaaactgtaccattgtcgaatagtattctactccctctattttcgaatatttgttagctgctagtttatttttgaactaaaacacgataaataaaaaaactaaggaacatactactaagattgtctcaacgggtaatctaaaataggggtcacaaaattgtagatgacattgtttgatgctgtttgtagagtaaagtttgaaataggagacacgatagggaatctgctagagatagcctaaggtcttgatcggttatttccatgccatatgaattggagggaattggaaaaaaataggaaggattttgatttgttatggatttaagtccatccgatcttctccaatctatatgaattaagataaaaatgaacatatgttgagtgtgggggtgaagtagatggtgagggttcccatgctccaagtagatggtgagggtgaagtagaatgtgggtggtgaccccactccaaattgatggtgagggtgaagttgaagatgtcgatggtgatt

SEQ ID NO: 43057 - DNA, 5679 bp, Zea Mays
cactttaaaaaaggacatccatgggctccatctcgtcaaaatctgggcggtgaaaccctcaaaccctaatcctttggcccctcaccatggcggacgctgacgacgcgccgccaacgccgcctcctgaggtagtagcccccgaggagcatcccgcggtcgccgaatccgccgttgccgcgcagcaggagggggcagcgacggcccaagtcgataacaagcggaagctcgaggaggctggcgccgacgcggaggcgaacggcaccggcgaggacgccaagcgcccgcgcgtggatggtgagcccgacgctgccacaggcattgagcagcagaacgatgggtcctccgtgaatgtctccgtgaatgtggaggaacccgcagctgcagaggaggataaggttgctcccaccgatggggcagcgacggatggtgataatgacacggccgctcctgctacggattcgcaggcgggttctgatgacaaaccgcttgaagcagcagctgaagctccacaaccggaaagtgatgcagcagctgttgcccaggagatctctcgtatgatcgaagtacccaacagcagggtcggtgtccttattggaaaagctggtgagacaatcaggaacttgcaaatgagctcgggtgcaaagatccaaatcaccaaggacgccgatgcggactcaaatgccctgactcgtccggttgaactagttggaacccttggaagcgttgataaagcagagctgcttattaagagtgtcatagctgaggctgaggctggcggttcccctgccttaatagctagaggatttggaagtggacagcctgggtcagagcaatttgagatgacagttcctgataacaaggttggtctcattatcggaaaaggtggtgatgcaattaaaggcatgcaaaccaaatctggtgctcgtattcagttaataccccaacatcctccagagggcgttacattgactgaaagaattgtacgtgttactgggaataagaagcagattgaacttgcgaaggatttgatcaagcaagctatgaatcaggtgatgtgatcttcctttgtgcctttttgtagtctatttgtgttttcagttctaagtgttgctagatgctggcatataactactttatgcttttgattgttcattcattctgtgattttgctctgatggttgctgatgatgtgatcatgcttcacgattgattgttcttggttcatgatatggttacttttgtgattgtagatgccaaaatcatgttgtctttaatatttgtgacccaacacaaattaatgacatgcctattgagaacatggccttatttcaatcctattatggaccaattggtttcttagctttgggtttcataatacaccttctttatcattgcatgcaatttgtaccatctttctgatcaagccaagttcgagaattccctgataagctttgctgcttctgtaggtgtcccaagtgtactggtattttttgctataaacaaacacactttgcttttgtactttgttgttcatactatgaatatattgccatctctcttgtgttacggagtgttgggccctttaagatttgttataaactaatcactcctctacaattggccttgtatgaagtatctatcttgatatatagcaatgcctaattgggctggaaggtaagtttttcttcatgtttgagttttcatcttccgatgaaagacaaacgagatgccattgctgtcaagatcaatgatgtaaaatttgtaaatcagattcattacctcaacaaatatttcacttcctttcccttgccaaaatcccttatcctcggtgctagcactgtgaatatggtgtatttttctttctcgtttttactggatcatgcatgcttccattccattacctgtccattggagcaaaattcttgatttatttatttaattaataatatggattattgaagggtcaaaaggagtacatgattatacaattcagaaatgaacttttgagctgtaatacatagcaaatgatatgtctggagatctgggtactgtttagattcttgatcccattagcttgattattcttcgtaggacatacactatgagtaggactttcctcatctatcaccattaacaatgtccatgactataggtttgcaagtgctgtcttaccataccagcggattatcgagttgctagataagagatattattctgtttcctacataagcagtctgaactgacacatcaagttcactcgcttccagtttccgtcaattatttttgttgaaggtgccaattggagttggttgggcatcctaatggagatacagctagctttcttcatgggcgccatcgttcttcaacatttacttgcaccggagagggatattgaccattatcccttacccttgcatggtttatgtagttggtaactggtaaggctgtctattgtcgaaaggaaacagaaactgtatggcattggaagactgcaacaagtgtttcattgccatgacaaggctactacagcaccatgtataggtttgctaaactgaatcgtttgtgactgtatgttgtttgcagaacaaaacttacatatgctatatataaatgattaaggatttacacatcgttacttacatagtgttgtactcttaactagagtttgggttacttagcattattatttttccccattagtaacggttgctattggataatgtgcgatgcagtgcatttaatctcgatactatcgtgttttctattgaggctgtttatgtttatgagatgcatctatatgttaaattctgaagtaacccttctttttattctaaatttcttgttgcaattctcaatgatggttaaccaacaattgatattcctattgtattaatggtgttgcataatgttgtccacagaaatttgtggagattttaagggtttattttcttgaacattgtttcttgaacgatttagtgatcattactggacagtgtttactaagtattgagatatgagctactatgcaggcggatattctcaatgctgttcttatttaactgcattgtgaacagtctgtttcccattgatggattcctattacagttggctttatgtttttctgcggtgtctgttatttacttctctttttggtttcttacatggtttcttgtacagacattttcaaggcatacaaaccagtctggcggatatggtccacaaggttaccgccctcagggtcaaggtgccgcttctcagtggggaccacgttctcagaatcatggctatggatacccacctagaggtatgcctccacctcaaaactacaacacaccctacggcagctacccgccgcagcagggaccaccaagaggtggcatgggctgggaccagaggcagggccctccaccccatccttcgtaccagggtggtgcttctgattactacaagcagggatctcagccatatgatagccagccaccgagctaccctcctgggccagggaattacaacagttatggtcaatcacagggtcctaactatggccaacctcaatacccgcaacatgcgcctcagcagaactacagccatgggtatggtgatcctagatacaatgctccccctccgaaccagcagtactatggtcagccgccaatgggcccgcagcaaggctatcctcagcagcaaggtggctatgcacagtacccacagacccaaccagcatatggtgagcaagcagctcaaaccaatgcgagctatgggtaccagggagctccagcagatcctaactatggaagtgcctacccacagccaggatatggtcctcctggtcaggctactggtcaggctggttatgcctcctcagcagccagccagcctgcgtatggccaggcaggatacacccagccgcctacaaatcctccaggttatgagcagtctgcggcaccagcaacaacccagagcggctatgctgcgcccccagcaaatccacagcagcctgctgcagcaaaaggggtctcgccacagcctggtggtggtgctgctgcatatggtgctggtgggcagtggacagcatgaccctcctcgaacctcaaacatggctcgctggtagcaatatcgtgctcaatatttgcaccttccggatgcatccttggttatcggaagagattgtgtaactccttgattagtgatacttggcatctctgtagtagcacctactagtagttcgttggttaactgtgactataaacatcctaattcctattcacttcgaatcaaacttcgcagcttgccaagtaatttttttggatttgtgtttattcatgtaaaatagttactggtttggctcacagaatgatgattctgtttctgcagttcattcaaatttggttctgatggatgttaaacctagtgatgacaatttaacccgcaaatctgaaattcgataggtgcgtgtatgtgtgaagattttgacccgtggttgcaacccatacctaacctgaagtttcgtgggtgttagatgcgggtttttatttcaacctgtatttgacccgaaattcaacccgtatttgactccaaatttggtttactccttattttgcgcaataatgactaaagatacaatagtaattattttcaattagtgacttggttaatgattcatgaagtgttttgttggtgcttaacgtaaggtttaaatccataaatataactcaattattgctggtatttaaatacttataactaaattattgcttgaaagtgtataatgagtaaaacccacgggtgatcttaaacccactcgaaacctgatggatttggatgtgggtttaaatttgcacccgcgtgtgcgatcgcgggtgagtttaggtagatttcacgagtttgatcgcgaacatggtttttctccaccgactcaaatctgattcattgtcatccctagtcaagccgaacatactatccctagtcaagccgaacatactgttgctcttgcaatgtgagaagcgttatgtacatatggatcgattagcggttgattgcaactatagtaagatcttgtccagtagtttatccatatggtcacctaaaatactgttttgcacctaaaatattgttttgcacggtagaccgcactgttcgcagagtggagtttaaaataggagatcataaggaaactgtaccattgtcgaatagtattctactccctctattttcgaatatttgttagctgctagtttatttttgaactaaaacacgataaataaaaaaactaaggaacatactactaagattgtctcaacgggtaatctaaaataggggtcacaaaattgtagatgacattgtttgatgctgtttgtagagtaaagtttgaaataggagacacgatagggaatctgctagagatagcctaaggtcttgatcggttatttccatgccatatgaattggagggaattggaaaaaaataggaaggattttgatttgttatggatttaagtccatccgatcttctccaatctatatgaattaagataaaaatgaacatatgttgagtgtgggggtgaagtagatggtgagggttcccatgctccaagtagatggtgagggtgaagtagaatgtgggtggtgaccccactccaaattgatggtgagggtgaagttgaagatgtcgatggtgatt

SEQ ID NO: 43058 - DNA, 5198 bp, Zea Mays
cactttaaaaaaggacatccatgggctccatctcgtcaaaatctgggcggtgaaaccctcaaaccctaatcctttggcccctcaccatggcggacgctgacgacgcgccgccaacgccgcctcctgaggtagtagcccccgaggagcatcccgcggtcgccgaatccgccgttgccgcgcagcaggagggggcagcgacggcccaagtcgataacaagcggaagctcgaggaggctggcgccgacgcggaggcgaacggcaccggcgaggacgccaagcgcccgcgcgtggatggtgagcccgacgctgccacaggcattgagcagcagaacgatgggtcctccgtgaatgtctccgtgaatgtggaggaacccgcagctgcagaggaggataaggttgctcccaccgatggggcagcgacggatggtgataatgacacggccgctcctgctacggattcgcaggcgggttctgatgacaaaccgcttgaagcagcagctgaagctccacaaccggaaagtgatgcagcagctgttgcccaggagatctctcgtatgatcgaagtacccaacagcagggtcggtgtccttattggaaaagctggtgagacaatcaggaacttgcaaatgagctcgggtgcaaagatccaaatcaccaaggacgccgatgcggactcaaatgccctgactcgtccggttgaactagttggaacccttggaagcgttgataaagcagagctgcttattaagagtgtcatagctgaggctgaggctggcggttcccctgccttaatagctagaggatttggaagtggacagcctgggtcagagcaatttgagatgacagttcctgataacaaggttggtctcattatcggaaaaggtggtgatgcaattaaaggcatgcaaaccaaatctggtgctcgtattcagttaataccccaacatcctccagagggcgttacattgactgaaagaattgtacgtgttactgggaataagaagcagattgaacttgcgaaggatttgatcaagcaagctatgaatcaggtgatgtgatcttcctttgtgcctttttgtagtctatttgtgttttcagttctaagtgttgctagatgctggcatataactactttatgcttttgattgttcattcattctgtgattttgctctgatggttgctgatgatgtgatcatgcttcacgattgattgttcttggttcatgatatggttacttttgtgattgtagatgccaaaatcatgttgtctttaatatttgtgacccaacacaaattaatgacatgcctattgagaacatggccttatttcaatcctattatggaccaattggtttcttagctttgggtttcataatacaccttctttatcattgcatgcaatttgtaccatctttctgatcaagccaagttcgagaattccctgataagctttgctgcttctgtaggtgtcccaagtgtactggtattttttgctataaacaaacacactttgcttttgtactttgttgttcatactatgaatatattgccatctctcttgtgttacggagtgttgggccctttaagatttgttataaactaatcactcctctacaattggccttgtatgaagtatctatcttgatatatagcaatgcctaattgggctggaaggtaagtttttcttcatgtttgagttttcatcttccgatgaaagacaaacgagatgccattgctgtcaagatcaatgatgtaaaatttgtaaatcagattcattacctcaacaaatatttcacttcctttcccttgccaaaatcccttatcctcggtgctagcactgtgaatatggtgtatttttctttctcgtttttactggatcatgcatgcttccattccattacctgtccattggagcaaaattcttgatttatttatttaattaataatatggattattgaagggtcaaaaggagtacatgattatacaattcagaaatgaacttttgagctgtaatacatagcaaatgatatgtctggagatctgggtactgtttagattcttgatcccattagcttgattattcttcgtaggacatacactatgagtaggactttcctcatctatcaccattaacaatgtccatgactataggtttgcaagtgctgtcttaccataccagcggattatcgagttgctagataagagatattattctgtttcctacataagcagtctgaactgacacatcaagttcactcgcttccagtttccgtcaattatttttgttgaaggtgccaattggagttggttgggcatcctaatggagatacagctagctttcttcatgggcgccatcgttcttcaacatttacttgcaccggagagggatattgaccattatcccttacccttgcatggtttatgtagttggtaactgacattttcaaggcatacaaaccagtctggcggatatggtccacaaggttaccgccctcagggtcaaggtgccgcttctcagtggggaccacgttctcagaatcatggctatggatacccacctagaggtatgcctccacctcaaaactacaacacaccctacggcagctacccgccgcagcagggaccaccaagaggtggcatgggctgggaccagaggcagggccctccaccccatccttcgtaccagggtggtgcttctgattactacaagcagggatctcagccatatgatagccagccaccgagctaccctcctgggccagggaattacaacagttatggtcaatcacagggtcctaactatggccaacctcaatacccgcaacatgcgcctcagcagaactacagccatgggtatggtgatcctagatacaatgctccccctccgaaccagcagtactatggtcagccgccaatgggcccgcagcaaggctatcctcaacagccagatccctatgctaggcctccatacagtggacctggtcaatggcctcccaggggtgctccggctgcagatggctcttaccaggcgccagctgcatcttatgggccgccttctcagcacccttctgcttatgggcaaacgtacagtgcagcaactggatctgatggatatgctcaacagggttacccacagcagggtgggcaggcaccagctccatatggtcagagtgcaccagcagctccaggctatcctcagcagcaaggtggctatgcacagtacccacagacccaaccagcatatggtgagcaagcagctcaaaccaatgcgagctatgggtaccagggagctccagcagatcctaactatggaagtgcctacccacagccaggatatggtcctcctggtcaggctactggtcaggctggttatgcctcctcagcagccagccagcctgcgtatggccaggcaggatacacccagccgcctacaaatcctccaggttatgagcagtctgcggcaccagcaacaacccagagcggctatgctgcgcccccagcaaatccacagcagcctgctgcagcaaaaggggtctcgccacagcctggtggtggtgctgctgcatatggtgctggtgggcagtggacagcatgaccctcctcgaacctcaaacatggctcgctggtagcaatatcgtgctcaatatttgcaccttccggatgcatccttggttatcggaagagattgtgtaactccttgattagtgatacttggcatctctgtagtagcacctactagtagttcgttggttaactgtgactataaacatcctaattcctattcacttcgaatcaaacttcgcagcttgccaagtaatttttttggatttgtgtttattcatgtaaaatagttactggtttggctcacagaatgatgattctgtttctgcagttcattcaaatttggttctgatggatgttaaacctagtgatgacaatttaacccgcaaatctgaaattcgataggtgcgtgtatgtgtgaagattttgacccgtggttgcaacccatacctaacctgaagtttcgtgggtgttagatgcgggtttttatttcaacctgtatttgacccgaaattcaacccgtatttgactccaaatttggtttactccttattttgcgcaataatgactaaagatacaatagtaattattttcaattagtgacttggttaatgattcatgaagtgttttgttggtgcttaacgtaaggtttaaatccataaatataactcaattattgctggtatttaaatacttataactaaattattgcttgaaagtgtataatgagtaaaacccacgggtgatcttaaacccactcgaaacctgatggatttggatgtgggtttaaatttgcacccgcgtgtgcgatcgcgggtgagtttaggtagatttcacgagtttgatcgcgaacatggtttttctccaccgactcaaatctgattcattgtcatccctagtcaagccgaacatactatccctagtcaagccgaacatactgttgctcttgcaatgtgagaagcgttatgtacatatggatcgattagcggttgattgcaactatagtaagatcttgtccagtagtttatccatatggtcacctaaaatactgttttgcacctaaaatattgttttgcacggtagaccgcactgttcgcagagtggagtttaaaataggagatcataaggaaactgtaccattgtcgaatagtattctactccctctattttcgaatatttgttagctgctagtttatttttgaactaaaacacgataaataaaaaaactaaggaacatactactaagattgtctcaacgggtaatctaaaataggggtcacaaaattgtagatgacattgtttgatgctgtttgtagagtaaagtttgaaataggagacacgatagggaatctgctagagatagcctaaggtcttgatcggttatttccatgccatatgaattggagggaattggaaaaaaataggaaggattttgatttgttatggatttaagtccatccgatcttctccaatctatatgaattaagataaaaatgaacatatgttgagtgtgggggtgaagtagatggtgagggttcccatgctccaagtagatggtgagggtgaagtagaatgtgggtggtgaccccactccaaattgatggtgagggtgaagttgaagatgtcgatggtgatt

SEQ ID NO: 43059 - DNA, 4834 bp, Zea Mays
cactttaaaaaaggacatccatgggctccatctcgtcaaaatctgggcggtgaaaccctcaaaccctaatcctttggcccctcaccatggcggacgctgacgacgcgccgccaacgccgcctcctgaggtagtagcccccgaggagcatcccgcggtcgccgaatccgccgttgccgcgcagcaggagggggcagcgacggcccaagtcgataacaagcggaagctcgaggaggctggcgccgacgcggaggcgaacggcaccggcgaggacgccaagcgcccgcgcgtggatggtgagcccgacgctgccacaggcattgagcagcagaacgatgggtcctccgtgaatgtctccgtgaatgtggaggaacccgcagctgcagaggaggataaggttgctcccaccgatggggcagcgacggatggtgataatgacacggccgctcctgctacggattcgcaggcgggttctgatgacaaaccgcttgaagcagcagctgaagctccacaaccggaaagtgatgcagcagctgttgcccaggagatctctcgtatgatcgaagtacccaacagcagggtcggtgtccttattggaaaagctggtgagacaatcaggaacttgcaaatgagctcgggtgcaaagatccaaatcaccaaggacgccgatgcggactcaaatgccctgactcgtccggttgaactagttggaacccttggaagcgttgataaagcagagctgcttattaagagtgtcatagctgaggctgaggctggcggttcccctgccttaatagctagaggatttggaagtggacagcctgggtcagagcaatttgagatgacagttcctgataacaaggttggtctcattatcggaaaaggtggtgatgcaattaaaggcatgcaaaccaaatctggtgctcgtattcagttaataccccaacatcctccagagggcgttacattgactgaaagaattgtacgtgttactgggaataagaagcagattgaacttgcgaaggatttgatcaagcaagctatgaatcaggtttgcaagtgctgtcttaccataccagcggattatcgagttgctagataagagatattattctgtttcctacataagcagtctgaactgacacatcaagttcactcgcttccagtttccgtcaattatttttgttgaaggtgccaattggagttggttgggcatcctaatggagatacagctagctttcttcatgggcgccatcgttcttcaacatttacttgcaccggagagggatattgaccattatcccttacccttgcatggtttatgtagttggtaactggtaaggctgtctattgtcgaaaggaaacagaaactgtatggcattggaagactgcaacaagtgtttcattgccatgacaaggctactacagcaccatgtataggtttgctaaactgaatcgtttgtgactgtatgttgtttgcagaacaaaacttacatatgctatatataaatgattaaggatttacacatcgttacttacatagtgttgtactcttaactagagtttgggttacttagcattattatttttccccattagtaacggttgctattggataatgtgcgatgcagtgcatttaatctcgatactatcgtgttttctattgaggctgtttatgtttatgagatgcatctatatgttaaattctgaagtaacccttctttttattctaaatttcttgttgcaattctcaatgatggttaaccaacaattgatattcctattgtattaatggtgttgcataatgttgtccacagaaatttgtggagattttaagggtttattttcttgaacattgtttcttgaacgatttagtgatcattactggacagtgtttactaagtattgagatatgagctactatgcaggcggatattctcaatgctgttcttatttaactgcattgtgaacagtctgtttcccattgatggattcctattacagttggctttatgtttttctgcggtgtctgttatttacttctctttttggtttcttacatggtttcttgtacagacattttcaaggcatacaaaccagtctggcggatatggtccacaaggttaccgccctcagggtcaaggtgccgcttctcagtggggaccacgttctcagaatcatggctatggatacccacctagaggtatgcctccacctcaaaactacaacacaccctacggcagctacccgccgcagcagggaccaccaagaggtggcatgggctgggaccagaggcagggccctccaccccatccttcgtaccagggtggtgcttctgattactacaagcagggatctcagccatatgatagccagccaccgagctaccctcctgggccagggaattacaacagttatggtcaatcacagggtcctaactatggccaacctcaatacccgcaacatgcgcctcagcagaactacagccatgggtatggtgatcctagatacaatgctccccctccgaaccagcagtactatggtcagccgccaatgggcccgcagcaaggctatcctcaacagccagatccctatgctaggcctccatacagtggacctggtcaatggcctcccaggggtgctccggctgcagatggctcttaccaggcgccagctgcatcttatgggccgccttctcagcacccttctgcttatgggcaaacgtacagtgcagcaactggatctgatggatatgctcaacagggttacccacagcagggtgggcaggcaccagctccatatggtcagagtgcaccagcagctccaggctatcctcagcagcaaggtggctatgcacagtacccacagacccaaccagcatatggtgagcaagcagctcaaaccaatgcgagctatgggtaccagggagctccagcagatcctaactatggaagtgcctacccacagccaggatatggtcctcctggtcaggctactggtcaggctggttatgcctcctcagcagccagccagcctgcgtatggccaggcaggatacacccagccgcctacaaatcctccaggttatgagcagtctgcggcaccagcaacaacccagagcggctatgctgcgcccccagcaaatccacagcagcctgctgcagcaaaaggggtctcgccacagcctggtggtggtgctgctgcatatggtgctggtgggcagtggacagcatgaccctcctcgaacctcaaacatggctcgctggtagcaatatcgtgctcaatatttgcaccttccggatgcatccttggttatcggaagagattgtgtaactccttgattagtgatacttggcatctctgtagtagcacctactagtagttcgttggttaactgtgactataaacatcctaattcctattcacttcgaatcaaacttcgcagcttgccaagtaatttttttggatttgtgtttattcatgtaaaatagttactggtttggctcacagaatgatgattctgtttctgcagttcattcaaatttggttctgatggatgttaaacctagtgatgacaatttaacccgcaaatctgaaattcgataggtgcgtgtatgtgtgaagattttgacccgtggttgcaacccatacctaacctgaagtttcgtgggtgttagatgcgggtttttatttcaacctgtatttgacccgaaattcaacccgtatttgactccaaatttggtttactccttattttgcgcaataatgactaaagatacaatagtaattattttcaattagtgacttggttaatgattcatgaagtgttttgttggtgcttaacgtaaggtttaaatccataaatataactcaattattgctggtatttaaatacttataactaaattattgcttgaaagtgtataatgagtaaaacccacgggtgatcttaaacccactcgaaacctgatggatttggatgtgggtttaaatttgcacccgcgtgtgcgatcgcgggtgagtttaggtagatttcacgagtttgatcgcgaacatggtttttctccaccgactcaaatctgattcattgtcatccctagtcaagccgaacatactatccctagtcaagccgaacatactgttgctcttgcaatgtgagaagcgttatgtacatatggatcgattagcggttgattgcaactatagtaagatcttgtccagtagtttatccatatggtcacctaaaatactgttttgcacctaaaatattgttttgcacggtagaccgcactgttcgcagagtggagtttaaaataggagatcataaggaaactgtaccattgtcgaatagtattctactccctctattttcgaatatttgttagctgctagtttatttttgaactaaaacacgataaataaaaaaactaaggaacatactactaagattgtctcaacgggtaatctaaaataggggtcacaaaattgtagatgacattgtttgatgctgtttgtagagtaaagtttgaaataggagacacgatagggaatctgctagagatagcctaaggtcttgatcggttatttccatgccatatgaattggagggaattggaaaaaaataggaaggattttgatttgttatggatttaagtccatccgatcttctccaatctatatgaattaagataaaaatgaacatatgttgagtgtgggggtgaagtagatggtgagggttcccatgctccaagtagatggtgagggtgaagtagaatgtgggtggtgaccccactccaaattgatggtgagggtgaagttgaagatgtcgatggtgatt

SEQ ID NO: 43060 - DNA, 4694 bp, Zea Mays
cactttaaaaaaggacatccatgggctccatctcgtcaaaatctgggcggtgaaaccctcaaaccctaatcctttggcccctcaccatggcggacgctgacgacgcgccgccaacgccgcctcctgaggtagtagcccccgaggagcatcccgcggtcgccgaatccgccgttgccgcgcagcaggagggggcagcgacggcccaagtcgataacaagcggaagctcgaggaggctggcgccgacgcggaggcgaacggcaccggcgaggacgccaagcgcccgcgcgtggatggtgagcccgacgctgccacaggcattgagcagcagaacgatgggtcctccgtgaatgtctccgtgaatgtggaggaacccgcagctgcagaggaggataaggttgctcccaccgatggggcagcgacggatggtgataatgacacggccgctcctgctacggattcgcaggcgggttctgatgacaaaccgcttgaagcagcagctgaagctccacaaccggaaagtgatgcagcagctgttgcccaggagatctctcgtatgatcgaagtacccaacagcagggtcggtgtccttattggaaaagctggtgagacaatcaggaacttgcaaatgagctcgggtgcaaagatccaaatcaccaaggacgccgatgcggactcaaatgccctgactcgtccggttgaactagttggaacccttggaagcgttgataaagcagagctgcttattaagagtgtcatagctgaggctgaggctggcggttcccctgccttaatagctagaggatttggaagtggacagcctgggtcagagcaatttgagatgacagttcctgataacaaggttggtctcattatcggaaaaggtggtgatgcaattaaaggcatgcaaaccaaatctggtgctcgtattcagttaataccccaacatcctccagagggcgttacattgactgaaagaattgtacgtgttactgggaataagaagcagattgaacttgcgaaggatttgatcaagcaagctatgaatcaggtgccaattggagttggttgggcatcctaatggagatacagctagctttcttcatgggcgccatcgttcttcaacatttacttgcaccggagagggatattgaccattatcccttacccttgcatggtttatgtagttggtaactggtaaggctgtctattgtcgaaaggaaacagaaactgtatggcattggaagactgcaacaagtgtttcattgccatgacaaggctactacagcaccatgtataggtttgctaaactgaatcgtttgtgactgtatgttgtttgcagaacaaaacttacatatgctatatataaatgattaaggatttacacatcgttacttacatagtgttgtactcttaactagagtttgggttacttagcattattatttttccccattagtaacggttgctattggataatgtgcgatgcagtgcatttaatctcgatactatcgtgttttctattgaggctgtttatgtttatgagatgcatctatatgttaaattctgaagtaacccttctttttattctaaatttcttgttgcaattctcaatgatggttaaccaacaattgatattcctattgtattaatggtgttgcataatgttgtccacagaaatttgtggagattttaagggtttattttcttgaacattgtttcttgaacgatttagtgatcattactggacagtgtttactaagtattgagatatgagctactatgcaggcggatattctcaatgctgttcttatttaactgcattgtgaacagtctgtttcccattgatggattcctattacagttggctttatgtttttctgcggtgtctgttatttacttctctttttggtttcttacatggtttcttgtacagacattttcaaggcatacaaaccagtctggcggatatggtccacaaggttaccgccctcagggtcaaggtgccgcttctcagtggggaccacgttctcagaatcatggctatggatacccacctagaggtatgcctccacctcaaaactacaacacaccctacggcagctacccgccgcagcagggaccaccaagaggtggcatgggctgggaccagaggcagggccctccaccccatccttcgtaccagggtggtgcttctgattactacaagcagggatctcagccatatgatagccagccaccgagctaccctcctgggccagggaattacaacagttatggtcaatcacagggtcctaactatggccaacctcaatacccgcaacatgcgcctcagcagaactacagccatgggtatggtgatcctagatacaatgctccccctccgaaccagcagtactatggtcagccgccaatgggcccgcagcaaggctatcctcaacagccagatccctatgctaggcctccatacagtggacctggtcaatggcctcccaggggtgctccggctgcagatggctcttaccaggcgccagctgcatcttatgggccgccttctcagcacccttctgcttatgggcaaacgtacagtgcagcaactggatctgatggatatgctcaacagggttacccacagcagggtgggcaggcaccagctccatatggtcagagtgcaccagcagctccaggctatcctcagcagcaaggtggctatgcacagtacccacagacccaaccagcatatggtgagcaagcagctcaaaccaatgcgagctatgggtaccagggagctccagcagatcctaactatggaagtgcctacccacagccaggatatggtcctcctggtcaggctactggtcaggctggttatgcctcctcagcagccagccagcctgcgtatggccaggcaggatacacccagccgcctacaaatcctccaggttatgagcagtctgcggcaccagcaacaacccagagcggctatgctgcgcccccagcaaatccacagcagcctgctgcagcaaaaggggtctcgccacagcctggtggtggtgctgctgcatatggtgctggtgggcagtggacagcatgaccctcctcgaacctcaaacatggctcgctggtagcaatatcgtgctcaatatttgcaccttccggatgcatccttggttatcggaagagattgtgtaactccttgattagtgatacttggcatctctgtagtagcacctactagtagttcgttggttaactgtgactataaacatcctaattcctattcacttcgaatcaaacttcgcagcttgccaagtaatttttttggatttgtgtttattcatgtaaaatagttactggtttggctcacagaatgatgattctgtttctgcagttcattcaaatttggttctgatggatgttaaacctagtgatgacaatttaacccgcaaatctgaaattcgataggtgcgtgtatgtgtgaagattttgacccgtggttgcaacccatacctaacctgaagtttcgtgggtgttagatgcgggtttttatttcaacctgtatttgacccgaaattcaacccgtatttgactccaaatttggtttactccttattttgcgcaataatgactaaagatacaatagtaattattttcaattagtgacttggttaatgattcatgaagtgttttgttggtgcttaacgtaaggtttaaatccataaatataactcaattattgctggtatttaaatacttataactaaattattgcttgaaagtgtataatgagtaaaacccacgggtgatcttaaacccactcgaaacctgatggatttggatgtgggtttaaatttgcacccgcgtgtgcgatcgcgggtgagtttaggtagatttcacgagtttgatcgcgaacatggtttttctccaccgactcaaatctgattcattgtcatccctagtcaagccgaacatactatccctagtcaagccgaacatactgttgctcttgcaatgtgagaagcgttatgtacatatggatcgattagcggttgattgcaactatagtaagatcttgtccagtagtttatccatatggtcacctaaaatactgttttgcacctaaaatattgttttgcacggtagaccgcactgttcgcagagtggagtttaaaataggagatcataaggaaactgtaccattgtcgaatagtattctactccctctattttcgaatatttgttagctgctagtttatttttgaactaaaacacgataaataaaaaaactaaggaacatactactaagattgtctcaacgggtaatctaaaataggggtcacaaaattgtagatgacattgtttgatgctgtttgtagagtaaagtttgaaataggagacacgatagggaatctgctagagatagcctaaggtcttgatcggttatttccatgccatatgaattggagggaattggaaaaaaataggaaggattttgatttgttatggatttaagtccatccgatcttctccaatctatatgaattaagataaaaatgaacatatgttgagtgtgggggtgaagtagatggtgagggttcccatgctccaagtagatggtgagggtgaagtagaatgtgggtggtgaccccactccaaattgatggtgagggtgaagttgaagatgtcgatggtgatt

SEQ ID NO: 43061 - DNA, 5086 bp, Zea Mays
cactttaaaaaaggacatccatgggctccatctcgtcaaaatctgggcggtgaaaccctcaaaccctaatcctttggcccctcaccatggcggacgctgacgacgcgccgccaacgccgcctcctgaggtagtagcccccgaggagcatcccgcggtcgccgaatccgccgttgccgcgcagcaggagggggcagcgacggcccaagtcgataacaagcggaagctcgaggaggctggcgccgacgcggaggcgaacggcaccggcgaggacgccaagcgcccgcgcgtggatggtgagcccgacgctgccacaggcattgagcagcagaacgatgggtcctccgtgaatgtctccgtgaatgtggaggaacccgcagctgcagaggaggataaggttgctcccaccgatggggcagcgacggatggtgataatgacacggccgctcctgctacggattcgcaggcgggttctgatgacaaaccgcttgaagcagcagctgaagctccacaaccggaaagtgatgcagcagctgttgcccaggagatctctcgtatgatcgaagtacccaacagcagggtcggtgtccttattggaaaagctggtgagacaatcaggaacttgcaaatgagctcgggtgcaaagatccaaatcaccaaggacgccgatgcggactcaaatgccctgactcgtccggttgaactagttggaacccttggaagcgttgataaagcagagctgcttattaagagtgtcatagctgaggctgaggctggcggttcccctgccttaatagctagaggatttggaagtggacagcctgggtcagagcaatttgagatgacagttcctgataacaaggttggtctcattatcggaaaaggtggtgatgcaattaaaggcatgcaaaccaaatctggtgctcgtattcagttaataccccaacatcctccagagggcgttacattgactgaaagaattgtacgtgttactgggaataagaagcagattgaacttgcgaaggatttgatcaagcaagctatgaatcaggtgatgtgatcttcctttgtgcctttttgtagtctatttgtgttttcagttctaagtgttgctagatgctggcatataactactttatgcttttgattgttcattcattctgtgattttgctctgatggttgctgatgatgtgatcatgcttcacgattgattgttcttggttcatgatatggttacttttgtgattgtagatgccaaaatcatgttgtctttaatatttgtgacccaacacaaattaatgacatgcctattgagaacatggccttatttcaatcctattatggaccaattggtttcttagctttgggtttcataatacaccttctttatcattgcatgcaatttgtaccatctttctgatcaagccaagttcgagaattccctgataagctttgctgcttctgtaggtgtcccaagtgtactggtattttttgctataaacaaacacactttgcttttgtactttgttgttcatactatgaatatattgccatctctcttgtgttacggagtgttgggccctttaagatttgttataaactaatcactcctctacaattggccttgtatgaagtatctatcttgatatatagcaatgcctaattgggctggaaggtaagtttttcttcatgtttgagttttcatcttccgatgaaagacaaacgagatgccattgctgtcaagatcaatgatgtaaaatttgtaaatcagattcattacctcaacaaatatttcacttcctttcccttgccaaaatcccttatcctcggtgctagcactgtgaatatggtgtatttttctttctcgtttttactggatcatgcatgcttccattccattacctgtccattggagcaaaattcttgatttatttatttaattaataatatggattattgaaggtaacccttctttttattctaaatttcttgttgcaattctcaatgatggttaaccaacaattgatattcctattgtattaatggtgttgcataatgttgtccacagaaatttgtggagattttaagggtttattttcttgaacattgtttcttgaacgatttagtgatcattactggacagtgtttactaagtattgagatatgagctactatgcaggcggatattctcaatgctgttcttatttaactgcattgtgaacagtctgtttcccattgatggattcctattacagttggctttatgtttttctgcggtgtctgttatttacttctctttttggtttcttacatggtttcttgtacagacattttcaaggcatacaaaccagtctggcggatatggtccacaaggttaccgccctcagggtcaaggtgccgcttctcagtggggaccacgttctcagaatcatggctatggatacccacctagaggtatgcctccacctcaaaactacaacacaccctacggcagctacccgccgcagcagggaccaccaagaggtggcatgggctgggaccagaggcagggccctccaccccatccttcgtaccagggtggtgcttctgattactacaagcagggatctcagccatatgatagccagccaccgagctaccctcctgggccagggaattacaacagttatggtcaatcacagggtcctaactatggccaacctcaatacccgcaacatgcgcctcagcagaactacagccatgggtatggtgatcctagatacaatgctccccctccgaaccagcagtactatggtcagccgccaatgggcccgcagcaaggctatcctcaacagccagatccctatgctaggcctccatacagtggacctggtcaatggcctcccaggggtgctccggctgcagatggctcttaccaggcgccagctgcatcttatgggccgccttctcagcacccttctgcttatgggcaaacgtacagtgcagcaactggatctgatggatatgctcaacagggttacccacagcagggtgggcaggcaccagctccatatggtcagagtgcaccagcagctccaggctatcctcagcagcaaggtggctatgcacagtacccacagacccaaccagcatatggtgagcaagcagctcaaaccaatgcgagctatgggtaccagggagctccagcagatcctaactatggaagtgcctacccacagccaggatatggtcctcctggtcaggctactggtcaggctggttatgcctcctcagcagccagccagcctgcgtatggccaggcaggatacacccagccgcctacaaatcctccaggttatgagcagtctgcggcaccagcaacaacccagagcggctatgctgcgcccccagcaaatccacagcagcctgctgcagcaaaaggggtctcgccacagcctggtggtggtgctgctgcatatggtgctggtgggcagtggacagcatgaccctcctcgaacctcaaacatggctcgctggtagcaatatcgtgctcaatatttgcaccttccggatgcatccttggttatcggaagagattgtgtaactccttgattagtgatacttggcatctctgtagtagcacctactagtagttcgttggttaactgtgactataaacatcctaattcctattcacttcgaatcaaacttcgcagcttgccaagtaatttttttggatttgtgtttattcatgtaaaatagttactggtttggctcacagaatgatgattctgtttctgcagttcattcaaatttggttctgatggatgttaaacctagtgatgacaatttaacccgcaaatctgaaattcgataggtgcgtgtatgtgtgaagattttgacccgtggttgcaacccatacctaacctgaagtttcgtgggtgttagatgcgggtttttatttcaacctgtatttgacccgaaattcaacccgtatttgactccaaatttggtttactccttattttgcgcaataatgactaaagatacaatagtaattattttcaattagtgacttggttaatgattcatgaagtgttttgttggtgcttaacgtaaggtttaaatccataaatataactcaattattgctggtatttaaatacttataactaaattattgcttgaaagtgtataatgagtaaaacccacgggtgatcttaaacccactcgaaacctgatggatttggatgtgggtttaaatttgcacccgcgtgtgcgatcgcgggtgagtttaggtagatttcacgagtttgatcgcgaacatggtttttctccaccgactcaaatctgattcattgtcatccctagtcaagccgaacatactatccctagtcaagccgaacatactgttgctcttgcaatgtgagaagcgttatgtacatatggatcgattagcggttgattgcaactatagtaagatcttgtccagtagtttatccatatggtcacctaaaatactgttttgcacctaaaatattgttttgcacggtagaccgcactgttcgcagagtggagtttaaaataggagatcataaggaaactgtaccattgtcgaatagtattctactccctctattttcgaatatttgttagctgctagtttatttttgaactaaaacacgataaataaaaaaactaaggaacatactactaagattgtctcaacgggtaatctaaaataggggtcacaaaattgtagatgacattgtttgatgctgtttgtagagtaaagtttgaaataggagacacgatagggaatctgctagagatagcctaaggtcttgatcggttatttccatgccatatgaattggagggaattggaaaaaaataggaaggattttgatttgttatggatttaagtccatccgatcttctccaatctatatgaattaagataaaaatgaacatatgttgagtgtgggggtgaagtagatggtgagggttcccatgctccaagtagatggtgagggtgaagtagaatgtgggtggtgaccccactccaaattgatggtgagggtgaagttgaagatgtcgatggtgatt

SEQ ID NO: 43062 - DNA, 5963 bp, Zea Mays
cactttaaaaaaggacatccatgggctccatctcgtcaaaatctgggcggtgaaaccctcaaaccctaatcctttggcccctcaccatggcggacgctgacgacgcgccgccaacgccgcctcctgaggtagtagcccccgaggagcatcccgcggtcgccgaatccgccgttgccgcgcagcaggagggggcagcgacggcccaagtcgataacaagcggaagctcgaggaggctggcgccgacgcggaggcgaacggcaccggcgaggacgccaagcgcccgcgcgtggatggcattgagcagcagaacgatgggtcctccgtgaatgtctccgtgaatgtggaggaacccgcagctgcagaggaggataaggttgctcccaccgatggggcagcgacggatggtgataatgacacggccgctcctgctacggattcgcaggcgggttctgatgacaaaccgcttgaagcagcagctgaagctccacaaccggaaagtgatgcagcagctgttgcccaggagatctctcgtcggtgtccttattggaaaagctggtgagacaatcaggaacttgcaaatgagctcgggtgcaaagatccaaatcaccaaggacgccgatgcggactcaaatgccctgactcgtccggttgaactagttggaacccttggaagcgttgataaagcagagctgcttattaagagtgtcatagctgaggctgaggctggcggttcccctgccttaatagctagaggatttggaagtggacagcctgggtcagagcaatttgagatgacagttcctgataacaaggttctttcttggtgctaaagatgttgttatagtgtgccattttatatgttcaaccattacctgtataccataggttggtctcattatcggaaaaggtggtgatgcaattaaaggcatgcaaaccaaatctggtgctcgtattcagttaataccccaacatcctccagagggcgttacattgactgaaagaattgtacgtgttactgggaataagaagcagattgaacttgcgaaggatttgatcaagcaagctatgaatcaggtgatgtgatcttcctttgtgcctttttgtagtctatttgtgttttcagttctaagtgttgctagatgctggcatataactactttatgcttttgattgttcattcattctgtgattttgctctgatggttgctgatgatgtgatcatgcttcacgattgattgttcttggttcatgatatggttacttttgtgattgtagatgccaaaatcatgttgtctttaatatttgtgacccaacacaaattaatgacatgcctattgagaacatggccttatttcaatcctattatggaccaattggtttcttagctttgggtttcataatacaccttctttatcattgcatgcaatttgtaccatctttctgatcaagccaagttcgagaattccctgataagctttgctgcttctgtaggtgtcccaagtgtactggtattttttgctataaacaaacacactttgcttttgtactttgttgttcatactatgaatatattgccatctctcttgtgttacggagtgttgggccctttaagatttgttataaactaatcactcctctacaattggccttgtatgaagtatctatcttgatatatagcaatgcctaattgggctggaaggtaagtttttcttcatgtttgagttttcatcttccgatgaaagacaaacgagatgccattgctgtcaagatcaatgatgtaaaatttgtaaatcagattcattacctcaacaaatatttcacttcctttcccttgccaaaatcccttatcctcggtgctagcactgtgaatatggtgtatttttctttctcgtttttactggatcatgcatgcttccattccattacctgtccattggagcaaaattcttgatttatttatttaattaataatatggattattgaagggtcaaaaggagtacatgattatacaattcagaaatgaacttttgagctgtaatacatagcaaatgatatgtctggagatctgggtactgtttagattcttgatcccattagcttgattattcttcgtaggacatacactatgagtaggactttcctcatctatcaccattaacaatgtccatgactataggtttgcaagtgctgtcttaccataccagcggattatcgagttgctagataagagatattattctgtttcctacataagcagtctgaactgacacatcaagttcactcgcttccagtttccgtcaattatttttgttgaaggtgccaattggagttggttgggcatcctaatggagatacagctagctttcttcatgggcgccatcgttcttcaacatttacttgcaccggagagggatattgaccattatcccttacccttgcatggtttatgtagttggtaactggtaaggctgtctattgtcgaaaggaaacagaaactgtatggcattggaagactgcaacaagtgtttcattgccatgacaaggctactacagcaccatgtataggtttgctaaactgaatcgtttgtgactgtatgttgtttgcagaacaaaacttacatatgctatatataaatgattaaggatttacacatcgttacttacatagtgttgtactcttaactagagtttgggttacttagcattattatttttccccattagtaacggttgctattggataatgtgcgatgcagtgcatttaatctcgatactatcgtgttttctattgaggctgtttatgtttatgagatgcatctatatgttaaattctgaagtaacccttctttttattctaaatttcttgttgcaattctcaatgatggttaaccaacaattgatattcctattgtattaatggtgttgcataatgttgtccacagaaatttgtggagattttaagggtttattttcttgaacattgtttcttgaacgatttagtgatcattactggacagtgtttactaagtattgagatatgagctactatgcaggcggatattctcaatgctgttcttatttaactgcattgtgaacagtctgtttcccattgatggattcctattacagttggctttatgtttttctgcggtgtctgttatttacttctctttttggtttcttacatggtttcttgtacagacattttcaaggcatacaaaccagtctggcggatatggtccacaaggttaccgccctcagggtcaaggtgccgcttctcagtggggaccacgttctcagaatcatggctatggatacccacctagaggtatgcctccacctcaaaactacaacacaccctacggcagctacccgccgcagcagggaccaccaagaggtggcatgggctgggaccagaggcagggccctccaccccatccttcgtaccagggtggtgcttctgattactacaagcagggatctcagccatatgatagccagccaccgagctaccctcctgggccagggaattacaacagttatggtcaatcacagggtcctaactatggccaacctcaatacccgcaacatgcgcctcagcagaactacagccatgggtatggtgatcctagatacaatgctccccctccgaaccagcagtactatggtcagccgccaatgggcccgcagcaaggctatcctcaacagccagatccctatgctaggcctccatacagtggacctggtcaatggcctcccaggggtgctccggctgcagatggctcttaccaggcgccagctgcatcttatgggccgccttctcagcacccttctgcttatgggcaaacgtacagtgcagcaactggatctgatggatatgctcaacagggttacccacagcagggtgggcaggcaccagctccatatggtcagagtgcaccagcagctccaggctatcctcagcagcaaggtggctatgcacagtacccacagacccaaccagcatatggtgagcaagcagctcaaaccaatgcgagctatgggtaccagggagctccagcagatcctaactatggaagtgcctacccacagccaggatatggtcctcctggtcaggctactggtcaggctggttatgcctcctcagcagccagccagcctgcgtatggccaggcaggatacacccagccgcctacaaatcctccaggttatgagcagtctgcggcaccagcaacaacccagagcggctatgctgcgcccccagcaaatccacagcagcctgctgcagcaaaaggggtctcgccacagcctggtggtggtgctgctgcatatggtgctggtgggcagtggacagcatgaccctcctcgaacctcaaacatggctcgctggtagcaatatcgtgctcaatatttgcaccttccggatgcatccttggttatcggaagagattgtgtaactccttgattagtgatacttggcatctctgtagtagcacctactagtagttcgttggttaactgtgactataaacatcctaattcctattcacttcgaatcaaacttcgcagcttgccaagtaatttttttggatttgtgtttattcatgtaaaatagttactggtttggctcacagaatgatgattctgtttctgcagttcattcaaatttggttctgatggatgttaaacctagtgatgacaatttaacccgcaaatctgaaattcgataggtgcgtgtatgtgtgaagattttgacccgtggttgcaacccatacctaacctgaagtttcgtgggtgttagatgcgggtttttatttcaacctgtatttgacccgaaattcaacccgtatttgactccaaatttggtttactccttattttgcgcaataatgactaaagatacaatagtaattattttcaattagtgacttggttaatgattcatgaagtgttttgttggtgcttaacgtaaggtttaaatccataaatataactcaattattgctggtatttaaatacttataactaaattattgcttgaaagtgtataatgagtaaaacccacgggtgatcttaaacccactcgaaacctgatggatttggatgtgggtttaaatttgcacccgcgtgtgcgatcgcgggtgagtttaggtagatttcacgagtttgatcgcgaacatggtttttctccaccgactcaaatctgattcattgtcatccctagtcaagccgaacatactatccctagtcaagccgaacatactgttgctcttgcaatgtgagaagcgttatgtacatatggatcgattagcggttgattgcaactatagtaagatcttgtccagtagtttatccatatggtcacctaaaatactgttttgcacctaaaatattgttttgcacggtagaccgcactgttcgcagagtggagtttaaaataggagatcataaggaaactgtaccattgtcgaatagtattctactccctctattttcgaatatttgttagctgctagtttatttttgaactaaaacacgataaataaaaaaactaaggaacatactactaagattgtctcaacgggtaatctaaaataggggtcacaaaattgtagatgacattgtttgatgctgtttgtagagtaaagtttgaaataggagacacgatagggaatctgctagagatagcctaaggtcttgatcggttatttccatgccatatgaattggagggaattggaaaaaaataggaaggattttgatttgttatggatttaagtccatccgatcttctccaatctatatgaattaagataaaaatgaacatatgttgagtgtgggggtgaagtagatggtgagggttcccatgctccaagtagatggtgagggtgaagtagaatgtgggtggtgaccccactccaaattgatggtgagggtgaagttgaagatgtcgatggtgatt

SEQ ID NO: 43063 - DNA, 5295 bp, Zea Mays
cactttaaaaaaggacatccatgggctccatctcgtcaaaatctgggcggtgaaaccctcaaaccctaatcctttggcccctcaccatggcggacgctgacgacgcgccgccaacgccgcctcctgaggtagtagcccccgaggagcatcccgcggtcgccgaatccgccgttgccgcgcagcaggagggggcagcgacggcccaagtcgataacaagcggaagctcgaggaggctggcgccgacgcggaggcgaacggcaccggcgaggacgccaagcgcccgcgcgtggatggtgagcccgacgctgccacaggcattgagcagcagaacgatgggtcctccgtgaatgtctccgtgaatgtggaggaacccgcagctgcagaggaggataaggttgctcccaccgatggggcagcgacggatggtgataatgacacggccgctcctgctacggattcgcaggcgggttctgatgacaaaccgcttgaagcagcagctgaagctccacaaccggaaagtgatgcagcagctgttgcccaggagatctctcgtatgatcgaagtacccaacagcagggtcggtgtccttattggaaaagctggtgagacaatcaggaacttgcaaatgagctcgggtgcaaagatccaaatcaccaaggacgccgatgcggactcaaatgccctgactcgtccggttgaactagttggaacccttggaagcgttgataaagcagagctgcttattaagagtgtcatagctgaggctgaggctggcggttcccctgccttaatagctagaggatttggaagtggacagcctgggtcagagcaatttgagatgacagttcctgataacaaggttggtctcattatcggaaaaggtggtgatgcaattaaaggcatgcaaaccaaatctggtgctcgtattcagttaataccccaacatcctccagagggcgttacattgactgaaagaattgtacgtgttactgggaataagaagcagattgaacttgcgaaggatttgatcaagcaagctatgaatcaggtgatgtgatcttcctttgtgcctttttgtagtctatttgtgttttcagttctaagtgttgctagatgctggcatataactactttatgcttttgattgttcattcattctgtgattttgctctgatggttgctgatgatgtgatcatgcttcacgattgattgttcttggttcatgatatggttacttttgtgattgtagatgccaaaatcatgttgtctttaatatttgtgacccaacacaaattaatgacatgcctattgagaacatggccttatttcaatcctattatggaccaattggtttcttagctttgggtttcataatacaccttctttatcattgcatgcaatttgtaccatctttctgatcaagccaagttcgagaattccctgataagctttgctgcttctgtaggtgtcccaagtgtactggtattttttgctataaacaaacacactttgcttttgtactttgttgttcatactatgaatatattgccatctctcttgtgttacggagtgttgggccctttaagatttgttataaactaatcactcctctacaattggccttgtatgaagtatctatcttgatatatagcaatgcctaattgggctggaaggtaagtttttcttcatgtttgagttttcatcttccgatgaaagacaaacgagatgccattgctgtcaagatcaatgatgtaaaatttgtaaatcagattcattacctcaacaaatatttcacttcctttcccttgccaaaatcccttatcctcggtgctagcactgtgaatatggtgtatttttctttctcgtttttactggatcatgcatgcttccattccattacctgtccattggagcaaaattcttgatttatttatttaattaataatatggattattgaagggtcaaaaggagtacatgattatacaattcagaaatgaacttttgagctgtaatacatagcaaatgatatgtctggagatctgggtactgtttagattcttgatcccattagcttgattattcttcgtaggacatacactatgagtaggactttcctcatctatcaccattaacaatgtccatgactataggtttgcaagtgctgtcttaccataccagcggattatcgagttgctagataagagatattattctgtttcctacataagcagtctgaactgacacatcaagttcactcgcttccagtttccgtcaattatttttgttgaaggtgccaattggagttggttgggcatcctaatggagatacagctagctttcttcatgggcgccatcgttcttcaacatttacttgcaccggagagggatattgaccattatcccttacccttgcatggtttatgtagttggtaactggtaaggctgtctattgtcgaaaggaaacagaaactgtatggcattggaagactgcaacaagtgtttcattgccatgacaaggctactacagcaccatacattttcaaggcatacaaaccagtctggcggatatggtccacaaggttaccgccctcagggtcaaggtgccgcttctcagtggggaccacgttctcagaatcatggctatggatacccacctagaggtatgcctccacctcaaaactacaacacaccctacggcagctacccgccgcagcagggaccaccaagaggtggcatgggctgggaccagaggcagggccctccaccccatccttcgtaccagggtggtgcttctgattactacaagcagggatctcagccatatgatagccagccaccgagctaccctcctgggccagggaattacaacagttatggtcaatcacagggtcctaactatggccaacctcaatacccgcaacatgcgcctcagcagaactacagccatgggtatggtgatcctagatacaatgctccccctccgaaccagcagtactatggtcagccgccaatgggcccgcagcaaggctatcctcaacagccagatccctatgctaggcctccatacagtggacctggtcaatggcctcccaggggtgctccggctgcagatggctcttaccaggcgccagctgcatcttatgggccgccttctcagcacccttctgcttatgggcaaacgtacagtgcagcaactggatctgatggatatgctcaacagggttacccacagcagggtgggcaggcaccagctccatatggtcagagtgcaccagcagctccaggctatcctcagcagcaaggtggctatgcacagtacccacagacccaaccagcatatggtgagcaagcagctcaaaccaatgcgagctatgggtaccagggagctccagcagatcctaactatggaagtgcctacccacagccaggatatggtcctcctggtcaggctactggtcaggctggttatgcctcctcagcagccagccagcctgcgtatggccaggcaggatacacccagccgcctacaaatcctccaggttatgagcagtctgcggcaccagcaacaacccagagcggctatgctgcgcccccagcaaatccacagcagcctgctgcagcaaaaggggtctcgccacagcctggtggtggtgctgctgcatatggtgctggtgggcagtggacagcatgaccctcctcgaacctcaaacatggctcgctggtagcaatatcgtgctcaatatttgcaccttccggatgcatccttggttatcggaagagattgtgtaactccttgattagtgatacttggcatctctgtagtagcacctactagtagttcgttggttaactgtgactataaacatcctaattcctattcacttcgaatcaaacttcgcagcttgccaagtaatttttttggatttgtgtttattcatgtaaaatagttactggtttggctcacagaatgatgattctgtttctgcagttcattcaaatttggttctgatggatgttaaacctagtgatgacaatttaacccgcaaatctgaaattcgataggtgcgtgtatgtgtgaagattttgacccgtggttgcaacccatacctaacctgaagtttcgtgggtgttagatgcgggtttttatttcaacctgtatttgacccgaaattcaacccgtatttgactccaaatttggtttactccttattttgcgcaataatgactaaagatacaatagtaattattttcaattagtgacttggttaatgattcatgaagtgttttgttggtgcttaacgtaaggtttaaatccataaatataactcaattattgctggtatttaaatacttataactaaattattgcttgaaagtgtataatgagtaaaacccacgggtgatcttaaacccactcgaaacctgatggatttggatgtgggtttaaatttgcacccgcgtgtgcgatcgcgggtgagtttaggtagatttcacgagtttgatcgcgaacatggtttttctccaccgactcaaatctgattcattgtcatccctagtcaagccgaacatactatccctagtcaagccgaacatactgttgctcttgcaatgtgagaagcgttatgtacatatggatcgattagcggttgattgcaactatagtaagatcttgtccagtagtttatccatatggtcacctaaaatactgttttgcacctaaaatattgttttgcacggtagaccgcactgttcgcagagtggagtttaaaataggagatcataaggaaactgtaccattgtcgaatagtattctactccctctattttcgaatatttgttagctgctagtttatttttgaactaaaacacgataaataaaaaaactaaggaacatactactaagattgtctcaacgggtaatctaaaataggggtcacaaaattgtagatgacattgtttgatgctgtttgtagagtaaagtttgaaataggagacacgatagggaatctgctagagatagcctaaggtcttgatcggttatttccatgccatatgaattggagggaattggaaaaaaataggaaggattttgatttgttatggatttaagtccatccgatcttctccaatctatatgaattaagataaaaatgaacatatgttgagtgtgggggtgaagtagatggtgagggttcccatgctccaagtagatggtgagggtgaagtagaatgtgggtggtgaccccactccaaattgatggtgagggtgaagttgaagatgtcgatggtgatt

SEQ ID NO: 43064 - DNA, 2047 bp, Zea Mays
tggcaatggcgtacaccggctcggccattggcgcacgtcgtccgggcttcctcgccgacgagcggccgccgtagctgacgacctgcacgcccagcccgtgactccggcgcgggcggggttggccgacaatgggccgtggggacgtagttctgtgttggctgcgattcctcaccaacgtacccgtccgcccggtcgtctgccgattaggccaccgccccaaccccgatgccatggggaggttctccggtgggcactagaagcatttgcggcacgattgggcgtcagggacaatcatggcgagcaggattcctcatcggcgcctgtgtatcaccatcgttcgcagcccaccgtgggtggaggtctccacgacatgaccaacgagagttttcgagccacctgaagatcaccttggttactggaatctcaagtggcaggcaagttgtgcccttgatcacttttgtttacccaataatgttctttattatcactattcatgcatagacttaattttgatgagacccaataggtcaccctagtctgtttatcttgtttactttgttacccctgaatcacatgggtagtttctgctattgctttatatgtttttgggattattatttcattatatccatgttccaattattctgttatgttatttatgttaatgtcaagatcattaatgttaattggaacatggagcttaacttgagaaacacgtgccaccacaagggtttaatgggacgcccttggccaactaactaggaaagctagtggaagactaccttacccgaaaggggcaagggcagtaggggagttgcatgcaaggaggttgtcgggttgattttactgcgatggcggtcaggcgagggattcttgcaagtgctcttcccataaactgtagtgggttttcggaagctagtggaactttgtaaaggcctcgtagtggatccctagccattcacctcggtagtgtctaagggccttgcaaatcctagcgacatgggatacacgacttgtgggtacagggtacaacctctgcagagtgtaaaactggtatactaaccgagctcacggtcatgagcagcttaggactctcgcatgattaaatatggaacctaaacttaatttatcatttgcatttgcatttgcatgggatttattattaattttgttctattattatttttattatggtttgatatttacttacatttagtaactgctaataaaattttgaccaacttataaaagcaatgctcagcttcaacctttattttgttgatcagccttacacttcacatgaactccaaccttttgcgagttcatgccacattattctccacaacttgttgatcgatgaacatgtgtgagctcacccttgctgtctcacacccccacaggagaagtacatgtggttcaagtggagccacgtatcgaggagttcgattcgatctaggtggcgtctcctagttgacttgcgccaaggacgatccttagagcatctccaagagctcctaaaaaatatcacccaataattagaaattgggacgtctttaaacattttgttccaaaaaaataagatgtactccaacacctccctttaatttccctaaatatctgttaaacctagtgtcgcgaggcctgtgttccttctggtaaacatagacagaagaagcatttttgtattccttctatggctgtgtttacccaataaacaggaaaaattagtacaccaaaacaaaagctgatgcatccaaacaaagaatacaaagaatactacgtggctgtttgtttcagcttctgggcggcttctggccaccagaagctgaagctgtatccaaacagccagcttctgaggcggcttttcgtcgtagcgcttcggatagaagccgagcgcacacagtccgcacgaagccgccctcacttcgcttctaacggaagcccccacccacttcgctagggtttaggcgacgaaacgcgcctccgccgccgccaacgaacccgccgccgctgcgcacccaacggaccgccgccaggtcgatctcct

SEQ ID NO: 43065 - DNA, 3196 bp, Zea Mays
cgacgagtcctcctctgtccattctctctcttctcttccttcgtcgtctcgtcgtcggcttctcgcatccgcctccgcctccgcctccgcctccgctccccgctgcgcgtcaccggaggagaggagagaaagtgagagaggggatccctccgacccgatccaccgacataacctccgccccctggatctcctccgtccccgcgcgacgccaggacagggttgatggataatctctctccagccactctgctcaacagtatctcctgtcttggcgccctaacatctgatgtctctactgcgagacccaagcctattcacaagtattgcaaaaatgtatatgatatctcaagcatcgtgaccccccttcttgaagatctttgcaagtctcccgaagagcaactcgatgaggtcttaagagaccttgacaccgctgtcaatgaagcttcaggccttattggaaactggcaccagacaaccagcaaaatgtatttcggttggcgaattgaatcagtaatatcagatattcagggatgttcccttcagttgtgccagctggttaattcgctattaccttctctgactgctcgtgcctgcatgtgtattgaggaggttgccatggagcttgcagcgacaagcgcagtgagttctgtgaatctgctgaaactatcaagtttgttgagtctgtcaacgaacatggaattgtacacggaagctgtttcccttgagaatctcaaaacaagggcactacgatgcgagagtcgtgaagaactggatctagctgagcagatgattccactggtcaactatatgcatgaccatcttctcaaggaaaaacaacaacttagcatcaacggggtgcctattcctgctgatttttgctgtcccctttccttggagctgatgtccgatcctgttattgtagcgtctggacagacctatgagcgggtttatatcaagttgtggcttgatgagggttttactatctgcccgaaaacactccaaagacttggacactccaatttaatacctaattatactgtgaaggctctgatagctaactggtgtgaatcacatgacattaggcttcctgatcctatgaaatcattgaagttgaactttccttctgctgcctccttccttgaggatttgagtgctgcagatggcagccctctacatcctattgtcgtgtcaagggctaatattcctgggtccccagaagttgatgtgtatttgagaaacttgaatggagcatctcctccccatagtttggtcaatcagaattctcatgcgcatgcaaaccgtcatggtcatgaggtctcgacgagtcaaacttcagaaaaaacaaatggttctgtaccagatgtttcaagattatctcttgcaagttctgaagcaagagagtctagtttggaaggaaggcgtggtggttcgattgggcaaatatcagaacattctacggaggaagcattccaatcttctaatttggatagggatctgcaggacaacttagctaattcttctttgaatggtagccttccaaatagtggtcaacttgatggggaatgtgacaatggggtgacaagggttccaagcgataggacaaattacagtagcgatgcatctggcgaagttacaaatggtggtggtgcgcctgtagcctcctctgttcctcaaagggagcatttgatccctccaagactgggtatgggtactaaacaatttatcaggcgacaaccatcagacaggggtttcccaagaattatttcttcctcaacaatggatgcacgtagtgatctctctgccatcgagaatcaggttcggaagctgattgacgatttgaaaagtgattctatagatgttcagagatcagcagcatcagatcttcgtcttctgtctaagcacaacatggagaataggattgccattgcaaactgtggggctgtaaacttgctggttggtcgtcttcattcaccagatgccaaaacccaagaacatgctgtgacagctcttttgaatttgtcgatcaatgacaacaataaaattgctattgcaaatgctgacgctgttgatcctctcattcatgtcctcgagactgggaaccctgaagctaaagagaattcagcagcaactctattcagcctctcggttatcgaagaaaataaagtgaagattgggcgatctggtgccatcaagcctctagtagacttgctaggaaatggcacccctcgaggaaagagggatgcagctactgctttgtttaacttgtccatccttcatgagaataaagctcgtatcgtgcaagctgatgctgtgaatcacctagttgagcttatggatcctgctgctggaatggtcgacaaagctgtggctgtgttggcaaaccttgctacgattccagaaggaaggaatgcgattgggcaggcacgtggcattccagcccttgttgaagtcgttgagttgggttctgcaagagggaaggagaatgctgcggctgcgttgcttcagctctgtacaaacagcaacaggttttgcagtatagttcttcaagagggtgcagtgccccctctagtcgccctttcacagtcaggaacaccgcgggcaagagagaaggcacaagcgcttctgagctacttccgcagccaaagacatgggaattcagcaaggagatagccttctgttttttcccgttttttgttgtagtgtacattaagcgttgcattttatgcccatcatcgcgactgggctcctgtttactgttgttgattggcactggcagatgcgttggctggaattatgcagtgccctgtgctctgtttatagatggagattgttatgctcatctcatgtaagttttgtctgttgagatggtatctttccttttctcgtttttgaggtttttttttgtatagcttaaccattgataggaacttcgaacttacataatcaccgattttgccctgtatataagtatatttgattgtctgtgacctttggaattattatggttcgatggttgtacaaattatttgatccgcagtacaaataaggccatgtttggataaatactgcttcctcatttcaaattagaaagcgttttgacttttttagctatatagcttttatgatatatatttgtttctagatatgtatggtaaagcaatatagaaaatgtcaaaaatgtgttataatttagaac

SEQ ID NO: 43066 - DNA, 3234 bp, Zea Mays
agcgacgagtcctcctctgtccattctctctcttctcttccttcgtcgtctcgtcgtcggcttctcgcatccgcctccgcctccgcctccgcctccgctccccgctgcgcgtcaccggaggagaggagagaaagtgagagaggggatccctccgacccgatccaccgacataacctccgccccctggatctcctccgtccccgcgcgacgccaggacagggttgatggataatctctctccagccactctgctcaacagtatctcctgtcttggcgccctaacatctgatgtctctactgcgagacccaagcctattcacaagtattgcaaaaatgtatatgatatctcaagcatcgtgaccccccttcttgaagatctttgcaagtctcccgaagagcaactcgatgaggtcttaagagaccttgacaccgctgtcaatgaagcttcaggccttattggaaactggcaccagacaaccagcaaaatgtatttcggttggcgaattgaatcagtaatatcagatattcagggatgttcccttcagttgtgccagctggttaattcgctattaccttctctgactgctcgtgcctgcatgtgtattgaggacataaatcatgagcacgtgtttgatctggttaaggaggttgccatggagcttgcagcgacaagcgcagtgagttctgtgaatctgctgaaactatcaagtttgttgagtctgtcaacgaacatggaattgtacacggaagctgtttcccttgagaatctcaaaacaagggcactacgatgcgagagtcgtgaagaactggatctagctgagcagatgattccactggtcaactatatgcatgaccatcttctcaaggaaaaacaacaacttagcatcaacggggtgcctattcctgctgatttttgctgtcccctttccttggagctgatgtccgatcctgttattgtagcgtctggacagacctatgagcgggtttatatcaagttgtggcttgatgagggttttactatctgcccgaaaacactccaaagacttggacactccaatttaatacctaattatactgtgaaggctctgatagctaactggtgtgaatcacatgacattaggcttcctgatcctatgaaatcattgaagttgaactttccttctgctgcctccttccttgaggatttgagtgctgcagatggcagccctctacatcctattgtcgtgtcaagggctaatattcctgggtccccagaagttgatgtgtatttgagaaacttgaatggagcatctcctccccatagtttggtcaatcagaattctcatgcgcatgcaaaccgtcatggtcatgaggtctcgacgagtcaaacttcagaaaaaacaaatggttctgtaccagatgtttcaagattatctcttgcaagttctgaagcaagagagtctagtttggaaggaaggcgtggtggttcgattgggcaaatatcagaacattctacggaggaagcattccaatcttctaatttggatagggatctgcaggacaacttagctaattcttctttgaatggtagccttccaaatagtggtcaacttgatggggaatgtgacaatggggtgacaagggttccaagcgataggacaaattacagtagcgatgcatctggcgaagttacaaatggtggtggtgcgcctgtagcctcctctgttcctcaaagggagcatttgatccctccaagactgggtatgggtactaaacaatttatcaggcgacaaccatcagacaggggtttcccaagaattatttcttcctcaacaatggatgcacgtagtgatctctctgccatcgagaatcaggttcggaagctgattgacgatttgaaaagtgattctatagatgttcagagatcagcagcatcagatcttcgtcttctgtctaagcacaacatggagaataggattgccattgcaaactgtggggctgtaaacttgctggttggtcgtcttcattcaccagatgccaaaacccaagaacatgctgtgacagctcttttgaatttgtcgatcaatgacaacaataaaattgctattgcaaatgctgacgctgttgatcctctcattcatgtcctcgagactgggaaccctgaagctaaagagaattcagcagcaactctattcagcctctcggttatcgaagaaaataaagtgaagattgggcgatctggtgccatcaagcctctagtagacttgctaggaaatggcacccctcgaggaaagagggatgcagctactgctttgtttaacttgtccatccttcatgagaataaagctcgtatcgtgcaagctgatgctgtgaatcacctagttgagcttatggatcctgctgctggaatggtcgacaaagctgtggctgtgttggcaaaccttgctacgattccagaaggaaggaatgcgattgggcaggcacgtggcattccagcccttgttgaagtcgttgagttgggttctgcaagagggaaggagaatgctgcggctgcgttgcttcagctctgtacaaacagcaacaggttttgcagtatagttcttcaagagggtgcagtgccccctctagtcgccctttcacagtcaggaacaccgcgggcaagagagaaggcacaagcgcttctgagctacttccgcagccaaagacatgggaattcagcaaggagatagccttctgttttttcccgttttttgttgtagtgtacattaagcgttgcattttatgcccatcatcgcgactgggctcctgtttactgttgttgattggcactggcagatgcgttggctggaattatgcagtgccctgtgctctgtttatagatggagattgttatgctcatctcatgtaagttttgtctgttgagatggtatctttccttttctcgtttttgaggtttttttttgtatagcttaaccattgataggaacttcgaacttacataatcaccgattttgccctgtatataagtatatttgattgtctgtgacctttggaattattatggttcgatggttgtacaaattatttgatccgcagtacaaataaggccatgtttggataaatactgcttcctcatttcaaattagaaagcgttttgacttttttagctatatagcttttatgatatatatttgtttctagatatgtatggtaaagcaatatagaaaatgtcaaaaatgtgttataatttagaac

SEQ ID NO: 43067 - DNA, 2973 bp, Zea Mays
aaaaaagcgacgagtcctcctctgtccattctctctcttctcttccttcgtcgtctcgtcgtcggcttctcgcatccgcctccgcctccgcctccgcctccgctccccgctgcgcgtcaccggaggagaggagagaaagtgagagaggggatccctccgacccgatccaccgacataacctccgccccctggatctcctccgtccccgcgcgacgccaggacagggttggcgaattgaatcagtaatatcagatattcagggatgttcccttcagttgtgccagctggttaattcgctattaccttctctgactgctcgtgcctgcatgtgtattgagaaactccaggacataaatcatgagcacgtgtttgatctggttaaggaggttgccatggagcttgcagcgacaagcgcagtgagttctgtgaatctgctgaaactatcaagtttgttgagtctgtcaacgaacatggaattgtacacggaagctgtttcccttgagaatctcaaaacaagggcactacgatgcgagagtcgtgaagaactggatctagctgagcagatgattccactggtcaactatatgcatgaccatcttctcaaggaaaaacaacaacttagcatcaacggggtgcctattcctgctgatttttgctgtcccctttccttggagctgatgtccgatcctgttattgtagcgtctggacagacctatgagcgggtttatatcaagttgtggcttgatgagggttttactatctgcccgaaaacactccaaagacttggacactccaatttaatacctaattatactgtgaaggctctgatagctaactggtgtgaatcacatgacattaggcttcctgatcctatgaaatcattgaagttgaactttccttctgctgcctccttccttgaggatttgagtgctgcagatggcagccctctacatcctattgtcgtgtcaagggctaatattcctgggtccccagaagttgatgtgtatttgagaaacttgaatggagcatctcctccccatagtttggtcaatcagaattctcatgcgcatgcaaaccgtcatggtcatgaggtctcgacgagtcaaacttcagaaaaaacaaatggttctgtaccagatgtttcaagattatctcttgcaagttctgaagcaagagagtctagtttggaaggaaggcgtggtggttcgattgggcaaatatcagaacattctacggaggaagcattccaatcttctaatttggatagggatctgcaggacaacttagctaattcttctttgaatggtagccttccaaatagtggtcaacttgatggggaatgtgacaatggggtgacaagggttccaagcgataggacaaattacagtagcgatgcatctggcgaagttacaaatggtggtggtgcgcctgtagcctcctctgttcctcaaagggagcatttgatccctccaagactgggtatgggtactaaacaatttatcaggcgacaaccatcagacaggggtttcccaagaattatttcttcctcaacaatggatgcacgtagtgatctctctgccatcgagaatcaggttcggaagctgattgacgatttgaaaagtgattctatagatgttcagagatcagcagcatcagatcttcgtcttctgtctaagcacaacatggagaataggattgccattgcaaactgtggggctgtaaacttgctggttggtcgtcttcattcaccagatgccaaaacccaagaacatgctgtgacagctcttttgaatttgtcgatcaatgacaacaataaaattgctattgcaaatgctgacgctgttgatcctctcattcatgtcctcgagactgggaaccctgaagctaaagagaattcagcagcaactctattcagcctctcggttatcgaagaaaataaagtgaagattgggcgatctggtgccatcaagcctctagtagacttgctaggaaatggcacccctcgaggaaagagggatgcagctactgctttgtttaacttgtccatccttcatgagaataaagctcgtatcgtgcaagctgatgctgtgaatcacctagttgagcttatggatcctgctgctggaatggtcgacaaagctgtggctgtgttggcaaaccttgctacgattccagaaggaaggaatgcgattgggcaggcacgtggcattccagcccttgttgaagtcgttgagttgggttctgcaagagggaaggagaatgctgcggctgcgttgcttcagctctgtacaaacagcaacaggttttgcagtatagttcttcaagagggtgcagtgccccctctagtcgccctttcacagtcaggaacaccgcgggcaagagagaaggcacaagcgcttctgagctacttccgcagccaaagacatgggaattcagcaaggagatagccttctgttttttcccgttttttgttgtagtgtacattaagcgttgcattttatgcccatcatcgcgactgggctcctgtttactgttgttgattggcactggcagatgcgttggctggaattatgcagtgccctgtgctctgtttatagatggagattgttatgctcatctcatgtaagttttgtctgttgagatggtatctttccttttctcgtttttgaggtttttttttgtatagcttaaccattgataggaacttcgaacttacataatcaccgattttgccctgtatataagtatatttgattgtctgtgacctttggaattattatggttcgatggttgtacaaattatttgatccgcagtacaaataaggccatgtttggataaatactgcttcctcatttcaaattagaaagcgttttgacttttttagctatatagcttttatgatatatatttgtttctagatatgtatggtaaagcaatatagaaaatgtcaaaaatgtgttataatttagaac

SEQ ID NO: 43068 - DNA, 2681 bp, Zea Mays
ctccaggttgactcgaggggacgatcagcatcagcactaaagtgacttgtcaacgaaaaatagaaggaaaaaaaagcgacgagtcctcctctgtccattctctctcttctcttccttcgtcgtctcgtcgtcggcttctcgcatccgcctccgcctccgcctccgcctccgctccccgctgcgcgtcaccggaggagaggagagaaagtgagagaggggatccctccgacccgatccaccgacataacctccgccccctggatctcctccgtccccgcgcgacgccaggacagggttggcgaattgaatcagtaatatcagatattcagggatgttcccttcagttgtgccagctggttaattcgctattaccttctctgactgctcgtgcctgcatgtgtattgagcgtctggacagacctatgagcgggtttatatcaagttgtggcttgatgagggttttactatctgcccgaaaacactccaaagacttggacactccaatttaatacctaattatactgtgaaggctctgatagctaactggtgtgaatcacatgacattaggcttcctgatcctatgaaatcattgaagttgaactttccttctgctgcctccttccttgaggatttgagtgctgcagatggcagccctctacatcctattgtcgtgtcaagggctaatattcctgggtccccagaagttgatgtgtatttgagaaacttgaatggagcatctcctccccatagtttggtcaatcagaattctcatgcgcatgcaaaccgtcatggtcatgaggtctcgacgagtcaaacttcagaaaaaacaaatggttctgtaccagatgtttcaagattatctcttgcaagttctgaagcaagagagtctagtttggaaggaaggcgtggtggttcgattgggcaaatatcagaacattctacggaggaagcattccaatcttctaatttggatagggatctgcaggacaacttagctaattcttctttgaatggtagccttccaaatagtggtcaacttgatggggaatgtgacaatggggtgacaagggttccaagcgataggacaaattacagtagcgatgcatctggcgaagttacaaatggtggtggtgcgcctgtagcctcctctgttcctcaaagggagcatttgatccctccaagactgggtatgggtactaaacaatttatcaggcgacaaccatcagacaggggtttcccaagaattatttcttcctcaacaatggatgcacgtagtgatctctctgccatcgagaatcaggttcggaagctgattgacgatttgaaaagtgattctatagatgttcagagatcagcagcatcagatcttcgtcttctgtctaagcacaacatggagaataggattgccattgcaaactgtggggctgtaaacttgctggttggtcgtcttcattcaccagatgccaaaacccaagaacatgctgtgacagctcttttgaatttgtcgatcaatgacaacaataaaattgctattgcaaatgctgacgctgttgatcctctcattcatgtcctcgagactgggaaccctgaagctaaagagaattcagcagcaactctattcagcctctcggttatcgaagaaaataaagtgaagattgggcgatctggtgccatcaagcctctagtagacttgctaggaaatggcacccctcgaggaaagagggatgcagctactgctttgtttaacttgtccatccttcatgagaataaagctcgtatcgtgcaagctgatgctgtgaatcacctagttgagcttatggatcctgctgctggaatggtcgacaaagctgtggctgtgttggcaaaccttgctacgattccagaaggaaggaatgcgattgggcaggcacgtggcattccagcccttgttgaagtcgttgagttgggttctgcaagagggaaggagaatgctgcggctgcgttgcttcagctctgtacaaacagcaacaggttttgcagtatagttcttcaagagggtgcagtgccccctctagtcgccctttcacagtcaggaacaccgcgggcaagagagaaggcacaagcgcttctgagctacttccgcagccaaagacatgggaattcagcaaggagatagccttctgttttttcccgttttttgttgtagtgtacattaagcgttgcattttatgcccatcatcgcgactgggctcctgtttactgttgttgattggcactggcagatgcgttggctggaattatgcagtgccctgtgctctgtttatagatggagattgttatgctcatctcatgtaagttttgtctgttgagatggtatctttccttttctcgtttttgaggtttttttttgtatagcttaaccattgataggaacttcgaacttacataatcaccgattttgccctgtatataagtatatttgattgtctgtgacctttggaattattatggttcgatggttgtacaaattatttgatccgcagtacaaataaggccatgtttggataaatactgcttcctcatttcaaattagaaagcgttttgacttttttagctatatagcttttatgatatatatttgtttctagatatgtatggtaaagcaatatagaaaatgtcaaaaatgtgttataatttagaac

SEQ ID NO: 43069 - DNA, 3368 bp, Zea Mays
attaaaaatacattatattactatataatatgacacaattatcgagtatagctccaggttgactcgaggggacgatcagcatcagcactaaagtgacttgtcaacgaaaaatagaaggaaaaaaaagcgacgagtcctcctctgtccattctctctcttctcttccttcgtcgtctcgtcgtcggcttctcgcatccgcctccgcctccgcctccgcctccgctccccgctgcgcgtcaccggaggagaggagagaaagtgagagaggggatccctccgacccgatccaccgacataacctccgccccctggatctcctccgtccccgcgcgacgccaggacagggttgatggataatctctctccagccactctgctcaacagtatctcctgtcttggcgccctaacatctgatgtctctactgcgagacccaagcctattcacaagtattgcaaaaatgtatatgatatctcaagcatcgtgaccccccttcttgaagatctttgcaagtctcccgaagagcaactcgatgaggtcttaagagaccttgacaccgctgtcaatgaagcttcaggccttattggaaactggcaccagacaaccagcaaaatgtatttcggttggcgaattgaatcagtaatatcagatattcagggatgttcccttcagttgtgccagctggttaattcgctattaccttctctgactgctcgtgcctgcatgtgtattgagaaactccaggacataaatcatgagcacgtgtttgatctggttaaggaggttgccatggagcttgcagcgacaagcgcagtgagttctgtgaatctgctgaaactatcaagtttgttgagtctgtcaacgaacatggaattgtacacggaagctgtttcccttgagaatctcaaaacaagggcactacgatgcgagagtcgtgaagaactggatctagctgagcagatgattccactggtcaactatatgcatgaccatcttctcaaggaaaaacaacaacttagcatcaacggggtgcctattcctgctgatttttgctgtcccctttccttggagctgatgtccgatcctgttattgtagcgtctggacagacctatgagcgggtttatatcaagttgtggcttgatgagggttttactatctgcccgaaaacactccaaagacttggacactccaatttaatacctaattatactgtgaaggctctgatagctaactggtgtgaatcacatgacattaggcttcctgatcctatgaaatcattgaagttgaactttccttctgctgcctccttccttgaggatttgagtgctgcagatggcagccctctacatcctattgtcgtgtcaagggctaatattcctgggtccccagaagttgatgtgtatttgagaaacttgaatggagcatctcctccccatagtttggtcaatcagaattctcatgcgcatgcaaaccgtcatggtcatgaggtctcgacgagtcaaacttcagaaaaaacaaatggttctgtaccagatgtttcaagattatctcttgcaagttctgaagcaagagagtctagtttggaaggaaggcgtggtggttcgattgggcaaatatcagaacattctacggaggaagcattccaatcttctaatttggatagggatctgcaggacaacttagctaattcttctttgaatggtagccttccaaatagtggtcaacttgatggggaatgtgacaatggggtgacaagggttccaagcgataggacaaattacagtagcgatgcatctggcgaagttacaaatggtggtggtgcgcctgtagcctcctctgttcctcaaagggagcatttgatccctccaagactgggtatgggtactaaacaatttatcaggcgacaaccatcagacaggggtttcccaagaattatttcttcctcaacaatggatgcacgtagtgatctctctgccatcgagaatcaggttcggaagctgattgacgatttgaaaagtgattctatagatgttcagagatcagcagcatcagatcttcgtcttctgtctaagcacaacatggagaataggattgccattgcaaactgtggggctgtaaacttgctggttggtcgtcttcattcaccagatgccaaaacccaagaacatgctgtgacagctcttttgaatttgtcgatcaatgacaacaataaaattgctattgcaaatgctgacgctgttgatcctctcattcatgtcctcgagactgggaaccctgaagctaaagagaattcagcagcaactctattcagcctctcggttatcgaagaaaataaagtgaagattgggcgatctggtgccatcaagcctctagtagacttgctaggaaatggcacccctcgaggaaagagggatgcagctactgctttgtttaacttgtccatccttcatgagaataaagctcgtatcgtgcaagctgatgctgtgaatcacctagttgagcttatggatcctgctgctggaatggtcgacaaagctgtggctgtgttggcaaaccttgctacgattccagaaggaaggaatgcgattgggcaggcacgtggcattccagcccttgttgaagtcgttgagttgggttctgcaagagggaaggagaatgctgcggctgcgttgcttcagctctgtacaaacagcaacaggttttgcagtatagttcttcaagagggtgcagtgccccctctagtcgccctttcacagtcaggaacaccgcgggcaagagagaaggcacaagcgcttctgagctacttccgcagccaaagacatgggaattcagcaaggagatagccttctgttttttcccgttttttgttgtagtgtacattaagcgttgcattttatgcccatcatcgcgactgggctcctgtttactgttgttgattggcactggcagatgcgttggctggaattatgcagtgccctgtgctctgtttatagatggagattgttatgctcatctcatgtaagttttgtctgttgagatggtatctttccttttctcgtttttgaggtttttttttgtatagcttaaccattgataggaacttcgaacttacataatcaccgattttgccctgtatataagtatatttgattgtctgtgacctttggaattattatggttcgatggttgtacaaattatttgatccgcagtacaaataaggccatgtttggataaatactgcttcctcatttcaaattagaaagcgttttgacttttttagctatatagcttttatgatatatatttgtttctagatatgtatggtaaagcaatatagaaaatgtcaaaaatgtgttataatttagaac

SEQ ID NO: 43070 - DNA, 1565 bp, Zea Mays
atcagcactaaagtgacttgtcaacgaaaaatagaaggaaaaaaaagcgacgagtcctcctctgtccattctctctcttctcttccttcgtcgtctcgtcgtcggcttctcgcatccgcctccgcctccgcctccgcctccgctccccgctgcgcgtcaccggaggagaggagagaaagtgagagaggggatccctccgacccgatccaccgacataacctccgccccctggatctcctccgtccccgcgcgacgccaggacagggttgatggataatctctctccagccactctgctcaacagtatctcctgtcttggcgccctaacatctgatgtctctactgcgagacccaagcctattcacaagtattgcaaaaatgtatatgatatctcaagcatcgtgaccccccttcttgaagatctttgcaagtctcccgaagagcaactcgatgaggtcttaagagaccttgacaccgctgtcaatgaagcttcaggccttattggaaactggcaccagacaaccagcaaaatgtatttcggttggcgaattgaatcagtaatatcagatattcagggatgttcccttcagttgtgccagctggttaattcgctattaccttctctgactgctcgtgcctgcatgtgtattgagaaggataccctggctgcgggacatccttagaaataaagctgttgcatttatgagttgaaactacatgttcttgcatcagttctggtaaaataattgggcaaggtaatgaaagaacccaataaaaaaagattgttaaaccgaattataagatgatggaacagcaaaacaaatagcattatatggatgtcttgcaccttctggctgcggcacttccttagaaataaagctgttgcgtttatgatttgaacctacgtgttcttgcattggttctggtaaaaaaatgggcaaggtaatgaaagaacccaataaaaaactaatagaatatattaaacgaattataagatgatggaacagcaaaacaaatagcattatatggatgtcttgcattttttatatattgaaagtagtaattgcagttagtggggatggcttcaatagcttgcatgtagagattgagagttagtcggtggtgatgtggcatctagtgaggatgacgtgcatgttgagattggaagctattggagggatgatttggcaattggcattagtggggggatgatctggatagtttgcagttgggtttgaaagctagtggtgctaagatatagatatagatttttgtttgtgaccctaatttttctataacattctatcggaaactggaacacaatacctattgcattgaggaaagttatatatatagactcaggggaaaccctaaccctaatggcccggcaacccaacagtggtgccgacccacacacacagtctaacatccccccgcattcgcaacgggggcaccgcacacgatgagactggagtagaagccgacgggttgaaattcctctgcagtcgcaacgtcgtgagggtgcgaatgttgcggttggagtagagaccggtgtagactccgag

SEQ ID NO: 43071 - DNA, 3974 bp, Zea Mays
gttagacattttcttcttactttaaatgttgacaagggcacaaggctaaggacaaagagatggaggtagtcttaggtatttacatgtcggtgcaacaaaaaccataactagcaaacaagtcacaaatgggagaaagttttgggtatgggaccatgctgtcgaagcatttaggttactgctgaggtgctagcattgtctcgtagtcccaaggccatataaatttctccatgaatacacatccgcgtcttgtacttatgtatgacaacaggtgcgggtgcacaaaaaaaaagataccttttgagcatatagcggcataagacaatgatatataggctactaaatgatccatgatttttagagaattagcaagtgtatgaacatttggggaaaaaatccatgttatagtttaggtgaaaagcatgcagagcataagaaaaggcatgcccagcataccaagagaactgaattaaaaagaaaaccagaactatcttggctggcaagaaaaaaaaaagggaaaagcaagcacaccattttattatggacaagatcaaggttcaaaattgcagcaatattaggcatatatgcttaaaatgacatcaaaagactgaagtacatacttgaagagggcatttagcacagcagtacagaaccaagcaagcatggaaagttggaaacacaacttcctatccagtatgaaactcagcaggagaacaagagaacaggctcagcaggaggagcaaggtggtaatcagatcgaacctgcagtggaggctcacttggaggtgaatgatggagctgctgatgctgatgcgtctgtgaacaacgctaatcaggtagtcactactgaaggattggaaaacagagtggttgagatggtggacagagaagtgaaaagagacgagcccagggttggagagaacatatgtcctagatgtggtaagtggggcatatcgctggaggttgctcaaatcctgtgatatgttcaaggtacaacaaggaggggcatctgcctagagtagagtttgcatgactaagatgccatgggtgtttatctcccctttccgtgggttgtccgctcatggtcaagatttccatgttattgaaagtactacatctgatgagggtatcaaatacatgtctgtctgattgagccttcattaccattactgctggggaagtttctgctaggcaaatagagaacgagttcaaagttaaagctggcccaacatcgacatggaagtggtatgctaaaaaagttaaaataaacaaggtccggatgaggttctcaaactctaaaaccattgaggatttgactttttttcacagaaatgcaaatgaggcatatgccttctgtggggtctagagttgagaagtggaatcctgctattagttctaaaggagccctggatctggcttggttcaggatcacaggaatcccttctgaaagagatcttctcctaatagggaggtttccaaaccatgctggaaatcaatggatcggaaatgaggaggataaagcaaacaaaaatgctgtgtctgtaaagggtaagcaagttagaatcaagggacacagcaccaagatgggcatctggaagatgaaagtgaggatcaagaggcaaaaaatgctttacgcagtatcaagactcaatagttctggtatctttcagtttgagactggaaatcacaagcttttcagtaaaggactagatgatatagtggaagagagagaacaggaagtcactactgggagggcaatatctttgagtccccaaaaagggtgccaagaagcccccgtcgtagaactatcaggtcaagaggagagtgtcaaggtgatacaagtaaccacttctgcggctaagggtgttgagaaccaacaggtttttaagtgttttatcatgatagctgagactgccaaagaaaaatgggcaaaggtctgtggggatattccatccagaaaggttgatttgcagtataagttcaacctggagtggaacaaggcaaatgaaaatcagaaaatatctcaagtggggatggaaagtcaggaagctggtattcaagtcgaacaagagtctaatgctgaaactgttgatgggttgaaagatcactagatcagatcaatacaaagaagttagagatggaggcccagcaaggagtcaaccatcatcccatgaatgaatggcgagaagtgaggatgagtaagaggtcagggataatggggagtagcacttgatgattgatgaccaactgaagaacaaagggaacaaggaaactgcaactcaacaacccaaataatcagaactcctttgcagttcttaataattccactataatatctcttgctgctaagatggggattgatgcttctgttcaaagatttttaaaatttgaagttggacatttgtaggtttaactatggcatcattacctaattttttaaaaattactgggtacgccctttaaggaagctaataaaaatacagcaatactgtcagggcctaaggaggcccacggaggggctgcagcagcagcagcagccataggccctccaaggggattagataaggatagttagagataagattagaagattagttgagattatttaggagattagttgagattatctagaaaggttatcagttagtttgttgagagtttttaggagagttttaaggagatcaggatctctagctagacaggggcggccggccggcctatttatgtaatcaatggatgagaattgagaaataaagtaggcaagaattagaggggagaaaccctcctcttgctcgaccgtgggtagagggccccggccgacgttcctgcccatcgatacccttctcaaatccctcactgatctagcgaccataacaaatacagacctatatgtctgttaaatgtgatctctaagatctttaccaaggctgaaggttatggggaaaatcattagtaaaagtcaatctagtttctttaatgatataaatgtcatggatggggtgatggcacttcatgagattcgtcatgacactagagttaagaagaaatatggagtggtgctgaaacttgattttgaaaaagcttatgataaaatcagttgaaacttccttttcgaatatctcaagaagagaagcttctgtcagaaaaggtatgattggattaagatggtgatgacctctggaacattaagtgttaaagtaaataatacttgtggcaactattttaagtctgggaaaggtgtgagacaaggggatcctttatcccccttcctctttaacattgctgctgacaccctagctaaaatcatatgtttagcccagaaaaacaagctgattgaaggattagtgccagcttatattgagaatggagtggccatcctgcagtatgcagatgacactaagcaggctgctcctatacatctatgaggattacaacatgtttgattgagaaataattcaaaaagttaggacagtttccttgtaaaaaggacaaaaaattcctttggcaaacaaaaagtacgtcacagacaactaattgaacttacccaatcacatgaagtccgacactaacaaccacattatgaatcaacaaatcaaccaagagcagttacatatgaaccaatacatccaggccaaagttggagtcaagtgacagtccaaggtacccacacaatagtgacgtactgattttaaaagcagaatgctactgaacaaccacctcagtcaagaaaaaactgtatgaaaagtcgctagcatactaacagtctctaggaactgtccagcgagaattcttacaggtgaagattaaggcacctaagcacatattgtaaatgaccaaatactacgagttacataagcttggcagaattgaccatataaagaaaattatgacaacaccaaaatgtacaattcgaagctaaaattaatagtactaagattagatttggtaggcaagaatggaacgcaaggttagagaag

SEQ ID NO: 43072 - DNA, 777 bp, Zea Mays
cgcacactctcttctctccccaactagcccgacgaccgcgccgccacccactacatggttgaaacacaccggtggcaagaaatcgggtgccaaagtgcccaaatcggcaaattgatataagaattagggagaggaggctgatacaaacatgatggaggtatcacacaccttgaattgtgttgcgccgagccctatcgaccacggacggtggcttaacggcaatggcaatctccccaaccacaccgcggacactacacagcaaaggaggcaaagcgtgggcgtaacggcctggatgtctactactgcttgccctgtccgttctgcggatagctgggagctcggcttttatggctctaggagcccgcatggttgcgtagcaggcggatgagacggttgcaatagtcaccaagatcaccggaggggggttgttaagcttcgcgcagatccagctcggtgttctgttcacagccgaaccaactcagcggagacgaggtacctgacgatgagggcccacgtgccatcgacagaggcaatgcgcgcaacggggagaatggtcactgaggctgccagatggggctcggttcgacagcagaggggggaaacggcgcgggcggaccagggtcgccagtgcgcgcgaagggaatggtgggctgagggagatttggcctagaatgcggttttctgttttctttctttttattatttattttttgctttattttcctatccaaatttccagttcatttcagaatcaaatttccaaattcccaaatatca

SEQ ID NO: 43073 - DNA, 787 bp, Zea Mays
cgcacactctcttctctccccaactagcccgacgaccgcgccgccacccactacatggttgaaacacaccggtggcaagaaatcgggtgccaaagtgcccaaatcggcaaattgatataagaattagggagaggaggctgatacaaacatgatggaggtatcacacaccttgaattgtgttgcgccgagccctatcgaccacggacggtggcttaacggcaatggtaaattctggcaatctccccaaccacaccgcggacactacacagcaaaggaggcaaagcgtgggcgtaacggcctggatgtctactactgcttgccctgtccgttctgcggatagctgggagctcggcttttatggctctaggagcccgcatggttgcgtagcaggcggatgagacggttgcaatagtcaccaagatcaccggaggggggttgttaagcttcgcgcagatccagctcggtgttctgttcacagccgaaccaactcagcggagacgaggtacctgacgatgagggcccacgtgccatcgacagaggcaatgcgcgcaacggggagaatggtcactgaggctgccagatggggctcggttcgacagcagaggggggaaacggcgcgggcggaccagggtcgccagtgcgcgcgaagggaatggtgggctgagggagatttggcctagaatgcggttttctgttttctttctttttattatttattttttgctttattttcctatccaaatttccagttcatttcagaatcaaatttccaaattcccaaatatca

SEQ ID NO: 43074 - DNA, 2645 bp, Zea Mays
gagaagaaacaaagacagtagaagtacaggcctgcaaggccaaacagcccagttataatagcggcctactcgctgacttgtgtcccttccggccgtctaccaccgagcgagcttgggctctccccggcctcctccgcctccgcctccgcctccacctccgcctccgcccgccgcgcccgttcccttcccgcgcaccgcgcgtccccgagctatccctggtgctgctggtgctggacgcgcgccagtccgagatcctcggggccctgggaccgaattgctcctcctcttctccgccgcgtctgctgcttggtcgccaccaaaacgtcaggagcacgatgaagcgcaagcacggccgcaagccggcggacaagaaggctgatccgtcggagtccacctcgccggaatccgcgtccagttccagcacggaggcgtcggacagcccgcgaaaccaggctgaggaggataacccgccgctcgtagatgctggggcagcagtgcctgaaccaccgtctcctcctcctgctcaaccttctgagccacctcggaagcccagtgccaccgcgccggctaatcctccagcggacataacgtacagcaggcccaaggtgggggctgtgtacggccgtgtcaaactgaagttcaagtcgtccaagacggtggactcgccgctgcgcccgcagcagcaggattctttggaagctcaagtgctgcctgctgatgctggtgcatcggagagcgctgctgtccctgaagtggtcaaaggagctgatgcggagaaggctacggttgtaatggatgggcagcaagcagaggggcaggggctggagtcgagtgacgcagataaggaaaaggtttcaaggaaagtaggaggcatcaagatcaagttggcggggctgccttctgtagaaagcaacactccggatcggaaatccgattcaacagatgagcgtcctccgagcaagcgggaagctcttttgggaagcaaaaaaatggaggatgcggtggagctgaggagctcacaggagtccgaagaaaaacagtctactccggaacatcagcgcaatgagaaagagctggctgctgcattagaagctattaagaaagttatgaagatggacgctgctgatccgttcaatgttccagtggatcctgttgcattagaaatacctgattattttgatgttattgagactcctatggattttggcacaatatgtcaaaacttggaacgtggtgacaagtatatgaattcagaggatgtatataaggatgtacagttcatatgggataactgtaccaagtacaatagtaaaggtgattacataattgagcttatgaaacgggtcaagaagggcttcatgaaatattggttggccgctggcttgtattctgatgtgctagacagtgatattatgtaggcggcaatgacaaccctggcgatgaggatgcgaaaggccactcaaaaagcaaggttaagaacaaaaggcgacgcccagggaacgatcgccataaaagtgactgcatatgtgctgtttgtcaagttacaaggcgtaagaaagaaagggatgaaatagtggctgttatagataatgaaactgctgcaatggatagtaacccttctgagcagcatgacatggagggaaactctggtgctaataatattggtaatcatgacacttgctctagccaggagcagccgtcacaaacttatgtgtacaaagaggcatcagaagcaaacgattctgagattcagatggaagatgttggaaagttgtccgttgatcagacatctagtttggtgcttcttgactatgaagacgagggttccagacaatatttggtggaaaaaggacagactgagtatagagatatgaacagtaacgaagagcacacccccactggcattcagcctaacgagtactctgatgttgagcatcaccagcaaaaggggcagacagagaccaccagccaagagattgaaatggaggactatcctattcagcaggagaaccctttattcctgcaactccgtgcgagcctcttccccagcaactggagcagcactttcagggggcgacattccctgttccgtccgcgacgccgagccccggtgaaggcgagccctctgcatgtagccatggcggcaataatgaagcggtaggtatttctgggagcctggtttttctgtgaagtgaagctccaggtaggtagcggcgctgactttggcaaaagctgtacccctcaagacatggaagcaggttggaatgctgaggctgattagtagtttatacatacatgtgggtgcgagattagtttgaggcgtgctcccatctctgtaggcggcatatggattcagaattctgtttgatttttattttattttattttatgtggggggtaattgtgatagccacatgttggtccatttgcttgccgccctggaatagggctcttggtctgacgaaacaccctcccatataatttgatgatctgaagggtttgtttattgtctgggcaaattcttctccccaactgcccacctgaccagagagaggaaaaagaaaagagatgctcttcgccccaacagaagatcagactgggatacatacatgattgatgattcggacttgaatatttgctctgac

SEQ ID NO: 43075 - DNA, 2555 bp, Zea Mays
gagaagaaacaaagacagtagaagtacaggcctgcaaggccaaacagcccagttataatagcggcctactcgctgacttgtgtcccttccggccgtctaccaccgagcgagcttgggctctccccggcctcctccgcctccgcctccgcctccacctccgcctccgcccgccgcgcccgttcccttcccgcgcaccgcgcgtccccgagctatccctggtgctgctggtgctggacgcgcgccagtccgagatcctcggggccctgggaccgaattgctcctcctcttctccgccgcgtctgctgcttggtcgccaccaaaacgtcaggagcacgatgaagcgcaagcacggccgcaagccggcggacaagaaggctgatccgtcggagtccacctcgccggaatccgcgtccagttccagcacggaggcgtcggacagcccgcgaaaccaggctgaggaggataacccgccgctcgtagatgctggggcagcagtgcctgaaccaccgtctcctcctcctgctcaaccttctgagccacctcggaagcccagtgccaccgcgccggctaatcctccagcggacataacgtacagcaggcccaaggtgggggctgtgtacggccgtgtcaaactgaagttcaagtcgtccaagacggtggactcgccgctgcgcccgcagcagcaggattctttggaagctcaagtgctgcctgctgatgctggtgcatcggagagcgctgctgtccctgaagtggtcaaaggagctgatgcggagaaggctacggttgtaatggatgggcagcaagcagaggggcaggggctggagtcgagtgacgcagataaggaaaaggtttcaaggaaagtaggaggcatcaagatcaagttggcggggctgccttctgtagaaagcaacactccggatcggaaatccgattcaacagatgagcgtcctccgagcaagcgggaagctcttttgggaagcaaaaaaatggaggatgcggtggagctgaggagctcacaggagtccgaagaaaaacagtctactccggaacatcagcgcaatgagaaagagctggctgctgcattagaagctattaagaaagttatgaagatggacgctgctgatccgttcaatgttccagtggatcctgttgcattagaaatacctgattattttgatgttattgagactcctatggattttggcacaatatgtcaaaacttggaacgtggtgacaagtatatgaattcagaggatgtatataaggatgtacagttcatatgggataactgtaccaagtacaatagtaaaggtgattacataattgagcttatgaaacgggtcaagaagggcttcatgaaatattggttggccgctggcttgtattctgatgtgctagacagtggaacgatcgccataaaagtgactgcatatgtgctgtttgtcaagttacaaggcgtaagaaagaaagggatgaaatagtggctgttatagataatgaaactgctgcaatggatagtaacccttctgagcagcatgacatggagggaaactctggtgctaataatattggtaatcatgacacttgctctagccaggagcagccgtcacaaacttatgtgtacaaagaggcatcagaagcaaacgattctgagattcagatggaagatgttggaaagttgtccgttgatcagacatctagtttggtgcttcttgactatgaagacgagggttccagacaatatttggtggaaaaaggacagactgagtatagagatatgaacagtaacgaagagcacacccccactggcattcagcctaacgagtactctgatgttgagcatcaccagcaaaaggggcagacagagaccaccagccaagagattgaaatggaggactatcctattcagcaggagaaccctttattcctgcaactccgtgcgagcctcttccccagcaactggagcagcactttcagggggcgacattccctgttccgtccgcgacgccgagccccggtgaaggcgagccctctgcatgtagccatggcggcaataatgaagcggtaggtatttctgggagcctggtttttctgtgaagtgaagctccaggtaggtagcggcgctgactttggcaaaagctgtacccctcaagacatggaagcaggttggaatgctgaggctgattagtagtttatacatacatgtgggtgcgagattagtttgaggcgtgctcccatctctgtaggcggcatatggattcagaattctgtttgatttttattttattttattttatgtggggggtaattgtgatagccacatgttggtccatttgcttgccgccctggaatagggctcttggtctgacgaaacaccctcccatataatttgatgatctgaagggtttgtttattgtctgggcaaattcttctccccaactgcccacctgaccagagagaggaaaaagaaaagagatgctcttcgccccaacagaagatcagactgggatacatacatgattgatgattcggacttgaatatttgctctgac

SEQ ID NO: 43076 - DNA, 1758 bp, Zea Mays
gagaagaaacaaagacagtagaagtacaggcctgcaaggccaaacagcccagttataatagcggcctactcgctgacttgtgtcccttccggccgtctaccaccgagcgagcttgggctctccccggcctcctccgcctccgcctccgcctccacctccgcctccgcccgccgcgcccgttcccttcccgcgcaccgcgcgtccccgagctatccctggtgctgctggtgctggacgcgcgccagtccgagatcctcggggccctgggaccgaattgctcctcctcttctccggattattttgatgttattgagactcctatggattttggcacaatatgtcaaaacttggaacgtggtgacaagtatatgaattcagaggatgtatataaggatgtacagttcatatgggataactgtaccaagtacaatagtaaaggtgattacataattgagcttatgaaacgggtcaagaagggcttcatgaaatattggttggccgctggcttgtattctgatgtgctagacagtggcggcaatgacaaccctggcgatgaggatgcgaaaggccactcaaaaagcaaggttaagaacaaaaggcgacgcccagggaacgatcgccataaaagtgactgcatatgtgctgtttgtcaagttacaaggcgtaagaaagaaagggatgaaatagtggctgttatagataatgaaactgctgcaatggatagtaacccttctgagcagcatgacatggagggaaactctggtgctaataatattggtaatcatgacacttgctctagccaggagcagccgtcacaaacttatgtgtacaaagaggcatcagaagcaaacgattctgagattcagatggaagatgttggaaagttgtccgttgatcagacatctagtttggtgcttcttgactatgaagacgagggttccagacaatatttggtggaaaaaggacagactgagtatagagatatgaacagtaacgaagagcacacccccactggcattcagcctaacgagtactctgatgttgagcatcaccagcaaaaggggcagacagagaccaccagccaagagattgaaatggaggactatcctattcagcaggagaaccctttattcctgcaactccgtgcgagcctcttccccagcaactggagcagcactttcagggggcgacattccctgttccgtccgcgacgccgagccccggtgaaggcgagccctctgcatgtagccatggcggcaataatgaagcggtaggtatttctgggagcctggtttttctgtgaagtgaagctccaggtaggtagcggcgctgactttggcaaaagctgtacccctcaagacatggaagcaggttggaatgctgaggctgattagtagtttatacatacatgtgggtgcgagattagtttgaggcgtgctcccatctctgtaggcggcatatggattcagaattctgtttgatttttattttattttattttatgtggggggtaattgtgatagccacatgttggtccatttgcttgccgccctggaatagggctcttggtctgacgaaacaccctcccatataatttgatgatctgaagggtttgtttattgtctgggcaaattcttctccccaactgcccacctgaccagagagaggaaaaagaaaagagatgctcttcgccccaacagaagatcagactgggatacatacatgattgatgattcggacttgaatatttgctctgac

SEQ ID NO: 43077 - DNA, 2207 bp, Zea Mays
cgatattttttgacgagttcacctagacacggtatattttgcagagcggcaacatacatcgacatgttttgacaaattcctctcccccgactgagatcactgatccagtgcgcgtgccgccggcgccatggccgcgccaccgccgtcgccagaccaaacctactagcagcgcgtcgggggtgcacctgcggccgatctaggagacagggatttcttctcgtcctgtcctgtggattattacgggcctggatttgcttgggagtgagaggagagagcgagtaatagggtgaaggagtcttggggagaagatggctgcggaaatggtgaaggcggcgacgagcgacaagctcaaggagatggactgggcaaagaacatcgaaatctgcgagctcgtggcgcaggatccggggaatgcgaaggatgtgatcaagtctataaagaagtctgtagggagcaagaacaagagcactcaacactttgctgttatgctattggagatgcttctgaataattgcggagagcctgtccataggcaggttgttgataatagccttcttccaatacttgtgaagatagtgaagaaaaaaacggatttaccagttcgagaaaaaatatttcttctgttagatgccacgcaaacatcccttggtggagctaaagcaaagtttcctcagtactatgaggcatactatgagctggtgtttttttggttgttgcagtgtttattatgatatatagctgaagcctatcatttatcttgcctccatagtctgctggtgtgcaattttcaaatcgcccaaatgttgttgtcacacgagcagaagtgccagtcccagaaacgagaacagaaccaaataatgtgagtttatcggcccgattgcatgaagctcaacaggaagtgcacactcagcctgctctggatacaagtatagtccagaaagcctgtagtgtcatggaagtattgagggatgtgcttaattctatggatcctagacaccctgagggagcaacggatgaatttgtgttggatcttgtcgagcaatgtacgtttcagaagcaacggatgatgcaccttgttatgacatcaagggatgaaatggtggtgtcacaagctatagagctaaacgaagagctacataaggttctcgtccggcatgatgtgttgctctcagttcatccgacaacaacagtagcttctaatatcaatgaggaagagaatgctgaaagtctctatcggagactgcggaaggggaaagctctgtcacaggactacacagatgactcggtaccgtcgttccggtccatgcccgaggacaagctgcggcggccgctgaccatccaatcacctcaccctgacaagagactgggcgcgctgaacatccacttgccggacggtgaggagccaaggcatgatcccgctccgctgatcccgccgccgcccgcaaagcacgccgagagggagaggttcttccaggagaagagcatcgacgagcatcgacggcggagtggccagcctgccgggtcacctgaggggcctgtcgcagcacagccgggacagcagcagctcgtgtagcggcagcactgattatggcgactgaagggggagcagtggtacatataggggttcccttcttgggggttgttggtctcccacttggccaggcaggccatacattggtgttgcgccggagtttggcttggccgtgagcttcttcttcatgctgacctgtgtacacttggtagcattttgttcctccttttcacctttgccgtgacattattgggagaccgttgtgttggtggcggtgtgggttcttttctttcagatctatagatgattgtgatctacatctactgcatggggtatgcttgggtctgaagcattgctgtgactttaccccttttggcttcctgctcctgtgtgtgtggtgtagcgcttggaggtctgccagagctgtgtccttgggaaaagctactgttcaaagcatgcgagagccccaccttgggctgtctatacagatgaaattttgataaactatcgttttggacaaaaactgtgtaaactgttcattgttttcttttttggaaaaaatatggcagaagttgtctttcaattaagataaactaggtgaatttcccgcgctttgctgtaagatcaacagcactgtaataagcacatgaacttgttgggttttgtgctgcaattc

SEQ ID NO: 43078 - DNA, 1920 bp, Zea Mays
cgatattttttgacgagttcacctagacacggtatattttgcagagcggcaacatacatcgacatgttttgacaaattcctctcccccgactgagatcactgatccagtgcgcgtgccgccggcgccatggccgcgccaccgccgtcgccagaccaaacctactagcagcgcgtcgggggtgcacctgcggccgatctaggaatgcgaaggatgtgatcaagtctataaagaagtctgtagggagcaagaacaagagcactcaacactttgctgttatgctattggagatgcttctgaataattgcggagagcctgtccataggcaggttgttgataatagccttcttccaatacttgtgaagatagtgaagaaaaaaacggatttaccagttcgagaaaaaatatttcttctgttagatgccacgcaaacatcccttggtggagctaaagcaaagtttcctcagtactatgaggcatactatgagctggtgtctgctggtgtgcaattttcaaatcgcccaaatgttgttgtcacacgagcagaagtgccagtcccagaaacgagaacagaaccaaataatgtgagtttatcggcccgattgcatgaagctcaacaggaagtgcacactcagcctgctctggatacaagaaagcctgtagtgtcatggaagtattgagggatgtgcttaattctatggatcctagacaccctgagggagcaacggatgaatttgtgttggatcttgtcgagcaatgtacgtttcagaagcaacggatgatgcaccttgttatgacatcaagggatgaaatggtggtgtcacaagctatagagctaaacgaagagctacataaggttctcgtccggcatgatgtgttgctctcagttcatccgacaacaacagtagcttctaatatcaatgaggaagagaatgctgaaagtctctatcggagactgcggaaggggaaagctctgtcacaggactacacagatgactcggtaccgtcgttccggtccatgcccgaggacaagctgcggcggccgctgaccatccaatcacctcaccctgacaagagactgggcgcgctgaacatccacttgccggacggtgaggagccaaggcatgatcccgctccgctgatcccgccgccgcccgcaaagcacgccgagagggagaggttcttccaggagaagagcatcgacgagcatcgacggcggagtggccagcctgccgggtcacctgaggggcctgtcgcagcacagccgggacagcagcagctcgtgtagcggcagcactgattatggcgactgaagggggagcagtggtacatataggggttcccttcttgggggttgttggtctcccacttggccaggcaggccatacattggtgttgcgccggagtttggcttggccgtgagcttcttcttcatgctgacctgtgtacacttggtagcattttgttcctccttttcacctttgccgtgacattattgggagaccgttgtgttggtggcggtgtgggttcttttctttcagatctatagatgattgtgatctacatctactgcatggggtatgcttgggtctgaagcattgctgtgactttaccccttttggcttcctgctcctgtgtgtgtggtgtagcgcttggaggtctgccagagctgtgtccttgggaaaagctactgttcaaagcatgcgagagccccaccttgggctgtctatacagatgaaattttgataaactatcgttttggacaaaaactgtgtaaactgttcattgttttcttttttggaaaaaatatggcagaagttgtctttcaattaagataaactaggtgaatttcccgcgctttgctgtaagatcaacagcactgtaataagcacatgaacttgttgggttttgtgctgcaattc

SEQ ID NO: 43079 - DNA, 2205 bp, Zea Mays
cgatattttttgacgagttcacctagacacggtatattttgcagagcggcaacatacatcgacatgttttgacaaattcctctcccccgactgagatcactgatccagtgcgcgtgccgccggcgccatggccgcgccaccgccgtcgccagaccaaacctactagcagcgcgtcgggggtgcacctgcggccgatctagggcagaatggctcctcgcgggctgcggttttgtgctcaaaggcgcgatctttacgctcgggatggcttcgttacaggagacagggatttcttctcgtcctgtcctgtggattattacgggcctggatttgcttgggagtgagaggagagagcgagtaatagggtgaaggagtcttggggagaagatggctgcggaaatggtgaaggcggcgacgagcgacaagctcaaggagatggactgggcaaagaacatcgaaatctgcgagctcgtggcgcaggatccggggaatgcgaaggatgtgatcaagtctataaagaagtctgtagggagcaagaacaagagcactcaacactttgctgttatgctattggagatgcttctgaataattgcggagagcctgtccataggcaggttgttgataatagccttcttccaatacttgtgaagatagtgaagaaaaaaacggatttaccagttcgagaaaaaatatttcttctgttagatgccacgcaaacatcccttggtggagctaaagcaaagtttcctcagtactatgaggcatactatgagctggtgtctgctggtgtgcaattttcaaatcgcccaaatgttgttgtcacacgagcagaagtgccagtcccagaaacgagaacagaaccaaataatgtgagtttatcggcccgattgcatgaagctcaacaggaagtgcacactcagcctgctctggatacaagaaagcctgtagtgtcatggaagtattgagggatgtgcttaattctatggatcctagacaccctgagggagcaacggatgaatttgtgttggatcttgtcgagcaatgtacgtttcagaagcaacggatgatgcaccttgttatgacatcaagggatgaaatggtggtgtcacaagctatagagctaaacgaagagctacataaggttctcgtccggcatgatgtgttgctctcagttcatccgacaacaacagtagcttctaatatcaatgaggaagagaatgctgaaagtctctatcggagactgcggaaggggaaagctctgtcacaggactacacagatgactcggtaccgtcgttccggtccatgcccgaggacaagctgcggcggccgctgaccatccaatcacctcaccctgacaagagactgggcgcgctgaacatccacttgccggacggtgaggagccaaggcatgatcccgctccgctgatcccgccgccgcccgcaaagcacgccgagagggagaggttcttccaggagaagagcatcgacgagcatcgacggcggagtggccagcctgccgggtcacctgaggggcctgtcgcagcacagccgggacagcagcagctcgtgtagcggcagcactgattatggcgactgaagggggagcagtggtacatataggggttcccttcttgggggttgttggtctcccacttggccaggcaggccatacattggtgttgcgccggagtttggcttggccgtgagcttcttcttcatgctgacctgtgtacacttggtagcattttgttcctccttttcacctttgccgtgacattattgggagaccgttgtgttggtggcggtgtgggttcttttctttcagatctatagatgattgtgatctacatctactgcatggggtatgcttgggtctgaagcattgctgtgactttaccccttttggcttcctgctcctgtgtgtgtggtgtagcgcttggaggtctgccagagctgtgtccttgggaaaagctactgttcaaagcatgcgagagccccaccttgggctgtctatacagatgaaattttgataaactatcgttttggacaaaaactgtgtaaactgttcattgttttcttttttggaaaaaatatggcagaagttgtctttcaattaagataaactaggtgaatttcccgcgctttgctgtaagatcaacagcactgtaataagcacatgaacttgttgggttttgtgctgcaattc

SEQ ID NO: 43080 - DNA, 1970 bp, Zea Mays
ctcaaatttactcgtgacctgttttgatgaacgagctcgattaagcgatattttttgacgagttcacctagacacggtatattttgcagagcggcaacatacatcgacatgttttgacaaattcctctcccccgactgagatcactgatccagtgcgcgtgccgccggcgccatggccgcgccaccgccgtcgccagaccaaacctactagcagcgcgtcgggggtgcacctgcggccgatctaggaatgcgaaggatgtgatcaagtctataaagaagtctgtagggagcaagaacaagagcactcaacactttgctgttatgctattggagatgcttctgaataattgcggagagcctgtccataggcaggttgttgataatagccttcttccaatacttgtgaagatagtgaagaaaaaaacggatttaccagttcgagaaaaaatatttcttctgttagatgccacgcaaacatcccttggtggagctaaagcaaagtttcctcagtactatgaggcatactatgagctggtgtctgctggtgtgcaattttcaaatcgcccaaatgttgttgtcacacgagcagaagtgccagtcccagaaacgagaacagaaccaaataatgtgagtttatcggcccgattgcatgaagctcaacaggaagtgcacactcagcctgctctggatacaagtccagaaagcctgtagtgtcatggaagtattgagggatgtgcttaattctatggatcctagacaccctgagggagcaacggatgaatttgtgttggatcttgtcgagcaatgtacgtttcagaagcaacggatgatgcaccttgttatgacatcaagggatgaaatggtggtgtcacaagctatagagctaaacgaagagctacataaggttctcgtccggcatgatgtgttgctctcagttcatccgacaacaacagtagcttctaatatcaatgaggaagagaatgctgaaagtctctatcggagactgcggaaggggaaagctctgtcacaggactacacagatgactcggtaccgtcgttccggtccatgcccgaggacaagctgcggcggccgctgaccatccaatcacctcaccctgacaagagactgggcgcgctgaacatccacttgccggacggtgaggagccaaggcatgatcccgctccgctgatcccgccgccgcccgcaaagcacgccgagagggagaggttcttccaggagaagagcatcgacgagcatcgacggcggagtggccagcctgccgggtcacctgaggggcctgtcgcagcacagccgggacagcagcagctcgtgtagcggcagcactgattatggcgactgaagggggagcagtggtacatataggggttcccttcttgggggttgttggtctcccacttggccaggcaggccatacattggtgttgcgccggagtttggcttggccgtgagcttcttcttcatgctgacctgtgtacacttggtagcattttgttcctccttttcacctttgccgtgacattattgggagaccgttgtgttggtggcggtgtgggttcttttctttcagatctatagatgattgtgatctacatctactgcatggggtatgcttgggtctgaagcattgctgtgactttaccccttttggcttcctgctcctgtgtgtgtggtgtagcgcttggaggtctgccagagctgtgtccttgggaaaagctactgttcaaagcatgcgagagccccaccttgggctgtctatacagatgaaattttgataaactatcgttttggacaaaaactgtgtaaactgttcattgttttcttttttggaaaaaatatggcagaagttgtctttcaattaagataaactaggtgaatttcccgcgctttgctgtaagatcaacagcactgtaataagcacatgaacttgttgggttttgtgctgcaattc

SEQ ID NO: 43081 - DNA, 2278 bp, Zea Mays
gtcccacctgtgagacccctcaaatttactcgtgacctgttttgatgaacgagctcgattaagcgatattttttgacgagttcacctagacacggtatattttgcagagcggcaacatacatcgacatgttttgacaaattcctctcccccgactgagatcactgatccagtgcgcgtgccgccggcgccatggccgcgccaccgccgtcgccagaccaaacctactagcagcgcgtcgggggtgcacctgcggccgatctagggcagaatggctcctcgcgggctgcggttttgtgctcaaaggcgcgatctttacgctcgggatggcttcgttacaggagacagggatttcttctcgtcctgtcctgtggattattacgggcctggatttgcttgggagtgagaggagagagcgagtaatagggtgaaggagtcttggggagaagatggctgcggaaatggtgaaggcggcgacgagcgacaagctcaaggagatggactgggcaaagaacatcgaaatctgcgagctcgtggcgcaggatccggggaatgcgaaggatgtgatcaagtctataaagaagtctgtagggagcaagaacaagagcactcaacactttgctgttatgctattggagatgcttctgaataattgcggagagcctgtccataggcaggttgttgataatagccttcttccaatacttgtgaagatagtgaagaaaaaaacggatttaccagttcgagaaaaaatatttcttctgttagatgccacgcaaacatcccttggtggagctaaagcaaagtttcctcagtactatgaggcatactatgagctggtgtctgctggtgtgcaattttcaaatcgcccaaatgttgttgtcacacgagcagaagtgccagtcccagaaacgagaacagaaccaaataatgtgagtttatcggcccgattgcatgaagctcaacaggaagtgcacactcagcctgctctggatacaagtatagtccagaaagcctgtagtgtcatggaagtattgagggatgtgcttaattctatggatcctagacaccctgagggagcaacggatgaatttgtgttggatcttgtcgagcaatgtacgtttcagaagcaacggatgatgcaccttgttatgacatcaagggatgaaatggtggtgtcacaagctatagagctaaacgaagagctacataaggttctcgtccggcatgatgtgttgctctcagttcatccgacaacaacagtagcttctaatatcaatgaggaagagaatgctgaaagtctctatcggagactgcggaaggggaaagctctgtcacaggactacacagatgactcggtaccgtcgttccggtccatgcccgaggacaagctgcggcggccgctgaccatccaatcacctcaccctgacaagagactgggcgcgctgaacatccacttgccggacggtgaggagccaaggcatgatcccgctccgctgatcccgccgccgcccgcaaagcacgccgagagggagaggttcttccaggagaagagcatcgacgagcatcgacggcggagtggccagcctgccgggtcacctgaggggcctgtcgcagcacagccgggacagcagcagctcgtgtagcggcagcactgattatggcgactgaagggggagcagtggtacatataggggttcccttcttgggggttgttggtctcccacttggccaggcaggccatacattggtgttgcgccggagtttggcttggccgtgagcttcttcttcatgctgacctgtgtacacttggtagcattttgttcctccttttcacctttgccgtgacattattgggagaccgttgtgttggtggcggtgtgggttcttttctttcagatctatagatgattgtgatctacatctactgcatggggtatgcttgggtctgaagcattgctgtgactttaccccttttggcttcctgctcctgtgtgtgtggtgtagcgcttggaggtctgccagagctgtgtccttgggaaaagctactgttcaaagcatgcgagagccccaccttgggctgtctatacagatgaaattttgataaactatcgttttggacaaaaactgtgtaaactgttcattgttttcttttttggaaaaaatatggcagaagttgtctttcaattaagataaactaggtgaatttcccgcgctttgctgtaagatcaacagcactgtaataagcacatgaacttgttgggttttgtgctgcaattc

SEQ ID NO: 43082 - DNA, 1043 bp, Zea Mays
gtcatctcctagagtcttcgagtctttagttcagccacgtgaagcttcctgctttttcactccgttcctgcacgccgagctttccatttcctggacacagccccctccccatagcactcggtcctcacctcgccggccctggctgctggtcgccgtcggccgcgagctctccagcgcaggggactccctctatggctggcgcccctgatggccggacctccacctcgccatggccggttgctcctgcactagcaacagccataaaaccccatcgtgtcacgctctcgacgtgttcgacggaatatcgcagcaagctccgccccggatctgcacagccccaacacgccgctgaccagcgccatcgcggccactacagctccctcccatcgtgtgctctgcctcatcgcactcgccgtggtcgacgtcgacctcacacagcaacgtcgtcgatccgcgcaaccatgacacacgtcgtcgtcttactatttggacagccccggtcacgatgtcatcgaaccttgccctccgtcgatgtcgggcctcgcgcatcgcgtgctcgacaaaaatctcaaacctgtggacagcacacgcgcgacccgagtttgattctgccaggtacgataattgatcacgtaatgtggaggacaaaggatggattaatctcaaggtgatgctgatgaataaacctgaagaatggatgatctgatgaagtactaggatgggagatgctcaccaagtggtcgtcatttaacaacactaacgtagtgttatcccaggcaagccccggtgcatttgccaccttccttgtgtttacaaaatctttatcacttatatgctgcattaggttataggagttgattgattaaacccttgatgcattaccatccttgaaaggttgattaccacaccttgtcacctgttttataaaagctagagatgcttagtcatgctgatagactaagaaaaatgttttttatctatgactcatgttttttacaaaaaagaaaataggctagggataatgaaggcatcaagacgttgat

SEQ ID NO: 43083 - DNA, 1201 bp, Zea Mays
cttaaaaccaaaatatgtgtataatgtattttgtttttcttaaaaataaagaaatccaactttatctcttccaccgctcaccatattctttattccttgtccacgccattttttcatccagaaagtggtcatctcctagagtcttcgagtctttagttcagccacgtgaagcttcctgctttttcactccgttcctgcacgccgagctttccatttcctggacacagccccctccccatagcactcggtcctcacctcgccggccctggctgctggtcgccgtcggccgcgagctctccagcgcaggggactccctctatggctggcgcccctgatggccggacctccacctcgccatggccggttgctcctgcactagattatcctcaagcccggtcgcgatatagcagcaacagccataaaaccccatcgtgtcacgctctcgacgtgttcgacggaatatcgcagcaagctccgccccggatctgcacagccccaacacgccgctgaccagcgccatcgcggccactacagctccctcccatcgtgtgctctgcctcatcgcactcgccgtggtcgacgtcgacctcacacagcaacgtcgtcgatccgcgcaaccatgacacacgtcgtcgtcttactatttggacagccccggtcacgatgtcatcgaaccttgccctccgtcgatgtcgggcctcgcgcatcgcgtgctcgacaaaaatctcaaacctgtggacagcacacgcgcgacccgagtttgattctgccaggtacgataattgatcacgtaatgtggaggacaaaggatggattaatctcaaggtgatgctgatgaataaacctgaagaatggatgatctgatgaagtactaggatgggagatgctcaccaagtggtcgtcatttaacaacactaacgtagtgttatcccaggcaagccccggtgcatttgccaccttccttgtgtttacaaaatctttatcacttatatgctgcattaggttataggagttgattgattaaacccttgatgcattaccatccttgaaaggttgattaccacaccttgtcacctgttttataaaagctagagatgcttagtcatgctgatagactaagaaaaatgttttttatctatgactcatgttttttacaaaaaagaaaataggctagggataatgaaggcatcaagacgttgat

SEQ ID NO: 43084 - DNA, 1354 bp, Zea Mays
gtcatctcctagagtcttcgagtctttagttcagccacgtgaagcttcctgctttttcactccgttcctgcacgccgagctttccatttcctggacacagccccctccccatagcactcggtcctcacctcgccggccctggctgctggtcgccgtcggccgcgagctctccagcgcaggggactccctctatggctggcgcccctgatggccggacctccacctcgccatggccggttgctcctgcactagattatcctcaagcccggtcgcgatatagcagcaacagccataaaaccccatcgtgtcacgctctcgacgtgttcgacggaatatcgcagcaagctccgccccggatctgcacagccccaacacgccgctgaccagcgccatcgcggccactacagctccctcccatcgtgtgctctgcctcatcgcactcgccgtggtcgacgtcgacctcacacagcaacgtcgtcgatccgcgcaaccatgacacacgtcgtcgtcttactatttggacagccccggtcacgatgtcatcgaaccttgccctccgtcgatgtcgggcctcgcgcatcgcgtgctcgacaaaaatctcaaacctgtggacagcacacgcgcgacccgagtttgattctgccaggttattgatgtgatttcctatccatatgatttgtcgatgttgtgtatatgtgtggttgaacggagtacacgaaggatgaattagtagaatatttcggtgtcacttgttaatttaaagtacaagcgagtacatatgtgtgttatatgggtgtttataattctagtgctccaaataattagaatgtagttagtaaatcgactgttggttctcatttggttgtttgaactctaacgaattataaaatgatgaagcatttctaagtattaagaacatgatactatagagcctaattaggagctaaaattgcatactcacagttttagactgcatgtacagtttctgccgtgctgtttgtttgacgaactaaagtgtattttctgtagaaatatactatagaaaggttgtagataacttctttatcttgattatgtaaaaatttcatgaccataggtttagaagtttaggagctatgatttttcaaagtccagtctcagaatctgctcagattctatactgatttcgaaaatgaccttgtttgcccaaattaaactaagaatcagcccttagtaattatataagaattgtaatacttttcttaagcttttcaataaattttggatcaccctttttggtgatctataagttaagttacagctgtttgaagtgtgatctctaaatctgtccaaatttgaacagcagagcctttct

SEQ ID NO: 43085 - DNA, 2071 bp, Zea Mays
ggcattccgaagagaagcggggggaggcgaaggcaacaggttcgccgttccgagtcgtccgtcgcctgcccgctgcccgttccgggcgcctccgccccgtttcgtcgaccacctctccggcgccgccgtcctgagccgtcgcacgcgccacgggggcgcctcccgcgcgcgctccctacgccggctccgccccgccccgccgccatgggctccagagtccttcacttagacgttcctgcaaattctgaggcctatcttatgagaaatgtaccagggagtgtaagtagccctcccatgaatggtgaaaagggtctctttcgaaatcagaatgcggggttcactgcacttgcaagtcctgtgaggagagaaatcggaaacaggcatatcgtcgacaaggtccttctgtgttgatgacaatgacttggaagatggtaaggcctcaaaagaaagggagagttctgcacagtcactcaggctcccaaagattcagaatcaggctctcttatctggtctggcttactgcatatcatcatgcagcatgatcttagtcaacaaatttgttctatctagctatggtttcagtgctccagtatttttgatgctttaccagaacattgtatcagtgaccatagtttctacactatccctgtccggtgctgttccaactgaaccattgacatggaatttaatcaaagtttggttgcctgtaaatatcatctttgttggaatgctgatcacaagcatgtttagtttgaagtacattaatgttgccatgctgactatattgaagaatgtcgccaatgtcctgactgcttctggggaaacttattttttcaagaagcagcatggtactcaagtttgggttgctcttatgttgatgataatctctgcagttgcgggaggaataacggatctgtcattccatgctgttggatatatctggcagaccttaaactgtgttctgacggcggcatattcgcttacattgcgacatgtaatggacagtgctaagcaagtcaccaagtctgggaatttgaatgagctttcgatggtgttgctgaataatgttctttcactgccattgggaattatcctcgttcttggtttgaatgaaatggagtaccttttgcagaatcactcttaaggatgcccgagttttggctggtcatcactgccagtggagttttggggcttggaatcagctttacatcgatgtggtttctccatcagacgagtgcaacaacatatagccttgtgggctccttgaacaagatccctctttccatcgctgggatcgtcctcttcaacgttcgtacaagcgtgcagaactctttgagcattctgtttggtctattagcaggagtattcttcgccagggccaaattgcgagataactcaccgaccttgtgatcaccgtgcaggctttatagtttgtagatcatcaatcagctcagaaacactctctggatttgtgcagatgcaatggttgtttcccacctgactatgcagagagacaacacatgcacccggattgggctgggactctccagttctccttctcttccccacaagctgacttgacccacagtggttagtcttctggtggtatacgtcttcgttcttgctgtaaaatagtacccaaaaagaaaattgatggacgcaactgattctcaggcagtttgtgatggaaaggcgggttgattgtagtttgtaaagacacggttgctggatggaaggggatgtaatggtaataggttccgtgcatgggaaatattaatacgaagtatctagatcaggattcaggcgacggaaaaagtaaaaaaatgaattggtttgtttatttcaaacaagatgggcctgaagaagcagagaagtgcaagctaagattcaaatggcaacgggcaatgccggtaggtacacagctatttgtataaaaaagacaatgaaatcgaagttttaaacgggtaaagtataaaaaattcaaagaagacaaaggtatttatgtcgttttgacgaagcctgtgttatttgcttgaagccagttgtgtcattttgttgaatccactttttg

SEQ ID NO: 43086 - DNA, 1913 bp, Zea Mays
ggcattccgaagagaagcggggggaggcgaaggcaacaggttcgccgttccgagtcgtccgtcgcctgcccgctgcccgttccgggcgcctccgccccgtttcgtcgaccacctctccggcgccgccgtcctgagccgtcgcacgcgccacgggggcgcctcccgcgcgcgctccctacgccggctccgccccgccccgccgccatgggctccagagtccttcacttagacgttcctgcaaattctgaggcctatcttatgagaaatgtaccagggagtgtaagtagccctcccatgaatggtgaaaagggtctctttcgaaatcagaatgcggggttcactgcacttgcaagtcctgtgaggagagaaatcggaaacagatcgtcgacaaggtccttctgtgttgatgacaatgacttggaagatggtaaggcctcaaaagaaagggagagttctgcacagtcactcaggctcccaaagattcagaatcaggctctcttatctggtctggcttactgcatatcatcatgcagcatgatcttagtcaacaaatttgttctatctagctatggtttcagtgctccagtatttttgatgctttaccagaacattgtatcagtgaccatagtttctacactatccctgtccggtgctgttccaactgaaccattgacatggaatttaatcaaagtttggttgcctgtaaatatcatctttgttggaatgctgatcacaagcatgtttagtttgaagtacattaatgttgccatgctgactatattgaagaatgtcgccaatgtcctgactgcttctggggaaacttattttttcaagaagcagcatggtactcaagtttgggttgctcttatgttgatgataatctctgcagttgcgggaggaataacggatctgtcattccatgctgttggatatatctggcagaccttaaactgtgttctgacggcggcatattcgatcactcttaaggatgcccgagttttggctggtcatcactgccagtggagttttggggcttggaatcagctttacatcgatgtggtttctccatcagacgagtgcaacaacatatagccttgtgggctccttgaacaagatccctctttccatcgctgggatcgtcctcttcaacgttcgtacaagcgtgcagaactctttgagcattctgtttggtctattagcaggagtattcttcgccagggccaaattgcgagataactcaccgaccttgtgatcaccgtgcaggctttatagtttgtagatcatcaatcagctcagaaacactctctggatttgtgcagatgcaatggttgtttcccacctgactatgcagagagacaacacatgcacccggattgggctgggactctccagttctccttctcttccccacaagctgacttgacccacagtggttagtcttctggtggtatacgtcttcgttcttgctgtaaaatagtacccaaaaagaaaattgatggacgcaactgattctcaggcagtttgtgatggaaaggcgggttgattgtagtttgtaaagacacggttgctggatggaaggggatgtaatggtaataggttccgtgcatgggaaatattaatacgaagtatctagatcaggattcaggcgacggaaaaagtaaaaaaatgaattggtttgtttatttcaaacaagatgggcctgaagaagcagagaagtgcaagctaagattcaaatggcaacgggcaatgccggtaggtacacagctatttgtataaaaaagacaatgaaatcgaagttttaaacgggtaaagtataaaaaattcaaagaagacaaaggtatttatgtcgttttgacgaagcctgtgttatttgcttgaagccagttgtgtcattttgttgaatccactttttg

SEQ ID NO: 43087 - DNA, 1903 bp, Zea Mays
ggcattccgaagagaagcggggggaggcgaaggcaacaggttcgccgttccgagtcgtccgtcgcctgcccgctgcccgttccgggcgcctccgccccgtttcgtcgaccacctctccggcgccgccgtcctgagccgtcgcacgcgccacgggggcgcctcccgcgcgcgctccctacgccggctccgccccgccccgccgccatgggctccagatcgtcgacaaggtccttctgtgttgatgacaatgacttggaagatggtaaggcctcaaaagaaagggagagttctgcacagtcactcaggctcccaaagattcagaatcaggctctcttatctggtctggcttactgcatatcatcatgcagcatgatcttagtcaacaaatttgttctatctagctatggtttcagtgctccagtatttttgatgctttaccagaacattgtatcagtgaccatagtttctacactatccctgtccggtgctgttccaactgaaccattgacatggaatttaatcaaagtttggttgcctgtaaatatcatctttgttggaatgctgatcacaagcatgtttagtttgaagtacattaatgttgccatgctgactatattgaagaatgtcgccaatgtcctgactgcttctggggaaacttattttttcaagaagcagcatggtactcaagtttgggttgctcttatgttgatgataatctctgcagttgcgggaggaataacggatctgtcattccatgctgttggatatatctggcagaccttaaactgtgttctgacggcggcatattcgcttacattgcgacatgtaatggacagtgctaagcaagtcaccaagtctgggaatttgaatgagctttcgatggtgttgctgaataatgttctttcactgccattgggaattatcctcgttcttggtttgaatgaaatggagtaccttttgcagacatcactcttaaggatgcccgagttttggctggtcatcactgccagtggagttttggggcttggaatcagctttacatcgatgtggtttctccatcagacgagtgcaacaacatatagccttgtgggctccttgaacaagatccctctttccatcgctgggatcgtcctcttcaacgttcgtacaagcgtgcagaactctttgagcattctgtttggtctattagcaggagtattcttcgccagggccaaattgcgagataactcaccgaccttgtgatcaccgtgcaggctttatagtttgtagatcatcaatcagctcagaaacactctctggatttgtgcagatgcaatggttgtttcccacctgactatgcagagagacaacacatgcacccggattgggctgggactctccagttctccttctcttccccacaagctgacttgacccacagtggttagtcttctggtggtatacgtcttcgttcttgctgtaaaatagtacccaaaaagaaaattgatggacgcaactgattctcaggcagtttgtgatggaaaggcgggttgattgtagtttgtaaagacacggttgctggatggaaggggatgtaatggtaataggttccgtgcatgggaaatattaatacgaagtatctagatcaggattcaggcgacggaaaaagtaaaaaaatgaattggtttgtttatttcaaacaagatgggcctgaagaagcagagaagtgcaagctaagattcaaatggcaacgggcaatgccggtaggtacacagctatttgtataaaaaagacaatgaaatcgaagttttaaacgggtaaagtataaaaaattcaaagaagacaaaggtatttatgtcgttttgacgaagcctgtgttatttgcttgaagccagttgtgtcattttgttgaatccactttttg

SEQ ID NO: 43088 - DNA, 2042 bp, Zea Mays
ggcattccgaagagaagcggggggaggcgaaggcaacaggttcgccgttccgagtcgtccgtcgcctgcccgctgcccgttccgggcgcctccgccccgtttcgtcgaccacctctccggcgccgccgtcctgagccgtcgcacgcgccacgggggcgcctcccgcgcgcgctccctacgccggctccgccccgccccgccgccatgggctccagagtccttcacttagacgttcctgcaaattctgaggcctatcttatgagaaatgtaccagggagtgtaagtagccctcccatgaatggtgaaaagggtctctttcgaaatcagaatgcggggttcactgcacttgcaagtcctgtgaggagagaaatcggaaacagatcgtcgacaaggtccttctgtgttgatgacaatgacttggaagatggtaaggcctcaaaagaaagggagagttctgcacagtcactcaggctcccaaagattcagaatcaggctctcttatctggtctggcttactgcatatcatcatgcagcatgatcttagtcaacaaatttgttctatctagctatggtttcagtgctccagtatttttgatgctttaccagaacattgtatcagtgaccatagtttctacactatccctgtccggtgctgttccaactgaaccattgacatggaatttaatcaaagtttggttgcctgtaaatatcatctttgttggaatgctgatcacaagcatgtttagtttgaagtacattaatgttgccatgctgactatattgaagaatgtcgccaatgtcctgactgcttctggggaaacttattttttcaagaagcagcatggtactcaagtttgggttgctcttatgttgatgataatctctgcagttgcgggaggaataacggatctgtcattccatgctgttggatatatctggcagaccttaaactgtgttctgacggcggcatattcgtgctaagcaagtcaccaagtctgggaatttgaatgagctttcgatggtgttgctgaataatgttctttcactgccattgggaattatcctcgttcttggtttgaatgaaatggagtaccttttgcagacatcactcttaaggatgcccgagttttggctggtcatcactgccagtggagttttggggcttggaatcagctttacatcgatgtggtttctccatcagacgagtgcaacaacatatagccttgtgggctccttgaacaagatccctctttccatcgctgggatcgtcctcttcaacgttcgtacaagcgtgcagaactctttgagcattctgtttggtctattagcaggagtattcttcgccagggccaaattgcgagataactcaccgaccttgtgatcaccgtgcaggctttatagtttgtagatcatcaatcagctcagaaacactctctggatttgtgcagatgcaatggttgtttcccacctgactatgcagagagacaacacatgcacccggattgggctgggactctccagttctccttctcttccccacaagctgacttgacccacagtggttagtcttctggtggtatacgtcttcgttcttgctgtaaaatagtacccaaaaagaaaattgatggacgcaactgattctcaggcagtttgtgatggaaaggcgggttgattgtagtttgtaaagacacggttgctggatggaaggggatgtaatggtaataggttccgtgcatgggaaatattaatacgaagtatctagatcaggattcaggcgacggaaaaagtaaaaaaatgaattggtttgtttatttcaaacaagatgggcctgaagaagcagagaagtgcaagctaagattcaaatggcaacgggcaatgccggtaggtacacagctatttgtataaaaaagacaatgaaatcgaagttttaaacgggtaaagtataaaaaattcaaagaagacaaaggtatttatgtcgttttgacgaagcctgtgttatttgcttgaagccagttgtgtcattttgttgaatccactttttg

SEQ ID NO: 43089 - DNA, 3456 bp, Zea Mays
atggcctgcaaccgccgccgcaagcttctctgcgcctgtttgctgctggcttgcgcagcccccgccgccgccgccgccgtcaacatctccgtctactggggccagaacagcaacgagggcagcctgggccagacatgcagcagcggccgctacgccttggttgccatggccttcctttccacgttcggcagcggccagacaccggtcctcaacttggccgggcactgcgaccccgcgtcgggcggctgcacagctctggccgcggacatcgcggcctgccaggcgagaggcgtcagggtgctcctcagcatcggcggcggtgctggaagctacaacctctcctccgcctcggacgccgagagctgcccgtacccggacgcctcgctcggcgcggcgctcgccacggggctgttcgaccacgtgtgggtgcagttctacaacaaccccgggtgcgagtaccagcagaaggacggagacggcgtggccaacctggcggcatcgtggaaggcgtggacgcagtcgctgccgtcgtcggcgtctgtgttccttggcctgccggcgtcgcctgctgcagcgggtagcgggtacgtacccccggacgaccttgtgtcgcgtgtgctgccggcggtgagcggctccgctaactacggcggcctcatgctgtggaaccgctactacgacaacagcaccggttacagtgcccggattctgagcagcatcacagcggatcgaccaaacagctcgccagttccagggggctccggcgatgaatcgccaccgccggacaactcaccagctccgccgccgagcactggccggtcacgaaagagaaggatcaaaacatatatcatagcgggcaccgcaggcgtatccgggctgtgtgcaataatcgctctcgcagccttgatgtggtggtacaagagacgttatggcatggtaataccatggcgcagaggcgtatccggggtcgaatcctttctgcaaaagcaaggagctctactacacccgaaaggctacacttactcggaggtgaagaggatgaccaggtccttcgctcacaagctcgggcaaggcggctacggcgctgtctacaggggcagcatgcctgacggccgtgaggtggccgtcaagatgctgacgggcatgctggagggcgacggcgaggagttcatgaacgaggtggcgagcatcagcaggacgtctcacgtcaacatcgttactctggtagggtactgcctccagggtccaaagagagctctcctgtacgagtacatgcccaatggctccctcgagaggtacaccttcggcagcagcagtggagaagacgccttgagctgggacaggctgttcggtatcgtcgttggagtcgcgcgagggctggagtacctccacacgggctgcaacacccgcatcgtgcacttcgacatcaagccgcacaacatcctgctggaccaggacatgtgtcccaagatctcggacttcgggctggcgaagctgtgcgggcagaaggcgagcagggtgtccatcgccggggcgaggggcacggtagggtacatagcgcccgaagtcttctcgaggagctacgaggcagtgggcagcaaggctgatgtgtacagctacggcatggtggtccttgagatggtcggagcgaggaagaatgtccatgtcagtgctacagacgacggcggcaacagcagcagcagcaggtattttccgcaatggctgtatgaaaacttggaccagttctgtcgccccacaaccacgagcaacggcgagatccgcggtgacgacgacgacgccacggaagtgctgctcgtgaggaagatggtcgtagttggactgtggtgcatacagtccaaaccggacagtcggccgtccatgggccaagtccttgagatgctggagagcaacgccgccgacctgcagctgccgccaaaggccttgtgcaccgcttattaaaccgagtccgatcttgtaaaaactctagtccagcggcgtaatgcattcattgcttacctgctatagatagatactactgattcgagctcattgttcttcactccaccacgtcctttgttctttcaaagatgacctcgtgggtctatcttttgcactctttttgtgaccttctatgctgcttgcgctggctttcagtagagatgttctgtgtgcgctgagacagacagcacctcgaccctcccttgcacatccttcaaccgctccttacacgagtaaataaaacattatccacctattcttcctacgatcaggcagagatacctcccacacaaactggagaccatgattttttcccccacacatttgagtaggcacccaagcctctaagctacgtgatacagaacaaagatgatacccaaaaccttttacactccctctgacattgtgtgcgctgccccccacccccaccattcaccctcaacacacactcacaacaaccttttacccactatatgacattgttttcctatattttttcccctggaattgctcaagtgaaaaagggaacaccgagtacaaattccatacgaaaattaccaattcacaaccatcatgtgatgtaggaataaccacagagaacaagaaccagtagacttacaatagaaggctgagtagtgctcaattcatcctttgaaaatgacaatagcattccattcgccgatcttacccataagacctggaaaattgggttttggtgcagtgaaccgcgccctaagtggtgcccgctttatgggtaagtgctctgtgggcttcttaataacttttacagcctacaagactaaagtagttttaacttacagagcatgccacaaagtagttacccagatcaaagaccaacctgtattcaggctaccaatcacgcccctaactgtccaggctctttatgctctatagctcctgataacttttagaaacagaagaaaaatagagcgagatgctagctagaggaactttaactggccaaagtagccttacagcaattacaatgttccatatgcaggtaatgctgacaagtttttaactactatgctatataaacatacaaccaataatcatttgttgaaatatccaaattcaaaatcaaggtgtattacgtacaaaattaatgaccatgtaaaccataacaatgctagctttatgttgtgtgtgatgatgaattcagtgctgtactgttgtaaacctagaacggtcacccatcctattagcaatatggcaccattacaaattccataaaaaatttgcatccaggcagttgttaggtgattaggtctaaacaccgaagaaagaattctctacagaattgtgctacacaagctgctactactgaaagacactatcgccagaaatcatgacatatatcaagaactaggtatatgcccgtgctttgctacggagctaaccaaaatgtaataaagatacattgaggtacaaaagcac

SEQ ID NO: 43090 - DNA, 3330 bp, Zea Mays
atggcctgcaaccgccgccgcaagcttctctgcgcctgtttgctgctggcttgcgcagcccccgccgccgccgccgccgtcaacatctccgtctactggggccagaacagcaacgagggcagcctgggccagacatgcagcagcggccgctacgccttggttgccatggccttcctttccacgttcggcagcggccagacaccggtcctcaacttggccgggcactgcgaccccgcgtcgggcggctgcacagctctggccgcggacatcgcggcctgccaggcgagaggcgtcagggtgctcctcagcatcggcggcggtgctggaagctacaacctctcctccgcctcggacgccgagagctgcccgtacccggacgcctcgctcggcgcggcgctcgccacggggctgttcgaccacgtgtgggtgcagttctacaacaaccccgggtgcgagtaccagcagaaggacggagacggcgtggccaacctggcggcatcgtggaaggcgtggacgcagtcgctgccgtcgtcggcgtctgtgttccttggcctgccggcgtcgcctgctgcagcgggtagcgggtacgtacccccggacgaccttgtgtcgcgtgtgctgccggcggtgagcggctccgctaactacggcggcctcatgctgtggaaccgctactacgacaacagcaccggttacagtgcccggattctgagcagcaatatcatagcgggcaccgcaggcgtatccgggctgtgtgcaataatcgctctcgcagccttgatgtggtggtacaagagacgttatggcatggtaataccatggcgcagaggcgtatccggggtcgaatcctttctgcaaaagcaaggagctctactacacccgaaaggctacacttactcggaggtgaagaggatgaccaggtccttcgctcacaagctcgggcaaggcggctacggcgctgtctacaggggcagcatgcctgacggccgtgaggtggccgtcaagatgctgacgggcatgctggagggcgacggcgaggagttcatgaacgaggtggcgagcatcagcaggacgtctcacgtcaacatcgttactctggtagggtactgcctccagggtccaaagagagctctcctgtacgagtacatgcccaatggctccctcgagaggtacaccttcggcagcagcagtggagaagacgccttgagctgggacaggctgttcggtatcgtcgttggagtcgcgcgagggctggagtacctccacacgggctgcaacacccgcatcgtgcacttcgacatcaagccgcacaacatcctgctggaccaggacatgtgtcccaagatctcggacttcgggctggcgaagctgtgcgggcagaaggcgagcagggtgtccatcgccggggcgaggggcacggtagggtacatagcgcccgaagtcttctcgaggagctacgaggcagtgggcagcaaggctgatgtgtacagctacggcatggtggtccttgagatggtcggagcgaggaagaatgtccatgtcagtgctacagacgacggcggcaacagcagcagcagcaggtattttccgcaatggctgtatgaaaacttggaccagttctgtcgccccacaaccacgagcaacggcgagatccgcggtgacgacgacgacgccacggaagtgctgctcgtgaggaagatggtcgtagttggactgtggtgcatacagtccaaaccggacagtcggccgtccatgggccaagtccttgagatgctggagagcaacgccgccgacctgcagctgccgccaaaggccttgtgcaccgcttattaaaccgagtccgatcttgtaaaaactctagtccagcggcgtaatgcattcattgcttacctgctatagatagatactactgattcgagctcattgttcttcactccaccacgtcctttgttctttcaaagatgacctcgtgggtctatcttttgcactctttttgtgaccttctatgctgcttgcgctggctttcagtagagatgttctgtgtgcgctgagacagacagcacctcgaccctcccttgcacatccttcaaccgctccttacacgagtaaataaaacattatccacctattcttcctacgatcaggcagagatacctcccacacaaactggagaccatgattttttcccccacacatttgagtaggcacccaagcctctaagctacgtgatacagaacaaagatgatacccaaaaccttttacactccctctgacattgtgtgcgctgccccccacccccaccattcaccctcaacacacactcacaacaaccttttacccactatatgacattgttttcctatattttttcccctggaattgctcaagtgaaaaagggaacaccgagtacaaattccatacgaaaattaccaattcacaaccatcatgtgatgtaggaataaccacagagaacaagaaccagtagacttacaatagaaggctgagtagtgctcaattcatcctttgaaaatgacaatagcattccattcgccgatcttacccataagacctggaaaattgggttttggtgcagtgaaccgcgccctaagtggtgcccgctttatgggtaagtgctctgtgggcttcttaataacttttacagcctacaagactaaagtagttttaacttacagagcatgccacaaagtagttacccagatcaaagaccaacctgtattcaggctaccaatcacgcccctaactgtccaggctctttatgctctatagctcctgataacttttagaaacagaagaaaaatagagcgagatgctagctagaggaactttaactggccaaagtagccttacagcaattacaatgttccatatgcaggtaatgctgacaagtttttaactactatgctatataaacatacaaccaataatcatttgttgaaatatccaaattcaaaatcaaggtgtattacgtacaaaattaatgaccatgtaaaccataacaatgctagctttatgttgtgtgtgatgatgaattcagtgctgtactgttgtaaacctagaacggtcacccatcctattagcaatatggcaccattacaaattccataaaaaatttgcatccaggcagttgttaggtgattaggtctaaacaccgaagaaagaattctctacagaattgtgctacacaagctgctactactgaaagacactatcgccagaaatcatgacatatatcaagaactaggtatatgcccgtgctttgctacggagctaaccaaaatgtaataaagatacattgaggtacaaaagcac

SEQ ID NO: 43091 - DNA, 887 bp, Zea Mays
gctggccactagacggcataactgtcaacccggaccggcatcgagccgattgtcaccacaccagctttgctcgtcttccggtcagcctccactaccttggaactgattttgaccttctgctcctcgccaccctcaggaactgcgctcccagagccactgactccatttagctgcttctccataccagctgtgctagtcttacggtcagcctccactgccttggagcttatcttgagagacccaagtttggcagtgaccctctgctgctcgccaccctctggaactggaactgtgctcgcagagccgctgactccatttagccgcttttcaggtgctttcagtgagccctgggcagcaccgctgtctgcatgctgctttggattttcgaccttcttccagtactgctgtttcccatccgcacctgccgccttcaagcttggacctggtggatggttggttgcagttttcgctgcatcctcttggttctgactgccgctgcaatgactttcctgtagttcattctctttctcagcctcactcgcctgcttatcagaggcacgcggctcctgaggattgatcaccttagcatcatgcggcttctcagacacattttgtatctcagatgttctgtctaccagcacactgctggacttcgtctgctcagtgcgctgggagacaggtacaaaatctggagcatcgtaactcagcttgcatcttctgtgcggcttcatttgcgcctcttctgcctcatatctcataaaatcatcaaacaggcagtccctcactttgatgtctttgaagatcttgatcacagatattccagggaggtatggtatctgcaaataagacattgcaacggatcatgacacgaggcttccacatgcata

SEQ ID NO: 43092 - DNA, 1853 bp, Zea Mays
ctaaagttcgccacctggttttgtgcttcttcaggtttattgcctccattcacttcacggcttaaactacccaattttttgcaatttagtcattttttcgaagaaaaaaaatcatgtttcggctgacttcgagcaggtgttcaggatccatgataggttgtacatcgttttctcaaggctcaccactgacgctcggatgctatgagttgtagttgctgaattttccctgcccaccaccacctattatcttctgttcggctgcttttcgatccctctgcaggtaccattggttgttcttcaggcacaacatgtatcagctgcgtcaggagagggacatgaagcatgagacttttgccatcttgtctctgggaagaggttataatcactcctgagcacaacgaagaagggatttacacgatcagattctacattcagattacaacgtcaataacaggcccagtgaatgctgaaagatgcgctttcatagaagaaactaagctctcaagatggtggcagaattaactcctttcctgttatgtttagacaggtttcaaggacagcctctgtataagctcagaccaagcaaattccgtgcagcaattgaggaggctttccttgctgaacgtggttttttttatctccaaacggatgaggtggttgcaggactgtggatcctttctgtccatgggagctgctgcaattttctcaccttgtcttacatagtgctggtcttgtacgaggtcaccctcagatgaactttagtgattgctcccaggcgcggcatgcatgctttgctttattcacatgatcgagttcccctcacgtccacgctctatccgatgccacgagagttttccagaagcaagtccacggattgtgtgttcagcaaataagtaaaccacattgccgccgggtccacgagggagaaaggaaacacgagcattgtttcctccgtcgacgacagagctccgttcgtctccccctcagtttgacagcctcgctctgtcttctctcctcaatcgcgtgcttactcttcagcatttactccttagtagaaattgccgaccaccgccgcaccttgaagaccgccgtgctgttcgtcgtggtggcccgtctcaggcaacgacgactacgtcggtcgtggcctcaaagacctcccgccaccgctgtgacttgaagccctcctccatgccaatcaaggtgattgacaagtcatttggatttcacgctgctgtggaggaggcccaaagggccctcaatgccgctcatgtcgaggctgaaagtgtagacaatggcattggtgttgtgaagctaatgggtcacaactgttgttttactgcaagtcacccttctacctcgaagggaagagacgactcctcgagttcatttagagacgacgtgaggacaagggtcatgtggttcatcgtgctggctgagggtgctgatcaggacctcatcgtgagaagtatgaatttcatggacacctaagatgcttctggagataaactgcttctagatggctgcctttggctattctagaagataaaggctaggcttatggtccaaaccttcgtctccttctcaatgtggtggcagagaacattgttattgccttcatctaccattcagtttgctttattattattattataaaatagatgatccctattgatcaatatgtcttgactactaatatctctatatgtttatatcaacaacctttatagtgttatatatatatatatatatatgtgaacacattgaccacagactcgcgcttcgcgcgagcccatgtggggatttcagctctctttaatttcttagggagttttttttgtagactattgatcgag

SEQ ID NO: 43093 - DNA, 1775 bp, Zea Mays
ctaaagttcgccacctggttttgtgcttcttcaggtttattgcctccattcacttcacggcttaaactacccaattttttgcaatttagtcattttttcgaagaaaaaaaatcatgtttcggctgacttcgagcaggtgttcaggatccatgataggttgtacatcgttttctcaaggctcaccactgacgctcggatgctatgagttgtagttgctgaattttccctgcccaccaccacctattatcttctgttcggctgcttttcgatccctctgcaggtaccattggttgttcttcaggcacaacatgtatcagctgcgtcaggagagggacatgaagcatgagacttttgccatcttgtctctgggaagaggttataatcactcctgagcacaacgaagaagggatttacacgatcagattctacattcagattacaacgtcaataacaggcccagtgaatgctgaaagatgcgctttcatagaagaaactaagctctcaagatggtggcagaattaactcctttcctgttatgtttaggtttcaaggacagcctctgtataagctcagaccaagcaaattccgtgcagcaattgaggaggctttccttgctgaacgtggttttttttatctccaaacggatgaggaagaggctgcttcaaataacgagcaagaatgccaatctgagtctcaggttgttggcaaagggaaagatcattccttacttaacccatccatagtccctgccatgcccgttagcaggattttgattgtggttgcaggactgtggatcctttctgtccatgggagctgctgcaattttctcaccttgtcttacatagtgttatccagttatggctttcttcatgcagtttttgtggtattgtacacagtgctggtcttgtacgagcatttactccttagtagaaattgccgaccaccgccgcaccttgaagaccgccgtgctgttcgtcgtggtggcccgtctcaggcaacgacgactacgtcggtcgtggcctcaaagacctcccgccaccgctgtgacttgaagccctcctccatgccaatcaaggtgattgacaagtcatttggatttcacgctgctgtggaggaggcccaaagggccctcaatgccgctcatgtcgaggctgaaagtgtagacaatggcattggtgttgtgaagctaatgggtcacaactgttgttttactgcagtgtgcttctctagctagccgttatgtggattgttgtttaatcccagagtcacccttctacctcgaagggaagagacgactcctcgagttcatttagagacgacgtgaggacaagggtcatgtggttcatcgtgctggctgagggtgctgatcaggacctcatcgtgagaagtatgaatttcatggacacctaagatgcttctggagataaactgcttctagatggctgcctttggctattctagaagataaaggctaggcttatggtccaaaccttcgtctccttctcaatgtggtggcagagaacattgttattgccttcatctaccattcagtttgctttattattattattataaaatagatgatccctattgatcaatatgtcttgactactaatatctctatatgtttatatcaacaacctttatagtgttatatatatatatatatatatgtgaacacattgaccacagactcgcgcttcgcgcgagcccatgtggggatttcagctctctttaatttcttagggagttttttttgtagactattgatcgag

SEQ ID NO: 43094 - DNA, 1728 bp, Zea Mays
gctaaagttcgccacctggttttgtgcttcttcaggtttattgcctccattcacttcacggcttaaactacccaattttttgcaatttagtcattttttcgaagaaaaaaaatcatgtttcggctgacttcgagcaggtgttcaggatccatgataggttgtacatcgttttctcaaggctcaccactgacgctcggatgctatgagttgtagttgctgaattttccctgcccaccaccacctattatcttctgttcggctgcttttcgatccctctgcaggtaccattggttgttcttcaggcacaacatgtatcagctgcgtcaggagagggacatgaagcatgagacttttgccatcttgtctctgggaagaggttataatcactcctgagcacaacgaagaagggatttacacgatcagattctacattcagattacaacgtcaataacaggcccagtgaatgctgaaagatgcgctttcatagaagaaactaagctctcaagatggtggcagaattaactcctttcctgttatgtttaggtttcaaggacagcctctgtataagctcagaccaagcaaattccgtgcagcaattgaggaggctttccttgctgaacgtggttttttttatctccaaacggatgaggttgttggcaaagggaaagatcattccttacttaacccatccatagtccctgccatgcccgttagcaggattttgattgtggttgcaggactgtggatcctttctgtccatgggagctgctgcaattttctcaccttgtcttacatagtgttatccagttatggctttcttcatgcagtttttgtggtattgtacacagtgctggtcttgtacgagcatttactccttagtagaaattgccgaccaccgccgcaccttgaagaccgccgtgctgttcgtcgtggtggcccgtctcaggcaacgacgactacgtcggtcgtggcctcaaagacctcccgccaccgctgtgacttgaagccctcctccatgccaatcaaggtgattgacaagtcatttggatttcacgctgctgtggaggaggcccaaagggccctcaatgccgctcatgtcgaggctgaaagtgtagacaatggcattggtgttgtgaagctaatgggtcacaactgttgttttactgcagtgtgcttctctagctagccgttatgtggattgttgtttaatcccagagtcacccttctacctcgaagggaagagacgactcctcgagttcatttagagacgacgtgaggacaagggtcatgtggttcatcgtgctggctgagggtgctgatcaggacctcatcgtgagaagtatgaatttcatggacacctaagatgcttctggagataaactgcttctagatggctgcctttggctattctagaagataaaggctaggcttatggtccaaaccttcgtctccttctcaatgtggtggcagagaacattgttattgccttcatctaccattcagtttgctttattattattattataaaatagatgatccctattgatcaatatgtcttgactactaatatctctatatgtttatatcaacaacctttatagtgttatatatatatatatatatatgtgaacacattgaccacagactcgcgcttcgcgcgagcccatgtggggatttcagctctctttaatttcttagggagttttttttgtagactattgatcgag

SEQ ID NO: 43095 - DNA, 1650 bp, Zea Mays
gctaaagttcgccacctggttttgtgcttcttcaggtttattgcctccattcacttcacggcttaaactacccaattttttgcaatttagtcattttttcgaagaaaaaaaatcatgtttcggctgacttcgagcaggtgttcaggatccatgataggttgtacatcgttttctcaaggctcaccactgacgctcggatgctatgagttgtagttgctgaattttccctgcccaccaccacctattatcttctgttcggctgcttttcgatccctctgcaggtaccattggttgttcttcaggcacaacatgtatcagctgcgtcaggagagggacatgaagcatgagacttttgccatcttgtctctgggaagaggttataatcactcctgagcacaacgaagaagggatttacacgatcagattctacattcagattacaacgtcaataacaggcccagtgaatgctgaaagatgcgctttcatagaagaaactaagctctcaagatggtggcagaattaactcctttcctgttatgtttaggtttcaaggacagcctctgtataagctcagaccaagcaaattccgtgcagcaattgaggaggctttccttgctgaacgtggttttttttatctccaaacggatgaggtggttgcaggactgtggatcctttctgtccatgggagctgctgcaattttctcaccttgtcttacatagtgttatccagttatggctttcttcatgcagtttttgtggtattgtacacagtgctggtcttgtacgagcatttactccttagtagaaattgccgaccaccgccgcaccttgaagaccgccgtgctgttcgtcgtggtggcccgtctcaggcaacgacgactacgtcggtcgtggcctcaaagacctcccgccaccgctgtgacttgaagccctcctccatgccaatcaaggtgattgacaagtcatttggatttcacgctgctgtggaggaggcccaaagggccctcaatgccgctcatgtcgaggctgaaagtgtagacaatggcattggtgttgtgaagctaatgggtcacaactgttgttttactgcagtgtgcttctctagctagccgttatgtggattgttgtttaatcccagagtcacccttctacctcgaagggaagagacgactcctcgagttcatttagagacgacgtgaggacaagggtcatgtggttcatcgtgctggctgagggtgctgatcaggacctcatcgtgagaagtatgaatttcatggacacctaagatgcttctggagataaactgcttctagatggctgcctttggctattctagaagataaaggctaggcttatggtccaaaccttcgtctccttctcaatgtggtggcagagaacattgttattgccttcatctaccattcagtttgctttattattattattataaaatagatgatccctattgatcaatatgtcttgactactaatatctctatatgtttatatcaacaacctttatagtgttatatatatatatatatatatgtgaacacattgaccacagactcgcgcttcgcgcgagcccatgtggggatttcagctctctttaatttcttagggagttttttttgtagactattgatcgag

SEQ ID NO: 43096 - DNA, 1777 bp, Zea Mays
agatgaggggctaaagttcgccacctggttttgtgcttcttcaggtttattgcctccattcacttcacggcttaaactacccaattttttgcaatttagtcattttttcgaagaaaaaaaatcatgtttcggctgacttcgagcaggtgttcaggatccatgataggttgtacatcgttttctcaaggctcaccactgacgctcggatgctatgagttgtagttgctgaattttccctgcccaccaccacctattatcttctgttcggctgcttttcgatccctctgcaggtaccattggttgttcttcaggcacaacatgtatcagctgcgtcaggagagggacatgaagcatgagacttttgccatcttgtctctgggaagaggttataatcactcctgagcacaacgaagaagggatttacacgatcagattctacattcagattacaacgtcaataacaggcccagtgaatgctgaaagatgcgctttcatagaagaaactaagctctcaagatggtggcagaattaactcctttcctgttatgtttaggtttcaaggacagcctctgtataagctcagaccaagcaaattccgtgcagcaattgaggaggctttccttgctgaacgtggttttttttatctccaaacggatgaggtggttgcaggactgtggatcctttctgtccatgggagctgctgcaattttctcaccttgtcttacatagtgctggtcttgtacgaggtcaccctcagatgaactttagtgattgctcccaggcgcggcatgcatgctttgctttattcacatgatcgagttcccctcacgtccacgctctatccgatgccacgagagttttccagaagcaagtccacggattgtgtgttcagcaaataagtaaaccacattgccgccgggtccacgagggagaaaggaaacacgagcattgtttcctccgtcgacgacagagctcctagaaattgccgaccaccgccgcaccttgaagaccgccgtgctgttcgtcgtggtggcccgtctcaggcaacgacgactacgtcggtcgtggcctcaaagacctcccgccaccgctgtgacttgaagccctcctccatgccaatcaaggtgattgacaagtcatttggatttcacgctgctgtggaggaggcccaaagggccctcaatgccgctcatgtcgaggctgaaagtgtagacaatggcattggtgttgtgaagctaatgggtcacaactgttgttttactgcaagtcacccttctacctcgaagggaagagacgactcctcgagttcatttagagacgacgtgaggacaagggtcatgtggttcatcgtgctggctgagggtgctgatcaggacctcatcgtgagaagtatgaatttcatggacacctaagatgcttctggagataaactgcttctagatggctgcctttggctattctagaagataaaggctaggcttatggtccaaaccttcgtctccttctcaatgtggtggcagagaacattgttattgccttcatctaccattcagtttgctttattattattattataaaatagatgatccctattgatcaatatgtcttgactactaatatctctatatgtttatatcaacaacctttatagtgttatatatatatatatatatatgtgaacacattgaccacagactcgcgcttcgcgcgagcccatgtggggatttcagctctctttaatttcttagggagttttttttgtagactattgatcgag

SEQ ID NO: 43097 - DNA, 2085 bp, Zea Mays
tcttgtttggggaagacgggaaagagatgaggggctaaagttcgccacctggttttgtgcttcttcaggtgttcaggatccatgataggttgtacatcgttttctcaaggctcaccactgacgctcggatgctatgagttgtagttgctgaattttccctgcccaccaccacctattatcttctgttcggctgcttttcgatccctctgcaggtaccattggttgttcttcaggcacaacatgtatcagctgcgtcaggagagggacatgaagcatgagacttttgccatcttgtctctgggaagaggttataatcactcctgagcacaacgaagaagggatttacacgatcagattctacattcagattacaacgtcaataacaggcccagtgaatgctgaaagatgcgctttcatagaagaaactaagctctcaagatggtggcagaattaactcctttcctgttatgtttagacaggtttcaaggacagcctctgtataagctcagaccaagcaaattccgtgcagcaattgaggaggctttccttgctgaacgtggttttttttatctccaaacggatgaggtatgctcaccgcgaaagtctgtaaataagcagtctgatcctattggttttcaggaagaggctgcttcaaataacgagcaagaatgccaatctgagtctcaggttgttggcaaagggaaagatcattccttacttaacccatccatagtccctgccatgcccgttagcaggattttgattgtatgttcaccgcgaaatttttgattgtatgttgactggcaggattttgttatgtatagacttctattaatcaaggcaattcattttggatgcatttaatgtgcttatctctattgtcaggtggttgcaggactgtggatcctttctgtccatgggagctgctgcaattttctcaccttgtcttacatagtgctggtcttgtacgaggtcaccctcagatgaactttagtgattgctcccaggcgcggcatgcatgctttgctttattcacatgatcgagttcccctcacgtccacgctctatccgatgccacgagagttttccagaagcaagtccacggattgtgtgttcagcaaataagtaaaccacattgccgccgggtccacgagggagaaaggaaacacgagcattgtttcctccgtcgacgacagagctccgttcgtctccccctcagtttgacagcctcgctctgtcttctctcctcaatcgcgtgcttactcttcagcatttactccttagtagaaattgccgaccaccgccgcaccttgaagaccgccgtgctgttcgtcgtggtggcccgtctcaggcaacgacgactacgtcggtcgtggcctcaaagacctcccgccaccgctgtgacttgaagccctcctccatgccaatcaaggtgattgacaagtcatttggatttcacgctgctgtggaggaggcccaaagggccctcaatgccgctcatgtcgaggctgaaagtgtagacaatggcattggtgttgtgaagctaatgggtcacaactgttgttttactgcaagtcacccttctacctcgaagggaagagacgactcctcgagttcatttagagacgacgtgaggacaagggtcatgtggttcatcgtgctggctgagggtgctgatcaggacctcatcgtgagaagtatgaatttcatggacacctaagatgcttctggagataaactgcttctagatggctgcctttggctattctagaagataaaggctaggcttatggtccaaaccttcgtctccttctcaatgtggtggcagagaacattgttattgccttcatctaccattcagtttgctttattattattattataaaatagatgatccctattgatcaatatgtcttgactactaatatctctatatgtttatatcaacaacctttatagtgttatatatatatatatatatatgtgaacacattgaccacagactcgcgcttcgcgcgagcccatgtggggatttcagctctctttaatttcttagggagttttttttgtagactattgatcgag

SEQ ID NO: 43098 - DNA, 2855 bp, Zea Mays
gttttcagtatttctttcaactcatcatactaatagggagagtgagtgcctcagccccaaggctatattctatgccgatatgaacttaattcaaaaataaaaaaggaaacgttacaggctcaaacctcaatcgacaaacagcaactaggattcctacaaagctgtatctaagttattaaaacttccccttttgaagccccgtccgcacttcacgggatcgtttcgtatcaggctttgacacctgttagagcgcggacccgaaatcggattctaattgagctctgagcagcggtgtcctgagtccgtcaccgtgttctctcccccgcgcttcccttcaacgccgcctccctaaagatccgccgcttctctgccctctgctcgtcgattcggcgcctcctctccttcacgcgcccacgctgccgtcgcctcctcctcactgtcgtccatgccgctgtagccgcctacggccatggccgctagagccagcgactatttgacggtggagtaccactccagagagctcccctctttcccctccgacgacgagggaggcaccgccggcagtggcgtcctcgtatgcagaacagcagaagacgctcgctcgctctgcgcgcatcgaaccaaaaaccacacctcggcggcagctatataaaagccttcacctgacccgggcgctagggtttattcgctcctcccacccgccgccgtcgccgcctcctctccccagcacccggagctcgctcgaccgccgctcaccatgatcatccccaagaagaaccgcaatgagatctgcaaagggcgtgttgtatgccaagaaggactacaacctggcgaagcatccgcagatcgatgtgcccaacctccaggactccaggtgatcaagctcatgcagagctttaagtccaaggagtatgttagggagaccttctcctggcagtactactactggtacctcaccaacgatggcattgagcacctacgcaactacctgaacctccggtctgagatcgtgcctgccacgctcaagaagtctgccaagccaccgggccgcccatttggctctggccctcctggtgaccgcccaaggtaccattggttgttcttcaggcacaacatgtatcagctgcgtcaggagagggacatgaagcatgagacttttgccatcttgtctctgggaagaggttataatcactcctgagcacaacgaagaagggatttacacgatcagattctacattcagattacaacgtcaataacaggcccagtgaatgctgaaagatgcgctttcatagaagaaactaagctctcaagatggtggcagaattaactcctttcctgttatgtttaggtttcaaggacagcctctgtataagctcagaccaagcaaattccgtgcagcaattgaggaggctttccttgctgaacgtggttttttttatctccaaacggatgaggtggttgcaggactgtggatcctttctgtccatgggagctgctgcaattttctcaccttgtcttacatagtgctggtcttgtacgaggtcaccctcagatgaactttagtgattgctcccaggcgcggcatgcatgctttgctttattcacatgatcgagttcccctcacgtccacgctctatccgatgccacgagagttttccagaagcaagtccacggattgtgtgttcagcaaataagtaaaccacattgccgccgggtccacgagggagaaaggaaacacgagcattgtttcctccgtcgacgacagagctccaaattgccgaccaccgccgcaccttgaagaccgccgtgctgttcgtcgtggtggcccgtctcaggcaacgacgactacgtcggtcgtggcctcaaagacctcccgccaccgctgtgacttgaagccctcctccatgccaatcaaggaatatcggccaccgctgtgccttgaagaggtacccccggttaccacatgtcgaagacctctcggagcactttgcctacttgcttaacatcttcctggcatattgaaagtgatgcagcgagacgggtttgtcctcggaacctcaagaggagggcatgacactgcgaaaatcattgattgtcttcaggaccgtgatactaaccagatttatattatcgaaggcgatggcattcagaaaggtgattgacaagtcatttggatttcacgctgctgtggaggaggcccaaagggccctcaatgccgctcatgtcgaggctgaaagtgtagacaatggcattggtgttgtgaagctaatgggtcacaactgttgttttactgcagtgtgcttctctagctagccgttatgtggattgttgtttaatcccagagtcacccttctacctcgaagggaagagacgactcctcgagttcatttagagacgacgtgaggacaagggtcatgtggttcatcgtgctggctgagggtgctgatcaggacctcatcgtgagaagtatgaatttcatggacacctaagatgcttctggagataaactgcttctagatggctgcctttggctattctagaagataaaggctaggcttatggtccaaaccttcgtctccttctcaatgtggtggcagagaacattgttattgccttcatctaccattcagtttgctttattattattattataaaatagatgatccctattgatcaatatgtcttgactactaatatctctatatgtttatatcaacaacctttatagtgttatatatatatatatatatatgtgaacacattgaccacagactcgcgcttcgcgcgagcccatgtggggatttcagctctctttaatttcttagggagttttttttgtagactattgatcgag

SEQ ID NO: 43099 - DNA, 3079 bp, Zea Mays
gttttcagtatttctttcaactcatcatactaatagggagagtgagtgcctcagccccaaggctatattctatgccgatatgaacttaattcaaaaataaaaaaggaaacgttacaggctcaaacctcaatcgacaaacagcaactaggattcctacaaagctgtatctaagttattaaaacttccccttttgaagccccgtccgcacttcacgggatcgtttcgtatcaggctttgacacctgttagagcgcggacccgaaatcggattctaattgagctctgagcagcggtgtcctgagtccgtcaccgtgttctctcccccgcgcttcccttcaacgccgcctccctaaagatccgccgcttctctgccctctgctcgtcgattcggcgcctcctctccttcacgcgcccacgctgccgtcgcctcctcctcactgtcgtccatgccgctgtagccgcctacggccatggccgctagagccagcgactatttgacggtggagtaccactccagagagctcccctctttcccctccgacgacgagggaggcaccgccggcagtggcgtcctcgtatgcagaacagcagaagacgctcgctcgctctgcgcgcatcgaaccaaaaaccacacctcggcggcagctatataaaagccttcacctgacccgggcgctagggtttattcgctcctcccacccgccgccgtcgccgcctcctctccccagcacccggagctcgctcgaccgccgctcaccatgatcatccccaagaagaaccgcaatgagatctgcaaagggcgtgttgtatgccaagaaggactacaacctggcgaagcatccgcagatcgatgtgcccaacctccaggactccaggtgatcaagctcatgcagagctttaagtccaaggagtatgttagggagaccttctcctggcagtactactactggtacctcaccaacgatggcattgagcacctacgcaactacctgaacctccggtctgagatcgtgcctgccacgctcaagaagtctgccaagccaccgggccgcccatttggctctggccctcctggtgaccgcccaagggagaggcgagatcttgtttggggaagacgggaaagagatgaggggctaaagttcgccacctggttttgtgcttcttcaggtgttcaggatccatgataggttgtacatcgttttctcaaggctcaccactgacgctcggatgctatgagttgtagttgctgaattttccctgcccaccaccacctattatcttctgttcggctgcttttcgatccctctgcaggtaccattggttgttcttcaggcacaacatgtatcagctgcgtcaggagagggacatgaagcatgagacttttgccatcttgtctctgggaagaggttataatcactcctgagcacaacgaagaagggatttacacgatcagattctacattcagattacaacgtcaataacaggcccagtgaatgctgaaagatgcgctttcatagaagaaactaagctctcaagatggtggcagaattaactcctttcctgttatgtttaggtttcaaggacagcctctgtataagctcagaccaagcaaattccgtgcagcaattgaggaggctttccttgctgaacgtggttttttttatctccaaacggatgaggtggttgcaggactgtggatcctttctgtccatgggagctgctgcaattttctcaccttgtcttacatagtgctggtcttgtacgaggtcaccctcagatgaactttagtgattgctcccaggcgcggcatgcatgctttgctttattcacatgatcgagttcccctcacgtccacgctctatccgatgccacgagagttttccagaagcaagtccacggattgtgtgttcagcaaataagtaaaccacattgccgccgggtccacgagggagaaaggaaacacgagcattgtttcctccgtcgacgacagagctccaaattgccgaccaccgccgcaccttgaagaccgccgtgctgttcgtcgtggtggcccgtctcaggcaacgacgactacgtcggtcgtggcctcaaagacctcccgccaccgctgtgacttgaagccctcctccatgccaatcaaggaatatcggccaccgctgtgccttgaagaggtacccccggttaccacatgtcgaagacctctcggagcactttgcctacttgcttaacatcttcctggcatattgaaagtgatgcagcgagacgggtttgtcctcggaacctcaagaggagggcatgacactgcgaaaatcattgattgtcttcaggaccgtgatactaaccagatttatattatcgaaggcgatggcattcagaaaggtgattgacaagtcatttggatttcacgctgctgtggaggaggcccaaagggccctcaatgccgctcatgtcgaggctgaaagtgtagacaatggcattggtgttgtgaagctaatgggtcacaactgttgttttactgcagtgtgcttctctagctagccgttatgtggattgttgtttaatcccagagtcacccttctacctcgaagggaagagacgactcctcgagttcatttagagacgacgtgaggacaagggtcatgtggttcatcgtgctggctgagggtgctgatcaggacctcatcgtgagaagtatgaatttcatggacacctaagatgcttctggagataaactgcttctagatggctgcctttggctattctagaagataaaggctaggcttatggtccaaaccttcgtctccttctcaatgtggtggcagagaacattgttattgccttcatctaccattcagtttgctttattattattattataaaatagatgatccctattgatcaatatgtcttgactactaatatctctatatgtttatatcaacaacctttatagtgttatatatatatatatatatatgtgaacacattgaccacagactcgcgcttcgcgcgagcccatgtggggatttcagctctctttaatttcttagggagttttttttgtagactattgatcgag

SEQ ID NO: 43100 - DNA, 2753 bp, Zea Mays
gttttcagtatttctttcaactcatcatactaatagggagagtgagtgcctcagccccaaggctatattctatgccgatatgaacttaattcaaaaataaaaaaggaaacgttacaggctcaaacctcaatcgacaaacagcaactaggattcctacaaagctgtatctaagttattaaaacttccccttttgaagccccgtccgcacttcacgggatcgtttcgtatcaggctttgacacctgttagagcgcggacccgaaatcggattctaattgagctctgagcagcggtgtcctgagtccgtcaccgtgttctctcccccgcgcttcccttcaacgccgcctccctaaagatccgccgcttctctgccctctgctcgtcgattcggcgcctcctctccttcacgcgcccacgctgccgtcgcctcctcctcactgtcgtccatgccgctgtagccgcctacggccatggccgctagagccagcgactatttgacggtggagtaccactccagagagctcccctctttcccctccgacgacgagggaggcaccgccggcagtggcgtcctcgtatgcagaacagcagaagacgctcgctcgctctgcgcgcatcgaaccaaaaaccacacctcggcggcagctatataaaagccttcacctgacccgggcgctagggtttattcgctcctcccacccgccgccgtcgccgcctcctctccccagcacccggagctcgctcgaccgccgctcaccatgatcatccccaagaagaaccgcaatgagatctgcaaagggcgtgttgtatgccaagaaggactacaacctggcgaagcatccgcagatcgatgtgcccaacctccaggactccaggtgatcaagctcatgcagagctttaagtccaaggagtatgttagggagaccttctcctggcagtactactactggtacctcaccaacgatggcattgagcacctacgcaactacctgaacctccggtctgagatcgtgcctgccacgctcaagaagtctgccaagccaccgggccgcccatttggctctggccctcctggtgaccgcccaaggtaccattggttgttcttcaggcacaacatgtatcagctgcgtcaggagagggacatgaagcatgagacttttgccatcttgtctctgggaagaggttataatcactcctgagcacaacgaagaagggatttacacgatcagattctacattcagattacaacgtcaataacaggcccagtgaatgctgaaagatgcgctttcatagaagaaactaagctctcaagatggtggcagaattaactcctttcctgttatgtttaggtttcaaggacagcctctgtataagctcagaccaagcaaattccgtgcagcaattgaggaggctttccttgctgaacgtggttttttttatctccaaacggatgaggtatgctcaccgcgaaagtctgtaaataagcagtctgatcctattggttttcaggaagaggctgcttcaaataacgagcaagaatgccaatctgagtctcaggttgttggcaaagggaaagatcattccttacttaacccatccatagtccctgccatgcccgttagcaggattttgattgtggttgcaggactgtggatcctttctgtccatgggagctgctgcaattttctcaccttgtcttacatagtgctggtcttgtacgaggtcaccctcagatgaactttagtgattgctcccaggcgcggcatgcatgctttgctttattcacatgatcgagttcccctcacgtccacgctctatccgatgccacgagagttttccagaagcaagtccacggattgtgtgttcagcaaataagtaaaccacattgccgccgggtccacgagggagaaaggaaacacgagcattgtttcctccgtcgacgacagagctcctagaaattgccgaccaccgccgcaccttgaagaccgccgtgctgttcgtcgtggtggcccgtctcaggcaacgacgactacgtcggtcgtggcctcaaagacctcccgccaccgctgtgacttgaagccctcctccatgccaatcaaggtgattgacaagtcatttggatttcacgctgctgtggaggaggcccaaagggccctcaatgccgctcatgtcgaggctgaaagtgtagacaatggcattggtgttgtgaagctaatgggtcacaactgttgttttactgcaagtcacccttctacctcgaagggaagagacgactcctcgagttcatttagagacgacgtgaggacaagggtcatgtggttcatcgtgctggctgagggtgctgatcaggacctcatcgtgagaagtatgaatttcatggacacctaagatgcttctggagataaactgcttctagatggctgcctttggctattctagaagataaaggctaggcttatggtccaaaccttcgtctccttctcaatgtggtggcagagaacattgttattgccttcatctaccattcagtttgctttattattattattataaaatagatgatccctattgatcaatatgtcttgactactaatatctctatatgtttatatcaacaacctttatagtgttatatatatatatatatatatgtgaacacattgaccacagactcgcgcttcgcgcgagcccatgtggggatttcagctctctttaatttcttagggagttttttttgtagactattgatcgag

SEQ ID NO: 43101 - DNA, 2896 bp, Zea Mays
gttttcagtatttctttcaactcatcatactaatagggagagtgagtgcctcagccccaaggctatattctatgccgatatgaacttaattcaaaaataaaaaaggaaacgttacaggctcaaacctcaatcgacaaacagcaactaggattcctacaaagctgtatctaagttattaaaacttccccttttgaagccccgtccgcacttcacgggatcgtttcgtatcaggctttgacacctgttagagcgcggacccgaaatcggattctaattgagctctgagcagcggtgtcctgagtccgtcaccgtgttctctcccccgcgcttcccttcaacgccgcctccctaaagatccgccgcttctctgccctctgctcgtcgattcggcgcctcctctccttcacgcgcccacgctgccgtcgcctcctcctcactgtcgtccatgccgctgtagccgcctacggccatggccgctagagccagcgactatttgacggtggagtaccactccagagagctcccctctttcccctccgacgacgagggaggcaccgccggcagtggcgtcctcgtatgcagaacagcagaagacgctcgctcgctctgcgcgcatcgaaccaaaaaccacacctcggcggcagctatataaaagccttcacctgacccgggcgctagggtttattcgctcctcccacccgccgccgtcgccgcctcctctccccagcacccggagctcgctcgaccgccgctcaccatgatcatccccaagaagaaccgcaatgagatctgcaaagggcgtgttgtatgccaagaaggactacaacctggcgaagcatccgcagatcgatgtgcccaacctccaggactccaggtgatcaagctcatgcagagctttaagtccaaggagtatgttagggagaccttctcctggcagtactactactggtacctcaccaacgatggcattgagcacctacgcaactacctgaacctccggtctgagatcgtgcctgccacgctcaagaagtctgccaagccaccgggccgcccatttggctctggccctcctggtgaccgcccaaggtaccattggttgttcttcaggcacaacatgtatcagctgcgtcaggagagggacatgaagcatgagacttttgccatcttgtctctgggaaggtttcaaggacagcctctgtataagctcagaccaagcaaattccgtgcagcaattgaggaggctttccttgctgaacgtggttttttttatctccaaacggatgaggaagaggctgcttcaaataacgagcaagaatgccaatctgagtctcaggttgttggcaaagggaaagatcattccttacttaacccatccatagtccctgccatgcccgttagcaggattttgattgtggttgcaggactgtggatcctttctgtccatgggagctgctgcaattttctcaccttgtcttacatagtgctggtcttgtacgaggtcaccctcagatgaactttagtgattgctcccaggcgcggcatgcatgctttgctttattcacatgatcgagttcccctcacgtccacgctctatccgatgccacgagagttttccagaagcaagtccacggattgtgtgttcagcaaataagtaaaccacattgccgccgggtccacgagggagaaaggaaacacgagcattgtttcctccgtcgacgacagagctccgttcgtctccccctcagtttgacagcctcgctctgtcttctctcctcaatcgcgtgcttactcttcagcatttactccttagtagaaattgccgaccaccgccgcaccttgaagaccgccgtgctgttcgtcgtggtggcccgtctcaggcaacgacgactacgtcggtcgtggcctcaaagacctcccgccaccgctgtgacttgaagccctcctccatgccaatcaaggaatatcggccaccgctgtgccttgaagaggtacccccggttaccacatgtcgaagacctctcggagcactttgcctacttgcttaacatcttcctggcatattgaaagtgatgcagcgagacgggtttgtcctcggaacctcaagaggagggcatgacactgcgaaaatcattgattgtcttcaggaccgtgatactaaccagatttatattatcgaaggcgatggcattcagaaaggtgattgacaagtcatttggatttcacgctgctgtggaggaggcccaaagggccctcaatgccgctcatgtcgaggctgaaagtgtagacaatggcattggtgttgtgaagctaatgggtcacaactgttgttttactgcagtgtgcttctctagctagccgttatgtggattgttgtttaatcccagagtcacccttctacctcgaagggaagagacgactcctcgagttcatttagagacgacgtgaggacaagggtcatgtggttcatcgtgctggctgagggtgctgatcaggacctcatcgtgagaagtatgaatttcatggacacctaagatgcttctggagataaactgcttctagatggctgcctttggctattctagaagataaaggctaggcttatggtccaaaccttcgtctccttctcaatgtggtggcagagaacattgttattgccttcatctaccattcagtttgctttattattattattataaaatagatgatccctattgatcaatatgtcttgactactaatatctctatatgtttatatcaacaacctttatagtgttatatatatatatatatatatgtgaacacattgaccacagactcgcgcttcgcgcgagcccatgtggggatttcagctctctttaatttcttagggagttttttttgtagactattgatcgag

SEQ ID NO: 43102 - DNA, 1249 bp, Zea Mays
ctaaagttcgccacctggttttgtgcttcttcaggtgttcaggatccatgataggttgtacatcgttttctcaaggctcaccactgacgctcggatgctatgagttgtagttgctgaattttccctgcccaccaccacctattatcttctgttcggctgcttttcgatccctctgcaggtaccattggttgttcttcaggcacaacatgtatcagctgcgtcaggagagggacatgaagcatgagacttttgccatcttgtctctgggaagaggttataatcactcctgagcacaacgaagaagggatttacacgatcagattctacattcagattacaacgtcaataacaggcccagtgaatgctgaaagatgcgctttcatagaagaaactaagctctcaagatggtggcagaattaactcctttcctgttatgtttaggtttcaaggacagcctctgtataagctcagaccaagcaaattccgtgcagcaattgaggaggctttccttgctgaacgtggttttttttatctccaaacggatgaggtggttgcaggactgtggatcctttctgtccatgggagctgctgcaattttctcaccttgtcttacatagtgctggtcttgtacgaggtcaccctcagatgaactttagtgattgctcccaggcgcggcatgcatgctttgctttattcacatgatcgagttcccctcacgtccacgctctatccgatgccacgagagttttccagaagcaagtccacggattgtgtgttcagcaaataagtaaaccacattgccgccgggtccacgagggagaaaggaaacacgagcattgtttcctccgtcgacgacagagctcctagaaattgccgaccaccgccgcaccttgaagaccgccgtgctgttcgtcgtggtggcccgtctcaggcaacgacgactacgtcggtcgtggcctcaaagacctcccgccaccgctgtgacttgaagccctcctccatgccaatcaaggaatatcggccaccgctgtgccttgaagaggtacccccggttaccacatgtcgaagacctctcggagcactttgcctacttgcttaacatcttcctggcatattgaaagtgatgcagcgagacgggtttgtcctcggaacctcaagaggagggcatgacactgcgaaaatcattgattgtcttcaggaccgtgatactaaccagatttatattatcgaaggcgatggcattcagaaa

SEQ ID NO: 43103 - DNA, 1454 bp, Zea Mays
ctaaagttcgccacctggttttgtgcttcttcaggtttattgcctccattcacttcacggcttaaactacccaattttttgcaatttagtcattttttcgaagaaaaaaaatcatgtttcggctgacttcgagcaggtgttcaggatccatgataggttgtacatcgttttctcaaggctcaccactgacgctcggatgctatgagttgtagttgctgaattttccctgcccaccaccacctattatcttctgttcggctgcttttcgatccctctgcaggtaccattggttgttcttcaggcacaacatgtatcagctgcgtcaggagagggacatgaagcatgagacttttgccatcttgtctctgggaagaggttataatcactcctgagcacaacgaagaagggatttacacgatcagattctacattcagattacaacgtcaataacaggcccagtgaatgctgaaagatgcgctttcatagaagaaactaagctctcaagatggtggcagaattaactcctttcctgttatgtttaggtttcaaggacagcctctgtataagctcagaccaagcaaattccgtgcagcaattgaggaggctttccttgctgaacgtggttttttttatctccaaacggatgaggtggttgcaggactgtggatcctttctgtccatgggagctgctgcaattttctcaccttgtcttacatagtttttgtggtattgtacacagtgctggtcttgtacgaggtcaccctcagatgaactttagtgattgctcccaggcgcggcatgcatgctttgctttattcacatgatcgagttcccctcacgtccacgctctatccgatgccacgagagttttccagaagcaagtccacggattgtgtgttcagcaaataagtaaaccacattgccgccgggtccacgagggagaaaggaaacacgagcattgtttcctccgtcgacgacagagctccgttcgtctccccctcagtttgacagcctcgctctgtcttctctcctcaatcgcgtgcttactcttcagcatttactccttagtagaaattgccgaccaccgccgcaccttgaagaccgccgtgctgttcgtcgtggtggcccgtctcaggcaacgacgactacgtcggtcgtggcctcaaagacctcccgccaccgctgtgacttgaagccctcctccatgccaatcaaggaatatcggccaccgctgtgccttgaagaggtacccccggttaccacatgtcgaagacctctcggagcactttgcctacttgcttaacatcttcctggcatattgaaagtgatgcagcgagacgggtttgtcctcggaacctcaagaggagggcatgacactgcgaaaatcattgattgtcttcaggaccgtgatactaaccagatttatattatcgaaggcgatggcattcagaaa

SEQ ID NO: 43104 - DNA, 2355 bp, Zea Mays
gttttcagtatttctttcaactcatcatactaatagggagagtgagtgcctcagccccaaggctatattctatgccgatatgaacttaattcaaaaataaaaaaggaaacgttacaggctcaaacctcaatcgacaaacagcaactaggattcctacaaagctgtatctaagttattaaaacttccccttttgaagccccgtccgcacttcacgggatcgtttcgtatcaggctttgacacctgttagagcgcggacccgaaatcggattctaattgagctctgagcagcggtgtcctgagtccgtcaccgtgttctctcccccgcgcttcccttcaacgccgcctccctaaagatccgccgcttctctgccctctgctcgtcgattcggcgcctcctctccttcacgcgcccacgctgccgtcgcctcctcctcactgtcgtccatgccgctgtagccgcctacggccatggccgctagagccagcgactatttgacggtggagtaccactccagagagctcccctctttcccctccgacgacgagggaggcaccgccggcagtggcgtcctcgtatgcagaacagcagaagacgctcgctcgctctgcgcgcatcgaaccaaaaaccacacctcggcggcagctatataaaagccttcacctgacccgggcgctagggtttattcgctcctcccacccgccgccgtcgccgcctcctctccccagcacccggagctcgctcgaccgccgctcaccatgatcatccccaagaagaaccgcaatgagatctgcaaagggcgtgttgtatgccaagaaggactacaacctggcgaagcatccgcagatcgatgtgcccaacctccaggactccaggtgatcaagctcatgcagagctttaagtccaaggagtatgttagggagaccttctcctggcagtactactactggtacctcaccaacgatggcattgagcacctacgcaactacctgaacctccggtctgagatcgtgcctgccacgctcaagaagtctgccaagccaccgggccgcccatttggctctggccctcctggtgaccgcccaaggtaccattggttgttcttcaggcacaacatgtatcagctgcgtcaggagagggacatgaagcatgagacttttgccatcttgtctctgggaagaggttataatcactcctgagcacaacgaagaagggatttacacgatcagattctacattcagattacaacgtcaataacaggcccagtgaatgctgaaagatgcgctttcatagaagaaactaagctctcaagatggtggcagaattaactcctttcctgttatgtttaggtttcaaggacagcctctgtataagctcagaccaagcaaattccgtgcagcaattgaggaggctttccttgctgaacgtggttttttttatctccaaacggatgaggtatgctcaccgcgaaagtctgtaaataagcagtctgatcctattggttttcaggaagaggctgcttcaaataacgagcaagaatgccaatctgagtctcaggttgttggcaaagggaaagatcattccttacttaacccatccatagtccctgccatgcccgttagcaggattttgattgtggttgcaggactgtggatcctttctgtccatgggagctgctgcaattttctcaccttgtcttacatagtttttgtggtattgtacacagtgctggtcttgtacgaggtcaccctcagatgaactttagtgattgctcccaggcgcggcatgcatgctttgctttattcacatgatcgagttcccctcacgtccacgctctatccgatgccacgagagttttccagaagcaagtccacggattgtgtgttcagcaaataagtaaaccacattgccgccgggtccacgagggagaaaggaaacacgagcattgtttcctccgtcgacgacagagctccaaattgccgaccaccgccgcaccttgaagaccgccgtgctgttcgtcgtggtggcccgtctcaggcaacgacgactacgtcggtcgtggcctcaaagacctcccgccaccgctgtgacttgaagccctcctccatgccaatcaaggaatatcggccaccgctgtgccttgaagaggtacccccggttaccacatgtcgaagacctctcggagcactttgcctacttgcttaacatcttcctggcatattgaaagtgatgcagcgagacgggtttgtcctcggaacctcaagaggagggcatgacactgcgaaaatcattgattgtcttcaggaccgtgatactaaccagatttatattatcgaaggcgatggcattcagaaa

SEQ ID NO: 43105 - DNA, 2160 bp, Zea Mays
ctaccatgcatagttcttccacattagtttcttgtgcttgtctaatccaatttcttttcgtgacatttctcagtacagttttcagtatttctttcaactcatcatactaatagggagagtgagtgcctcagccccaaggctatattctatgccgatatgaacttaattcaaaaataaaaaaggaaacgttacaggctcaaacctcaatcgacaaacagcaactaggattcctacaaagctgtatctaagttattaaaacttccccttttgaagccccgtccgcacttcacgggatcgtttcgtatcaggctttgacacctgttagagcgcggacccgaaatcggattctaattgagctctgagcagcggtgtcctgagtccgtcaccgtgttctctcccccgcgcttcccttcaacgccgcctccctaaagatccgccgcttctctgccctctgctcgtcgattcggcgcctcctctccttcacgcgcccacgctgccgtcgcctcctcctcactgtcgtccatgccgctgtagccgcctacggccatggccgctagagccagcgactatttgacggtggagtaccactccagagagctcccctctttcccctccgacgacgagggaggcaccgccggcagtggcgtcctcgtatgcagaacagcagaagacgctcgctcgctctgcgcgcatcgaaccaaaaaccacacctcggcggcagctatataaaagccttcacctgacccgggcgctagggtttattcgctcctcccacccgccgccgtcgccgcctcctctccccagcacccggagctcgctcgaccgccgctcaccatgatcatccccaagaagaaccgcaatgagatctgcaagtacctcttcaaggagggcgtgttgtatgccaagaaggactacaacctggcgaagcatccgcagatcgatgtgcccaacctccaggactccaggtgatcaagctcatgcagagctttaagtccaaggagtatgttagggagaccttctcctggcagtactactactggtacctcaccaacgatggcattgagcacctacgcaactacctgaacctccggtctgagatcgtgcctgccacgctcaagaagtctgccaagccaccgggccgcccatttggctctggccctcctggtgaccgcccaaggtaccattggttgttcttcaggcacaacatgtatcagctgcgtcaggagagggacatgaagcatgagacttttgccatcttgtctctgggaaggtttcaaggacagcctctgtataagctcagaccaagcaaattccgtgcagcaattgaggaggctttccttgctgaacgtggttttttttatctccaaacggatgaggtggttgcaggactgtggatcctttctgtccatgggagctgctgcaattttctcaccttgtcttacatagtgctggtcttgtacgaggtcaccctcagatgaactttagtgattgctcccaggcgcggcatgcatgctttgctttattcacatgatcgagttcccctcacgtccacgctctatccgatgccacgagagttttccagaagcaagtccacggattgtgtgttcagcaaataagtaaaccacattgccgccgggtccacgagggagaaaggaaacacgagcattgtttcctccgtcgacgacagagctccgttcgtctccccctcagtttgacagcctcgctctgtcttctctcctcaatcgcgtgcttactcttcagcatttactccttagtagaaattgccgaccaccgccgcaccttgaagaccgccgtgctgttcgtcgtggtggcccgtctcaggcaacgacgactacgtcggtcgtggcctcaaagacctcccgccaccgctgtgacttgaagccctcctccatgccaatcaaggaatatcggccaccgctgtgccttgaagaggtacccccggttaccacatgtcgaagacctctcggagcactttgcctacttgcttaacatcttcctggcatattgaaagtgatgcagcgagacgggtttgtcctcggaacctcaagaggagggcatgacactgcgaaaatcattgattgtcttcaggaccgtgatactaaccagatttatattatcgaaggcgatggcattcagaaa

SEQ ID NO: 43106 - DNA, 2144 bp, Zea Mays
gttttcagtatttctttcaactcatcatactaatagggagagtgagtgcctcagccccaaggctatattctatgccgatatgaacttaattcaaaaataaaaaaggaaacgttacaggctcaaacctcaatcgacaaacagcaactaggattcctacaaagctgtatctaagttattaaaacttccccttttgaagccccgtccgcacttcacgggatcgtttcgtatcaggctttgacacctgttagagcgcggacccgaaatcggattctaattgagctctgagcagcggtgtcctgagtccgtcaccgtgttctctcccccgcgcttcccttcaacgccgcctccctaaagatccgccgcttctctgccctctgctcgtcgattcggcgcctcctctccttcacgcgcccacgctgccgtcgcctcctcctcactgtcgtccatgccgctgtagccgcctacggccatggccgctagagccagcgactatttgacggtggagtaccactccagagagctcccctctttcccctccgacgacgagggaggcaccgccggcagtggcgtcctcgtatgcagaacagcagaagacgctcgctcgctctgcgcgcatcgaaccaaaaaccacacctcggcggcagctatataaaagccttcacctgacccgggcgctagggtttattcgctcctcccacccgccgccgtcgccgcctcctctccccagcacccggagctcgctcgaccgccgctcaccatgatcatccccaagaagaaccgcaatgagatctgcaaagggcgtgttgtatgccaagaaggactacaacctggcgaagcatccgcagatcgatgtgcccaacctccaggactccaggtgatcaagctcatgcagagctttaagtccaaggagtatgttagggagaccttctcctggcagtactactactggtacctcaccaacgatggcattgagcacctacgcaactacctgaacctccggtctgagatcgtgcctgccacgctcaagaagtctgccaagccaccgggccgcccatttggctctggccctcctggtgaccgcccaaggtaccattggttgttcttcaggcacaacatgtatcagctgcgtcaggagagggacatgaagcatgagacttttgccatcttgtctctgggaagaggttataatcactcctgagcacaacgaagaagggatttacacgatcagattctacattcagattacaacgtcaataacaggcccagtgaatgctgaaagatgcgctttcatagaagaaactaagctctcaagatggtggcagaattaactcctttcctgttatgtttaggtttcaaggacagcctctgtataagctcagaccaagcaaattccgtgcagcaattgaggaggctttccttgctgaacgtggttttttttatctccaaacggatgaggtggttgcaggactgtggatcctttctgtccatgggagctgctgcaattttctcaccttgtcttacatagtgctggtcttgtacgaggtcaccctcagatgaactttagtgattgctcccaggcgcggcatgcatgctttgctttattcacatgatcgagttcccctcacgtccacgctctatccgatgccacgagagttttccagaagcaagtccacggattgtgtgttcagcaaataagtaaaccacattgccgccgggtccacgagggagaaaggaaacacgagcattgtttcctccgtcgacgacagagctccgttcgtctccccctcagtttgacagcctcgctctgtcttctctcctcaatcgcgtgcttactcttcagcatttactccttagtagaaattgccgaccaccgccgcaccttgaagaccgccgtgctgttcgtcgtggtggcccgtctcaggcaacgacgactacgtcggtcgtggcctcaaagacctcccgccaccgctgtgacttgaagccctcctccatgccaatcaaggaatatcggccaccgctgtgccttgaagaggtacccccggttaccacatgtcgaagacctctcggagcactttgcctacttgcttaacatcttcctggcatattgaaagtgatgcagcgattcatggtgaacgacatccata

SEQ ID NO: 43107 - DNA, 1428 bp, Zea Mays
ctaaagttcgccacctggttttgtgcttcttcaggtgttcaggatccatgataggttgtacatcgttttctcaaggctcaccactgacgctcggatgctatgagttgtagttgctgaattttccctgcccaccaccacctattatcttctgttcggctgcttttcgatccctctgcaggtaccattggttgttcttcaggcacaacatgtatcagctgcgtcaggagagggacatgaagcatgagacttttgccatcttgtctctgggaagaggttataatcactcctgagcacaacgaagaagggatttacacgatcagattctacattcagattacaacgtcaataacaggcccagtgaatgctgaaagatgcgctttcatagaagaaactaagctctcaagatggtggcagaattaactcctttcctgttatgtttagacaggtttcaaggacagcctctgtataagctcagaccaagcaaattccgtgcagcaattgaggaggctttccttgctgaacgtggttttttttatctccaaacggatgaggtggttgcaggactgtggatcctttctgtccatgggagctgctgcaattttctcaccttgtcttacatagtgctggtcttgtacgaggtcaccctcagatgaactttagtgattgctcccaggcgcggcatgcatgctttgctttattcacatgatcgagttcccctcacgtccacgctctatccgatgccacgagagttttccagaagcaagtccacggattgtgtgttcagcaaataagtaaaccacattgccgccgggtccacgagggagaaaggaaacacgagcattgtttcctccgtcgacgacagagctccgttcgtctccccctcagtttgacagcctcgctctgtcttctctcctcaatcgcgtgcttactcttcagcatttactccttagtagaaattgccgaccaccgccgcaccttgaagaccgccgtgctgttcgtcgtggtggcccgtctcaggcaacgacgactacgtcggtcgtggcctcaaagacctcccgccaccgctgtgacttgaagccctcctccatgccaatcaaggaatatcggccaccgctgtgccttgaagaggtacccccggttaccacatgtcgaagacctctcggagcactttgcctacttgcttaacatcttcctggcatattgaaagtgatgcagcggtaatgataatatactttatttatgtccatgttgttcttgcttcctatacccaaacacctctgcacttttgcatctggagcaccttggttatttgcatattgccttcacagtatactgaaagttatatggtggtgctccaataaactttatttatgtccatgcttgcattgtgttcccatcgcttaatattggacgattacaaagattcat

SEQ ID NO: 43108 - DNA, 1604 bp, Zea Mays
ctaaagttcgccacctggttttgtgcttcttcaggtttattgcctccattcacttcacggcttaaactacccaattttttgcaatttagtcattttttcgaagaaaaaaaatcatgtttcggctgacttcgagcaggtgttcaggatccatgataggttgtacatcgttttctcaaggctcaccactgacgctcggatgctatgagttgtagttgctgaattttccctgcccaccaccacctattatcttctgttcggctgcttttcgatccctctgcaggtaccattggttgttcttcaggcacaacatgtatcagctgcgtcaggagagggacatgaagcatgagacttttgccatcttgtctctgggaagaggttataatcactcctgagcacaacgaagaagggatttacacgatcagattctacattcagattacaacgtcaataacaggcccagtgaatgctgaaagatgcgctttcatagaagaaactaagctctcaagatggtggcagaattaactcctttcctgttatgtttaggtttcaaggacagcctctgtataagctcagaccaagcaaattccgtgcagcaattgaggaggctttccttgctgaacgtggttttttttatctccaaacggatgaggttgttggcaaagggaaagatcattccttacttaacccatccatagtccctgccatgcccgttagcaggattttgattgtggttgcaggactgtggatcctttctgtccatgggagctgctgcaattttctcaccttgtcttacatagtgctggtcttgtacgaggtcaccctcagatgaactttagtgattgctcccaggcgcggcatgcatgctttgctttattcacatgatcgagttcccctcacgtccacgctctatccgatgccacgagagttttccagaagcaagtccacggattgtgtgttcagcaaataagtaaaccacattgccgccgggtccacgagggagaaaggaaacacgagcattgtttcctccgtcgacgacagagctccgttcgtctccccctcagtttgacagcctcgctctgtcttctctcctcaatcgcgtgcttactcttcagcatttactccttagtagaaattgccgaccaccgccgcaccttgaagaccgccgtgctgttcgtcgtggtggcccgtctcaggcaacgacgactacgtcggtcgtggcctcaaagacctcccgccaccgctgtgacttgaagccctcctccatgccaatcaaggaatatcggccaccgctgtgccttgaagaggtacccccggttaccacatgtcgaagacctctcggagcactttgcctacttgcttaacatcttcctggcatattgaaagtgatgcagcggtaatgataatatactttatttatgtccatgttgttcttgcttcctatacccaaacacctctgcacttttgcatctggagcaccttggttatttgcatattgccttcacagtatactgaaagttatatggtggtgctccaataaactttatttatgtccatgcttgcattgtgttcccatcgcttaatattggacgattacaaagattcat

SEQ ID NO: 43109 - DNA, 1441 bp, Zea Mays
ctaaagttcgccacctggttttgtgcttcttcaggtttattgcctccattcacttcacggcttaaactacccaattttttgcaatttagtcattttttcgaagaaaaaaaatcatgtttcggctgacttcgagcaggtgttcaggatccatgataggttgtacatcgttttctcaaggctcaccactgacgctcggatgctatgagttgtagttgctgaattttccctgcccaccaccacctattatcttctgttcggctgcttttcgatccctctgcaggtaccattggttgttcttcaggcacaacatgtatcagctgcgtcaggagagggacatgaagcatgagacttttgccatcttgtctctgggaagaggttataatcactcctgagcacaacgaagaagggatttacacgatcagattctacattcagattacaacgtcaataacaggcccagtgaatgctgaaagatgcgctttcatagaagaaactaagctctcaagatggtggcagaattaactcctttcctgttatgtttaggtttcaaggacagcctctgtataagctcagaccaagcaaattccgtgcagcaattgaggaggctttccttgctgaacgtggttttttttatctccaaacggatgaggtggttgcaggactgtggatcctttctgtccatgggagctgctgcaattttctcaccttgtcttacatagtgctggtcttgtacgaggtcaccctcagatgaactttagtgattgctcccaggcgcggcatgcatgctttgctttattcacatgatcgagttcccctcacgtccacgctctatccgatgccacgagagttttccagaagcaagtccacggattgtgtgttcagcaaataagtaaaccacattgccgccgggtccacgagggagaaaggaaacacgagcattgtttcctccgtcgacgacagagctccaaattgccgaccaccgccgcaccttgaagaccgccgtgctgttcgtcgtggtggcccgtctcaggcaacgacgactacgtcggtcgtggcctcaaagacctcccgccaccgctgtgacttgaagccctcctccatgccaatcaaggaatatcggccaccgctgtgccttgaagaggtacccccggttaccacatgtcgaagacctctcggagcactttgcctacttgcttaacatcttcctggcatattgaaagtgatgcagcggtaatgataatatactttatttatgtccatgttgttcttgcttcctatacccaaacacctctgcacttttgcatctggagcaccttggttatttgcatattgccttcacagtatactgaaagttatatggtggtgctccaataaactttatttatgtccatgcttgcattgtgttcccatcgcttaatattggacgattacaaagattcat

SEQ ID NO: 43110 - DNA, 2423 bp, Zea Mays
ctaccatgcatagttcttccacattagtttcttgtgcttgtctaatccaatttcttttcgtgacatttctcagtacagttttcagtatttctttcaactcatcatactaatagggagagtgagtgcctcagccccaaggctatattctatgccgatatgaacttaattcaaaaataaaaaaggaaacgttacaggctcaaacctcaatcgacaaacagcaactaggattcctacaaagctgtatctaagttattaaaacttccccttttgaagccccgtccgcacttcacgggatcgtttcgtatcaggctttgacacctgttagagcgcggacccgaaatcggattctaattgagctctgagcagcggtgtcctgagtccgtcaccgtgttctctcccccgcgcttcccttcaacgccgcctccctaaagatccgccgcttctctgccctctgctcgtcgattcggcgcctcctctccttcacgcgcccacgctgccgtcgcctcctcctcactgtcgtccatgccgctgtagccgcctacggccatggccgctagagccagcgactatttgacggtggagtaccactccagagagctcccctctttcccctccgacgacgagggaggcaccgccggcagtggcgtcctcgtatgcagaacagcagaagacgctcgctcgctctgcgcgcatcgaaccaaaaaccacacctcggcggcagctatataaaagccttcacctgacccgggcgctagggtttattcgctcctcccacccgccgccgtcgccgcctcctctccccagcacccggagctcgctcgaccgccgctcaccatgatcatccccaagaagaaccgcaatgagatctgcaagtacctcttcaaggagggcgtgttgtatgccaagaaggactacaacctggcgaagcatccgcagatcgatgtgcccaacctccaggactccaggtgatcaagctcatgcagagctttaagtccaaggagtatgttagggagaccttctcctggcagtactactactggtacctcaccaacgatggcattgagcacctacgcaactacctgaacctccggtctgagatcgtgcctgccacgctcaagaagtctgccaagccaccgggccgcccatttggctctggccctcctggtgaccgcccaaggtaccattggttgttcttcaggcacaacatgtatcagctgcgtcaggagagggacatgaagcatgagacttttgccatcttgtctctgggaagaggttataatcactcctgagcacaacgaagaagggatttacacgatcagattctacattcagattacaacgtcaataacaggcccagtgaatgctgaaagatgcgctttcatagaagaaactaagctctcaagatggtggcagaattaactcctttcctgttatgtttaggtttcaaggacagcctctgtataagctcagaccaagcaaattccgtgcagcaattgaggaggctttccttgctgaacgtggttttttttatctccaaacggatgaggtggttgcaggactgtggatcctttctgtccatgggagctgctgcaattttctcaccttgtcttacatagtgctggtcttgtacgaggtcaccctcagatgaactttagtgattgctcccaggcgcggcatgcatgctttgctttattcacatgatcgagttcccctcacgtccacgctctatccgatgccacgagagttttccagaagcaagtccacggattgtgtgttcagcaaataagtaaaccacattgccgccgggtccacgagggagaaaggaaacacgagcattgtttcctccgtcgacgacagagctccgttcgtctccccctcagtttgacagcctcgctctgtcttctctcctcaatcgcgtgcttactcttcagcatttactccttagtagaaattgccgaccaccgccgcaccttgaagaccgccgtgctgttcgtcgtggtggcccgtctcaggcaacgacgactacgtcggtcgtggcctcaaagacctcccgccaccgctgtgacttgaagccctcctccatgccaatcaaggaatatcggccaccgctgtgccttgaagaggtacccccggttaccacatgtcgaagacctctcggagcactttgcctacttgcttaacatcttcctggcatattgaaagtgatgcagcggtaatgataatatactttatttatgtccatgttgttcttgcttcctatacccaaacacctctgcacttttgcatctggagcaccttggttatttgcatattgccttcacagtatactgaaagttatatggtggtgctccaataaactttatttatgtccatgcttgcattgtgttcccatcgcttaatattggacgattacaaagattcat

SEQ ID NO: 43111 - DNA, 2470 bp, Zea Mays
caaggttttggctctcggcgctagtttcccccgctcctccggtttggacaaccgcttgcagcggcttcgcttcgtcctcccaccctcccctcgtccctctccgctccggcgtgcttcggttgcccaccaagatctctaatttcccatcaaaccctagccctgtcgccgcctcctcactgccctgaccctctcctcctcacgcttcccgttccccatctcgccgccgtttctttggcctgggagacacgctctgctagctgtgtccgcgtatggcctccgacggtgcccccagaggccgccgtcccaagcgccccgcttcgggaggcctggtccaacccgacgtcctcacctacaagagacgacgccgcggcaccggcgccaacgccggccacagcgccgtcacgtcgggccccgaccccgatcccgtcaagatgagcgcggtggtgcacgccaccaattcccagcaaggtgggcgccaaacgctggacaggcactggagaagctggagggacacgctggagggcgtccttcgatccactgctgtgaaccagagcgccggagggattcagaactgcatccgagatgcgctcagatataatggttggcatcccacagaacatggaaacttagttgatgaccgaggaacagacgaagaggacgctactggagctctacattctgaagagagtagtggtgccttggttaagttagaagatggaacagttgcatctttggaagccaacaaggcgatgtgccacgacactctctttgacattctaatctccgagaagtttgccatgttgtgtgatctgctagctgcaacattccacggcagtaagccagacgacgttattggtttgcaaataattgatgccaagatgagaaatggggattatgcacagaaccctgcgctgtttgaccatgatattaagcagatatggaagaagtttgaacacgttggccaagaaatggctggtctggcaagcagtctcttactgatttcacaagcttctaatcaaaagcaggcttctgacatttcagaaattgatgtggctgaacacaagatagaggaaacaagtctggttggtgtcacccgcaaagccctaaggaagttcactcccccatgcgattctggctattctaccataccaagacgaactgggacatctggatcggatggaatttgcaaggattgtggtagaaaggcagacagcaaaggaagaattatctgtgacaggtgtgaagccgcgtaccatgtttcatgtctcaagcttgccattgatgaagaggccccagcaaaatggtactgtcccacctgcgtcgaaccagacgtacctttaaagagcaacaaccatggcagagcacatgaaggctgcgatgtatgcgagtggcttgaggtggagaagccagaagaacctgccgaagaacctgaattggccgtcaaaacacaggagagctcagtgtcaagcattgtcgaagacagtgaaccagacctctcgataaccgctctagcaaacttgtgcaagctttgtggcacgtgtgaagatgagaacaagaagttcgtggtatgcgggcatggctactgttctttcaagttctatcatgccctgtgcctgaaagaaagccagattgcaagcgagaagcagaggaatctaaaatgctggtactgcccgtcttgcctgtgcagacgctgcttcaagaacaaggacgacgagaaaatagtgttgtgtgatggctgtgacgaagcttaccacacttactgcatggatccgccgcgcagttctgtcccgagaggtaaatggttctgcacgccgtgtagtgcatggaggtcggcgaacgggatgcagaggtatgagaagtcgatcctgcagagcgtcaagcgtgttcctgatgccaaagggcccaaggtgcaggcagcagctgctgctccaggaaaataagcagcggcgctgtggatgcgagggtacaaaaagaaatgaaaggattcttgttcctctgaaggtgtatgcattactctgacagactgaatcgagtaatcggaggatgggctgtgtatacgtggggagaagacctgttggcttgtgaagacggagatggtggcatccgagtggacacgcacttttgtctctgtggatggagctgctgatgttggttccctgtcctgttatttccttcctggaattcttctgactaccccaagcgagtaggttgttgttgttgttgttgttctgttatgttgtgtctgccctttacctgatgctaagtggtaacactgacacccgcccatgttgacattgatatgtacatgcccgttacctgttttctttttgttggacaatccttatatactttctgcatggcatgtggtcgatgtctgtataagttcattacatatctgattgaacccataaggcagaaagcttgggtgatatctaaacaatgatgcatctccatgttttttctttctttc

SEQ ID NO: 43112 - DNA, 2269 bp, Zea Mays
ctcggatctggtccgacaaggccactaacaggatcaagtaccacgtactcactcgaaggtgagacacagagcaaatacaataaagcataaaaccatacattaaaggagtacataaaattattgcaacatcatcaaagttttgcaaaagtagtgatcattgtttgaaatgcagcggaatatgactaacggtaaacaaacggagggatggggaagcctggcccatcactcctcatgctcctccccagccgaggtagggtcccactcaactgtccaacccggtggcaagttgaacgaccaagtcactccagcaaccatatcctccagagaacctgtaaaaaattatgccacaagcaaggatgagtctactaatacttagctagacttacctggtgtgaggagtctactccactacctctagacatgcagctgtttggttgaggggtttggtttgccaaaagcactagctgagtctaaaatcatgttttagattttcaaattttagtatgatcctttttaaactagttgtgtacctagctaatcatacatggtatcgaacattttttatcaaacaacgtcttttgcaaatcaacacctttccacttgttactcaatgtagcagcatggatcaagcagtctcattagctgcgagaagcagacgattcgaatcgagtttttatccttgctaggtaaacctaaacacacgacgtggcgaggcactccgtccccatcgattccccgtcaacagatcagggcttaccgccttagcgtacaatgcctcactgaccccgactgccatcgtgcagtgaccgcacttgtacccaccataaccggaatgggagaccacgtctcaggtcgtgtgaggggtaaagtctgcgggcaggttcactcaggtactaggcttaccgatttaccatatttctcggcatgtgtttagtacgttcaaatgcttgacacacggtaccacaccttaatccttattccaatttccgtctcgtagacaacgcatcctcatggatcgttgtccacagaccattatcattacgatataaaaatgggtacaaccaattcctgacctcgcgtgagtgctagaaaaatcactcgacttctaccgagatccctaattagcaaagtagctactcgacctagacctagcatactagtatccatctcaaaggaatcctgaattcatgcaactagggtttcagtcaactcctacacttaagtgcacagtacaagcctacaaacattaagtgcagtaaaatagcatatatatataacggttatgtataaaaccggggcttgccttccaaagctggggcaggcagatcctcgatggcaggctctggtgatggcttctgggctacctcttgagcaactctgtaacacccctggtgttactgtaactaaaacttgagcatagcatcataagcattggcattgcatatgtttgatacaactagagtgcattcactaggtaaaaatttcaaacaagttgtattgttttaatgttttgcaaatagaaccctggatagggaacttaaccctaaatagggattaaaggggtaagacctaacccaaattgagaaaacctaaaggctttagggaaagagtcataaaatgtccccaaaaacaaagttgaatcacatttatacccctgggataccaaaaatctcaattagaaccctggaaaaccctaaaaccaaaccctagggacctatgtgcaaaattagtccacttttggactaaagtgcaaaaaccaagtcaaataagtatcttaaatcatttggttcacaaatatgtggacttgtaagccaaatgttggattttggacttaaatgcaaaatggacctcacctaagttctattctaagtctgaaattcagtgttgaggactcaactttgaagccctgtatctttccaaatatagggtttttgccctggagtaccacatcaaacttgtagacctattaatggataacaagtttgcttaagaatgcaagccatgttcttgtgagaaattggaagataatcttgctcaaagtcaggctgtcaggctggtttggtctgaattttcagactaacagtgaactaccaccaacttctagcccaatttcagacatgatccaatgattttcagtggcaacaccatatggcaacattgtagatggtacattactctacaattttgctatagagcttgacatggattatcattaggaattgagaggaaatttggttccaaacttgactgtcaggctgtctgaaacgag

SEQ ID NO: 43113 - DNA, 1311 bp, Zea Mays
gcatgcaacagataatcagcgctagctatcccctcatcgtcttctcttatcctcactcgcgtagtcgcctccctcctcttctcttccgcggcctggtgcaagaccaaggtgagtgattactgtcggtaatactttgtctacccttagcgcacgtagcgtgatgcatctcgctcccaattctctgcggctagggtgtcgttcattggcactctaattcgcgcgcgtgtcctgttcgatggaatctcagaaagagttccggtctttcgacagagggaggaggaggccacgatggccggcagcgtcagcaacggcagcgggaagagcctggcgcgctggctgcgggagaacgggttcgacgacgacgccgtggcgcgcatgtccaggcggtgcaggaacctgcacagcctcgacgccggcgaggccccgggcgtgtgggactacctcctgaccggcgtcaagatggagcggcggaagctgcggcacgtggtggccaagtgccccaagctgctcaccctgtccgtggacggcaagctcgcgcccacggtgcagtgcctcgccacgctgcaggccaggcccggggaggtggcgcaggccatcgccaagttcccccagatactgttccacagcgtcgaggagaagctctgcccgctcctcgccttcttccagacgctcggcgtctccgagaggcagctcgccaagctgctcatggtcaacccgcgcctcatcagctacagcatcgaggccaagttctcgcagaccgtcggcttcctcgccggcctcggcgtcgacagggaaggcatgatcggcaagatcctcaccaaggagccgtatatcatggggtacagcgtcgacaagcggttgcgccccactgccgagttcctcaagtcggaagtcgggttacaggggccagatctccagagggtggtcatgaccttccccgatatactgtcgcgagacgtggataagatcctgcggcccaatctggcgttcctacagagccgcggattcagcagggatcaggtcacggcactggtagctggttaccctcctgttctcatcaagagcatcaaacattgcctggagccaaggatcaagttcctggtcgaagagatggggcgggacatgggcgaggtggtaggttacccccagttctttcgccatggcctcaagaggagcctggagtaccgccacaaggtgcttaagcagatgaactcgagctgcagcctcagcgagatgctagactgtaaccacaagaagtttgccatgaaattcggtttggtcgcagcagtttagaggtgacgggtggttgtg

SEQ ID NO: 43114 - DNA, 175 bp, Zea Mays
cagagaaactcatttcctgattccagcgtgattgttatttgactgcttgctaaaaagtatatgaagggatgttagaagtctgaacattcttcaagtcgtcaggtgttaacagcactgaacttacatgcataaccaaggcattgtggatgttgacccagaaacagagctgctcttc

SEQ ID NO: 43115 - DNA, 4180 bp, Zea Mays
tcatcactccatgatctaatcgaacaacgcacgcacgcagcgccggcgtcgcccacggcacatccattgctcagtccactccgccgtccaccttgaagtcgtctttactcttcccgatccgtcagccaccgattggtcgtcaggaggcggcgatggcgtcccaggacgacgggtggggaggcggcgaggacggcagctcgctcttcgagggcatggtcctcttcgcgccagaacccgccgccgccgaggactcggtccctacccccgcccctgtccctgagctgacatccgccgctcgccccgacgccgacgcggcttcgtccgcgccgccgccgctcgacgaggacctcttttccgacctcaccctcctcgctccgcaggagccgctctcgctcgagcagccgcccccacccccgcaaggcgaggatcggagccacgcggcgcttgctcccgcgccgccagcagccgctgcggagctctcccggcagccgtcctcctcatcgctacgcaagaagaagcgggccgtgcgcatcgggtacggccgcttgccgcagcccgcgccgccttcccctcctgcctccgcagctgctgccgcgatctccgctagcagtatttccttcctggacgcttcgccgcatgcggccgtcactcgcatcctcgaccagctccctgatcggcaagtcgatgtctatgccaacggctacgaggcacacgcggaggcggtggccgtggataccagttcaccgcgtgtagaggcggtggcaactgaggacgatggtggtgggaaagaggatgaagacgctgcagttgtagccttgggggtcgaggagaggctggctctcctcagatcccaaatctccagcaagctcgactccatccagcagacggctgctgccgtggctgccaagaggaggcctgcgaggccgaggactttgagagggcagagaggatcagcgactccctcgccacgctcgagaaggagaaggatcggctgtcgacggcgctgcgtggtgctgagcttgactatgattcagtggattcggagttgcaggaggtgcttgagtctcgcattgctgcagaggaggaagctgctgccctcatggagcaatttgcgaaggatgccactgaacacgctaattcagcgagcgagcacgcacaagaattatcctcgaaagaaatagaagagtggcaaacttcattggagttactagaaacaaagaagttagaaatggaagttgaaacacggttggttttagaagcacgttctgggttggaagggtcaatagagcatttggttgaagaagacaaactggagaaggatatgcttagtaaaaaaggagaaatcctcactaaggagttagctgagcttctagagttggtgaggttgaaagaagcagagatagctgaaaacaatgcccggatccatgaagttcaagaaagaatcagtgcagtggtctccagattccatggttctcagtcagatattgacttgaagctcagttccttgaaggaagaccaaagtaaagtggatctagagactgaagcacttttgttgaagaagaatgaaattgataagttcattactttaacagatcaaaaggattcagagttgagggacataattggtgcttgttcctctgaagcaaaagcttgtcgacaatcagttgaaataagaagaaagcttgcatcatcgatcttgaagtcaagagaggatagaattgggttgctaaaaatggaggaggaaattttgcaagtcattcaaatgcaaaggcaaaaaattaccgatgcaagaagtactcttcaggaggtatcttcaaggcgaacaagcatacagcaagaaacggaagcactgaagcagaagttgagtttcattgacaaaagaggccctgaactagaggctgaaaagaaagttgctgccgcctcaagaaactttaaggaagcaggaaggatagctgcagaggcaaaagctcttaactccgaaaaggacgagctgtatggtaagttggagaaagccgctactgatctagagacaatagaaaaggatattgtagcaaccacgaacaagatacaggaatgcgaagggcttattgaactcaaaggaagagagtcagcgttgacaagttacagaagactacggttagactgtgctgctgctagagcagaactgactgctgcagctgaaacagatgataacgaagaagctgagatactacgtaaggaggctgaagctgcagagtctaaagcaatggaactcaaaacatgctatgacctccaggtggtggatgatgagttcgtgtttcagcctgtagtccctatagcattcataacgaattcaacagggcagcacttggcagaaattgcgtcttcacttggcctatctcctcagaaatgaaatctggcagtggatttgtacagtgccaaggtctgtcggttgcactgcgattcaagtcctgccagtgccgtgcctgcgcgtattgaggggaagatctccttccaggatgtcctcctcaaggacccccctttatctcgcagcatttggaaattggaatctactcctaaacagagtaaagatcctagtgaggatttaagtgtaaagaatgtaattcttttgttgtgccagttttgattgaattgcagtgacatgccatcatcatcaaccagtacgtaatcatatttttgttttgagaaaaaaaaggatgtaatcagaagaaaatgtccaggaatgaagcttttcatgcatttgcctcactctgttggtgacagctgccattggaataaactgaccagtaacagtaacagagtaacttgaactgtgccattagaaaactgaacgtctctcatgtttgcagcttcagagaagtcttgaacattaggtactttagcaggaggaaatgcaccgagcacagaggtagccatgggccggcccatgggccatacgggcctattttgcctcctcgttgtgggagtaagaacggatgcatgcaacagataatcagcgctagctatcccctcatcgtcttctcttatcctcactcgcgtagtcgcctccctcctcttctcttccgcggcctggtgcaagaccaagagggaggaggaggccacgatggccggcagcgtcagcaacggcagcgggaagagcctggcgcgctggctgcgggagaacgggttcgacgacgacgccgtggcgcgcatgtccaggcggtgcaggaacctgcacagcctcgacgccggcgaggccccgggcgtgtgggactacctcctgaccggcgtcaagatggagcggcggaagctgcggcacgtggtggccaagtgccccaagctgctcaccctgtccgtggacggcaagctcgcgcccacggtgcagtgcctcgccacgctgcaggccaggcccggggaggtggcgcaggccatcgccaagttcccccagatactgttccacagcgtcgaggagaagctctgcccgctcctcgccttcttccagacgctcggcgtctccgagaggcagctcgccaagctgctcatggtcaacccgcgcctcatcagctacagcatcgaggccaagttctcgcagaccgtcggcttcctcgccggcctcggcgtcgacagggaaggcatgatcggcaagatcctcaccaaggagccgtatatcatggggtacagcgtcgacaagcggttgcgccccactgccgagttcctcaagtcggaagtcgggttacaggggccagatctccagagggtggtcatgaccttccccgatatactgtcgcgagacgtggataagatcctgcggcccaatctggcgttcctacagagccgcggattcagcagggatcaggtcacggcactggtagctggttaccctcctgttctcatcaagagcatcaaacattgcctggagccaaggatcaagttcctggtcgaagagatggggcgggacatgggcgaggtggtaggttacccccagttctttcgccatggcctcaagaggagcctggagtaccgccacaaggtgcttaagcagatgaactcgagctgcagcctcagcgagatgctagactgtaaccacaagaagtttgccatgaaattcggtttggtcgcagcagtttagctcaggcatgctctcgcacactatgtcaacaaggtcaggtagctccagggaagcatccttcgcatagaagtg

SEQ ID NO: 43116 - DNA, 1243 bp, Zea Mays
gcatgcaacagataatcagcgctagctatcccctcatcgtcttctcttatcctcactcgcgtagtcgcctccctcctcttctcttccgcggcctggtgcaagaccaagagggaggaggaggccacgatggccggcagcgtcagcaacggcagcgggaagagcctggcgcgctggctgcgggagaacgggttcgacgacgacgccgtggcgcgcatgtccaggcggtgcaggaacctgcacagcctcgacgccggcgaggccccgggcgtgtgggactacctcctgaccggcgtcaagatggagcggcggaagctgcggcacgtggtggccaagtgccccaagctgctcaccctgtccgtggacggcaagctcgcgcccacggtgcagtgcctcgccacgctgcaggccaggcccggggaggtggcgcaggccatcgccaagttcccccagatactgttccacagcgtcgaggagaagctctgcccgctcctcgccttcttccagacgctcggcgtctccgagaggcagctcgccaagctgctcatggtcaacccgcgcctcatcagctacagcatcgaggccaagttctcgcagaccgtcggcttcctcgccggcctcggcgtcgacagggaaggcatgatcggcaagatcctcaccaaggagccgtatatcatggggtacagcgtcgacaagcggttgcgccccactgccgagttcctcaagtcggaagtcgggttacaggggccagatctccagagggtggtcatgaccttccccgatatactgtcgcgagacgtggataagatcctgcggcccaatctggcgttcctacagagccgcggattcagcagggatcaggtcacggcactggtagctggttaccctcctgttctcatcaagagcatcaaacattgcctggagccaaggatcaagttcctggtcgaagagatggggcgggacatgggcgaggtggtaggttacccccagttctttcgccatggcctcaagaggagcctggagtaccgccacaaggtgcttaagcagatgaactcgagctgcagcctcagcgagatgctagactgtaaccacaagaagtttgccatgaaattcggtttggtcgcagcagtttaggttgtgttgttcttttgaacatttgggcaatgataactaataattcaaggtcctttacaagtatcaactggtatctttgacaccctaagtacataaaatctctatgttctgt

SEQ ID NO: 43117 - DNA, 804 bp, Zea Mays
atgggcagcttgagtaatgctatcctgtggaggttcttcccgatgatggggttcatcgcatacaaggctacaactttggttcaagtctatagaggtaacgaggatctctgcttgatgcttgctgaggaaaaggatgttgacaatgaaagcatttgatgtatacaaattagatatgtctggcgctgtatgccatcatctaataacatggctgaggaggaaacaaagggacactgccctaccgtagcacatgctatgacaaggataggattgtcaggtgttgctcaatctgtacagacacacgctcaaaaaactcagccacatacattaggtaaggtgtctcagataaccagtcagtcaccatagttctactctcatctgcagcatcaatagcaacatcaaactatgtcagcaggttcagtcccaggcatgcaacatctagcagggtctagcacagatggtccagctacaaatatcctctccacatgctcatagtacaccatgggtcaaatgtcgttgcaacgcacgggcatcgtactagtcaattgttcagagacggaacatttgtacatacttgcaagatgcatgtgactgtaagtgtctaccttttgtgttgatccagcatttggtatttttgttgtgagtagaggtcgtaatggataacgatccaaatatttcttcacaataaattaggacacttaatttaatttaaatttaaaataaatagaaatagagtttggtactaatttcgattctattcttaaattttatagtgtaaaatcgagagcttattatcaccctaaggtg

SEQ ID NO: 43118 - DNA, 3483 bp, Zea Mays
gcttttggcagatagatggtggataaggtgaaggtggttggtgcccctggaaaaaggaagaatgccttttgcggggatagcttcggaaggatgactgcaggtggtggcgctggtgcttggttgcctagggtttcaggccagccggctgacttggaggcggcaagtgtaatggctactgagagtgctgtcagattaattggtggaacgggagctagggactggagtaagggatttggtgcattcgactcttcagtgggtgccctttcaggggaagacttgggatttgtagataatgatgctggggtttatgggggctggagcaaatctgttccaaatcgcagtggaagcgcgccacctagcatggaaggatctcttgctgctcttggccatctcattggccagcagagtgggagctttgaagctagtttggcaaccttggataacataactgacagttccaagtctgaggagcaagtacttgctgatccagcatattttgagtattatggctccaaggtgaatctgaatccaaggctccctcccccacttatttcaagggagagccgccgattaatgaaccgtgttggcaaggccaaagagtggagggtggtctctcaagataacagcaacaaagactctatatacattcctcgatccacattgtcaactcacaaagaagaacctgaggatgataaatctccaagattggatttaagttcagtggaggatgcccagattatctccagtgcatccaactttcagagccaggattttatgctggagagctttcgacagagtgctgcttctttgcctaacagttcatcttctaacccttcaaatatcaatactggtgattctatgcctgtatattctgacataaatttgtcagttgatgctgtcaagcaatcagacttgaactcctggacaccaaaaaggccactgaaaagtactgttagcaatgatgtttcatcgctgcccctttccagttcatcatcatattctggtagaaaacctggtatgcaaacttctcagcaagaaaaggcggctgtagacaccaaacatggaaatgttgtgcttggcagtggtgcagctgtttctgaacttgataatgtggactccagtatgaacaatttgatgataagtttggatggccatgcatcctcacctgtcaagcagaagtggcaggacaatgtcttgtggcagtatggctcctttctcccagcccaaggtgatcctactcaaggaatccatcttccccatgtaccttctattgataacctgtctcatgctcagctcaagttacctgctggtgacatgcaccagtttttaccgcagcctagtatgacaacacctttctatacaccaaattcgtttggaaacccttattatccgaatttgcaccctggtaatgcttttccaacctcaattggaactggagggtacgctgtaagtggttccattttgccaccttttgtggctggctttgctccccaaggtcctcttgctacacctctcgacagtcctatgactccaagctttagtggtaggccatctggattttctccagcagggaatcttacagggggaacagagtttatgcagtcatataaagtatacggacaacctggggctggtatgcagccatccattcccgattcgaactttattcatttctttcagcatccctctttatttcagtatactggtggaaatcaatacaatacaatgggtccaagatttactgttgtgaatccaactgaaagctttgatccacaaaagatgatacatcaagctgcatatccatctgatcagaggcttccacttccaagaactggctttcctaattctcctacatccagaagaggagggactgttccaaattatcaaggcatatcatcctatgttggagggccgatgacttatcctacaagtccagtgtttcagggacaaaccttgcctggagtattgcctcctgataggagaaatgaccctgttggatttcagtccccctcaagaaacatcaccgatagtcctgggattcaaaggcagcgagacagacagaagtttgatgaatcaaaaacttgctctttcttagaagagttgaagtccaacagagcccgcagggttgaactatctgacatcacaggtcgtataattgaatacagtgctgaccaacatggtagccgattcattcaacagaagttggaaaattgcactgccgaagagaaggcatatgtgtttgcagaggttcttcctcatgcttcatcactaatgactgacgttttcgggaattatgtgatccagaaggctcttgaagttatggaacttgaccagaaaatagatctagttcatgagcttgatggacatgttatgagatgtgttcgtgatcaaaatggaaatcacgttatacaaaagtgcattgagtgtgtccctacagaacatattggttttgtagtatctgcttttcagggacaagttgctagcctttcaatgcacccatatggctgccgtgtaattcagagagttttggagcactgcggtggtacctcacaaagccagtgcatagtagatgagatattgcagtcggcgtgcgtccttgcgcaagatcagtatggcaactatgttacacagcatgttctagaaagaggaaatgctcatgagaggagccaaattattattaaattggctgggcaggttgttaccatgagccaaaataaatttgcatcaaatgtgatagagaagtgttttcaacatggtgatatggcggagcgggatctcttgatcaggcagattgtggagcagacagagggcaatgacaatttgctggcaatgatgaaggaccagtatgcgaattacgtggtccagaagatactcgaaacatgcaatgagaaccagcgggaactcctggtcagccgtgtcaagggccacatgcaagcattgaggaagtacacatacggcaagcacattgtaagccgagttgagcagctctgcggcgacggaaccgccgagccggattcttgaaatgaacccgcctaattcttcccaggccaggggtgtgagggtgtcttgttcttttgctcagtccatcagtggagaaagcagaacagatcaagtccacctctggtgcttccaaacagactaacaaaactgtcatcgaagattgtataggtgtgactcgcttcaggatagtcttgaggttctagaacaggaacttagtggtgtgcatcagtgtatctatgttagggtgtgcctatttacagaataacagtggttggctagctgtgtgcagaagggagtttagcgttatggtttgtatgtgatacatattatgcctggtaatgtatttgctttcttgcatcgccagttgtggggtaaatgcaatgttcacgcattgtcctgatatctcgttcagttcaagttgcgttttctacatggcaatggaggccagctgcatcattttttttggtttggtgaaaaaagaaa

SEQ ID NO: 43119 - DNA, 3662 bp, Zea Mays
cgctctatcgtcatctccaccaagtcgaaaaaaaggaaaggggcaaatcagcggcggcggagcaaaggaaagcttttggcagatagatggtggataaggtgaaggtggttggtgcccctggaaaaaggaagaatgccttttgcggggatagcttcggaaggatgactgcaggtggtggcgctggtgcttggttgcctagggtttcaggccagccggctgacttggaggcggcaagtgtaatggctactgagagtgctgtcagattaattggtggaacgggagctagggactggagtaagggatttggtgcattcgactcttcagtgggtgccctttcaggggaagacttgggatttgtagataatgatgctggggtttatgggggctggagcaaatctgttccaaatcgcagtggaagcgcgccacctagcatggaaggatctcttgctgctcttggccatctcattggccagcagagtgggagctttgaagctagtttggcaaccttggataacataactgacagttccaagtctgaggagcaagtacttgctgatccagcatattttgagtattatggctccaaggtgaatctgaatccaaggctccctcccccacttatttcaagggagagccgccgattaatgaaccgtgttggcaaggccaaagagtggagggtggtctctcaagataacagcaacaaagactctatatacattcctcgatccacattgtcaactcacaaagaagaacctgaggatgataaatctccaagattggatttaagttcagtggaggatgcccagattatctccagtgcatccaactttcagagccaggattttatgctggagagctttcgacagagtgctgcttctttgcctaacagttcatcttctaacccttcaaatatcaatactggtgattctatgcctgtatattctgacataaatttgtcagttgatgctgtcaagcaatcagacttgaactcctggacaccaaaaaggccactgaaaagtactgttagcaatgatgtttcatcgctgcccctttccagttcatcatcatattctggtagaaaacctggtatgcaaacttctcagcaagaaaaggcggctgtagacaccaaacatggaaatgttgtgcttggcagtggtgcagctgtttctgaacttgataatgtggactccagtatgaacaatttgatgataagtttggatggccatgcatcctcacctgtcaagcagaagtggcaggacaatgtcttgtggcagtatggctcctttctcccagcccaaggtgatcctactcaaggaatccatcttccccatgtaccttctattgataacctgtctcatgctcagctcaagttacctgctggtgacatgcaccagtttttaccgcagcctagtatgacaacacctttctatacaccaaattcgtttggaaacccttattatccgaatttgcaccctggtaatgcttttccaacctcaattggaactggagggtacgctgtaagtggttccattttgccaccttttgtggctggctttgctccccaaggtcctcttgctacacctctcgacagtcctatgactccaagctttagtggtaggccatctggattttctccagcagggaatcttacagggggaacagagtttatgcagtcatataaagtatacggacaacctggggctggtatgcagccatccattcccgattcgaactttattcatttctttcagcatccctctttatttcagtatactggtggaaatcaatacaatacaatgggtccaagatttactgttgtgaatccaactgaaagctttgatccacaaaagatgatacatcaagctgcatatccatctgatcagaggcttccacttccaagaactggctttcctaattctcctacatccagaagaggagggactgttccaaattatcaaggcatatcatcctatgttggagggccgatgacttatcctacaagtccagtgtttcagggacaaaccttgcctggagtattgcctcctgataggagaaatgaccctgttggatttcagtccccctcaagaaacatcaccgatagtcctgggattcaaaggcagcgagacagacagaagtttgatgaatcaaaaacttgctctttcttagaagagttgaagtccaacagagcccgcagggttgaactatctgacatcacaggtcgtataattgaatacagtgctgaccaacatggtagccgattcattcaacagaagttggaaaattgcactgccgaagagaaggcatatgtgtttgcagaggttcttcctcatgcttcatcactaatgactgacgttttcgggaattatgtgatccagaagttttttgaacatggaactcgtgagcaaaggagggatcttgctaccaagctcgttggtcatgttttgcctctgagtcttcagatgtatggctgccgtgtaatccagaaggctcttgaagttatggaacttgaccagaaaatagatctagttcatgagcttgatggacatgttatgagatgtgttcgtgatcaaaatggaaatcacgttatacaaaagtgcattgagtgtgtccctacagaacatattggttttgtagtatctgcttttcagggacaagttgctagcctttcaatgcacccatatggctgccgtgtaattcagagagttttggagcactgcggtggtacctcacaaagccagtgcatagtagatgagatattgcagtcggcgtgcgtccttgcgcaagatcagtatggcaactatgttacacagcatgttctagaaagaggaaatgctcatgagaggagccaaattattattaaattggctgggcaggttgttaccatgagccaaaataaatttgcatcaaatgtgatagagaagtgttttcaacatggtgatatggcggagcgggatctcttgatcaggcagattgtggagcagacagagggcaatgacaatttgctggcaatgatgaaggaccagtatgcgaattacgtggtccagaagatactcgaaacatgcaatgagaaccagcgggaactcctggtcagccgtgtcaagggccacatgcaagcattgaggaagtacacatacggcaagcacattgtaagccgagttgagcagctctgcggcgacggaaccgccgagccggattcttgaaatgaacccgcctaattcttcccaggccaggggtgtgagggtgtcttgttcttttgctcagtccatcagtggagaaagcagaacagatcaagtccacctctggtgcttccaaacagactaacaaaactgtcatcgaagattgtataggtgtgactcgcttcaggatagtcttgaggttctagaacaggaacttagtggtgtgcatcagtgtatctatgttagggtgtgcctatttacagaataacagtggttggctagctgtgtgcagaagggagtttagcgttatggtttgtatgtgatacatattatgcctggtaatgtatttgctttcttgcatcgccagttgtggggtaaatgcaatgttcacgcattgtcctgatatctcgttcagttcaagttgcgttttctacatggcaatggaggccagctgcatcattttttttggtttggtgaaaaaagaaa

SEQ ID NO: 43120 - DNA, 3597 bp, Zea Mays
ccgtcgcccatcgtcttctccaccgagtcgccaaaagaaaaagggtaaaagcgtgcgtggcggagaggtggaggaggagcagcgaagcaaaagctcaccgagtgaagaagtgttgtccgaaggtgtggataaggccgacgcggttggaggctccggcgtcgcagaaagcgggacgcttgtcgccggcgtagctccaggcggcggaggaggactgctggtggacttgctcggctgcctagggtttcgggctgccagcctgccgtctcggaggccgcaagtgtaatggctactgagagtgctgtcagattaattggtggaacgggagctagggactggagtaagggatttggtgcattcgactcttcagtgggtgccctttcaggggaagacttgggatttgtagataatgatgctggggtttatgggggctggagcaaatctgttccaaatcgcagtggaagcgcgccacctagcatggaaggatctcttgctgctcttggccatctcattggccagcagagtgggagctttgaagctagtttggcaaccttggataacataactgacagttccaagtctgaggagcaagtacttgctgatccagcatattttgagtattatggctccaaggtgaatctgaatccaaggctccctcccccacttatttcaagggagagccgccgattaatgaaccgtgttggcaaggccaaagagtggagggtggtctctcaagataacagcaacaaagactctatatacattcctcgatccacattgtcaactcacaaagaagaacctgaggatgataaatctccaagattggatttaagttcagtggaggatgcccagattatctccagtgcatccaactttcagagccaggattttatgctggagagctttcgacagagtgctgcttctttgcctaacagttcatcttctaacccttcaaatatcaatactggtgattctatgcctgtatattctgacataaatttgtcagttgatgctgtcaagcaatcagacttgaactcctggacaccaaaaaggccactgaaaagtactgttagcaatgatgtttcatcgctgcccctttccagttcatcatcatattctggtagaaaacctggtatgcaaacttctcagcaagaaaaggcggctgtagacaccaaacatggaaatgttgtgcttggcagtggtgcagctgtttctgaacttgataatgtggactccagtatgaacaatttgatgataagtttggatggccatgcatcctcacctgtcaagcagaagtggcaggacaatgtcttgtggcagtatggctcctttctcccagcccaaggtgatcctactcaaggaatccatcttccccatgtaccttctattgataacctgtctcatgctcagctcaagttacctgctggtgacatgcaccagtttttaccgcagcctagtatgacaacacctttctatacaccaaattcgtttggaaacccttattatccgaatttgcaccctggtaatgcttttccaacctcaattggaactggagggtacgctgtaagtggttccattttgccaccttttgtggctggctttgctccccaaggtcctcttgctacacctctcgacagtcctatgactccaagctttagtggtaggccatctggattttctccagcagggaatcttacagggggaacagagtttatgcagtcatataaagtatacggacaacctggggctggtatgcagccatccattcccgattcgaactttattcatttctttcagcatccctctttatttcagtatactggtggaaatcaatacaatacaatgggtccaagatttactgttgtgaatccaactgaaagctttgatccacaaaagatgatacatcaagctgcatatccatctgatcagaggcttccacttccaagaactggctttcctaattctcctacatccagaagaggagggactgttccaaattatcaaggcatatcatcctatgttggagggccgatgacttatcctacaagtccagtgtttcagggacaaaccttgcctggagtattgcctcctgataggagaaatgaccctgttggatttcagtccccctcaagaaacatcaccgatagtcctgggattcaaaggcagcgagacagacagaagtttgatgaatcaaaaacttgctctttcttagaagagttgaagtccaacagagcccgcagggttgaactatctgacatcacaggtcgtataattgaatacagtgctgaccaacatggtagccgattcattcaacagaagttggaaaattgcactgccgaagagaaggcatatgtgtttgcagaggttcttcctcatgcttcatcactaatgactgacgttttcgggaattatgtgatccagaaggctcttgaagttatggaacttgaccagaaaatagatctagttcatgagcttgatggacatgttatgagatgtgttcgtgatcaaaatggaaatcacgttatacaaaagtgcattgagtgtgtccctacagaacatattggttttgtagtatctgcttttcagggacaagttgctagcctttcaatgcacccatatggctgccgtgtaattcagagagttttggagcactgcggtggtacctcacaaagccagtgcatagtagatgagatattgcagtcggcgtgcgtccttgcgcaagatcagtatggcaactatgttacacagcatgttctagaaagaggaaatgctcatgagaggagccaaattattattaaattggctgggcaggttgttaccatgagccaaaataaatttgcatcaaatgtgatagagaagtgttttcaacatggtgatatggcggagcgggatctcttgatcaggcagattgtggagcagacagagggcaatgacaatttgctggcaatgatgaaggaccagtatgcgaattacgtggtccagaagatactcgaaacatgcaatgagaaccagcgggaactcctggtcagccgtgtcaagggccacatgcaagcattgaggaagtacacatacggcaagcacattgtaagccgagttgagcagctctgcggcgacggaaccgccgagccggattcttgaaatgaacccgcctaattcttcccaggccaggggtgtgagggtgtcttgttcttttgctcagtccatcagtggagaaagcagaacagatcaagtccacctctggtgcttccaaacagactaacaaaactgtcatcgaagattgtataggtgtgactcgcttcaggatagtcttgaggttctagaacaggaacttagtggtgtgcatcagtgtatctatgttagggtgtgcctatttacagaataacagtggttggctagctgtgtgcagaagggagtttagcgttatggtttgtatgtgatacatattatgcctggtaatgtatttgctttcttgcatcgccagttgtggggtaaatgcaatgttcacgcattgtcctgatatctcgttcagttcaagttgcgttttctacatggcaatggaggccagctgcatcattttttttggtttggtgaaaaaagaaa

SEQ ID NO: 43121 - DNA, 4104 bp, Zea Mays
aaaaggataatgaatagttagttatagagtggttgtcaaatcaaccattagggagttagaattactcaacaatgttacaaaggccatgaatacacagactaacaattacacatcaatcttacaaagggcgtgaagccataaactaacgaaccatgtatcgatatcattgctatgttaaagtgttcatcagttgatacctactaggctgtctccaacaggtatcctatcccatcccctatttcaaactctactctacaaatattgttatgtacaatacaaatcccctgttttacatgatctgatgtgaacaaccttaccctcgttgagtgcgttgtgccagggtcactgggacgcgaacatcacccccactagatcagccttgcttgtgttgatgtacatgtgtagcccacgatcacccctatatgacaatgttttggcttcgtggtatcatgtatagctttaatttatatgtagtcggtcaaggcttgtgactccatcgagtgaagaagtgttgtccgaaggtgtggataaggccgacgcggttggaggctccggcgtcgcagaaagcgggacgcttgtcgccggcgtagctccaggcggcggaggaggactgctggtggacttgctcggctgcctagggtttcgggctgccagcctgccgtctcggaggccgcaagtgtaatggctactgagagtgctgtcagattaattggtggaacgggagctagggactggagtaagggatttggtgcattcgactcttcagtgggtgccctttcaggggaagacttgggatttgtagataatgatgctggggtttatgggggctggagcaaatctgttccaaatcgcagtggaagcgcgccacctagcatggaaggatctcttgctgctcttggccatctcattggccagcagagtgggagctttgaagctagtttggcaaccttggataacataactgacagttccaagtctgaggagcaagtacttgctgatccagcatattttgagtattatggctccaaggtgaatctgaatccaaggctccctcccccacttatttcaagggagagccgccgattaatgaaccgtgttggcaaggccaaagagtggagggtggtctctcaagataacagcaacaaagactctatatacattcctcgatccacattgtcaactcacaaagaagaacctgaggatgataaatctccaagattggatttaagttcagtggaggatgcccagattatctccagtgcatccaactttcagagccaggattttatgctggagagctttcgacagagtgctgcttctttgcctaacagttcatcttctaacccttcaaatatcaatactggtgattctatgcctgtatattctgacataaatttgtcagttgatgctgtcaagcaatcagacttgaactcctggacaccaaaaaggccactgaaaagtactgttagcaatgatgtttcatcgctgcccctttccagttcatcatcatattctggtagaaaacctggtatgcaaacttctcagcaagaaaaggcggctgtagacaccaaacatggaaatgttgtgcttggcagtggtgcagctgtttctgaacttgataatgtggactccagtatgaacaatttgatgataagtttggatggccatgcatcctcacctgtcaagcagaagtggcaggacaatgtcttgtggcagtatggctcctttctcccagcccaaggtgatcctactcaaggaatccatcttccccatgtaccttctattgataacctgtctcatgctcagctcaagttacctgctggtgacatgcaccagtttttaccgcagcctagtatgacaacacctttctatacaccaaattcgtttggaaacccttattatccgaatttgcaccctggtaatgcttttccaacctcaattggaactggagggtacgctgtaagtggttccattttgccaccttttgtggctggctttgctccccaaggtcctcttgctacacctctcgacagtcctatgactccaagctttagtggtaggccatctggattttctccagcagggaatcttacagggggaacagagtttatgcagtcatataaagtatacggacaacctggggctggtatgcagccatccattcccgattcgaactttattcatttctttcagcatccctctttatttcagtatactggtggaaatcaatacaatacaatgggtccaagatttactgttgtgaatccaactgaaagctttgatccacaaaagatgatacatcaagctgcatatccatctgatcagaggcttccacttccaagaactggctttcctaattctcctacatccagaagaggagggactgttccaaattatcaaggcatatcatcctatgttggagggccgatgacttatcctacaagtccagtgtttcagggacaaaccttgcctggagtattgcctcctgataggagaaatgaccctgttggatttcagtccccctcaagaaacatcaccgatagtcctgggattcaaaggcagcgagacagacagaagtttgatgaatcaaaaacttgctctttcttagaagagttgaagtccaacagagcccgcagggttgaactatctgacatcacaggtcgtataattgaatacagtgctgaccaacatggtagccgattcattcaacagaagttggaaaattgcactgccgaagagaaggcatatgtgtttgcagaggttcttcctcatgcttcatcactaatgactgacgttttcgggaattatgtgatccagaagttttttgaacatggaactcgtgagcaaaggagggatcttgctaccaagctcgttggtcatgttttgcctctgagtcttcagatgtatggctgccgtgtaatccagaaggctcttgaagttatggaacttgaccagaaaatagatctagttcatgagcttgatggacatgttatgagatgtgttcgtgatcaaaatggaaatcacgttatacaaaagtgcattgagtgtgtccctacagaacatattggttttgtagtatctgcttttcagggacaagttgctagcctttcaatgcacccatatggctgccgtgtaattcagagagttttggagcactgcggtggtacctcacaaagccagtgcatagtagatgagatattgcagtcggcgtgcgtccttgcgcaagatcagtatggcaactatgttacacagcatgttctagaaagaggaaatgctcatgagaggagccaaattattattaaattggctgggcaggttgttaccatgagccaaaataaatttgcatcaaatgtgatagagaagtgttttcaacatggtgatatggcggagcgggatctcttgatcaggcagattgtggagcagacagagggcaatgacaatttgctggcaatgatgaaggaccagtatgcgaattacgtggtccagaagatactcgaaacatgcaatgagaaccagcgggaactcctggtcagccgtgtcaagggccacatgcaagcattgaggaagtacacatacggcaagcacattgtaagccgagttgagcagctctgcggcgacggaaccgccgagccggattcttgaaatgaacccgcctaattcttcccaggccaggggtgtgagggtgtcttgttcttttgctcagtccatcagtggagaaagcagaacagatcaagtccacctctggtgcttccaaacagactaacaaaactgtcatcgaagattgtataggtgtgactcgcttcaggatagtcttgaggttctagaacaggaacttagtggtgtgcatcagtgtatctatgttagggtgtgcctatttacagaataacagtggttggctagctgtgtgcagaagggagtttagcgttatggtttgtatgtgatacatattatgcctggtaatgtatttgctttcttgcatcgccagttgtggggtaaatgcaatgttcacgcattgtcctgatatctcgttcagttcaagttgcgttttctacatggcaatggaggccagctgcatcattttttttggtttggtgaaaaaagaaa

SEQ ID NO: 43122 - DNA, 2931 bp, Zea Mays
ctttagttccctgtcgatacatgtagattgtggtccaggtcatctccccgttcgctggcttcagcagcagagctcttgctggcaaacaagtgatctttctacagttttaggctcggagattatgacacaagcatgactggtccttgaaaactatacacggctttggagagatgggatgtgctgcttccaggttagaagatgaggaagccatcaagatgtgccgggacagaagggacttcatcaagcaggcactggagcagcgcaaccgatttgcatcttctcacattgcttacatcgagtccctgaagcgtgtttcaatggctctccaacggtttgttgctggagatgaccaccatgagctcatcttcgatacattcatctcccctgtcaagcaacagaagccagagacgctcagcctgccttatggttcatatgagaagagaaccattcatgtctcgagatacttgaggtcagggcctaacccatcagtgtcagttgaggagcacccacgaccggtggaaacagtccgtgttgagtcacattaccctatggacaatcacagtggcatggataggttcttacaatcgcactcctcaccggtggtatcgtcttcatactacccaccaccttataccaggccaagctacccatctccatcgtcccaggaaccagttatgaatacttctacctattacatgccttatgacaggccaagatatgcacctccatcaccccaggaggcaatgaggacttcttattatgcatcttatgacaggccaagctaccgaccaccatcatcccaggagccaccgaggaattcttatcatgtgccatatgacaggccaagcttcccacctccatcaccccaggagcaggaatcatcaccatgggactccttctggaacccattctcatcgctggacagctttggatatccccgccctcggagtagctatgacaacgtgaccaatgacgatgaactcgcgaggttacagcgggtacgagaggaggaaggaatcccagaacttgaagaggaagacgatgagtgtcaagagcatgtacaaatgcatagaaaagaagaacaagaagatcatgataatgcggatgatgatgatgaagacgatgaggaagatgacgatgacgaatgtgagcattcagatgagtatatggtttctgacgagggcacttgctctgtcaattttgatgctaatatgaagcaagaaacaaagggatttgaatccaaaggtattcagtgtactgaagcaccagaacctcgcaagacagtagaacttgagttaaaggcacacaagaaagaactgatgagaaacagagtagcaaatgcagaagaaactcctggtttcacagtatatctgaatcgaagaccagcaagcttggttgaggccatgaaggatatcgactgtcagttctcgggaatatgtgacgctgctcgggaaatctcagtaatgttggaggcaagtagagctcagtactcagcctcaaacgatctttctgcgaagatgctgaatccggttgcacttttgcgctctgtgtcgtcgcgttcatcgtcttctcgtttccttcttgctccctctagctcaatagatgatctctttgacaatgagactagcagctgttactctgaagaatcttgtagtaccatgtctggaagtcaccactctaccttagatagactctatacatgggagaagaaactgtacaaggaagtaaaggctggtgagcggttaagaatcgagtacgagaagaggttgacacatttgaggaaccaagatgtcaaaggcgaagaaccttcctctgttgataagacttgtgcagcattaagaagcttgcatactcggctgaaggtgtcaatacagacagttcagtcaatatcaacgaggattgaaattctaagggatgaggagctgcatcatcagcttatggagctgattcaagggctatcacggatgtggcgggccatggctgaacgccacaaagcccagaagcgcaccatcgaggacgccaagcttctcttcctccagcaccacccctcggccgccaccgccatctcccttggcccgctagaggctgcaggtcccccaccggctgccttggaattggagtccgagatccaggcgtggcgaggagcgctggaggcctggctgttcgcgcagcgcgcctacgcgcgcgcgctggccgcgtgggcgcgacggtgcctcggcatcagcaccgcggcgcggccaagtagccacgcgctgccgccggcgttcctggcgtgcatggagtgggggcgcgcggtcgacgcggccactgaggcgcgggtgatggacggtctggacttcttcgtcgccggcgtcgggtcggtgtgctcgggcgcggctgccgggatggagggcatggctgggcgcgtgctgtgtgctggcatggcagcggtcaccggcgccttggcggagttcgcggcggcgtctggcgacagctatgacgccgctgtcgcagctgtcgtcgccgcggcgcgtgcgccggagcgcgggaaagaggacggcgtgggacaagtgccggaacgctaggaaagtgctgcggcggttgctttgttggttgaccggcccccgtgacgtagagtggctctgctcaccttgtgatgacgatgggtagggtaggagatggaattaagcatgcagctacgtatgtagtcttgtgattgataagaatgctattacaaggctatctaattttgctagcgactgcttattatagtgtggtggtcctagaccgacaaatctaagcaatagcaacaattggttgtttgtgatacaagcacaagcgaatgggatggagtttgtttatgagagcaagaaccgctacgcgcggctacggggaaactatccgatacgaggaagacgaaggcttaccggtggcttcaaatgcggcttttcc

SEQ ID NO: 43123 - DNA, 3013 bp, Zea Mays
ctttattgcctttcatgtctgtctatagtttaaggaccccattaatgacggcgaacaaaatgattgtggtccaggtcatctccccgttcgctggcttcagcagcagagctcttgctggcaaacaagtgatctttctacagttttagaagggcaggcctttgacactgggtttgctctcttctcatgttcgaagctcggagattatgacacaagcatgactggtccttgaaaactatacacggctttggagagatgggatgtgctgcttccaggttagaagatgaggaagccatcaagatgtgccgggacagaagggacttcatcaagcaggcactggagcagcgcaaccgatttgcatcttctcacattgcttacatcgagtccctgaagcgtgtttcaatggctctccaacggtttgttgctggagatgaccaccatgagctcatcttcgatacattcatctcccctgtcaagcaacagaagccagagacgctcagcctgccttatggttcatatgagaagagaaccattcatgtctcgagatacttgaggtcagggcctaacccatcagtgtcagttgaggagcacccacgaccggtggaaacagtccgtgttgagtcacattaccctatggacaatcacagtggcatggataggttcttacaatcgcactcctcaccggtggtatcgtcttcatactacccaccaccttataccaggccaagctacccatctccatcgtcccaggaaccagttatgaatacttctacctattacatgccttatgacaggccaagatatgcacctccatcaccccaggaggcaatgaggacttcttattatgcatcttatgacaggccaagctaccgaccaccatcatcccaggagccaccgaggaattcttatcatgtgccatatgacaggccaagcttcccacctccatcaccccaggagcaggaatcatcaccatgggactccttctggaacccattctcatcgctggacagctttggatatccccgccctcggagtagctatgacaacgtgaccaatgacgatgaactcgcgaggttacagcgggtacgagaggaggaaggaatcccagaacttgaagaggaagacgatgagtgtcaagagcatgtacaaatgcatagaaaagaagaacaagaagatcatgataatgcggatgatgatgatgaagacgatgaggaagatgacgatgacgaatgtgagcattcagatgagtatatggtttctgacgagggcacttgctctgtcaattttgatgctaatatgaagcaagaaacaaagggatttgaatccaaaggtattcagtgtactgaagcaccagaacctcgcaagacagtagaacttgagttaaaggcacacaagaaagaactgatgagaaacagagtagcaaatgcagaagaaactcctggtttcacagtatatctgaatcgaagaccagcaagcttggttgaggccatgaaggatatcgactgtcagttctcgggaatatgtgacgctgctcgggaaatctcagtaatgttggaggcaagtagagctcagtactcagcctcaaacgatctttctgcgaagatgctgaatccggttgcacttttgcgctctgtgtcgtcgcgttcatcgtcttctcgtttccttcttgctccctctagctcaatagatgatctctttgacaatgagactagcagctgttactctgaagaatcttgtagtaccatgtctggaagtcaccactctaccttagatagactctatacatgggagaagaaactgtacaaggaagtaaaggctggtgagcggttaagaatcgagtacgagaagaggttgacacatttgaggaaccaagatgtcaaaggcgaagaaccttcctctgttgataagacttgtgcagcattaagaagcttgcatactcggctgaaggtgtcaatacagacagttcagtcaatatcaacgaggattgaaattctaagggatgaggagctgcatcatcagcttatggagctgattcaagggctatcacggatgtggcgggccatggctgaacgccacaaagcccagaagcgcaccatcgaggacgccaagcttctcttcctccagcaccacccctcggccgccaccgccatctcccttggcccgctagaggctgcaggtcccccaccggctgccttggaattggagtccgagatccaggcgtggcgaggagcgctggaggcctggctgttcgcgcagcgcgcctacgcgcgcgcgctggccgcgtgggcgcgacggtgcctcggcatcagcaccgcggcgcggccaagtagccacgcgctgccgccggcgttcctggcgtgcatggagtgggggcgcgcggtcgacgcggccactgaggcgcgggtgatggacggtctggacttcttcgtcgccggcgtcgggtcggtgtgctcgggcgcggctgccgggatggagggcatggctgggcgcgtgctgtgtgctggcatggcagcggtcaccggcgccttggcggagttcgcggcggcgtctggcgacagctatgacgccgctgtcgcagctgtcgtcgccgcggcgcgtgcgccggagcgcgggaaagaggacggcgtgggacaagtgccggaacgctaggaaagtgctgcggcggttgctttgttggttgaccggcccccgtgacgtagagtggctctgctcaccttgtgatgacgatgggtagggtaggagatggaattaagcatgcagctacgtatgtagtcttgtgattgataagaatgctattacaaggctatctaattttgctagcgactgcttattatagtgtggtggtcctagaccgacaaatctaagcaatagcaacaattggttgtttgtgatacaagcacaagcgaatgggatggagtttgtttatgagagcaagaaccgctacgcgcggctacggggaaactatccgatacgaggaagacgaaggcttaccggtggcttcaaatgcggcttttcc

SEQ ID NO: 43124 - DNA, 2994 bp, Zea Mays
cgtagagctagctgctcccgatctttagaattccgcgcgtcctccgagcgctccaagaacacgtacgccgtcgctggcttctcctatcggattgtggtccaggtcatctccccgttcgctggcttcagcagcagagctcttgctggcaaacaagtgatctttctacagttttagctcggagattatgacacaagcatgactggtccttgaaaactatacacggctttggagagatgggatgtgctgcttccaggttagaagatgaggaagccatcaagatgtgccgggacagaagggacttcatcaagcaggcactggagcagcgcaaccgatttgcatcttctcacattgcttacatcgagtccctgaagcgtgtttcaatggctctccaacggtttgttgctggagatgaccaccatgagctcatcttcgatacattcatctcccctgtcaagcaacagaagccagagacgctcagcctgccttatggttcatatgagaagagaaccattcatgtctcgagatacttgaggtcagggcctaacccatcagtgtcagttgaggagcacccacgaccggtggaaacagtccgtgttgagtcacattaccctatggacaatcacagtggcatggataggttcttacaatcgcactcctcaccggtggtatcgtcttcatactacccaccaccttataccaggccaagctacccatctccatcgtcccaggaaccagttatgaatacttctacctattacatgccttatgacaggccaagatatgcacctccatcaccccaggaggcaatgaggacttcttattatgcatcttatgacaggccaagctaccgaccaccatcatcccaggagccaccgaggaattcttatcatgtgccatatgacaggccaagcttcccacctccatcaccccaggagcaggaatcatcaccatgggactccttctggaacccattctcatcgctggacagctttggatatccccgccctcggagtagctatgacaacgtgaccaatgacgatgaactcgcgaggttacagcgggtacgagaggaggaaggaatcccagaacttgaagaggaagacgatgagtgtcaagagcatgtacaaatgcatagaaaagaagaacaagaagatcatgataatgcggatgatgatgatgaagacgatgaggaagatgacgatgacgaatgtgagcattcagatgagtatatggtttctgacgagggcacttgctctgtcaattttgatgctaatatgaagcaagaaacaaagggatttgaatccaaaggtattcagtgtactgaagcaccagaacctcgcaagacagtagaacttgagttaaaggcacacaagaaagaactgatgagaaacagagtagcaaatgcagaagaaactcctggtttcacagtatatctgaatcgaagaccagcaagcttggttgaggccatgaaggatatcgactgtcagttctcgggaatatgtgacgctgctcgggaaatctcagtaatgttggaggcaagtagagctcagtactcagcctcaaacgatctttctgcgaagatgctgaatccggttgcacttttgcgctctgtgtcgtcgcgttcatcgtcttctcgtttccttcttgctccctctagctcaatagatgatctctttgacaatgagactagcagctgttactctgaagaatcttgtagtaccatgtctggaagtcaccactctaccttagatagactctatacatgggagaagaaactgtacaaggaagtaaaggctggtgagcggttaagaatcgagtacgagaagaggttgacacatttgaggaaccaagatgtcaaaggcgaagaaccttcctctgttgataagacttgtgcagcattaagaagcttgcatactcggctgaaggtgtcaatacagacagttcagtcaatatcaacgaggattgaaattctaagggatgaggagctgcatcatcagcttatggagctgattcaagggctatcacggatgtggcgggccatggctgaacgccacaaagcccagaagcgcaccatcgaggacgccaagcttctcttcctccagcaccacccctcggccgccaccgccatctcccttggcccgctagaggctgcaggtcccccaccggctgccttggaattggagtccgagatccaggcgtggcgaggagcgctggaggcctggctgttcgcgcagcgcgcctacgcgcgcgcgctggccgcgtgggcgcgacggtgcctcggcatcagcaccgcggcgcggccaagtagccacgcgctgccgccggcgttcctggcgtgcatggagtgggggcgcgcggtcgacgcggccactgaggcgcgggtgatggacggtctggacttcttcgtcgccggcgtcgggtcggtgtgctcgggcgcggctgccgggatggagggcatggctgggcgcgtgctgtgtgctggcatggcagcggtcaccggcgccttggcggagttcgcggcggcgtctggcgacagctatgacgccgctgtcgcagctgtcgtcgccgcggcgcgtgcgccggagcgcgggaaagaggacggcgtgggacaagtgccggaacgctaggaaagtgctgcggcggttgctttgttggttgaccggcccccgtgacgtagagtggctctgctcaccttgtgatgacgatgggtagggtaggagatggaattaagcatgcagctacgtatgtagtcttgtgattgataagaatgctattacaaggctatctaattttgctagcgactgcttattatagtgtggtggtcctagaccgacaaatctaagcaatagcaacaattggttgtttgtgatacaagcacaagcgaatgggatggagtttgtttatgagagcaagaaccgctacgcgcggctacggggaaactatccgatacgaggaagacgaaggcttaccggtggcttcaaatgcggcttttcc

SEQ ID NO: 43125 - DNA, 2600 bp, Zea Mays
gaatctgtggggaccaaagcgagtagagagagagagagagagaggcggaaggaatggattcgttctcgtagagctagctgctcccgatctttagaattccgcgcgtcctccgagcgctccaagaacacgtacgccgtcgctggcttctcctatcggattgtggtccaggtcatctccccgttcgctggcttcagcagcagagctcttgctggcaaacaagtgatctttctacagttttagctcggagattatgaatacttctacctattacatgccttatgacaggccaagatatgcacctccatcaccccaggaggcaatgaggacttcttattatgcatcttatgacaggccaagctaccgaccaccatcatcccaggagccaccgaggaattcttatcatgtgccatatgacaggccaagcttcccacctccatcaccccaggagcaggaatcatcaccatgggactccttctggaacccattctcatcgctggacagctttggatatccccgccctcggagtagctatgacaacgtgaccaatgacgatgaactcgcgaggttacagcgggtacgagaggaggaaggaatcccagaacttgaagaggaagacgatgagtgtcaagagcatgtacaaatgcatagaaaagaagaacaagaagatcatgataatgcggatgatgatgatgaagacgatgaggaagatgacgatgacgaatgtgagcattcagatgagtatatggtttctgacgagggcacttgctctgtcaattttgatgctaatatgaagcaagaaacaaagggatttgaatccaaaggtattcagtgtactgaagcaccagaacctcgcaagacagtagaacttgagttaaaggcacacaagaaagaactgatgagaaacagagtagcaaatgcagaagaaactcctggtttcacagtatatctgaatcgaagaccagcaagcttggttgaggccatgaaggatatcgactgtcagttctcgggaatatgtgacgctgctcgggaaatctcagtaatgttggaggcaagtagagctcagtactcagcctcaaacgatctttctggtactgcttttatgatccaatgctgaaattactttaaagatccagatttgatacttactgaacatagctaggcttgtccattgtataatgcagcgaagatgctgaatccggttgcacttttgcgctctgtgtcgtcgcgttcatcgtcttctcgtttccttcttgctccctctagctcaatagatgatctctttgacaatgagactagcagctgttactctgaagaatcttgtagtaccatgtctggaagtcaccactctaccttagatagactctatacatgggagaagaaactgtacaaggaagtaaaggctggtgagcggttaagaatcgagtacgagaagaggttgacacatttgaggaaccaagatgtcaaaggcgaagaaccttcctctgttgataagacttgtgcagcattaagaagcttgcatactcggctgaaggtgtcaatacagacagttcagtcaatatcaacgaggattgaaattctaagggatgaggagctgcatcatcagcttatggagctgattcaagggctatcacggatgtggcgggccatggctgaacgccacaaagcccagaagcgcaccatcgaggacgccaagcttctcttcctccagcaccacccctcggccgccaccgccatctcccttggcccgctagaggctgcaggtcccccaccggctgccttggaattggagtccgagatccaggcgtggcgaggagcgctggaggcctggctgttcgcgcagcgcgcctacgcgcgcgcgctggccgcgtgggcgcgacggtgcctcggcatcagcaccgcggcgcggccaagtagccacgcgctgccgccggcgttcctggcgtgcatggagtgggggcgcgcggtcgacgcggccactgaggcgcgggtgatggacggtctggacttcttcgtcgccggcgtcgggtcggtgtgctcgggcgcggctgccgggatggagggcatggctgggcgcgtgctgtgtgctggcatggcagcggtcaccggcgccttggcggagttcgcggcggcgtctggcgacagctatgacgccgctgtcgcagctgtcgtcgccgcggcgcgtgcgccggagcgcgggaaagaggacggcgtgggacaagtgccggaacgctaggaaagtgctgcggcggttgctttgttggttgaccggcccccgtgacgtagagtggctctgctcaccttgtgatgacgatgggtagggtaggagatggaattaagcatgcagctacgtatgtagtcttgtgattgataagaatgctattacaaggctatctaattttgctagcgactgcttattatagtgtggtggtcctagaccgacaaatctaagcaatagcaacaattggttgtttgtgatacaagcacaagcgaatgggatggagtttgtttatgagagcaagaaccgctacgcgcggctacggggaaactatccgatacgaggaagacgaaggcttaccggtggcttcaaatgcggcttttcc

SEQ ID NO: 43126 - DNA, 3110 bp, Zea Mays
gaggaatctgtggggaccaaagcgagtagagagagagagagagagaggcggaaggaatggattcgttctcgtagagctagctgctcccgatctttagaattccgcgcgtcctccgagcgctccaagaacacgtacgccgtcgctggcttctcctatcggattgtggtccaggtcatctccccgttcgctggcttcagcagcagagctcttgctggcaaacaagtgatctttctacagttttagaagggcaggcctttgacactgggtttgctctcttctcatgttcgaagctcggagattatgacacaagcatgactggtccttgaaaactatacacggctttggagagatgggatgtgctgcttccaggttagaagatgaggaagccatcaagatgtgccgggacagaagggacttcatcaagcaggcactggagcagcgcaaccgatttgcatcttctcacattgcttacatcgagtccctgaagcgtgtttcaatggctctccaacggtttgttgctggagatgaccaccatgagctcatcttcgatacattcatctcccctgtcaagcaacagaagccagagacgctcagcctgccttatggttcatatgagaagagaaccattcatgtctcgagatacttgaggtcagggcctaacccatcagtgtcagttgaggagcacccacgaccggtggaaacagtccgtgttgagtcacattaccctatggacaatcacagtggcatggataggttcttacaatcgcactcctcaccggtggtatcgtcttcatactacccaccaccttataccaggccaagctacccatctccatcgtcccaggaaccagttatgaatacttctacctattacatgccttatgacaggccaagatatgcacctccatcaccccaggaggcaatgaggacttcttattatgcatcttatgacaggccaagctaccgaccaccatcatcccaggagccaccgaggaattcttatcatgtgccatatgacaggccaagcttcccacctccatcaccccaggagcaggaatcatcaccatgggactccttctggaacccattctcatcgctggacagctttggatatccccgccctcggagtagctatgacaacgtgaccaatgacgatgaactcgcgaggttacagcgggtacgagaggaggaaggaatcccagaacttgaagaggaagacgatgagtgtcaagagcatgtacaaatgcatagaaaagaagaacaagaagatcatgataatgcggatgatgatgatgaagacgatgaggaagatgacgatgacgaatgtgagcattcagatgagtatatggtttctgacgagggcacttgctctgtcaattttgatgctaatatgaagcaagaaacaaagggatttgaatccaaaggtattcagtgtactgaagcaccagaacctcgcaagacagtagaacttgagttaaaggcacacaagaaagaactgatgagaaacagagtagcaaatgcagaagaaactcctggtttcacagtatatctgaatcgaagaccagcaagcttggttgaggccatgaaggatatcgactgtcagttctcgggaatatgtgacgctgctcgggaaatctcagtaatgttggaggcaagtagagctcagtactcagcctcaaacgatctttctgcgaagatgctgaatccggttgcacttttgcgctctgtgtcgtcgcgttcatcgtcttctcgtttccttcttgctccctctagctcaatagatgatctctttgacaatgagactagcagctgttactctgaagaatcttgtagtaccatgtctggaagtcaccactctaccttagatagactctatacatgggagaagaaactgtacaaggaagtaaaggctggtgagcggttaagaatcgagtacgagaagaggttgacacatttgaggaaccaagatgtcaaaggcgaagaaccttcctctgttgataagacttgtgcagcattaagaagcttgcatactcggctgaaggtgtcaatacagacagttcagtcaatatcaacgaggattgaaattctaagggatgaggagctgcatcatcagcttatggagctgattcaagggctatcacggatgtggcgggccatggctgaacgccacaaagcccagaagcgcaccatcgaggacgccaagcttctcttcctccagcaccacccctcggccgccaccgccatctcccttggcccgctagaggctgcaggtcccccaccggctgccttggaattggagtccgagatccaggcgtggcgaggagcgctggaggcctggctgttcgcgcagcgcgcctacgcgcgcgcgctggccgcgtgggcgcgacggtgcctcggcatcagcaccgcggcgcggccaagtagccacgcgctgccgccggcgttcctggcgtgcatggagtgggggcgcgcggtcgacgcggccactgaggcgcgggtgatggacggtctggacttcttcgtcgccggcgtcgggtcggtgtgctcgggcgcggctgccgggatggagggcatggctgggcgcgtgctgtgtgctggcatggcagcggtcaccggcgccttggcggagttcgcggcggcgtctggcgacagctatgacgccgctgtcgcagctgtcgtcgccgcggcgcgtgcgccggagcgcgggaaagaggacggcgtgggacaagtgccggaacgctaggaaagtgctgcggcggttgctttgttggttgaccggcccccgtgacgtagagtggctctgctcaccttgtgatgacgatgggtagggtaggagatggaattaagcatgcagctacgtatgtagtcttgtgattgataagaatgctattacaaggctatctaattttgctagcgactgcttattatagtgtggtggtcctagaccgacaaatctaagcaatagcaacaattggttgtttgtgatacaagcacaagcgaatgggatggagtttgtttatgagagcaagaaccgctacgcgcggctacggggaaactatccgatacgaggaagacgaaggcttaccggtggcttcaaatgcggcttttcc

SEQ ID NO: 43127 - DNA, 2749 bp, Zea Mays
atatacaagaaatactctccccgtttacaccctttctctctcatcgccgctgatttctcctcccctctgaaagccttttgaccgttgcagtctctctctccctctgtccttccgttcccggccactcctctctccctctcttctctctctctgcagactgcacaaagccgccttcgtcttccactcgttcttgtttacacacacagcacagcacagcacagcagcctcccgggaaagagaaggcagttccctcactgtctctcaggattgtggtccaggtcatctccccgttcgctggcttcagcagcagagctcttgctggcaaacaagtgatctttctacagttttaggcctttgacactgggtttgctctcttctcatgttcgaagctcggagattatgaatacttctacctattacatgccttatgacaggccaagatatgcacctccatcaccccaggaggcaatgaggacttcttattatgcatcttatgacaggccaagctaccgaccaccatcatcccaggagccaccgaggaattcttatcatgtgccatatgacaggccaagcttcccacctccatcaccccaggagcaggaatcatcaccatgggactccttctggaacccattctcatcgctggacagctttggatatccccgccctcggagtagctatgacaacgtgaccaatgacgatgaactcgcgaggttacagcgggtacgagaggaggaaggaatcccagaacttgaagaggaagacgatgagtgtcaagagcatgtacaaatgcatagaaaagaagaacaagaagatcatgataatgcggatgatgatgatgaagacgatgaggaagatgacgatgacgaatgtgagcattcagatgagtatatggtttctgacgagggcacttgctctgtcaattttgatgctaatatgaagcaagaaacaaagggatttgaatccaaaggtattcagtgtactgaagcaccagaacctcgcaagacagtagaacttgagttaaaggcacacaagaaagaactgatgagaaacagagtagcaaatgcagaagaaactcctggtttcacagtatatctgaatcgaagaccagcaagcttggttgaggccatgaaggatatcgactgtcagttctcgggaatatgtgacgctgctcgggaaatctcagtaatgttggaggcaagtagagctcagtactcagcctcaaacgatctttctggtactgcttttatgatccaatgctgaaattactttaaagatccagatttgatacttactgaacatagctaggcttgtccattgtataatgcagcgaagatgctgaatccggttgcacttttgcgctctgtgtcgtcgcgttcatcgtcttctcgtttccttcttgctccctctagctcaatagatgatctctttgacaatgagactagcagctgttactctgaagaatcttgtagtaccatgtctggaagtcaccactctaccttagatagactctatacatgggagaagaaactgtacaaggaagtaaaggctggtgagcggttaagaatcgagtacgagaagaggttgacacatttgaggaaccaagatgtcaaaggcgaagaaccttcctctgttgataagacttgtgcagcattaagaagcttgcatactcggctgaaggtgtcaatacagacagttcagtcaatatcaacgaggattgaaattctaagggatgaggagctgcatcatcagcttatggagctgattcaagggctatcacggatgtggcgggccatggctgaacgccacaaagcccagaagcgcaccatcgaggacgccaagcttctcttcctccagcaccacccctcggccgccaccgccatctcccttggcccgctagaggctgcaggtcccccaccggctgccttggaattggagtccgagatccaggcgtggcgaggagcgctggaggcctggctgttcgcgcagcgcgcctacgcgcgcgcgctggccgcgtgggcgcgacggtgcctcggcatcagcaccgcggcgcggccaagtagccacgcgctgccgccggcgttcctggcgtgcatggagtgggggcgcgcggtcgacgcggccactgaggcgcgggtgatggacggtctggacttcttcgtcgccggcgtcgggtcggtgtgctcgggcgcggctgccgggatggagggcatggctgggcgcgtgctgtgtgctggcatggcagcggtcaccggcgccttggcggagttcgcggcggcgtctggcgacagctatgacgccgctgtcgcagctgtcgtcgccgcggcgcgtgcgccggagcgcgggaaagaggacggcgtgggacaagtgccggaacgctaggaaagtgctgcggcggttgctttgttggttgaccggcccccgtgacgtagagtggctctgctcaccttgtgatgacgatgggtagggtaggagatggaattaagcatgcagctacgtatgtagtcttgtgattgataagaatgctattacaaggctatctaattttgctagcgactgcttattatagtgtggtggtcctagaccgacaaatctaagcaatagcaacaattggttgtttgtgatacaagcacaagcgaatgggatggagtttgtttatgagagcaagaaccgctacgcgcggctacggggaaactatccgatacgaggaagacgaaggcttaccggtggcttcaaatgcggcttttcc

SEQ ID NO: 43128 - DNA, 2617 bp, Zea Mays
atatacaagaaatactctccccgtttacaccctttctctctcatcgccgctgatttctcctcccctctgaaagccttttgaccgttgcagtctctctctccctctgtccttccgttcccggccactcctctctccctctcttctctctctctgcagactgcacaaagccgccttcgtcttccactcgttcttgtttacacacacagcacagcacagcacagcagcctcccgggaaagagaaggcagttccctcactgtctctcaggattgtggtccaggtcatctccccgttcgctggcttcagcagcagagctcttgctggcaaacaagtgatctttctacagttttagctcggagattatgaatacttctacctattacatgccttatgacaggccaagatatgcacctccatcaccccaggaggcaatgaggacttcttattatgcatcttatgacaggccaagctaccgaccaccatcatcccaggagccaccgaggaattcttatcatgtgccatatgacaggccaagcttcccacctccatcaccccaggagcaggaatcatcaccatgggactccttctggaacccattctcatcgctggacagctttggatatccccgccctcggagtagctatgacaacgtgaccaatgacgatgaactcgcgaggttacagcgggtacgagaggaggaaggaatcccagaacttgaagaggaagacgatgagtgtcaagagcatgtacaaatgcatagaaaagaagaacaagaagatcatgataatgcggatgatgatgatgaagacgatgaggaagatgacgatgacgaatgtgagcattcagatgagtatatggtttctgacgagggcacttgctctgtcaattttgatgctaatatgaagcaagaaacaaagggatttgaatccaaaggtattcagtgtactgaagcaccagaacctcgcaagacagtagaacttgagttaaaggcacacaagaaagaactgatgagaaacagagtagcaaatgcagaagaaactcctggtttcacagtatatctgaatcgaagaccagcaagcttggttgaggccatgaaggatatcgactgtcagttctcgggaatatgtgacgctgctcgggaaatctcagtaatgttggaggcaagtagagctcagtactcagcctcaaacgatctttctgcgaagatgctgaatccggttgcacttttgcgctctgtgtcgtcgcgttcatcgtcttctcgtttccttcttgctccctctagctcaatagatgatctctttgacaatgagactagcagctgttactctgaagaatcttgtagtaccatgtctggaagtcaccactctaccttagatagactctatacatgggagaagaaactgtacaaggaagtaaaggctggtgagcggttaagaatcgagtacgagaagaggttgacacatttgaggaaccaagatgtcaaaggcgaagaaccttcctctgttgataagacttgtgcagcattaagaagcttgcatactcggctgaaggtgtcaatacagacagttcagtcaatatcaacgaggattgaaattctaagggatgaggagctgcatcatcagcttatggagctgattcaagggctatcacggatgtggcgggccatggctgaacgccacaaagcccagaagcgcaccatcgaggacgccaagcttctcttcctccagcaccacccctcggccgccaccgccatctcccttggcccgctagaggctgcaggtcccccaccggctgccttggaattggagtccgagatccaggcgtggcgaggagcgctggaggcctggctgttcgcgcagcgcgcctacgcgcgcgcgctggccgcgtgggcgcgacggtgcctcggcatcagcaccgcggcgcggccaagtagccacgcgctgccgccggcgttcctggcgtgcatggagtgggggcgcgcggtcgacgcggccactgaggcgcgggtgatggacggtctggacttcttcgtcgccggcgtcgggtcggtgtgctcgggcgcggctgccgggatggagggcatggctgggcgcgtgctgtgtgctggcatggcagcggtcaccggcgccttggcggagttcgcggcggcgtctggcgacagctatgacgccgctgtcgcagctgtcgtcgccgcggcgcgtgcgccggagcgcgggaaagaggacggcgtgggacaagtgccggaacgctaggaaagtgctgcggcggttgctttgttggttgaccggcccccgtgacgtagagtggctctgctcaccttgtgatgacgatgggtagggtaggagatggaattaagcatgcagctacgtatgtagtcttgtgattgataagaatgctattacaaggctatctaattttgctagcgactgcttattatagtgtggtggtcctagaccgacaaatctaagcaatagcaacaattggttgtttgtgatacaagcacaagcgaatgggatggagtttgtttatgagagcaagaaccgctacgcgcggctacggggaaactatccgatacgaggaagacgaaggcttaccggtggcttcaaatgcggcttttcc

SEQ ID NO: 43129 - DNA, 2664 bp, Zea Mays
atatacaagaaatactctccccgtttacaccctttctctctcatcgccgctgatttctcctcccctctgaaagccttttgaccgttgcagtctctctctccctctgtccttccgttcccggccactcctctctccctctcttctctctctctgcagactgcacaaagccgccttcgtcttccactcgttcttgtttacacacacagcacagcacagcacagcagcctcccgggaaagagaaggcagttccctcactgtctctcaggattgtggtccaggtcatctccccgttcgctggcttcagcagcagagctcttgctggcaaacaagtgatctttctacagttttagaagggcaggcctttgacactgggtttgctctcttctcatgttcgaagctcggagattatgaatacttctacctattacatgccttatgacaggccaagatatgcacctccatcaccccaggaggcaatgaggacttcttattatgcatcttatgacaggccaagctaccgaccaccatcatcccaggagccaccgaggaattcttatcatgtgccatatgacaggccaagcttcccacctccatcaccccaggagcaggaatcatcaccatgggactccttctggaacccattctcatcgctggacagctttggatatccccgccctcggagtagctatgacaacgtgaccaatgacgatgaactcgcgaggttacagcgggtacgagaggaggaaggaatcccagaacttgaagaggaagacgatgagtgtcaagagcatgtacaaatgcatagaaaagaagaacaagaagatcatgataatgcggatgatgatgatgaagacgatgaggaagatgacgatgacgaatgtgagcattcagatgagtatatggtttctgacgagggcacttgctctgtcaattttgatgctaatatgaagcaagaaacaaagggatttgaatccaaaggtattcagtgtactgaagcaccagaacctcgcaagacagtagaacttgagttaaaggcacacaagaaagaactgatgagaaacagagtagcaaatgcagaagaaactcctggtttcacagtatatctgaatcgaagaccagcaagcttggttgaggccatgaaggatatcgactgtcagttctcgggaatatgtgacgctgctcgggaaatctcagtaatgttggaggcaagtagagctcagtactcagcctcaaacgatctttctgcgaagatgctgaatccggttgcacttttgcgctctgtgtcgtcgcgttcatcgtcttctcgtttccttcttgctccctctagctcaatagatgatctctttgacaatgagactagcagctgttactctgaagaatcttgtagtaccatgtctggaagtcaccactctaccttagatagactctatacatgggagaagaaactgtacaaggaagtaaaggctggtgagcggttaagaatcgagtacgagaagaggttgacacatttgaggaaccaagatgtcaaaggcgaagaaccttcctctgttgataagacttgtgcagcattaagaagcttgcatactcggctgaaggtgtcaatacagacagttcagtcaatatcaacgaggattgaaattctaagggatgaggagctgcatcatcagcttatggagctgattcaagggctatcacggatgtggcgggccatggctgaacgccacaaagcccagaagcgcaccatcgaggacgccaagcttctcttcctccagcaccacccctcggccgccaccgccatctcccttggcccgctagaggctgcaggtcccccaccggctgccttggaattggagtccgagatccaggcgtggcgaggagcgctggaggcctggctgttcgcgcagcgcgcctacgcgcgcgcgctggccgcgtgggcgcgacggtgcctcggcatcagcaccgcggcgcggccaagtagccacgcgctgccgccggcgttcctggcgtgcatggagtgggggcgcgcggtcgacgcggccactgaggcgcgggtgatggacggtctggacttcttcgtcgccggcgtcgggtcggtgtgctcgggcgcggctgccgggatggagggcatggctgggcgcgtgctgtgtgctggcatggcagcggtcaccggcgccttggcggagttcgcggcggcgtctggcgacagctatgacgccgctgtcgcagctgtcgtcgccgcggcgcgtgcgccggagcgcgggaaagaggacggcgtgggacaagtgccggaacgctaggaaagtgctgcggcggttgctttgttggttgaccggcccccgtgacgtagagtggctctgctcaccttgtgatgacgatgggtagggtaggagatggaattaagcatgcagctacgtatgtagtcttgtgattgataagaatgctattacaaggctatctaattttgctagcgactgcttattatagtgtggtggtcctagaccgacaaatctaagcaatagcaacaattggttgtttgtgatacaagcacaagcgaatgggatggagtttgtttatgagagcaagaaccgctacgcgcggctacggggaaactatccgatacgaggaagacgaaggcttaccggtggcttcaaatgcggcttttcc

SEQ ID NO: 43130 - DNA, 3340 bp, Zea Mays
atctcttgctccataaaaatcgtagtgttatatattaatatacaagaaatactctccccgtttacaccctttctctctcatcgccgctgatttctcctcccctctgaaagccttttgaccgttgcagtctctctctccctctgtccttccgttcccggccactcctctctccctctcttctctctctctgcagactgcacaaagccgccttcgtcttccactcgttcttgtttacacacacagcacagcacagcacagcagcctcccgggaaagagaaggcagttccctcactgtctctcaggattgtggtccaggtcatctccccgttcgctggcttcagcagcagagctcttgctggcaaacaagtgatctttctacagttttagggcctttgacactgggtttgctctcttctcatgttcgaagctcggagattatgacacaagcatgactggtccttgaaaactatacacggctttggagagatgggatgtgctgcttccaggttagaagatgaggaagccatcaagatgtgccgggacagaagggacttcatcaagcaggcactggagcagcgcaaccgatttgcatcttctcacattgcttacatcgagtccctgaagcgtgtttcaatggctctccaacggtttgttgctggagatgaccaccatgagctcatcttcgatacattcatctcccctgtcaagcaacagaagccagagacgctcagcctgccttatggttcatatgagaagagaaccattcatgtctcgagatacttgaggtcagggcctaacccatcagtgtcagttgaggagcacccacgaccggtggaaacagtccgtgttgagtcacattaccctatggacaatcacagtggcatggataggttcttacaatcgcactcctcaccggtggtatcgtcttcatactacccaccaccttataccaggccaagctacccatctccatcgtcccaggaaccagttatgaatacttctacctattacatgccttatgacaggccaagatatgcacctccatcaccccaggaggcaatgaggacttcttattatgcatcttatgacaggccaagctaccgaccaccatcatcccaggagccaccgaggaattcttatcatgtgccatatgacaggccaagcttcccacctccatcaccccaggagcaggaatcatcaccatgggactccttctggaacccattctcatcgctggacagctttggatatccccgccctcggagtagctatgacaacgtgaccaatgacgatgaactcgcgaggttacagcgggtacgagaggaggaaggaatcccagaacttgaagaggaagacgatgagtgtcaagagcatgtacaaatgcatagaaaagaagaacaagaagatcatgataatgcggatgatgatgatgaagacgatgaggaagatgacgatgacgaatgtgagcattcagatgagtatatggtttctgacgagggcacttgctctgtcaattttgatgctaatatgaagcaagaaacaaagggatttgaatccaaaggtattcagtgtactgaagcaccagaacctcgcaagacagtagaacttgagttaaaggcacacaagaaagaactgatgagaaacagagtagcaaatgcagaagaaactcctggtttcacagtatatctgaatcgaagaccagcaagcttggttgaggccatgaaggatatcgactgtcagttctcgggaatatgtgacgctgctcgggaaatctcagtaatgttggaggcaagtagagctcagtactcagcctcaaacgatctttctggtactgcttttatgatccaatgctgaaattactttaaagatccagatttgatacttactgaacatagctaggcttgtccattgtataatgcagcgaagatgctgaatccggttgcacttttgcgctctgtgtcgtcgcgttcatcgtcttctcgtttccttcttgctccctctagctcaatagatgatctctttgacaatgagactagcagctgttactctgaagaatcttgtagtaccatgtctggaagtcaccactctaccttagatagactctatacatgggagaagaaactgtacaaggaagtaaaggctggtgagcggttaagaatcgagtacgagaagaggttgacacatttgaggaaccaagatgtcaaaggcgaagaaccttcctctgttgataagacttgtgcagcattaagaagcttgcatactcggctgaaggtgtcaatacagacagttcagtcaatatcaacgaggattgaaattctaagggatgaggagctgcatcatcagcttatggagctgattcaagggctatcacggatgtggcgggccatggctgaacgccacaaagcccagaagcgcaccatcgaggacgccaagcttctcttcctccagcaccacccctcggccgccaccgccatctcccttggcccgctagaggctgcaggtcccccaccggctgccttggaattggagtccgagatccaggcgtggcgaggagcgctggaggcctggctgttcgcgcagcgcgcctacgcgcgcgcgctggccgcgtgggcgcgacggtgcctcggcatcagcaccgcggcgcggccaagtagccacgcgctgccgccggcgttcctggcgtgcatggagtgggggcgcgcggtcgacgcggccactgaggcgcgggtgatggacggtctggacttcttcgtcgccggcgtcgggtcggtgtgctcgggcgcggctgccgggatggagggcatggctgggcgcgtgctgtgtgctggcatggcagcggtcaccggcgccttggcggagttcgcggcggcgtctggcgacagctatgacgccgctgtcgcagctgtcgtcgccgcggcgcgtgcgccggagcgcgggaaagaggacggcgtgggacaagtgccggaacgctaggaaagtgctgcggcggttgctttgttggttgaccggcccccgtgacgtagagtggctctgctcaccttgtgatgacgatgggtagggtaggagatggaattaagcatgcagctacgtatgtagtcttgtgattgataagaatgctattacaaggctatctaattttgctagcgactgcttattatagtgtggtggtcctagaccgacaaatctaagcaatagcaacaattggttgtttgtgatacaagcacaagcgaatgggatggagtttgtttatgagagcaagaaccgctacgcgcggctacggggaaactatccgatacgaggaagacgaaggcttaccggtggcttcaaatgcggcttttcc

SEQ ID NO: 43131 - DNA, 3240 bp, Zea Mays
ccacattcctcgtgcctctccccgcgactccgccgtctacctctctctcgacactgtcactctcttcactcacttgtgctgctgctgccatcgtcgtcgatctcttgctccataaaaatcgtagtgttatatattaatatacaagaaatactctccccgtttacaccctttctctctcatcgccgctgatttctcctcccctctgaaagccttttgaccgttgcagtctctctctccctctgtccttccgttcccggccactcctctctccctctcttctctctctctgcagactgcacaaagccgccttcgtcttccactcgttcttgtttacacacacagcacagcacagcacagcagcctcccgggaaagagaaggcagttccctcactgtctctcaggattgtggtccaggtcatctccccgttcgctggcttcagcagcagagctcttgctggcaaacaagtgatctttctacagttttagctcggagattatgacacaagcatgactggtccttgaaaactatacacggctttggagagatgggatgtgctgcttccaggttagaagatgaggaagccatcaagatgtgccgggacagaagggacttcatcaagcaggcactggagcagcgcaaccgatttgcatcttctcacattgcttacatcgagtccctgaagcgtgtttcaatggctctccaacggtttgttgctggagatgaccaccatgagctcatcttcgatacattcatctcccctgtcaagcaacagaagccagagacgctcagcctgccttatggttcatatgagaagagaaccattcatgtctcgagatacttgaggtcagggcctaacccatcagtgtcagttgaggagcacccacgaccggtggaaacagtccgtgttgagtcacattaccctatggacaatcacagtggcatggataggttcttacaatcgcactcctcaccggtggtatcgtcttcatactacccaccaccttataccaggccaagctacccatctccatcgtcccaggaaccagttatgaatacttctacctattacatgccttatgacaggccaagatatgcacctccatcaccccaggaggcaatgaggacttcttattatgcatcttatgacaggccaagcttcccacctccatcaccccaggagcaggaatcatcaccatgggactccttctggaacccattctcatcgctggacagctttggatatccccgccctcggagtagctatgacaacgtgaccaatgacgatgaactcgcgaggttacagcgggtacgagaggaggaaggaatcccagaacttgaagaggaagacgatgagtgtcaagagcatgtacaaatgcatagaaaagaagaacaagaagatcatgataatgcggatgatgatgatgaagacgatgaggaagatgacgatgacgaatgtgagcattcagatgagtatatggtttctgacgagggcacttgctctgtcaattttgatgctaatatgaagcaagaaacaaagggatttgaatccaaaggtattcagtgtactgaagcaccagaacctcgcaagacagtagaacttgagttaaaggcacacaagaaagaactgatgagaaacagagtagcaaatgcagaagaaactcctggtttcacagtatatctgaatcgaagaccagcaagcttggttgaggccatgaaggatatcgactgtcagttctcgggaatatgtgacgctgctcgggaaatctcagtaatgttggaggcaagtagagctcagtactcagcctcaaacgatctttctgcgaagatgctgaatccggttgcacttttgcgctctgtgtcgtcgcgttcatcgtcttctcgtttccttcttgctccctctagctcaatagatgatctctttgacaatgagactagcagctgttactctgaagaatcttgtagtaccatgtctggaagtcaccactctaccttagatagactctatacatgggagaagaaactgtacaaggaagtaaaggctggtgagcggttaagaatcgagtacgagaagaggttgacacatttgaggaaccaagatgtcaaaggcgaagaaccttcctctgttgataagacttgtgcagcattaagaagcttgcatactcggctgaaggtgtcaatacagacagttcagtcaatatcaacgaggattgaaattctaagggatgaggagctgcatcatcagcttatggagctgattcaagggctatcacggatgtggcgggccatggctgaacgccacaaagcccagaagcgcaccatcgaggacgccaagcttctcttcctccagcaccacccctcggccgccaccgccatctcccttggcccgctagaggctgcaggtcccccaccggctgccttggaattggagtccgagatccaggcgtggcgaggagcgctggaggcctggctgttcgcgcagcgcgcctacgcgcgcgcgctggccgcgtgggcgcgacggtgcctcggcatcagcaccgcggcgcggccaagtagccacgcgctgccgccggcgttcctggcgtgcatggagtgggggcgcgcggtcgacgcggccactgaggcgcgggtgatggacggtctggacttcttcgtcgccggcgtcgggtcggtgtgctcgggcgcggctgccgggatggagggcatggctgggcgcgtgctgtgtgctggcatggcagcggtcaccggcgccttggcggagttcgcggcggcgtctggcgacagctatgacgccgctgtcgcagctgtcgtcgccgcggcgcgtgcgccggagcgcgggaaagaggacggcgtgggacaagtgccggaacgctaggaaagtgctgcggcggttgctttgttggttgaccggcccccgtgacgtagagtggctctgctcaccttgtgatgacgatgggtagggtaggagatggaattaagcatgcagctacgtatgtagtcttgtgattgataagaatgctattacaaggctatctaattttgctagcgactgcttattatagtgtggtggtcctagaccgacaaatctaagcaatagcaacaattggttgtttgtgatacaagcacaagcgaatgggatggagtttgtttatgagagcaagaaccgctacgcgcggctacggggaaactatccgatacgaggaagacgaaggcttaccggtggcttcaaatgcggcttttcc

SEQ ID NO: 43132 - DNA, 3353 bp, Zea Mays
ccacattcctcgtgcctctccccgcgactccgccgtctacctctctctcgacactgtcactctcttcactcacttgtgctgctgctgccatcgtcgtcgatctcttgctccataaaaatcgtagtgttatatattaatatacaagaaatactctccccgtttacaccctttctctctcatcgccgctgatttctcctcccctctgaaagccttttgaccgttgcagtctctctctccctctgtccttccgttcccggccactcctctctccctctcttctctctctctgcagactgcacaaagccgccttcgtcttccactcgttcttgtttacacacacagcacagcacagcacagcagcctcccgggaaagagaaggcagttccctcactgtctctcaggattgtggtccaggtcatctccccgttcgctggcttcagcagcagagctcttgctggcaaacaagtgatctttctacagttttagaagggcaggcctttgacactgggtttgctctcttctcatgttcgaagctcggagattatgacacaagcatgactggtccttgaaaactatacacggctttggagagatgggatgtgctgcttccaggttagaagatgaggaagccatcaagatgtgccgggacagaagggacttcatcaagcaggcactggagcagcgcaaccgatttgcatcttctcacattgcttacatcgagtccctgaagcgtgtttcaatggctctccaacggtttgttgctggagatgaccaccatgagctcatcttcgatacattcatctcccctgtcaagcaacagaagccagagacgctcagcctgccttatggttcatatgagaagagaaccattcatgtctcgagatacttgaggtcagggcctaacccatcagtgtcagttgaggagcacccacgaccggtggaaacagtccgtgttgagtcacattaccctatggacaatcacagtggcatggataggttcttacaatcgcactcctcaccggtggtatcgtcttcatactacccaccaccttataccaggccaagctacccatctccatcgtcccaggaaccagttatgaatacttctacctattacatgccttatgacaggccaagatatgcacctccatcaccccaggaggcaatgaggacttcttattatgcatcttatgacaggccaagctaccgaccaccatcatcccaggagccaccgaggaattcttatcatgtgccatatgacaggccaagcttcccacctccatcaccccaggagcaggaatcatcaccatgggactccttctggaacccattctcatcgctggacagctttggatatccccgccctcggagtagctatgacaacgtgaccaatgacgatgaactcgcgaggttacagcgggtacgagaggaggaaggaatcccagaacttgaagaggaagacgatgagtgtcaagagcatgtacaaatgcatagaaaagaagaacaagaagatcatgataatgcggatgatgatgatgaagacgatgaggaagatgacgatgacgaatgtgagcattcagatgagtatatggtttctgacgagggcacttgctctgtcaattttgatgctaatatgaagcaagaaacaaagggatttgaatccaaaggtattcagtgtactgaagcaccagaacctcgcaagacagtagaacttgagttaaaggcacacaagaaagaactgatgagaaacagagtagcaaatgcagaagaaactcctggtttcacagtatatctgaatcgaagaccagcaagcttggttgaggccatgaaggatatcgactgtcagttctcgggaatatgtgacgctgctcgggaaatctcagtaatgttggaggcaagtagagctcagtactcagcctcaaacgatctttctgcgaagatgctgaatccggttgcacttttgcgctctgtgtcgtcgcgttcatcgtcttctcgtttccttcttgctccctctagctcaatagatgatctctttgacaatgagactagcagctgttactctgaagaatcttgtagtaccatgtctggaagtcaccactctaccttagatagactctatacatgggagaagaaactgtacaaggaagtaaaggctggtgagcggttaagaatcgagtacgagaagaggttgacacatttgaggaaccaagatgtcaaaggcgaagaaccttcctctgttgataagacttgtgcagcattaagaagcttgcatactcggctgaaggtgtcaatacagacagttcagtcaatatcaacgaggattgaaattctaagggatgaggagctgcatcatcagcttatggagctgattcaagggctatcacggatgtggcgggccatggctgaacgccacaaagcccagaagcgcaccatcgaggacgccaagcttctcttcctccagcaccacccctcggccgccaccgccatctcccttggcccgctagaggctgcaggtcccccaccggctgccttggaattggagtccgagatccaggcgtggcgaggagcgctggaggcctggctgttcgcgcagcgcgcctacgcgcgcgcgctggccgcgtgggcgcgacggtgcctcggcatcagcaccgcggcgcggccaagtagccacgcgctgccgccggcgttcctggcgtgcatggagtgggggcgcgcggtcgacgcggccactgaggcgcgggtgatggacggtctggacttcttcgtcgccggcgtcgggtcggtgtgctcgggcgcggctgccgggatggagggcatggctgggcgcgtgctgtgtgctggcatggcagcggtcaccggcgccttggcggagttcgcggcggcgtctggcgacagctatgacgccgctgtcgcagctgtcgtcgccgcggcgcgtgcgccggagcgcgggaaagaggacggcgtgggacaagtgccggaacgctaggaaagtgctgcggcggttgctttgttggttgaccggcccccgtgacgtagagtggctctgctcaccttgtgatgacgatgggtagggtaggagatggaattaagcatgcagctacgtatgtagtcttgtgattgataagaatgctattacaaggctatctaattttgctagcgactgcttattatagtgtggtggtcctagaccgacaaatctaagcaatagcaacaattggttgtttgtgatacaagcacaagcgaatgggatggagtttgtttatgagagcaagaaccgctacgcgcggctacggggaaactatccgatacgaggaagacgaaggcttaccggtggcttcaaatgcggcttttcc

SEQ ID NO: 43133 - DNA, 2292 bp, Zea Mays
ctctgtgcttccatctttgacctcccgctaatcacaaccaccgccattaaccacagcctaaagcaggcggttgctccccccgcttaaaccctcgaaagattggattgcactatttgcagggactggctggattccagcatccagctcccgcacggccacaccgacgaggcgaacgggccagagtcggcgatcggcgtgtctccactctacaggcgacgacgaaaccagcagcctcagcgccgaccactccgggagcggggcctcacaccctcaggatcaacgggagatgccggtcgccgccgcctcaccctcgcactcgtgaactggcttcctctgcgacgagccggggcgggctcggattcggcggatcttgtgggtgcgtggcgtcgggctggtccggtgctagattgatcccgcattcgagctgcggcaagcgtctgggtagtcgcttctcccgaggtatttcggccgccgagcacggcacggcgcggcgcgagtccgcgatttcttagggtttgttttagatgtccatttcaggggcgtcacctccggcgcgctccccgtcttttatccgtccgctccctgatacctgtgctgtttgcagggaaaggaaaacaaagttgcttggccgactttgggatcaaggatcggcgaaaagaaagagaaaggagggatctttttgggaggttctgtttgagctttcagggtttatatcgtagccttgggcaactccgtgctgatggatttcttcaagattaagaagttcaggaaggggaataagagcgcccggggcgggggagaggtaatagaatccgacgacgacgccagcgctgggaatgtgacccctcggggcctggtggagcagaagcctggcatcggggaggggaacaatgccgaggtggcggtggatggtggaggcgcgggcaatggggtggttgaagaagaggaggacgacgacgatgatttcatcacgaatgaggtgaagcggaggctcaaggagctcaggaagaacagcttcatggtgctcatccccgaggacgagtgcgccgaggtcgaggaggatggcgacgaggaggaagggggcagccccacggagtggctggagtcgggtgtcggtgacggcttcccgctgtgtgggttggattcactgtatgataagtactgcgagagtatgctggtgtttcataagatgatcgcacagctcatgaaggatccagagtcactgaacatgtccaaaaagtctccaagatcagcatcaaaattggcgtctaccctgcgcaacctctcattcaaaagaaaagatgagctcccggaggattgtgaacaacttcaacaacagcaaagcggatatgatccttaccagacacttgagactgcatatgttgctcatattgcattaagctgggaggctctgcattgcacctatgtgcacctgagccttatcgttgcagcacaacctgataatcctacaacctataattctgctgctcaagcattccagcaattccaggtcctgctgcagagattcattgaaaatgagccatttgagcatggtacccgtgttgagatatatgcacggtctcggagcttgttgtcaaagttgcttcaggtccccacttttcaaggacaagagaaagggtggtgtccttatgagtgctcatggccacactggaagctcgatccaacaggtgcagtcttcgctcgataagaaagaggcgaaggtgaaggagctgctgaagaagaggaaagggtggaagagcaagacctggccaggcacagtggaggaggtgcagctgctgctcgccctgatcgatgtcaaggtcgtgtcgcgggtgctccgggtggggaagctgagcagggagcagctgctgtggtgcgaggagaagctgagcaaggtgggcctcacggagaaccggctgcgccgcgacgggtccccgatcctcttcccctgttgaccgacgcagcatgtcatgccgcgccagagatctcccttgccattcacttcgtttaccttctgagatatgtacatgccttcaggttgaattgaggatgcacataccaaaccaaagtagggcttacacatgtgttgctgcacgctgatcactgagtttagtttatacagtgcagcatggggcaacatgcttcgtttcacttcaccggaagcatatggtttcttaaaccctcgtgtaatctgtgttgaacaaggaggatgcagtgcagcacatgcagtatgcagaggctgccgtgctgcgttggttggttggttggttgcaccgaactttttttttgttc

SEQ ID NO: 43134 - DNA, 2153 bp, Zea Mays
gctctctgtgcttccatctttgacctcccgctaatcacaaccaccgccattaaccacagcctaaagcaggcggttgctccccccgcttaaaccctcgaaagattggattgcactatttgcagggactggctggattccagcatccagctcccgcacggccacaccgacgaggcgaacgggccagagtcggcgatcggcgtgtctccactctacaggcgacgacgaaaccagcagcctcagcgccgaccactccgggagcggggcctcacaccctcaggatcaacgggagatgccggtcgccgccgcctcaccctcgcactcgtgaactggcttcctctgcgacgagccggggcgggctcggattcggcggatcttgtgggtgcgtggcgtcgggctggtccggtgctagattgatcccgcattcgagctgcggcaagcgtctgggtagtcgcttctcccgagggaaaggaaaacaaagttgcttggccgactttgggatcaaggatcggcgaaaagaaagagaaaggagggatctttttgggaggttctgtttgagctttcagggtttatatcgtagccttgggcaactccgtgctgatggatttcttcaagattaagaagttcaggaaggggaataagagcgcccggggcgggggagaggtaatagaatccgacgacgacgccagcgctgggaatgtgacccctcggggcctggtggagcagaagcctggcatcggggaggggaacaatgccgaggtggcggtggatggtggaggcgcgggcaatggggtggttgaagaagaggaggacgacgacgatgatttcatcacgaatgaggtgaagcggaggctcaaggagctcaggaagaacagcttcatggtgctcatccccgaggacgagtgcgccgaggtcgaggaggatggcgacgaggaggaagggggcagccccacggagtggctggagtcgggtgtcggtgacggcttcccgctgtgtgggttggattcactgtatgataagtactgcgagagtatgctggtgtttcataagatgatcgcacagctcatgaaggatccagagtcactgaacatgtccaaaaagtctccaagatcagcatcaaaattggcgtctaccctgcgcaacctctcattcaaaagaaaagatgagctcccggaggattgtgaacaacttcaacaacagcaaagcggatatgatccttaccagacacttgagactgcatatgttgctcatattgcattaagctgggaggctctgcattgcacctatgtgcacctgagccttatcgttgcagcacaacctgataatcctacaacctataattctgctgctcaagcattccagcaattccaggtcctgctgcagagattcattgaaaatgagccatttgagcatggtacccgtgttgagatatatgcacggtctcggagcttgttgtcaaagttgcttcaggtccccacttttcaagaaggacaagagaaagggtggtgtccttatgagtgctcatggccacactggaagctcgatccaacaggtgcagtcttcgctcgataagaaagaggcgaaggtgaaggagctgctgaagaagaggaaagggtggaagagcaagacctggccaggcacagtggaggaggtgcagctgctgctcgccctgatcgatgtcaaggtcgtgtcgcgggtgctccgggtggggaagctgagcagggagcagctgctgtggtgcgaggagaagctgagcaaggtgggcctcacggagaaccggctgcgccgcgacgggtccccgatcctcttcccctgttgaccgacgcagcatgtcatgccgcgccagagatctcccttgccattcacttcgtttaccttctgagatatgtacatgccttcaggttgaattgaggatgcacataccaaaccaaagtagggcttacacatgtgttgctgcacgctgatcactgagtttagtttatacagtgcagcatggggcaacatgcttcgtttcacttcaccggaagcatatggtttcttaaaccctcgtgtaatctgtgttgaacaaggaggatgcagtgcagcacatgcagtatgcagaggctgccgtgctgcgttggttggttggttggttgcaccgaactttttttttgttc

SEQ ID NO: 43135 - DNA, 2205 bp, Zea Mays
tcacaagccacagtccacatgctctctgtgcttccatctttgacctcccgctaatcacaaccaccgccattaaccacagcctaaagcaggcggttgctccccccgcttaaaccctcgaaagattggattgcactatttgcagggactggctggattccagcatccagctcccgcacggccacaccgacgaggcgaacgggccagagtcggcgatcggcgtgtctccactctacaggcgacgacgaaaccagcagcctcagcgccgaccactccgggagcggggcctcacaccctcaggatcaacgggagatgccggtcgccgccgcctcaccctcgcactcgtgaactggcttcctctgcgacgagccggggcgggctcggattcggcggatcttgtgggtgcgtggcgtcgggctggtccggtgctagattgatcccgcattcgagctgcggcaagcgtctgggtagtcgcttctcccgagggaaaggaaaacaaagttgcttggccgactttgggatcaaggatcggcgaaaagaaagagaaaggagggatctttttgggaggttctgtttgagctttcagggtttatatcgtagccttgggcaactccgtgctgatggatttcttcaagattaagaagttcaggaaggggaataagagcgcccggggcgggggagaggtaatagaatccgacgacgacgccagcgctgggaatgtgacccctcggggcctggtggagcagaagcctggcatcggggaggggaacaatgccgaggtggcggtggatggtggaggcgcgggcaatggggtggttgaagaagaggaggacgacgacgatgatttcatcacgaatgaggtgaagcggaggctcaaggagctcaggaagaacagcttcatggtgctcatccccgaggacgagtgcgccgaggtcgaggaggatggcgacgaggaggaagggggcagccccacggagtggctggagtcgggtgtcggtgacggcttcccgctgtgtgggttggattcactgtatgataagtactgcgagagtatgctggtgtttcataagatgatcgcacagctcatgaaggatccagagtcactgaacatgtccaaaaagtctccaagatcagcatcaaaattggcgtctaccctgcgcaacctctcattcaaaagaaaagatgagctcccggaggattgtgaacaacttcaacaacagcaaagcggatatgatccttaccagacacttgagactgcatatgttgctcatattgcattaagctgggaggctctgcattgcacctatgtgcacctgagccttatcgttgcagcacaacctgataatcctacaacctataattctgctgctcaagcattccagcaattccaggtcctgctgcagagattcattgaaaatgagccatttgagcatggtacccgtgttgagatatatgcacggtctcggagcttgttgtcaaagttgcttcaggtccccacttttcaagtcgtagataggaaagacaacaccgacgatcagatggagccagcgatttcggcgcacgacctcatcaaactgttagaggaatctatcctaactttccgccttttcctgaagaaggacaagagaaagggtggtgtccttatgagtgctcatggccacactggaagctcgatccaacaggtgcagtcttcgctcgataagaaagaggcgaaggtgaaggagctgctgaagaagaggaaagggtggaagagcaagacctggccaggcacagtggaggagctgctgtggtgcgaggagaagctgagcaaggtgggcctcacggagaaccggctgcgccgcgacgggtccccgatcctcttcccctgttgaccgacgcagcatgtcatgccgcgccagagatctcccttgccattcacttcgtttaccttctgagatatgtacatgccttcaggttgaattgaggatgcacataccaaaccaaagtagggcttacacatgtgttgctgcacgctgatcactgagtttagtttatacagtgcagcatggggcaacatgcttcgtttcacttcaccggaagcatatggtttcttaaaccctcgtgtaatctgtgttgaacaaggaggatgcagtgcagcacatgcagtatgcagaggctgccgtgctgcgttggttggttggttggttgcaccgaactttttttttgttc

SEQ ID NO: 43136 - DNA, 1922 bp, Zea Mays
ggcgggcccacgcggcagcgagcgacagagacgagaccggctacctcatccacccccaccaggtgcactgcactgcacacctcgctcgccgccggtcggtcgtctccttctctctctctctccgtccgactatacaatacaattccactgcgtggcagggtccagctccttatcctgtccccctcgcccctttcccttccccgcccgtctcctccccctccctgcctctccgcccacccacccactgacccacccacccatctcgctcgcgcgcgccgggatttctcgccttcgctcaatcgctccgcggctctcctcctgcgcgccggccggtcgatccgggcgccggggcccgaggtgcgccgcggcggaggctctgccgggccggattcgctgatcggtcggttggtaggttcggttgttaggtaggtaggtaggttggttggtcgcgggcatgtccacggcggtggcgcggccggcgcacggcggcttccggcagtcggggagcgggaagccggatccggaggacgcggacaggatgagggacgccaacgggtacttggtccaagaacgtgagaaggaagaggaagagcgtggcggtgaggcggcggcggcggggagggaggaagaggcgctgtcggaggcctcgtcgatcggcgcggcgtcgtccgacagctcctccatcggcgagaactccgcgtccgacaaggagggcagcgacggggaggaggaggaggtggaaggcaaggcgcaggggctcggcatgatggggctggccacgctccagtccttggacgatgccctgcccaccaagcggggcctgtccaacttctacgcgggcaagtccaagtcgttcacgagcctggcggaggcggctgcgacggcggccgccaaggagatcgcgaagccggagaacccgttcaacaagcggcggcgcgtgctgcgggcgtggtcgcggcggcgggcgtcgtgcagcgcgctggccaccgcgtacctgccgccgctgctggccccggaccacgcggtggtggaggaggacgacgaggagggcgcggacgacgaggacgaggacgagggccagcacgggcgcggcgggctcaggggcaggaggccgcccacgttcccgtccccgcggctgagcgcgcacgccaccgccggccagatggcgagggccgggtcgtttcggtccccgaggtccttctccatgacggacctccacagcgcggagtacgagtaggcagcgacagacagcagccacgattagagccagagcacctctggtctgtctccttcctcctctaggcgccagaagagcaccaggattcaggtttcagggcttcgcgcaaagccagtggcagcatgccagcatgggatggatcatggatgccgaaaagaagaaagcgaggaggaatgggatgggtcatgcatgcatgccgaaaataatgttcaggagatgctggcgatgttgtgtttgcgttgctcctcttgcctctgcacctgctgctggtgactcgcgggagcagacaaacggtgggtgatgatgagtcctacgccgccggcctaatcccatcgaagacaaccctaatctaagcatgacattatcgacagcggcagggttcgtggagaaggcagcgacaaatccaagcatacagcacgagaagaaaaaaaaaagatcttttctcacaagtagggctgacaatgggctataaattttgcactataagatttaagtatcgaagcgggttaggatcagactctatttatagtcatttttgaactataatttatttaaggctttgacattttacgaagaactatttggatcacgatccattaccactcctactcacaaggcagccgtagcatagcagtggccagtgggtaggtctggtggcacagtccatggttgacttgtttgcaat

SEQ ID NO: 43137 - DNA, 1093 bp, Zea Mays
cagacatcgacgacgacgacaggacaggctatacttttaccacatctgctgggttcttgatcgagctacggcggcctatacggatgaacaagaagaagcggcggcggcggcggcagcagcagggtgggaggcctgtgctggtgacgttctacgtgacacagccaagggaccgcggcggctccacggcgtcgtcgtcgtcgcatcaccaccaccacaacaggcaggagcgtcacgatgaccaccaccgtcgctcgcatggcggtagtggtggtcgtcctggcatgcagcggcggcgacggaacgacggcaaagcccagagcggtgaccggcgggcggacctgctcgagtactcgcggcagctgagggcgttggcgcggcagacggcgtcggcgaccacgcctgtaagctccataccaccgccgccgccgccgcgttgtcgggacacggacacaatcatggccgctgttggtgttcatagcgaagagcagcagggagctccagctgtgaatcatcggctggggcgcgcgatgagccagcagcagcaggtccgcccgcgttgcttcggtggtgacggctggagctggaagaaggtgctcgtgctcgtcctcccttcccacagcgagagcaggcgtccaagaaggagcaaccgtgatgacagcgaaaagaacgtcaagatcaatcagacgggccgggcggctgcgtcgtcgttgctggtcggcaagctgacggtttgcaagggcagacgagaccgtagcgggttactgaagccgctcatgtccttgtttcagaagcggccacgatagattgtcgaagaggtgtactgtggcgagcgcggcgagcgagccttctagacaccatggattcttgagcacaaacatgatatcaacatgagaattaataaggttccaggggcgtcccgtcgttttaggagaccctgtgcaaaacataaaaaaaatatggagtaactttaatttgtgtatatatgtacacatgatataatgaaaattaaatattgtatcgattatgtaatctttatttagaacgcattatttttttggtgttctttaaaataaaatcgtcgatgatattttta

SEQ ID NO: 43138 - DNA, 1092 bp, Zea Mays
ccgcgaaacattatccagtgcagagcgtacatattccgctgcgtctagcgaggtagcagacatcgacgacgacgacaggacaggctatacttttaccacatctgctgggttcttgatcgagctacggcggcctatacggatgaacaagaagaagcggcggcggcggcggcagcagcagggtgggaggcctgtgctggtgacgttctacgtgacacagccaagggaccgcggcggctccacggcgtcgtcgtcgtcgcatcaccaccaccacaacaggcaggagcgtcacgatgaccaccaccgtcgctcgcatggcggtagtggtggtcgtcctggcatgcagcggcggcgacggaacgacggcaaagcccagagcggtgaccggcgggcggacctgctcgagtactcgcggcagctgagggcgttggcgcggcagacggcgtcggcgaccacgcctgccgctgttggtgttcatagcgaagagcagcagggagctccagctgtgaatcatcggctggggcgcgcgatgagccagcagcagcaggtccgcccgcgttgcttcggtggtgacggctggagctggaagaaggtgctcgtgctcgtcctcccttcccacagcgagagcaggcgtccaagaaggagcaaccgtgatgacagcgaaaagaacgtcaagatcaatcagacgggccgggcggctgcgtcgtcgttgctggtcggcaagctgacggtttgcaagggcagacgagaccgtagcgggttactgaagccgctcatgtccttgtttcagaagcggccacgatagattgtcgaagaggtgtactgtggcgagcgcggcgagcgagccttctagacaccatggattcttgagcacaaacatgatatcaacatgagaattaataaggttccaggggcgtcccgtcgttttaggagaccctgtgcaaaacataaaaaaaatatggagtaactttaatttgtgtatatatgtacacatgatataatgaaaattaaatattgtatcgattatgtaatctttatttagaacgcattatttttttggtgttctttaaaataaaatcgtcgatgatattttta

SEQ ID NO: 43139 - DNA, 770 bp, Zea Mays
cggtcgtcctcatcccatctccatcgaactccatccccacgcacgcctccttggacaccatccccgcgaggtccatccccacacacgtctcctccaccgccatctccgcgagcacctccgcctccttcccgcatgctccttttgatctcgacaaggtttgcgcggggtaggcaaaaccgcctagcaccagtcgagccctcccccctcctcctgcgagtcgcggcaacccacgagcgtgtctatccatcgactttctgtcagaaaaggccactcgcggtttgtcgtgcacgccgcgtccagtgccgcctgtggaatggtccgttgctggtgctacttgctcatggagttatggtggtaggcgtaggccacttcgtctgcctcctggatttctcactgctgcatcggctccgaaagcaaattagacaactatagttctgttatggtgattgtagtacagtttcagctctaacctatggaaaattgaatggcagttgcactaatctgttggtggaatgattttcccagtaatttcctgggcaagcagatggctgagaaccatctaccttatgagaaatgatgccttgtatggttcagtatagttcttgtattgcttgtttgaattaattcctgtatggcagttgcactaaactgaatggcagttgcactttgagatattcttctattgctggtttaaaaccatggtgactgttcttgtatgcattctgtatgaattcttgtttaaaacctggttgcttctatatgcattcttg

SEQ ID NO: 43140 - DNA, 724 bp, Zea Mays
ccaggcgattctcccggtcgtcctcatcccatctccatcgaactccatccccacgcacgcctccttggacaccatccccgcgaggtccatccccacacacgtctcctccaccgccatctccgcgagcacctccgcctccttcccgcatgctccttttgatctcgacaaggtttgcgcggggtaggcaaaaccgcctagcaccagtcgagccctcccccctcctcctgcgagtcgcggcaacccacgagcgtgtctatccatcgactttctgtcagaaaaggccactcgcggtttgtcgtgcacgccgcgtccagatatcatagtgccgcctgtggaatggtccgttgctggtgctacttgctcatggagttatggtggtaggcgtaggccacttcgtctgcctcctggatttctcactgctgcatcggctccgaaagcaaattagttgcactaatctgttggtggaatgattttcccagtaatttcctgggcaagcagatggctgagaaccatctaccttatgagaaatgatgccttgtatggttcagtatagttcttgtattgcttgtttgaattaattcctgtatggcagttgcactaaactgaatggcagttgcactttgagatattcttctattgctggtttaaaaccatggtgactgttcttgtatgcattctgtatgaattcttgtttaaaacctggttgcttctatatgcattcttg

SEQ ID NO: 43141 - DNA, 602 bp, Zea Mays
ccaggcgattctcccggtcgtcctcatcccatctccatcgaactccatccccacgcacgcctccttggacaccatccccgcgaggtccatccccacacacgtctcctccaccgccatctccgcgagcacctccgcctccttcccgcatgctccttttgatctcgacaaggtttgcgcggggtaggcaaaaccgcctagcaccagtcgagccctcccccctcctcctgcgagtcgcggcaacccacgagcgtgtctatccatcgactttctgtcagaaaaggccactcgcggtttgtcgtgcacgccgcgtccaggttggaatgttgcactaatctgttggtggaatgattttcccagtaatttcctgggcaagcagatggctgagaaccatctaccttatgagaaatgatgccttgtatggttcagtatagttcttgtattgcttgtttgaattaattcctgtatggcagttgcactaaactgaatggcagttgcactttgagatattcttctattgctggtttaaaaccatggtgactgttcttgtatgcattctgtatgaattcttgtttaaaacctggttgcttctatatgcattcttg

SEQ ID NO: 43142 - DNA, 821 bp, Zea Mays
caaccctggccttgggaggccaggcgattctcccggtcgtcctcatcccatctccatcgaactccatccccacgcacgcctccttggacaccatccccgcgaggtccatccccacacacgtctcctccaccgccatctccgcgagcacctccgcctccttcccgcatgctccttttgatctcgacaaggtttgcgcggggtaggcaaaaccgcctagcaccagtcgagccctcccccctcctcctgcgagtcgcggcaacccacgagcgtgtctatccatcgactttctgtcagaaaaggccactcgcggtttgtcgtgcacgccgcgtccaggttggaatgatatcatagtgccgcctgtggaatggtccgttgctggtgctacttgctcatggagttatggtggtaggcgtaggccacttcgtctgcctcctggatttctcactgctgcatcggctccgaaagcaaattagacaactatagttctgttatggtgattgtagtacagtttcagctctaacctatggaaaattgaatggcagttgcactaatctgttggtggaatgattttcccagtaatttcctgggcaagcagatggctgagaaccatctaccttatgagaaatgatgccttgtatggttcagtatagttcttgtattgcttgtttgaattaattcctgtatggcagttgcactaaactgaatggcagttgcactttgagatattcttctattgctggtttaaaaccatggtgactgttcttgtatgcattctgtatgaattcttgtttaaaacctggttgcttctatatgcattcttg

SEQ ID NO: 43143 - DNA, 690 bp, Zea Mays
caaccctggccttgggaggccaggcgattctcccggtcgtcctcatcccatctccatcgaactccatccccacgcacgcctccttggacaccatccccgcgaggtccatccccacacacgtctcctccaccgccatctccgcgagcacctccgcctccttcccgcatgctccttttgatctcgacaaggtttgcgcggggtaggcaaaaccgcctagcaccagtcgagccctcccccctcctcctgcgagtcgcggcaacccacgagcgtgtctatccatcgactttctgtcagaaaaggccactcgcggtttgtcgtgcacgccgcgtccaggttggaatgacaactatagttctgttatggtgattgtagtacagtttcagctctaacctatggaaaattgaatggcagttgcactaatctgttggtggaatgattttcccagtaatttcctgggcaagcagatggctgagaaccatctaccttatgagaaatgatgccttgtatggttcagtatagttcttgtattgcttgtttgaattaattcctgtatggcagttgcactaaactgaatggcagttgcactttgagatattcttctattgctggtttaaaaccatggtgactgttcttgtatgcattctgtatgaattcttgtttaaaacctggttgcttctatatgcattcttg

SEQ ID NO: 43144 - DNA, 997 bp, Zea Mays
ctaaactttagcaggggcaaccaaacacccccttagtcctagtccgtacggcaggcagcgtttgctgaccgtgtgacagactgacagtacatcaggctcctgtcttcctcacccacgcacgggatcctgaacgccgtgagctggggcctcctgctgcccatgggcgccaccttcgctcggtacctcaagacgttcaggtccgccgacccggcctggttctacctccacgtggcgtgccagctggccgggtacggcgtcggggtgtccggctgggccaccggcatccacctcgggaacctgtccaaggggatcacctactcgctccaccggaacatcgggatcacggtcttcgccctcggcactctgcaggtctttgcgctgttcttgaggccgaagaaggagcacaagtaccgggtgtactggaacgcgtaccaccactcggtggggtacacggtgatcgtgctgggcgtcgtcaacgtcttcaagggcatggccatcctggacgtggagcggaggtggaggacgggctacgtcgccgccgtctccgtgctggccgccgtcgccgtggcgctggaggccgtcacgtggggcgtcgtgctgcggcgccggaagcaggaggaaaagacctccaacgccggccgcttgccgctgtctatgtaatatatatatatatacctcatcgtcgtcgtcgtcgggggcgtctcactatatatctatctgatctgatctgatcttcagagtagtaggccttacgatgggttgggttagctagctagtgtgtgtatcttcattgtatggtaggtgtctctgtgtgtgtgtgtatactgcacgttcgtatactggagatgagtgagtgtgataccggccggcggcattggtctttggctgttgcctttttgtttctgttcgttcgtgaatgctgatctgatcatgcacttgcgttctgggatcatgctattttggctgctgctccatctcgcaaagaggagaaaaaaaa

SEQ ID NO: 43145 - DNA, 1552 bp, Zea Mays
gtggagtctttcccctgcccttgaactcgagctcgtgtccatcgcgtgagaggaggagttctggttttcaggtctgagtaacccctttccatcaccaagtccggtctgccccggagctgtgtgccatctctgcagtttggtgaccacgcccagctgaccctccccctcaccgcggcccaggttcctcgagagctttctcagtcgtgtgggtcgcgccaccgcagatcggtaccatggacagcctcaccgtcgaccaaccagcgtgcttcttccctgagcattttcatgcgagccccgtaagctgtgtctgagtaacccctttccatcaccaagtccggtctgccccggagctgtgtgccatctctgcagtttggtgaccacgcccagctgaccctccccctcaccgtggcccaggttcctcgagagctttctcagtcgtgtgggtcgcgccaccgcagatcggtaccatggacagcctcaccgtcgaccgaccagcgtgcttcttccctgagcattttcatgcgagccccgtaagctgtaacacctagatgaagtggtgtctgaagaaggagttcacttcagtgcctgctgatccagtggcggagtttcctctaactgcttaccagagtagaagagttttagatcttctcctgcaataagtcaagccccggtgcatttgccaccttccttgtatttacaaaattttatcacttatatgatgcattaggtgataggggttgaatgattaaacacttgatgcattaccatttcttgaaagaaatgattaccataccttgtcacctgatttataaaagctagagatgcttaatcatgcagatagattagaaaaaaatgtttttgatctatgactcataatttccaaaagaaaattggcttgcgataatgaaggcatcatctgcagtgagaaattcattatccaggcatggcccctctgttaggcgccaaatattttgagaaatagtaaaagtaaacttgaggccgggcggttgacttgcactagaacggagtctggttgtagtgtctccgtctgtgtcgattaaggaccataccgattgttggcctgatgatctaggaccttttaactggccacatacctcgtcatgggtaagcctgaacccggctattccatacgtgaaatgacaaccgcgcactgggcgtgggagatggtgggagtagcagttatcctcctagcaagaggctggatggtagggtaatgtgctcccgggtagcgcggaccagttcatgtagtggaggatccgtgggaatggttgacatatgcaagggttaagtgctacatctgtcgtgtggttggagatccccagctgggtattaatcgattcggatcgtcgttacttctcggatatgaagactggatcgctgcccttcatcgtagataacaagtgaaacaaaaatttggattttaaaagcaacctagtgtaggtcaaatgaatgatctagattaggaaattgctagattcaggctagaagattcaggtaataaactaacttgtgaaataaagcttggcttaag

SEQ ID NO: 43146 - DNA, 8371 bp, Zea Mays
agaagattggcttcgaaccattgaacagaaattgggactcatccattgtgatgacgttcagaaaactcagtgtgcaacacaacaactccagtgtcaagctggggcctggtgggctgaataccttgtgttgcagccagagggacatcaaatttcttgggctgagttccgtgaggtatttcgaacgcattatattccgaaagccctgatggaaatcaaattcaatgagttcttagatttgaagcaaggcgaagaagagagtgtaatggaatattttgagaggttcactcgcctatcccagtatgtcttggattttgtaaataccaatgagaagaaaaagttctacttcctacgtggcctcaacaagaaacttcaaggcttgatggctaccagttcggctgaaagatataatgaggtggtcagtcaggctgtcttgggtgataacaagattcggcttcatcaggagtctaaaagaaagaagtttgcagaggaatcatctggtaaaatcaaacagtgtcggagggttgtttatcaacaaatttattatcctcgtttttctccaccccagctgcctagctcaccttagtcatgtgaaaaacagattgtcattcctttcattccacctgagccggatgtcccagacattcgttctaaatctatcttagacaacactaactcatgcgagaattgtggaaagtcaggacactctactcaagactgtcgtttccctaaatcagtggctaagccgcagtcgctgatcaggttacctcggtgtaaccgacaagatactagaaagaggagcagagctgtacctaggtggggacaggttaatcttactcatgcccatgctattctggagggtgctctagttatgatgagtgtatttcctgttgccaaccatcctgcggtgactctattcgattcaggcgcatcccataccttcatcaacagagcttttgttgtcaaacatcaactaccattggaaattggaaaagatactttttgtatacaatcccctggaggtcgtatctatagtaaggaaatggtggagagaatacccataagtttggagggatatattttccctactaacttaatcttttttaagaatcaggacattgatgtcatccttggtatgaattggttacgtcaacatagagttgttattgatacgttgcaacgaacagtgcaattggattcgcttgatggcaattctaagttgctaatctagttgccaactttgaaaagagcagttgaacaagtgtgtgctatcactgttaaagaggtgaaggatatacctgttgttagggagtttccagatgtattccccgaagatttgcctggtttgcctccagaaagggatgtagaatttgtgatcgaattgcagccaggtactgcacctatatctagaaggtcatacagaatgccacctaaggaattagcagaactaaagactcaattgcaggacttgctcaacaaaggattcattcgcccaagttcatcaccttggggttgtcctgctatttttgtgaaaaagaaggatcaaacactccagttatgtgttgattaccgaccacttaacgaggtgaccattaagaacaaatatcctctccctcgtatcgatttgttatttgatcaactttctggagctaaagtgttctctaagattgatcttagatcaggttatcaccagataagaattcgacctgaagatattcctaagactgctttcactactcgatatggtctctatgaatatttggtgatgtcttttggtttgaccaatgctccagctcatttcatgtacttgatgaactcagtgttcatgcccgaacttgacaagttcgtggtggtatttattgatgacatcttgatacactccaagaccaaagaagaacatgcagagcacttgcgtgtcattttaacgcggctaagggaacaccaactatatgccaagttcaacaaatgtgaattttggttggacataattccattcttgggtcatatcttgtctgccgaaggtgttgcggtcgacccaagtaaagtcaaggacattttggaatggaaaccacccactacggtacaccaagttcgaagtttcattggaatggcggggtattaccgtcgttttattccagatttctccaagatagctaagcctattactgagttgctcaagaatcatatcaaatttgtgtggtcatctgagtgcaacaaagcttttgaagaactaaaaaagttgttgactaccgcaccagtattggcgcagcctgatattgagaaatcctttgatgtttattgtgatgcttcgggcattggcatagggtgtgtacttatgcaagaaggccgtgtgattgcttatgcatcacgacaactcaagcgtcatgaagagcattacccaacccatgatcttgaattagctgctgttgttcatgcacttaagatttggcgccattatttgctgggtaatacgtgtcacatatatactgaccataaaagtctaaagtacatttttacacagtctgaactgaatatgaggcaaagaagatggcttgagttgatcaaagactatgatttagaagttcactaccatcctggcaaagctaatgtcgtggcagatgctctaagccggaagcctcaatgtaattgtctttcggtgaggcctttaactgtcaacctatgtcaggaaatggaaaggttgaatttgggggtaattcagcatggaaccttaaccaatcttgttcttgaatcaactatccaaagccaaattattgatgctcaaaaggtgaataagggtatagctcatatcaaggaacgagttgaagcaggaaaagctacatgttttagaattgatgaagatggtgttctttggttccaaaaccgtttggtagttccaaaggtacctgaattgcgtcaacaaatactggacgaagctcatttgtctcggtattccattcacccaggaagcaataagatgtatcaagatctgaagcaaaggttttggtggactaagatgaaaatagaaattgctcggtatgtggctaagtgtgacatttgtcaacgagtgaaagccgtccatttgaaatctgccgggccattacaacctttacccattccgacctggaagtgggaagatatcagtatggacttcattgttggtttacccaaaacctcacgagggtacgattctatctgggtaattgtggatcgtctcaccaagttagctcatttcctgcctgtgaacaaaagcaattcggtgcttgcatatgctaagttgtatattgctcgcatcctaagtctacatggtgtacccaagaccatcgtgtcggatcggggtccacaatttattgccaagttttggacagagttgcacaaatcattgggtaccaagttaattcacagttcagcttatcatccgcagactagtggtcaaactgagcgggtgaatcaaatcttggaagatatgttaagagcttgtgtgcttgcttattcggttaaatgggatgaatgtttgcctttggctgagttttcatataataatagttatcaggaaagcataaagatggcaccttttgaggctctttatggtcgaaggtgtagaacaccgttaaattggtcagaaccaggagagaaatacttctttgggcctgatcttgtaaaagaagcggaagaaaaggttcaagtgatccaacgaaatttgcgggtgacacaatctcgtcaaaagagttatgctgataagagacgtcgatccttgattttccacgttggtgatcatgtatatttaagagtgtcaccgatgaagggcgtgactcgatttggtgtcaaaggaaagcttgcgccccgctatgttggtccatttcaagtgcttgaacggttggacttgtggcttataaggtgcaattgccacagaatcttccaaaagtgcataatgtgtttcacgtatcccagttgaagaaatgccttcgagtcccagagcaagtagttgaggtttcagatgttaaccttgaacccgatctaacttactctgaatatcctattcgaattctggatcaaaaagatcggatcacacgaagaaagattatcaagttctacaaagtacaatggaaccaacactccacagatgaggctacatgggaatcagaagactatctaatggagcattttcctcagcttttagattcctgtaaatcttaggccctgtgcattttgtctttgatgtaaacccacaggggcacacccctgtcttgtaagaacaaatgtggaataagatcgtgacgcatttctttttttccattacggatctaagaattttaatctcgggacgagattcctttttaggggggaaggttgtaacatccctggtgttacgagaactaaaacattgacatgacatcatatgcatcagcatcattttgcttgatacacctagaatgcattttagtaggtccaaaatctcaaatgaaacactaaagtagccaaaaagtggaattttaaatctagaaagaatttgctaggagaccatataccaaagttatagagttttcagaaccagacaactttcatgtgttgatattttcaagttttgaagaaaaatttggagtagttgcagaattcagatttggttcagtttttggttcggctcaaaacagctttgtttacctgtttttggacccctgcagtttctaatccatgtgagttttgagaaaggttgctgtagaaaacttgtagagtagttataggagacccacttttattgagtatgttagccctaaaaccacatgcaactatgtgaaaaattggtcaaaagatgggctgacaggtttggatttcagacttggtgtaattattcaagtctgaatttcagtgtgtctggctcaactttggagctttgtggtgattgatctatatggttttggactgcaattcctgtagcaagtttgaagaccatatgttggtgtgcaagtttggtcaaaggtcatacccctaaagctacttggaacttggagaaaaggtggtccaaattggagctgttagacttgtgatttctggactttgattcagaaattgaagtgcagtttcagcatttttagcaaactttagatctctgttgtgacaaacttctgatgttatggcctgcactatccagagcaaagtgttagagggtaatgtggttagtaattttaatccaggtggatccccctgaacttgcctagaaatgggagaaaatggtgtccaaaaacatgttgtcagactccagatttcagacttagttcaattgactgaaactgaattttagtgggttttgctcaactttggagtcctgtagcatttaatccctgagcttttagttataaatcattatagaaatattgtaaacctatcataggagtatatattttgttaagttactcaaccctaaagccctatggaactcagtgtaaaactggtctaaagcagggttgacatggttgcagatttcggacttagtgctgaattggcactgcagaactcatattttggagcaactttgggatctctttgtgactaatatatggagtatgaacgatggtttctatagtaaaatggaagaccatacaatagttaacaaggtttcttaaataaggttggcttggtactgcataaaaatttgagtaatagttgcttaagactgggatggtcagttacagaaactgaatttcaatcagtgcctgaaaactgaagttgcactgtttggtgtcagtttgggaacacttttgtgaccattccatcaagttttagactatgaattatatagcaaagttggagaccaagtattagtgaacaactttactaagaggtgcttagcttggtgctgcacaaagttgggagtaaatctgttccaaagtggttcctggcagcttctttcagttaactgaaaatgacatttagtgggataaaaggagagtgattcagttcactgaatctagaatcagatcgaagatgaagaaaagatctctttgccctactgtaatccacttttgtgctcaagccaggacgtgcatgagatggcaacaagggttctcgaagtccagttttgctgtagaaaatatcatgtcttggcttgtactcatttaatgcacccttatctatttaaattcttgtctgcaaaaataggacaaaatgggtgtttattctgaaattgtgaaacctgtgtggagttgtagttgtgtgacacgtgtggggacctatgcagtgctggcaccctggagaatactctccactgcttaatattgggctcacggatgtctgtccctggatgcagtcaccttagggcttagttttgtggagtctttcccctgcccttgaactcgagctcgtgtccatcgcgtgagaggaggagttctggttttcaggtctgagtaacccctttccatcaccaagtccggtctgccccggagctgtgtgccatctctgcagtttggtgaccacgcccagctgaccctccccctcaccgcggcccaggttcctcgagagctttctcagtcgtgtgggtcgcgccaccgcagatcggtaccatggacagcctcaccgtcgaccaaccagcgtgcttcttccctgagcattttcatgcgagccccgtaagctgtgtctgagtaacccctttccatcaccaagtccggtctgccccggagctgtgtgccatctctgcagtttggtgaccacgcccagctgaccctccccctcaccgtggcccaggttcctcgagagctttctcagtcgtgtgggtcgcgccaccgcagatcggtaccatggacagcctcaccgtcgaccgaccagcgtgcttcttccctgagcattttcatgcgagccccgtaagctgtgtatggcactgaagcttgttccctgagtaaaagtagatttaggatttttatagcagataccaaatttcaggggattaaaatatgctcttagaaggtctatttgattttagaaataaaagttttgttccaaaaattatgaaaatttttggggaaccttgtctttaccagctgagcacttggtccaagtttgaaattgtttggaagaaattttctcagcaaacagattgttgcccgaaaagaaaaaggattttacccttgggtaattaggaaatgaagctgcttaagaaagtttgagcttctggatgaagtttaagatgggttagttcctggtgaattattagttgatgatgtcttctagtgcccttggtaatcctctattgttttggctagttttatgcaccttgtattaaagtgtactcagaatgggttgtttgttacctttctttataaaatgcatttccgtacatagcaaacattcatctacatgtaattgacttgtagaacacctagatgaagtggtgtctgaagaaggagttcacttcagtgcctgctgatccagtggcggagtttcctctaactgcttaccagagtagaagagttttagatcttctcctgcaataagtcaagccccggtgcatttgccaccttccttgtatttacaaaattttatcacttatatgatgcattaggtgataggggttgaatgattaaacacttgatgcattaccatttcttgaaagaaatgattaccataccttgtcacctgatttataaaagctagagatgcttaatcatgcagatagattagaaaaaaatgtttttgatctatgactcataatttccaaaagaaaattggcttgcgataatgaaggcatcatctgcagtgagaaattcattatccaggcatggcccctctgttaggcgccaaatattttgagaaatagtaaaagtaaacttgaggccgggcggttgacttgcactagaacggagtctggttgtagtgtctccgtctgtgtcgattaaggaccataccgattgttggcctgatgatctaggaccttttaactggccacatacctcgtcatgggtaagcctgaacccggctattccatacgtgaaatgacaaccgcgcactgggcgtgggagatggtgggagtagcagttatcctcctagcaagaggctggatggtagggtaatgtgctcccgggtagcgcggaccagttcatgtagtggaggatccgtgggaatggttgacatatgcaagggttaagtgctacatctgtcgtgtggttggagatccccagctgggtattaatcgattcggatcgtcgttacttctcggatatgaagactggatcgctgcccttcatcgtagataacaagtgaaacaaaaatttggattttaaaagcaacctagtgtaggtcaaatgaatgatctagattaggaaattgctagattcaggctagaagattcaggtaataaactaacttgtgaaataaagcttggcttaag

SEQ ID NO: 43147 - DNA, 7502 bp, Zea Mays
agaagattggcttcgaaccattgaacagaaattgggactcatccattgtgatgacgttcagaaaactcagtgtgcaacacaacaactccagtgtcaagctggggcctggtgggctgaataccttgtgttgcagccagagggacatcaaatttcttgggctgagttccgtgaggtatttcgaacgcattatattccgaaagccctgatggaaatcaaattcaatgagttcttagatttgaagcaaggcgaagaagagagtgtaatggaatattttgagaggttcactcgcctatcccagtatgtcttggattttgtaaataccaatgagaagaaaaagttctacttcctacgtggcctcaacaagaaacttcaaggcttgatggctaccagttcggctgaaagatataatgaggtggtcagtcaggctgtcttgggtgataacaagattcggcttcatcaggagtctaaaagaaagaagtttgcagaggaatcatctggtaaaatcaaacagtgtcggagggttgtttatcaacaaatttattatcctcgtttttctccaccccagctgcctagctcaccttagtcatgtgaaaaacagattgtcattcctttcattccacctgagccggatgtcccagacattcgttctaaatctatcttagacaacactaactcatgcgagaattgtggaaagtcaggacactctactcaagactgtcgtttccctaaatcagtggctaagccgcagtcgctgatcaggttacctcggtgtaaccgacaagatactagaaagaggagcagagctgtacctaggtggggacaggttaatcttactcatgcccatgctattctggagggtgctctagttatgatgagtgtatttcctgttgccaaccatcctgcggtgactctattcgattcaggcgcatcccataccttcatcaacagagcttttgttgtcaaacatcaactaccattggaaattggaaaagatactttttgtatacaatcccctggaggtcgtatctatagtaaggaaatggtggagagaatacccataagtttggagggatatattttccctactaacttaatcttttttaagaatcaggacattgatgtcatccttggtatgaattggttacgtcaacatagagttgttattgatacgttgcaacgaacagtgcaattggattcgcttgatggcaattctaagttgctaatctagttgccaactttgaaaagagcagttgaacaagtgtgtgctatcactgttaaagaggtgaaggatatacctgttgttagggagtttccagatgtattccccgaagatttgcctggtttgcctccagaaagggatgtagaatttgtgatcgaattgcagccaggtactgcacctatatctagaaggtcatacagaatgccacctaaggaattagcagaactaaagactcaattgcaggacttgctcaacaaaggattcattcgcccaagttcatcaccttggggttgtcctgctatttttgtgaaaaagaaggatcaaacactccagttatgtgttgattaccgaccacttaacgaggtgaccattaagaacaaatatcctctccctcgtatcgatttgttatttgatcaactttctggagctaaagtgttctctaagattgatcttagatcaggttatcaccagataagaattcgacctgaagatattcctaagactgctttcactactcgatatggtctctatgaatatttggtgatgtcttttggtttgaccaatgctccagctcatttcatgtacttgatgaactcagtgttcatgcccgaacttgacaagttcgtggtggtatttattgatgacatcttgatacactccaagaccaaagaagaacatgcagagcacttgcgtgtcattttaacgcggctaagggaacaccaactatatgccaagttcaacaaatgtgaattttggttggacataattccattcttgggtcatatcttgtctgccgaaggtgttgcggtcgacccaagtaaagtcaaggacattttggaatggaaaccacccactacggtacaccaagttcgaagtttcattggaatggcggggtattaccgtcgttttattccagatttctccaagatagctaagcctattactgagttgctcaagaatcatatcaaatttgtgtggtcatctgagtgcaacaaagcttttgaagaactaaaaaagttgttgactaccgcaccagtattggcgcagcctgatattgagaaatcctttgatgtttattgtgatgcttcgggcattggcatagggtgtgtacttatgcaagaaggccgtgtgattgcttatgcatcacgacaactcaagcgtcatgaagagcattacccaacccatgatcttgaattagctgctgttgttcatgcacttaagatttggcgccattatttgctgggtaatacgtgtcacatatatactgaccataaaagtctaaagtacatttttacacagtctgaactgaatatgaggcaaagaagatggcttgagttgatcaaagactatgatttagaagttcactaccatcctggcaaagctaatgtcgtggcagatgctctaagccggaagcctcaatgtaattgtctttcggtgaggcctttaactgtcaacctatgtcaggaaatggaaaggttgaatttgggggtaattcagcatggaaccttaaccaatcttgttcttgaatcaactatccaaagccaaattattgatgctcaaaaggtgaataagggtatagctcatatcaaggaacgagttgaagcaggaaaagctacatgttttagaattgatgaagatggtgttctttggttccaaaaccgtttggtagttccaaaggtacctgaattgcgtcaacaaatactggacgaagctcatttgtctcggtattccattcacccaggaagcaataagatgtatcaagatctgaagcaaaggttttggtggactaagatgaaaatagaaattgctcggtatgtggctaagtgtgacatttgtcaacgagtgaaagccgtccatttgaaatctgccgggccattacaacctttacccattccgacctggaagtgggaagatatcagtatggacttcattgttggtttacccaaaacctcacgagggtacgattctatctgggtaattgtggatcgtctcaccaagttagctcatttcctgcctgtgaacaaaagcaattcggtgcttgcatatgctaagttgtatattgctcgcatcctaagtctacatggtgtacccaagaccatcgtgtcggatcggggtccacaatttattgccaagttttggacagagttgcacaaatcattgggtaccaagttaattcacagttcagcttatcatccgcagactagtggtcaaactgagcgggtgaatcaaatcttggaagatatgttaagagcttgtgtgcttgcttattcggttaaatgggatgaatgtttgcctttggctgagttttcatataataatagttatcaggaaagcataaagatggcaccttttgaggctctttatggtcgaaggtgtagaacaccgttaaattggtcagaaccaggagagaaatacttctttgggcctgatcttgtaaaagaagcggaagaaaaggttcaagtgatccaacgaaatttgcgggtgacacaatctcgtcaaaagagttatgctgataagagacgtcgatccttgattttccacgttggtgatcatgtatatttaagagtgtcaccgatgaagggcgtgactcgatttggtgtcaaaggaaagcttgcgccccgctatgttggtccatttcaagtgcttgaacggttggacttgtggcttataaggtgcaattgccacagaatcttccaaaagtgcataatgtgtttcacgtatcccagttgaagaaatgccttcgagtcccagagcaagtagttgaggtttcagatgttaaccttgaacccgatctaacttactctgaatatcctattcgaattctggatcaaaaagatcggatcacacgaagaaagattatcaagttctacaaagtacaatggaaccaacactccacagatgaggctacatgggaatcagaagactatctaatggagcattttcctcagcttttagattcctgtaaatcttaggccctgtgcattttgtctttgatgtaaacccacaggggcacacccctgtcttgtaagaacaaatgtggaataagatcgtgacgcatttctttttttccattacggatctaagaattttaatctcgggacgagattcctttttaggggggaaggttgtaacatccctggtgttacgagaactaaaacattgacatgacatcatatgcatcagcatcattttgcttgatacacctagaatgcattttagtaggtccaaaatctcaaatgaaacactaaagtagccaaaaagtggaattttaaatctagaaagaatttgctaggagaccatataccaaagttatagagttttcagaaccagacaactttcatgtgttgatattttcaagttttgaagaaaaatttggagtagttgcagaattcagatttggttcagtttttggttcggctcaaaacagctttgtttacctgtttttggacccctgcagtttctaatccatgtgagttttgagaaaggttgctgtagaaaacttgtagagtagttataggagacccacttttattgagtatgttagccctaaaaccacatgcaactatgtgaaaaattggtcaaaagatgggctgacaggtttggatttcagacttggtgtaattattcaagtctgaatttcagtgtgtctggctcaactttggagctttgtggtgattgatctatatggttttggactgcaattcctgtagcaagtttgaagaccatatgttggtgtgcaagtttggtcaaaggtcatacccctaaagctacttggaacttggagaaaaggtggtccaaattggagctgttagacttgtgatttctggactttgattcagaaattgaagtgcagtttcagcatttttagcaaactttagatctctgttgtgacaaacttctgatgttatggcctgcactatccagagcaaagtgttagagggtaatgtggttagtaattttaatccaggtggatccccctgaacttgcctagaaatgggagaaaatggtgtccaaaaacatgttgtcagactccagatttcagacttagttcaattgactgaaactgaattttagtgggttttgctcaactttggagtcctgtagcatttaatccctgagcttttagttataaatcattatagaaatattgtaaacctatcataggagtatatattttgttaagttactcaaccctaaagccctatggaactcagtgtaaaactggtctaaagcagggttgacatggttgcagatttcggacttagtgctgaattggcactgcagaactcatattttggagcaactttgggatctctttgtgactaatatatggagtatgaacgatggtttctatagtaaaatggaagaccatacaatagttaacaaggtttcttaaataaggttggcttggtactgcataaaaatttgagtaatagttgcttaagactgggatggtcagttacagaaactgaatttcaatcagtgcctgaaaactgaagttgcactgtttggtgtcagtttgggaacacttttgtgaccattccatcaagttttagactatgaattatatagcaaagttggagaccaagtattagtgaacaactttactaagaggtgcttagcttggtgctgcacaaagttgggagtaaatctgttccaaagtggttcctggcagcttctttcagttaactgaaaatgacatttagtgggataaaaggagagtgattcagttcactgaatctagaatcagatcgaagatgaagaaaagatctctttgccctactgtaatccacttttgtgctcaagccaggacgtgcatgagatggcaacaagggttctcgaagtccagttttgctgtagaaaatatcatgtcttggcttgtactcatttaatgcacccttatctatttaaattcttgtctgcaaaaataggacaaaatgggtgtttattctgaaattgtgaaacctgtgtggagttgtagttgtgtgacacgtgtggggacctatgcagtgctggcaccctggagaatactctccactgcttaatattgggctcacggatgtctgtccctggatgcagtcaccttagggcttagttttgtggagtctttcccctgcccttgaactcgagctcgtgtccatcgcgtgagaggaggagttctggttttcaggtctgagtaacccctttccatcaccaagtccggtctgccccggagctgtgtgccatctctgcagtttggtgaccacgcccagctgaccctccccctcaccgcggcccaggttcctcgagagctttctcagtcgtgtgggtcgcgccaccgcagatcggtaccatggacagcctcaccgtcgaccaaccagcgtgcttcttccctgagcattttcatgcgagccccgtaagctgtgtatggcactgaagcttcttccctgagtaaaagtagatttaggatttttacagcagataccaaatttcaggggattaaaatatgctcttagaaggtctatttgattttagaaataaaagtttagttccaaaaattatgaaaatttttgggaaaccttgtctttaccagctgagcacttggtccaagtttgaaattgtttggaagaaattttctcagcaaacagattgttgcccgaaaagaaaaaggattttaccctcgggtaattaggaaatgaagttgcttaagaaagtttgagcttctggatgaagtttaagatgggttagttcctggtgaattattagttgatgatgtcttctagtgcccttggtaatcctctagtgttttggctagttttatgcaccttgtattaaagtgtactcaggatgggttgtttgttaccttctttataaaatgcatttccgtacatagcaaacattcatctacatgtaattgacttgtagaacacctagatgaagtggtgtctgaagaaggagttcacttcagtgcctgctgatccagtggcggagttttctctaactgcttaccagagtagaagagttttagatcttctcctgcaataaggcaagccccgatgcatttgccaccttccttgtatttacaaaattttatcacttatatgatgcattaggtgatttcttgaaataattgattaccataccttgtcacctgatttataaaagctagagatgcttaatcatgcagatagattagaaaaaaatgtttttgatctatgactcataatttccaaaagaaaattggcttgggataatgaaggcatcatgtgcagtgagaaattcattatccaggcatggcccctct

SEQ ID NO: 43148 - DNA, 724 bp, Zea Mays
aaagaaacgaatgaaagatggcagcagcacacggaagcaggcattgttgtgtagcgccgtgccgtctactcctcgtggttgtactactagtggtgacgactggtgatggtgccgtagtagctgatgctccaacagcaggctcgccgcgaaccgacgaagtagtagcagcccttcaggcagagcagctgctggaatttagaagcagatccggcagcgaagaagaagcgccgatgacgacgactgctgcagctgctggttggccggtgttgaacacggagcagcagcaggctattattaccggcgtcggcggcgggaggaggaagctggtcgggtccagggctccgacgacgtgcacctacaacgagtgccgaggctgccggcacaggtgcagcgtccaggaggtgcccatcgacgccagcgaccccatcaacagcgcctaccactacagatgcgtctgccatctataggccggccggccggccggccgacgtacggcatgcatttccatatcgcttgattttgtatttttggtttttggagatgccatcgaaagcgttgctgtgcatgcatgggcaacgtaaccgctcgtcctgaatgaataagctaagcgcggcagagaagagaacacccactactacttctggttgtaacgctagctgttctatttatctctacctacaagtgtgtgcttgttgtttagttatactaaaaaaaattcttaaac

SEQ ID NO: 43149 - DNA, 724 bp, Zea Mays
cagctatatagggctccatagcctgaaagaaacgaatgaaagatggcagcagcacacggaagcaggcattgttgtgtagcgccgtgccgtctactcctcgtggtgatggtgccgtagtagctgatgctccaacagcaggctcgccgcgaaccgacgaagtagtagcagcccttcaggcagagcagctgctggaatttagaagcagatccggcagcgaagaagaagcgccgatgacgacgactgctgcagctgctggttggccggtgttgaacacggagcagcagcaggctattattaccggcgtcggcggcgggaggaggaagctggtcgggtccagggctccgacgacgtgcacctacaacgagtgccgaggctgccggcacaggtgcagcgtccaggaggtgcccatcgacgccagcgaccccatcaacagcgcctaccactacagatgcgtctgccatctataggccggccggccggccggccgacgtacggcatgcatttccatatcgcttgattttgtatttttggtttttggagatgccatcgaaagcgttgctgtgcatgcatgggcaacgtaaccgctcgtcctgaatgaataagctaagcgcggcagagaagagaacacccactactacttctggttgtaacgctagctgttctatttatctctacctacaagtgtgtgcttgttgtttagttatactaaaaaaaattcttaaac

SEQ ID NO: 43150 - DNA, 783 bp, Zea Mays
catctgtttctcgtcgatgccctccgccgccgtcgcgccgttcttcctcctctcatcgtcatagtctccttgggccgaagggcgtcgactcctgtgtcagaaggaagttcagaaggtcagctttgttgcccaacatcggttatggttctgacgagaaagaaggcattaccttcctaacatgttcaagaaatctggtgtccacaatgtctctgacctggatttgcgtacatagtaacgttctaccgcttttataacacgccgatgattgggttccctggaactcgatgttatcaagataactctgatgcttgcttcgatcaaccatgatcatgcttcaacttttttaaaacttacttcttatgaacgggtactgcgctgaaattgcttgccgtctatatacgtgagcggaaggaggcagtggggagcactggggcgtgctttgcagaagatagttgaaacaagctcatatctaaagttaagaaaaaaaaaaactgtgaaaactcatattggctactttgccgatgagggctactcttctctgacttttttttatttcttcatcattctctctcgtttctcttttcttcatttcctctctggatgaaaataaaccatagtctacctttagagtgtttggtctgaagaacgagctaatctatcatcttttcacttttatttttttaattggtttgtgaaatgaccatcaccaccttattctttatagttagttagttaatactaatataaggaatggagttatttaatcaaatttgagaaattgac

SEQ ID NO: 43151 - DNA, 796 bp, Zea Mays
tttccatctgtttctcgtcgatgccctccgccgccgtcgcgccgttcttcctcctctcatcgtcatagtctccttggctggtgcaggccgaagggcgtcgactcctgtgtcagaaggaagttcagaaggtcagctttgttgcccaacatcggttatggttctgacgagaaagaaggcattaccttcctaacatgttcaagaaatctggtgtccacaatgtctctgacctggatttgcgtacatagtaacgttctaccgcttttataacacgccgatgattgggttccctggaactcgatgttatcaagataactctgatgcttgcttcgatcaaccatgatcatgcttcaacttttttaaaacttacttcttatgaacgggtactgcgctgaaattgcttgccgtctatatacgtgagcggaaggaggcagtggggagcactggggcgtgctttgcagaagatagttgaaacaagctcatatctaaagttaagaaaaaaaaaaactgtgaaaactcatattggctactttgccgatgagggctactcttctctgacttttttttatttcttcatcattctctctcgtttctcttttcttcatttcctctctggatgaaaataaaccatagtctacctttagagtgtttggtctgaagaacgagctaatctatcatcttttcacttttatttttttaattggtttgtgaaatgaccatcaccaccttattctttatagttagttagttaatactaatataaggaatggagttatttaatcaaatttgagaaattgac

SEQ ID NO: 43152 - DNA, 932 bp, Zea Mays
caaaagtctaatccaaaacctcgcaagacagtaagctttataccgatccatatggtcatggtagctttccatatacacaatcaagtacttataacgtatggtggacacgaaggaaatgctaaccagaatcagctcgattataactgggtcactgaacgggcatcaattgaacactaccaaaaactgtcaacattcatctgagccccagacaggtagctgaattacacggcagataaccctgaatcgcacgcaatactcgaaaaggcgagcataggaatcgcccaatcccaaaactacatctccatcgcaggggagcgctatcccgaaaatcaccacgcaacacaatttgaagcctcccagctcgtagaaaccaaactaatcagatcgaaccgaggtggggcgagagggacgagagtcgggtgagaggggacgaggaggttcgggcgagagtgaagcagaagagcgcggcgtgcgccgcggccgcctgggccgtcttccccacccctacccacgtgtggccccgccgccgctgcatccctcctgctccctaggcacccaacgggaaagtcaaatcttcccttctccaccgactctgcttccttggactcaatgctcggcgatggtcccggaaactcagagaaatgggggatgaaaaggaacacgggtaccagggtttctctctctagtctagcgatggagccgtggagagagtggacggctgccgaagaggatggatcgggtcggtcgcaatgcgttccaccgagccgagagtctgagacaccaagagtgaaggaaactgaagaaggcagtatggtggacacgaaggaaaccgaagtgcatcagcaaatcggcatactcacatagctatgggaacaattgagcaaagatataactactctaggtgtttgaacaatgttatgctttatactgat

SEQ ID NO: 43153 - DNA, 644 bp, Zea Mays
aaacattgataaccaaacagagtaaatattacaaatccgttggtcaagatgttctattaccctttagtaaccttggctaccagggaatccaaagaccatttctaaactacaagctgaaaatgaatatcaaataaccttcaaataaaaatgtttaggcgcagtcatacagagagtttgctagaactataactcgatgtctcactatgaattgaaggtgcaaaagaaatttgaaaactaaattaaagcactgaacgtaggtttaatatgtatatagagatagtgtaatatagatgcatagcaaaagctatatccctgaacaagccaaatcaacttacagttaagaacagaggtaaaagcttggataaattctgaaattgaccattaacaaatagaaatgacttgacaaaattttaaatttcaaggagctctaattaatgcataattgtttctctaaatgcaatggcatgtcaaaacttaataaaagcattaggaactgcaattgtcatacctcgctcaagcaggatgtcaatgattagagagagagttgtcggagagtgaaaaggtgcacacccctcctcgcccttcgtgttcagcaagcttgagagccctaaaaaagttatcaaagccaacaggacattattgtc

SEQ ID NO: 43154 - DNA, 175 bp, Zea Mays
gggttctccgtgcaggcggacgaacatggcatgcctggatccagtgtctatcatagccgcggtgcgcgcggagggcgtctgctaggcacaacgacttgcccttctcattggcgcccggatcggtgccaacacttaccttctcccaagctcaacttcactaacatcagcatcgatc

SEQ ID NO: 43155 - DNA, 574 bp, Zea Mays
tgttaggttgaatgggggggataagaaactataccttcttgttccatgcttttcgattgtgagcacaggtgcttcgacttcagcaacatagaatgggcgtcagatcctgtgttgcccctgctctggtgaccatttagacttatttgctagaactacaggttctgctttggggtctgcagctagaaccgaaaaaaggctcatgagtttgtggatactttattaggcgatgatacaccaaagtagtgtacaaaatcatgatcactgccatgatagttcattgctaatgtgatatgtcaacttcaccatgcttagaagacgagtcagcagcaattctatatccattgattctacttcatggatttttttcttcattagtaaataagtcaggactgtcttcctgcaaagaaaaggtttgtttggtcaatgaaataaccaacatgcaaattaactggaaccttgaaattgttaaagttttccaactattattacaggctataacaaaagaaaataacagaacaggaagcaagacatctattagtcaaacaacatgtcatatctagaaaactaagagtac

SEQ ID NO: 43156 - DNA, 812 bp, Zea Mays
gaggagagacagacagagagagcgagcgactgagaccgacagggttcggttcgacccgatgcttccggcgctgcggcctcgccgccggctcccggtggcatccctcctccgccgcctcctctccgactccaccccctcctcctctggcactggagagagtgatctgatggccgcggccgcagcgaaggcccgggcggaggcggcagcgcgggctcgggtggaggcgtacaagcaagtccaaaacttcgactggagcagcggcgccgactggaagaccgccgccaacatcctcttcacggtgccccctaagcgcaaggagttcgggcttgatttccaccttgtgcagctcttctttgtctgcatgccatcgctagctgtctatttagtggcccaatatgcacggagggagatcaaaaggatggaaggggaagcagaagagaaaaggaaaaaagacgaggaacttgagaaacaaaaacaggtcgaggaagaatctgccaaggaggatgctgattcaaagctttcgaaggtattagacaggctagatacactagagggtgtcgttaaggagattgtggatgacaaaaggaaactttcttcccctgatttaccgaccaaagaggaggttgcaaagaaaaatgaagcatctccggctaaggcttctgattcgagaagctatggtcagccagtggtggctgccaatagtaaggacaccaactatgcttcaaatgctccagcaaatactgcaaaaccaaacaataaggggattggtgataaggcatttccagattcagatatcacacacccgattaccc

SEQ ID NO: 43157 - DNA, 1004 bp, Zea Mays
ctccacggccgcgaaccgcacgacggcacgagaggagagacagacagagagagcgagcgactgagaccgacagggttcggttcgacccgatgcttccggcgctgcggcctcgccgccggctcccggtggcatccctcctccgccgcctcctctccgactccaccccctcctcctctggcactggagagagtgatctgatggccgcggccgcagcgaaggcccgggcggaggcggcagcgcgggctcgggtggaggcgtacaagcaagtccaaaacttcgactggagcagcggcgccgactggaagaccgccgccaacatcctcttcacggtgccccctaagcgcaaggagttcggctgtctatttagtggcccaatatgcacggagggagatcaaaaggatggaaggggaagcagaagagaaaaggaaaaaagacgaggaacttgagaaacaaaaacaggtcgaggaagaatctgccaaggaggatgctgattcaaagctttcgaaggtattagacaggctagatacactagagggtgtcgttaaggagattgtggatgacaaaaggaaactttcttcccctgatttaccgaccaaagaggaggttgcaaagaaaaatgaagcatctccggctaaggcttctgattcgagaagctatggtcagccagtggtggctgccaatagtaaggacaccaactatgcttcaaatgctccagcaaatactgcaaaaccaaacaataaggggattggtgataaggcatttccagttgagtccgaaagttgataaatcatttgagtttttttcttctgaaaacacaaaattggtgtttagctatgtagtcgtgtcctcgatgctaagcgaatgaaaagatgtaatttccacaccttaggatatgatgcgtcttaggaaaaaaaatacagtgagctaacgttttgtactacatagccccttcgatagttgaggctgtgatcttggataatgattaccacaaaatctttctgctt

SEQ ID NO: 43158 - DNA, 1877 bp, Zea Mays
ctcacactaacacattaatttattcaacgatcgaactattctaaataatttatcagcttaccgtttccacagatgagatgaatctacgagatcggtagcgattttccgatccaagcaatttgtcgagcgcttgggggaatatcgcgctgttaacttcgtcttcacccgattcttgggatctctggggatgcacgaataacaacgagttggagacttgcagagtcgagcacggcaaggagttccgaaaatcgacgtaggcagcacgcaattggaaaacagatcatcggagtcgacaagcatgtcgtggatacaacgtaggccgacaacgaggtccatgacgagcgttagggataagcgacggtgatgagctcggcaagacacaagggccgagcgacggcatccgcgactgcgcacgggaaagccggtgaattccacgaatcaggggcaacccggcgcgacggtggttcagcggataacagtgactagaactggacgcgacaaaaggagcccagggagacgagggacgccataagggtgagcaccagcatggagggtgaccccgacgagcacagcgaggcagagagtcagcctcgcgtgcgacgggcaagcaaggccggagacccatggacgcatcgacggccggacctaaatagcttgaacggaggagcagatacgacgaccatggagatgaggagaggacgagctcgagggggatgccgagccaaggacgagtgtgctgggagcgatgtccaggacggagagcgacaagctgacgaccagttggatactaccgcgggggtgttgcgcaatgggaagaaaggaaatgcgcctagtagtgaatatatctgcgtaggaggagaagacgttaaggatatttcacatgagcgagggcatcaggaggataagactgaataaagcggtggtgagatacttctgggcagcatgggataaggtcgataaaaataacatattgaaatttcttgtttttgtttttatataaaccttggttccactaattcgtatgtttatgatgccaaggaaatataacagagaaagagcggtgggaaggatgaggctcaaccgttcaagggaaaaaatcaatctgatgaaaaatatcaggaacgttgtatatatcaggaacgttgtggagactaatggagagaaaatacaagagggagagggacgtgtgcgagcttctaatgccgagcaagcagagatttgtgagggaggacttcatgtgcagaaaatatcagctagaggataggaacgtatagaaaataagaataatagaagacgtgtggagtaattagaggatgaggccaagtctacacgatagctggataggatagaaagatattttctgcatttagttaatgtagatatagagacaaatctaatttctagggtttaaaagaggcacaaatgtgtttgatgaaaataacatcagcgaattcaatatggtgaacactctcggaatcagatgaatttttactagttatttatccgaggttttggatcggtcaagaaacgacagaccgaaataagctgatttcggcaacacggaaacggactggatatcagatacattattttgagacaatactgatttagtcgatctcggataaaaatttatccgatgtctaaacacagttgattttattattttacagagtgtgccgaagaataaattggataataactttgcgcacgatttttctcggacaatgcgcgatacaaattattttaccccgaacattttagttgttaagttcacactaatttgctcaggataaaaatcatccgagtgggtcgggcttccgaattcgtattcgcgcgagcgatgaattttaaataatcactggacgcaccgattttcg

SEQ ID NO: 43159 - DNA, 2276 bp, Zea Mays
gttaaaaattaatataaaacatagatatcacccttgaccaaccaacagttgcagacttcttagcgctactaaagcatagccacaagcatttgatacggtttagacattcacaaagagagcaaaacagattttccacaagactaagagaccttataacatctacatgagaataataggtcgcaccatgattgatgaagtctaatgatatcaaaaagatttaagttcaagagtttctcctagcaaaaactacttactatataaatgaatcaattaccttgtgtagtacctaagacacaagcttcaaaagcatacaaagttcgaaaaattagacaagtgtattaaatcagtcaaacaaagcagtcgatctaatctacacaaggtaccagaggatgtccagcgtgaagttctccaccaccacgctgccaggccctctgctcctgctggacccgaccctcggcggcattagcgactgttgcgcaccaccagaggtatcctgttcgttcctgtggcggcgccggcgacaccacaggaccagcgcgaactgcaatgccatgaagaagacgaggtgccaccggcgacaccacaggaccagcgcgaactgcaatgccacgaagaagacgaggaaagcgacaggggcagccgggagaggtgagaggcagaacatggtgcacggatggtctacattagaggcttatagagtagtaaagattaaagcactagtttcaatggtcgtcttgcgtcatatttttacagaaaaccccttgccatcttttcaaatcaacacgcacttcagcccatgcactatacccactacccaacaaacccccgcgagacgcgcgcaagggctcgacacaacacccgccttggctgcatcggcctagggcatcggcgaggagaaggctagtcgcctctcgtgcttccccaagagtaggagaggtaggttggggttcgtgaggttcacgccgtgcacgctcccgcacgtcgtttcacagcaggttgagcgccacacctgcgtctgtttctctcactgcttcacatgtcacacccatgcttatcggcatttgcaacccacgaaaggcccacagtgaccgtcgccagagcctgtcgcacaatgatcttgcgcgcccgtctctggcccagaagatcccaaccccgcacacatcatcgtctatccgtcacgccgttgcggtctcccggacggatgcctcgtgatgccaatcatgtggcctccacggccatgatggtgcttcacccaggggtcgtcgggaaatgtcaatgtgtcctccgctgcactaggtggacgcctgaccgacgacagtcgagggacagtcatgcgtgccaaggtggctaaggccatgcaggtggtggacgagggtggcaggcaggaagcacctctcgctgcatccatagtggatatccccgtcacgtgctatcaggtgaacggttcgagttcctggtccattttatggattgcaatttcaaaaatgagttcgccttctgttgtctgaccgtagccgcctgatctgattcgtcggtttgttactccacgacgccatgtcaattaattacctcagttgtagattgaatcggtgttttcctataacgagtcaaattcattgtgcgtacctgtcggggaccataattaggggtaccctcaagactattaattctcagctggtaacccccatcagcataaagctgcaaaggcctgatgggtgcaactaagtcaaggatcggtccgttcaagggactcgatcacgcctcgcccgagcctagcctcgggcaagggcagctgaccccggaggatctacgtctcgcccgaggccccccttccagcgacggacacaccttcggctcgcccaaggcccagtcttcaccaagaagcaaccttggccaaatcgccacgccaaccgaccaaatcgcaggggcatttaatgcaaaggtggcctgacacctttatcctgacgcgcgccctccagtcgatagagccaaagtgaccgcagtcacttcgccgctaaactaaccggtctgacaagaggacagcgccgcctgtgccgcaccgactgctgtgccacttgacagagtgaggctgacagccgccaggcccggcctcaggcaccataggaaactccgcttcgcccgaccctagggctcggactcgggctcagccccggaagacgacgaactccgcttcgcctgaccccagggctcagactcgggctcagccccggaagacgacgaactccgcttcgcccgaccgcagggctcggactcgg

SEQ ID NO: 43160 - DNA, 602 bp, Zea Mays
atcagaaattggcatttaagttttttgggccatttcaggtttggtgtcttctccagtgctgcctaatgagcaatttcagttcagtgtgcctgtcaagatcttgcagcgtcggacggtggctcgtggggggcagtccagtgaacaaattcttgtccagtggtcacacatgcccgtggagttggctacttgggagtttgcgcaggacttgcaacagcagtttccgcatgcagctgtttggggacaaccagcggatttagcagggggaatgtcagcgaagcggaggaagcagtcatcggtgcggcaaatgacaaagaaggtttggctgcaacagcaggagatgggccgtgtcgggccaaaaggctgaggaagcgcaacccaaaggtctttgggccggcgtgggtaaacagcacagagtaatccagccgattattaaataagggtttggcggcgcgtagggttttttatgctgtaacagaactctagactctagttcttcttcctttccaagtactatctcaactactctgttctccgtctctgcattctccagatattgtgtgtgttccaacttatgcaagtcgttaacaaactttcagtccaac

SEQ ID NO: 43161 - DNA, 3007 bp, Zea Mays
gttcttcttcctttccaagtactatctcaactactctgttctccgtctctgcattctccagatattgtgtgtgtgttccaacttatgcaagtcgttaacaagtggtatcaaaggttaccgatccttggcttgtgggtgttgacgcgctggatcgcggcgaccagcagcattactttacccgtgctcgcctccgacgtgttctcatgaatccagacactcaactcatcctggatgagttgtcgcggcgtttctctgaacatgactccaagtgggatcgcagagtggccgagcaggagtcgcgttggaacgcgaccttctcggagttcaccactggacaagaccgctgcgtgggggctctagaacaagccactggtgtgctggaagattggcggatgaacatggaagggatgatggatgacctgcgactcgaggtgggcaagatctccaaaaattgggagcgtgctgtagtggacaattcgtccgctatggcgggcatcctcgctccttctccaccggctgtcgagcaacaacctgccggagttccagccaacaggccccatgggcaccgcgtcgaatcgagccaccgggaggatggttttgggtcggtcaccaccctcctccataccccggtcaagggtatgtgttcatcattgcctcgttctccagctgtgcatacttcggaattccatcagcatgtgggcgatctgtcatatccaaccatggggggcgcgatgcgtggtcgtttgcctaagttgaattttcctgtgtttgatggcgaaaaccccaaattatggatccgtcgcagccatgactactttgacatgtatgaagtagaaccgcacctatggatcagggtagcgtcgatgcattttgttgggggggctgctcggtggttttcatctctggacgaacattcacacttatctagttggcctgttttttgccgcgtgcttttagagcgttttggaaaagatgagcatgagttgtttattagacaattgtttcgcattcgtcaacatggcacagtaactgaatatgtagatcagttttcttcattagtagacaagttggtgtcgtacgggcgacctgtggatcctctctattttgtgcaacgttttgtggatggtcttcgttcagacattcgtgctgctattattcttcaacggccttcttccttggattctgcttgcgctctcgccttgctgcaggaagaggtggccacgtcagaccgacgtttggagcatcgacgtccagaatgggcgtcgtcaggaaaggggtatggcaaatcttcagtgcctcctttcttgacagcacgacccgacaagactggagctgtgatcgaagaaacaaagccggctgaacaacatcgtgctcgtgtcttggatgacaaacttgctgccttgcgcgcttatcgtcgagctaaagggttgtgccagcgttgtgcggagaagtggtcgcgtgatcataagtgtcctcccacagtccagttacatgctctacaggaactctgggaattatatgaaggggatgaagacaccattcctgaggatgttgtggtcgaggatcagatcatagagactgaatgtttggccatctccattgctgctgttaaaggattggagttgaaccatactctgaagttgcggggactgattcaaggcattgaagtggtgatgctgatcgattcaggtagcggatggcaatcgtttgaagtgttcttgccagctagttggcgctagatggtccgttcaacactgcgtgtttgacactgacttgagagttttggatctggcttcatatgatatgatcattggtatggattggttggcagctaatagtccgatgaaggtgcattggtcccaaaagtggatgatcattccatatcaacgttcctgggtgctattacatggattgtctgctgtttttccacctgggtcgatagtggaattagatatgatagaatctgaaccacctctgtttgcacacttggatttaacacctgtgctgatggcattgttggaggaatttaaagctgtgtttgcaccaccaaatggtcttcctccaactcgtgagtgtgatcataccattccattagtgccaggggctgttcctgtccatgtcagaccatatcgatatccaccagctatcaaagatgaaatagagcgccaagtttcggtcatgcttcagtcaggaattatacaacccagcactagtccattttcttcttcagtattattggtcaagaagaaggataattcatggcgcttctgtgtggattttcggcacttaaatgctattactgtcaagacatcttttccggtacctgtcatcgaggagttgttggatgaattggggcaagcttcctggtttactagtctggacttgacagcgggatatcaccagattcggctgttaccggcagattgtcataagacagcattccaaacacactcgggtcactatgaatttagagttatggcttttggtttgaccggggcaccagccacttttcaacgcgccatgaatgcaacattagcaccattacttcgtcgttgtgtgctagttttctttgatgatattttaatctacagttcgagctttgaagaccatattcagcatgttcgagcagtcttcgaactactcatacagtatcaatggcaaattaagttgaataaatgttcatttgccaggcctcagttatcctatctcggtcatgtcatttcagcggccggagtagctacagacccaagcaagattcaggctgtttctcagtggtcttctcccaggactgtgaaggaattacgcagttttttgggtttggcagggtactaccgtcgctttgttcgtcattttggtcttttggctcgacctctgacgggtctactaaaaaagggtgctatatttgtatggactcccgcacacgaagcttcctttgcagccttgaaacaagctttagtgtctgctcctgttttggcattaccaaacttttcattgcccttctgtttag

SEQ ID NO: 43162 - DNA, 2247 bp, Zea Mays
aaacggcatccgattttaccgtggcagatccgatcgagcgaagcgagcccgagccggcgcggaagaaaagcgctgctgacacgcagaaacaatcaaacaaacaaacgccccgcggaaaccaaaccacgcccatttccgcccccaaatcagcgatccgccctccgcacgcgagatccagagagacgagccgaaacggaacccccacgcatagcaaggaccaaggaggcaacgatcttcttcggctgctgcccgcccgtgcagtgctctacttgcttgggggcgtgcgtcagcgaggcggcgaccgacttgcttggcgtcgggggtgatggaggggcggttgctgcggcctgcggcgcagcgcgacgctggcggaccagctcgccgcggtcgcggaaggtcgggctccgcactgcgctgcgccacgttctggaagtgggtttcgtgaatctgcccggtgctttcagttcagctctacattacagatggtggttgaaggcaagaggggaacggatcaaatatcatcgtccagattgtagctgtacagtacatcatggtttagcaataagcagcgacagcggccgttcgcttcacttggagagcaggccgaagtaggggttctccaaggccgacgcgatctcgacgccggcggcggtgagcagagccacgtcgaccttgtccctcggcatcaccaggtacccgatgccgctgaacctgcggaacccgcacagctccaggaactccacgccgcctcgcacgctgcccaccctgtcctgcttgcatagatgtggggtgagatggtgtagcgcgagttgcgctgcatgccggtctctgctgctttaccttgaacacagggttgctgagccggatcctcctgaacttctcctcccctgggttcttcgctacgttgccaacaatcttgagcaacacctggtacgctcttgccactgcagcagggtcatcctacagcagcagcagaagaagaagaaaatgaattactaagatcaaaacgaaccagaaacagcatctgcgagggggttcttcagttttattaccctgtggttcttcttcacggttcgcaggcagtctctcagctgctctgacgcaacgacggcgcgtccagcaggctttacctgcgcggtcaagaaacgcgtgcgtgtgagcgatgcgcctggaggtttcgctcgtcattatcagaagatgctgtagaaaccaggaagaaatgcatttcgacgacctttgcaggcgtcatggttgcggcgggatccctaggatcatcctgcggcagaccaagccgtctcctcctctctgcctgcacaggaggatgtagcatttcatctgactctcaacagaacatagagtgacattttgcgtgtgtgtgggggaaatccaaggtaataacaaaaaaaaaatgacaaaaatgaaggatttgttactggatgacttatgatcatgctgggaagaagaagaaaattcagttgcagtaaggagtacatggttatttttgtataattaagcagagtttttagcatgctgcagcagacagcacagaccttatcgtcagctatacgctggcgtatcctctccctcgctcttttctcctcctcttgatctgctacccgactctccatcaccctgcagccaaaacagagccatcgcttctcttcaagaagcaatcttgggagctgcaagtgagacgcgcgttcgaaagaaacacaccgcttcctttgattttcctcgagacttctctttgcttccataaggtctttagcagctcgaatcctctccctctgtacaaacaagaaggagcattcgggaagatcaccacaggatacacttaagatgttggcgcgagaaagcacattttcaaaaagagaatgcaatacctgatcctcttgtaattgactccgtatccgccctcttgccctcccttcctcgtctcgtttttgcttatatagtgctaatatcctgggaagtacagtacaggtgcgttactgggggtgaatccgtgataagcaacctaatccaaggcaagggtaagctacctgatgggaggataatagctatgaagcaactttcccaaacatcacatcaggggaaaaaaagcaagtttgcagaagtggccacaatttttgctgcgcaatgcccacccacaacaaatatgattgcgtaccgtgttaacgcacggtacagtcattcttacaacacacaacaactttgtcagcgaagcggaggaagcagtcatcggtg

SEQ ID NO: 43163 - DNA, 2696 bp, Zea Mays
aaacggcatccgattttaccgtggcagatccgatcgagcgaagcgagcccgagccggcgcggaagaaaagcgctgctgacacgcagaaacaatcaaacaaacaaacgccccgcggaaaccaaaccacgcccatttccgcccccaaatcagcgatccgccctccgcacgcgagatccagagagacgagccgaaacggaacccccacgcatagcaaggaccaaggaggcaacgatcttcttcggctgctgcccgcccgtgcagtgctctacttgcttgggggcgtgcgtcagcgaggcggcgaccgacttgcttggcgtcgggggtgatggaggggcggttgctgcggcctgcggcgcagcgcgacgctggcggaccagctcgccgcggtcgcggaaggtcgggctccgcactgcgctgcgccacgttctggaagtgggtttcgtgaatctgcccggtgctttcagttcagctctacattacagatggtggttgaaggcaagaggggaacggatcaaatatcatcgtccagattgtagctgtacagtacatcatggtttagcaataagcagcgacagcggccgttcgcttcacttggagagcaggccgaagtaggggttctccaaggccgacgcgatctcgacgccggcggcggtgagcagagccacgtcgaccttgtccctcggcatcaccaggtacccgatgccgctgaacctgcggaacccgcacagctccaggaactccacgccgcctcgcacgctgcccaccctgtcctgcttgcatagatgtggggtgagatggtgtagcgcgagttgcgctgcatgccggtctctgctgctttaccttgaacacagggttgctgagccggatcctcctgaacttctcctcccctgggttcttcgctacgttgccaacaatcttgagcaacacctggtacgctcttgccactgcagcagggtcatcctacagcagcagcagaagaagaagaaaatgaattactaagatcaaaacgaaccagaaacagcatctgcgagggggttcttcagttttattaccctgtggttcttcttcacggttcgcaggcagtctctcagctgctctgacgcaacgacggcgcgtccagcaggctttacctgcgcggtcaagaaacgcgtgcgtgtgagcgatgcgcctggaggtttcgctcgtcattatcagaagatgctgtagaaaccaggaagaaatgcatttcgacgacctttgcaggcgtcatggttgcggcgggatccctaggatcatcctgcggcagaccaagccgtctcctcctctctgcctgcacaggaggatgtagcatttcatctgactctcaacagaacatagagtgacattttgcgtgtgtgtgggggaaatccaaggtaataacaaaaaaaaaatgacaaaaatgaaggatttgttactggatgacttatgatcatgctgggaagaagaagaaaattcagttgcagtaaggagtacatggttatttttgtataattaagcagagtttttagcatgctgcagcagacagcacagaccttatcgtcagctatacgctggcgtatcctctccctcgctcttttctcctcctcttgatctgctacccgactctccatcaccctgcagccaaaacagagccatcgcttctcttcaagaagcaatcttgggagctgcaagtgagacgcgcgttcgaaagaaacacaccgcttcctttgattttcctcgagacttctctttgcttccataaggtctttagcagctcgaatcctctccctctgtacaaacaagaaggagcattcgggaagatcaccacaggatacacttaagatgttggcgcgagaaagcacattttcaaaaagagaatgcaatacctgatcctcttgtaattgactccgtatccgccctcttgccctcccttcctcgtctcgtttttgcttatatagtgctaatatcctgggaagtacagtacaggtgcgttactgggggtgaatccgtgataagcaacctaatccaaggcaaggtacacacctctttctatcttcttcctcctgtccatctgcatttggttctcgttccaactgggatgtctcctagtttaggagaaatttgtagcccatgccactcagtatgcatggtatgaagttttaaaggaaatatttgatacatctaataagaagaaactaagtacattctgtctcccagtttcagtgtgttctttaggtttctgctcctgcacagtatccctgcaagacaagtatcatccattacattttataaatcaccgagatttttttcataaatcaagcaacagaaatgccgatcagtacatgcattctgtcaccgagatttttttttcataaatcatttgttgactactgagaaacacaagcatttaacttgcctttgtaaacaggccggttgaaggacaggtgccccccccacccccaaacacacacacacacataaccgtttcattaaaaaaaaaagggaatgtcccttgataaaaaggttatctgaaatccagaagaaggaaaaataaagtttttaccttgaggtggcaaagactcagaactgtaagctatgacatcacacagtgacactgcatccatacaaaatatgctatagattgctgattcctcaattgaggtagatatttaacaatcttactcaggatttgattttcc

SEQ ID NO: 43164 - DNA, 3039 bp, Zea Mays
ggcagtttgttttatttcccttctcctgtttcttttctattctgtcggagtcggacttgtgtccatcttgcttttgcttctccctcccccatgatccaatccctaacccgcagtctacttgatcgtggctagaatgatcgcgatcgagtttcttcggagcttcttcggtgccactgccacggccccgatccaatccctaacccgcaggccccgatccaatccctaacccgcagctggctatttgcttttgctttcgtagggcgtacgtgatggctgacacgagggcgaggccgtgggaggcggacgagagctcgcggtcgcgggactccaaagttccgcggctggacttgctggccgcatcggcggcggaggaggaggagaaagtgaagcatctgctaggccaggaggaatgtaccgagatgaccggccacgatccatgctgcgatcacgtccccacggacagttatcacaatgatattctgatctcgtcgttgctatccgacgacgcggggaattgccaggactgccggggccggcggcgcgaggaggccgatgggcccggcggccggcccatgtatcgccggatcatggtgtgcctggaatgcggccggcattcctgcggggattcgacgagctatatcccgtacggacacgctcaggaccacgccaaccaggaaaagcattgggttgccgcgatgttcgacgatccacaggctggattctgcttcaagtgcgaacacgaagtgcctgtgtatccagagccagacgagatggagatgataacgggcgagattcaggccggcggcggcggcggcggcggtggtcatgcgtttggattcgacatgtcccgcgatctcgccaccgtgttgctcaatctcggggacgcatggtgtgcagccgccgatctcgggtccgtgaatgcgcaaggctatgctatcagagggatgccaaaccgcgggaacacatgctacatgaacgcgatggtgcagtgcctcctcgcgctcgacaagctgcgggcaaggatgctagggccggatactccgccgggccaccttggaatggcactgaaggagcttttcgtggaggcgagcgctgctggttctgcgggaggcatgctgaacccagataaactcttgagaagtgtacgattacatgctggcaagtacgaaccttacacgatgcacgacagctatgaactgctcgagtccttgcgcagcgcattgcatgacgaggaagagggaattcaagctccttacagggaaagaggtgccccgacagtcattgatgcggtcttcaagggcgaactgtgtgatacaaggtcctgcaaagattgtcagtctgcttcggctttccatggagaattctgggagctttcattatcgctgccatcaaaagaggatctatgtgaaaattttgcatcatcatcacaacgagcaagcaagaatctcaaccctcaaccggagaaggctgctcctcagttactttcagcaaatgagagtaacttgtggaagatcgatgccagtaaaactgattctggtgaagagcagcgcaccttgcaaatcaagaatcttatacatgttttgtgcacagaggagccactaaattcagttgattttgttcctcatagcatctatgatgctaaagttgagcagatgattcagataacagcagattccctgcctccactgattgttccacaagttgaacacgatgcatcaacggcgccgggcagctatgtagatcaaaatggcaaggggataggggaggatagcaattgtgtactaacaatcgaggattgtctttcactcttttttagagaggaggtggtagaacggagctgtgattgttccaaggtacctatggaggagccaagcactaaccaaagcagaaagggtaagcagatggaggtaggcaccaatgatgaggtagcagctaatgggagccatagtaaacagtcagaccggacaacatgctcaaatggccaatctagtaaactgaatagtttgtcagtagaatacaacagttgttactgtaggcaacaacatggttctgacgaagagagtgacattacacagatggcagatacacatactgctggagcaaattcaaggatgacttgtggtcttaaggaaaccgagtatcatggtggtattcaagaaactgtacgtagtagttccctttcgactgagaaacaaaccgatctgttgagcacccagcatagccaaagcctcatcccacagaatcaagacctgaggttggatctcagtgcacaccagttaggagacaagcaaaatggacagaaagagaggagtggacgtgctattcaaaggactaatattactaagctgccgcctgtgttgacccttcatctcaagaggtacttcaagaacggcaacgagtaccataaaaatgaagcccgcgtgagctacaaggagcatcttgatgtaggacggttcatgaactctagttccgcggacaaaagcagcaccgtctaccgtctagccggcgtcgtggagcaccgcggtggacccttcatgaacgcaggacactacgtcgcctacgtgagagcaaggaagatcgggaagcagagcagccggccttcgtcatggttctgcgcggacgacagcaacgtcagagaagtcgctctggaagaggttctcgagcgcaaggcttacgttcttttctacgagagggtggaggacgcaaacacgctgattggttaagagacgttgcagctcgtcggaatagcagcaacaagagacgctgattggttaagagtagctagcattctttgcaatggcattggttagactgttagggtagttgaccatattcaggattatatatatagcttcattcgatcctacagattgatgtttttggctcgcctagtcagggtgattggttatttaattgattggcaaattttggccatgaatgaaatggggacgcttggcttggtcggactggtgaatgtgaatttgtaaggttgtgctgatggtagtgttaattagatgctaaccatttagatgcgttgtg

SEQ ID NO: 43165 - DNA, 3043 bp, Zea Mays
attttcgccggcagtttgttttatttcccttctcctgtttcttttctattctgtcggagtcggacttgtgtccatcttgcttttgcttctccctcccccatgatccaatccctaacccgcagtctacttgatcgtggctagaatgatcgcgatcgagtttcttcggagcttcttcggtgccactgccacggccccgatccaatccctaacccgcaggccccgatccaatccctaacccgcagctggctatttgcttttgctttcgcgtacgtgatggctgacacgagggcgaggccgtgggaggcggacgagagctcgcggtcgcgggactccaaagttccgcggctggacttgctggccgcatcggcggcggaggaggaggagaaagtgaagcatctgctaggccaggaggaatgtaccgagatgaccggccacgatccatgctgcgatcacgtccccacggacagttatcacaatgatattctgatctcgtcgttgctatccgacgacgcggggaattgccaggactgccggggccggcggcgcgaggaggccgatgggcccggcggccggcccatgtatcgccggatcatggtgtgcctggaatgcggccggcattcctgcggggattcgacgagctatatcccgtacggacacgctcaggaccacgccaaccaggaaaagcattgggttgccgcgatgttcgacgatccacaggctggattctgcttcaagtgcgaacacgaagtgcctgtgtatccagagccagacgagatggagatgataacgggcgagattcaggccggcggcggcggcggcggcggtggtcatgcgtttggattcgacatgtcccgcgatctcgccaccgtgttgctcaatctcggggacgcatggtgtgcagccgccgatctcgggtccgtgaatgcgcaaggctatgctatcagagggatgccaaaccgcgggaacacatgctacatgaacgcgatggtgcagtgcctcctcgcgctcgacaagctgcgggcaaggatgctagggccggatactccgccgggccaccttggaatggcactgaaggagcttttcgtggaggcgagcgctgctggttctgcgggaggcatgctgaacccagataaactcttgagaagtgtacgattacatgctggcaagtacgaaccttacacgatgcacgacagctatgaactgctcgagtccttgcgcagcgcattgcatgacgaggaagagggaattcaagctccttacagggaaagaggtgccccgacagtcattgatgcggtcttcaagggcgaactgtgtgatacaaggtcctgcaaagattgtcagtctgcttcggctttccatggagaattctgggagctttcattatcgctgccatcaaaagaggatctatgtgaaaattttgcatcatcatcacaacgagcaagcaagaatctcaaccctcaaccggagaaggctgctcctcagttactttcagcaaatgagagtaacttgtggaagatcgatgccagtaaaactgattctggtgaagagcagcgcaccttgcaaatcaagaatcttatacatgttttgtgcacagaggagccactaaattcagttgattttgttcctcatagcatctatgatgctaaagttgagcagatgattcagataacagcagattccctgcctccactgattgttccacaagttgaacacgatgcatcaacggcgccgggcagctatgtagatcaaaatggcaaggggataggggaggatagcaattgtgtactaacaatcgaggattgtctttcactcttttttagagaggaggtggtagaacggagctgtgattgttccaaggtacctatggaggagccaagcactaaccaaagcagaaagggtaagcagatggaggtaggcaccaatgatgaggtagcagctaatgggagccatagtaaacagtcagaccggacaacatgctcaaatggccaatctagtaaactgaatagtttgtcagtagaatacaacagttgttactgtaggcaacaacatggttctgacgaagagagtgacattacacagatggcagatacacatactgctggagcaaattcaaggatgacttgtggtcttaaggaaaccgagtatcatggtggtattcaagaaactgtacgtagtagttccctttcgactgagaaacaaaccgatctgttgagcacccagcatagccaaagcctcatcccacagaatcaagacctgaggttggatctcagtgcacaccagttaggagacaagcaaaatggacagaaagagaggagtggacgtgctattcaaaggactaatattactaagctgccgcctgtgttgacccttcatctcaagaggtacttcaagaacggcaacgagtaccataaaaatgaagcccgcgtgagctacaaggagcatcttgatgtaggacggttcatgaactctagttccgcggacaaaagcagcaccgtctaccgtctagccggcgtcgtggagcaccgcggtggacccttcatgaacgcaggacactacgtcgcctacgtgagagcaaggaagatcgggaagcagagcagccggccttcgtcatggttctgcgcggacgacagcaacgtcagagaagtcgctctggaagaggttctcgagcgcaaggcttacgttcttttctacgagagggtggaggacgcaaacacgctgattggttaagagacgttgcagctcgtcggaatagcagcaacaagagacgctgattggttaagagtagctagcattctttgcaatggcattggttagactgttagggtagttgaccatattcaggattatatatatagcttcattcgatcctacagattgatgtttttggctcgcctagtcagggtgattggttatttaattgattggcaaattttggccatgaatgaaatggggacgcttggcttggtcggactggtgaatgtgaatttgtaaggttgtgctgatggtagtgttaattagatgctaaccatttagatgcgttgtg

SEQ ID NO: 43166 - DNA, 3097 bp, Zea Mays
atcagcccaatcgcaaatctccactccgcgttcgccacgcgaaatccctctccaaaacccttccggttccgggcgtcgccgcggtccctcagttccggcgccattttcgccggcagtttgttttatttcccttctcctgtttcttttctattctgtcggagtcggacttgtgtccatcttgcttttgcttctccctcccccatgatccaatccctaacccgcagtctacttgatcgtggctagaatgatcgcgatcgagtttcttcggagcttcttcggtgccactgccacggccccgatccaatccctaacccgcaggcgtacgtgatggctgacacgagggcgaggccgtgggaggcggacgagagctcgcggtcgcgggactccaaagttccgcggctggacttgctggccgcatcggcggcggaggaggaggagaaagtgaagcatctgctaggccaggaggaatgtaccgagatgaccggccacgatccatgctgcgatcacgtccccacggacagttatcacaatgatattctgatctcgtcgttgctatccgacgacgcggggaattgccaggactgccggggccggcggcgcgaggaggccgatgggcccggcggccggcccatgtatcgccggatcatggtgtgcctggaatgcggccggcattcctgcggggattcgacgagctatatcccgtacggacacgctcaggaccacgccaaccaggaaaagcattgggttgccgcgatgttcgacgatccacaggctggattctgcttcaagtgcgaacacgaagtgcctgtgtatccagagccagacgagatggagatgataacgggcgagattcaggccggcggcggcggcggcggcggtggtcatgcgtttggattcgacatgtcccgcgatctcgccaccgtgttgctcaatctcggggacgcatggtgtgcagccgccgatctcgggtccgtgaatgcgcaaggctatgctatcagagggatgccaaaccgcgggaacacatgctacatgaacgcgatggtgcagtgcctcctcgcgctcgacaagctgcgggcaaggatgctagggccggatactccgccgggccaccttggaatggcactgaaggagcttttcgtggaggcgagcgctgctggttctgcgggaggcatgctgaacccagataaactcttgagaagtgtacgattacatgctggcaagtacgaaccttacacgatgcacgacagctatgaactgctcgagtccttgcgcagcgcattgcatgacgaggaagagggaattcaagctccttacagggaaagaggtgccccgacagtcattgatgcggtcttcaagggcgaactgtgtgatacaaggtcctgcaaagattgtcagtctgcttcggctttccatggagaattctgggagctttcattatcgctgccatcaaaagaggatctatgtgaaaattttgcatcatcatcacaacgagcaagcaagaatctcaaccctcaaccggagaaggctgctcctcagttactttcagcaaatgagagtaacttgtggaagatcgatgccagtaaaactgattctggtgaagagcagcgcaccttgcaaatcaagaatcttatacatgttttgtgcacagaggagccactaaattcagttgattttgttcctcatagcatctatgatgctaaagttgagcagatgattcagataacagcagattccctgcctccactgattgttccacaagttgaacacgatgcatcaacggcgccgggcagctatgtagatcaaaatggcaaggggataggggaggatagcaattgtgtactaacaatcgaggattgtctttcactcttttttagagaggaggtggtagaacggagctgtgattgttccaaggtacctatggaggagccaagcactaaccaaagcagaaagggtaagcagatggaggtaggcaccaatgatgaggtagcagctaatgggagccatagtaaacagtcagaccggacaacatgctcaaatggccaatctagtaaactgaatagtttgtcagtagaatacaacagttgttactgtaggcaacaacatggttctgacgaagagagtgacattacacagatggcagatacacatactgctggagcaaattcaaggatgacttgtggtcttaaggaaaccgagtatcatggtggtattcaagaaactgtacgtagtagttccctttcgactgagaaacaaaccgatctgttgagcacccagcatagccaaagcctcatcccacagaatcaagacctgaggttggatctcagtgcacaccagttaggagacaagcaaaatggacagaaagagaggagtggacgtgctattcaaaggactaatattactaagctgccgcctgtgttgacccttcatctcaagaggtacttcaagaacggcaacgagtaccataaaaatgaagcccgcgtgagctacaaggagcatcttgatgtaggacggttcatgaactctagttccgcggacaaaagcagcaccgtctaccgtctagccggcgtcgtggagcaccgcggtggacccttcatgaacgcaggacactacgtcgcctacgtgagagcaaggaagatcgggaagcagagcagccggccttcgtcatggttctgcgcggacgacagcaacgtcagagaagtcgctctggaagaggttctcgagcgcaaggcttacgttcttttctacgagagggtggaggacgcaaacacgctgattggttaagagacgttgcagctcgtcggaatagcagcaacaagagacgctgattggttaagagtagctagcattctttgcaatggcattggttagactgttagggtagttgaccatattcaggattatatatatagcttcattcgatcctacagattgatgtttttggctcgcctagtcagggtgattggttatttaattgattggcaaattttggccatgaatgaaatggggacgcttggcttggtcggactggtgaatgtgaatttgtaaggttgtgctgatggtagtgttaattagatgctaaccatttagatgcgttgtg

SEQ ID NO: 43167 - DNA, 2646 bp, Zea Mays
gccattttcgccggcagtttgttttatttcccttctcctgtttcttttctattctgtcggagtcggacttgtgtccatcttgcttttgcttctccctcccccatgatccaatccctaacccgcagtctacttgatcgtggctagaatgatcgcgatcgagtttcttcggagcttcttcggtgccactgccacggccccgatccaatccctaacccgcaggccccgatccaatccctaacccgcagctggctatttgcttttgctttcgtagggtttgttgtttgcttggtggtttcgggtccaataattgggattcatcattcatgcgactctcttatttcttgtgatcccttgtttccttccaggcgtacgtgatggctgacacgagggcgaggccgtgggaggcggacgagagctcgcggtcgcgggactccaaagttccgcggctggacttgctggccgcatcggcggcggaggaggaggagaaagtgaagcatctgctaggccaggaggaatgtaccgagatgaccggccacgatccatgctgcgatcacgtccccacggacagttatcacaatgatattctgatctcgtcgttgctatccgacgacgcggggaattgccaggactgccggggccggcggcgcgaggaggccgatgggcccggcggccggcccatgtatcgccggatcatggtgtgcctggaatgcggccggcattcctgcggggattcgacgagctatatcccgtacggacacgctcaggaccacgccaaccaggaaaagcattgggttgccgcgatgttcgacgatccacaggctggattctgcttcaagtgcgaacacgaagtgcctgtgtatccagagccagacgagatggagatgataacgggcgagattcaggccggcggcggcggcggcggcggtggtcatgcgtttggattcgacatgtcccgcgatctcgccaccgtgttgctcaatctcggggacgcatggtgtgcagccgccgatctcgggtccgtgaatgcgcaaggctatgctatcagagggatgccaaaccgcgggaacacatgctacatgaacgcgatggtgcagtgcctcctcgcgctcgacaagctgcgggcaaggatgctagggccggatactccgccgggccaccttggaatggcactgaaggagcttttcgtggaggcgagcgctgctggttctgcgggaggcatgctgaacccagataaactcttgagaagtgtacgattacatgctggcaagtacgaaccttacacgatgcacgacagctatgaactgctcgagtccttgcgcagcgcattgcatgacgaggaagagggaattcaagctccttacagggaaagaggtgccccgacagtcattgatgcggtcttcaagggcgaactgtgtgatacaaggtcctgcaaagattgtcagtctgcttcggctttccatggagaattctgggagctttcattatcgctgccatcaaaagaggatctatgtgaaaattttgcatcatcatcacaacgagcaagcaagaatctcaaccctcaaccggagaaggctgctcctcagttactttcagcaaatgagagtaacttgtggaagatcgatgccagtaaaactgattctggtgaagagcagcgcaccttgcaaatcaagaatcttatacatgttttgtgcacagaggagccactaaattcagttgattttgttcctcatagcatctatgatgctaaagttgagcagatgattcagataacagcagattccctgcctccactgattgttccacaagttgaacacgatgcatcaacggcgccgggcagctatgtagatcaaaatggcaaggggataggggaggatagcaattgtgtactaacaatcgaggattgtctttcactcttttttagagaggaggtggtagaacggagctgtgattgttccaaggtacctatggaggagccaagcactaaccaaagcagaaagggtaagcagatggaggtaggcaccaatgatgaggtagcagctaatgggagccatagtaaacagtcagaccggacaacatgctcaaatggccaatctagtaaactgaatagtttgtcagtagaatacaacagttgttactgtaggcaacaacatggttctgacgaagagagtgacattacacagatggcagatacacatactgctggagcaaattcaaggatgacttgtggtcttaaggaaaccgagtatcatggtggtattcaagaaactgtacgtagtagttccctttcgactgagaaacaaaccgatctgttgagcacccagcatagccaaagcctcatcccacagaatcaagacctgaggttggatctcagtgcacaccagttaggagacaagcaaaatggacagaaagagaggagtggacgtgctattcaaaggactaatattactaagctgccgcctgtgttgacccttcatctcaagaggtacttcaagaacggcaacgagtaccataaaaatgaagcccgcgtgagctacaaggagcatcttgatgtaggacggttcatgaactctaggaccaaaaatggtttccaactcatcgtggttcaagcttcagaacaaactcaaactgagcttaagcatctttttt

SEQ ID NO: 43168 - DNA, 2563 bp, Zea Mays
aaaatgatagatcgtttcatagacaccgtcagcgcattgcgagccataatctgtgttctttattaccagttctatacttgaccttacaatagttggccttgatgtcgtggatgatgacctgagttcacatgggcaacagcctcattttttgaaaacttgcttgaaccccagcttggaccttggcagtacggttttgctactgggccacaacagaaatgatttggctgtaggtgaggggaaggttgtaatagctacagacaaccttataaagttctcgattgatgaagtcttgtggcatcctggatctgctgggtttgatatgcacggcaacctagcttttatggtctgtgatcccatgaagattgcaccttctacacccaatgggtatgcttctgcatcatcaactgccatttgtacatcaaaaaaggatgtgcccacacagtttgggatccctatccctgcagtatgtgaatggttaaaacaacattggaatggttgcttggaagatgctagcaagccgatgatgactcctgcacgattgacaacctgtggagaacgaagtgggtgttcttcccttggtcgtcttcgttatattaagactgcagaggttgaaggtggtgatgtcttgtcatcatcacagatgccaccaagaccaacatggcagcatggagcatgcagttcagcatctgccaagatttcacatggcgaaaatgattcgattggctcacattctttccatgggcaacatgagcagagctcaaaaatttgcaaacctcataaagagcaagctacttcacttgtggatcattcaagatctattcgcctaccccttcccttaaagcaaatgctgcctgatgataacaaggatgaggcgaacagtcaagctccgcacagaacagaaccatctaatgtgcaaatgaactgtggcactcttcacaatgttgcttaccatgaaaattgctggagtgaggtgcagtccagttcttctccagttgtgatatcggaaataggagatgggagggacggttttagcagcggtgaggagacaatgtactctgctgaaacaagggaaagccggaacattccaagtccaaaggaaaagaaaaccgggatggttggtagatcacagagtcttgtgaaccgtagcaaatgggactcgcctaaaagcgttgaatcttcgagagggtttccctcgaagtcacagaccttcattccgttaaggaaaccgcacctgcaggccgcatccatttcacagaagagccaagattatttcagcccgaccgtctcgtcgaacatgaagaagaggaacctgtcccaaactcccatgaaacccaggcagcgtgctcaagtcacctcaaagtggattacttgatgcattcgcctgccccaggaatcatacaaagataacatgttcttgggttcacccggtcccatgctgcatttctttttcttttcatttatcccttttagatgcatttgtaaatgcattctagtcatggactattctagtcattctttatttagggtacgttaggaaatgctgctctttaccctgcaattctctactgaagggttagacaggttgccatcacaaaatacaacgttttccctcctcctgactcccgcagctgggcggatacaagcctgggccaacctgtccatgtcccgggatatgattcatatatctctagttatatttattatttctagatcaaaatatattagaagaatattatatccaatagaccgatccgggcgtgatcggatcctaaattggcctctaaggagaggtgagaagtgtgggacctggtcttctccagtcttcactcccaagtgtcagctcaagggataattcacaggaatggtttgcccttgctggattgctcctgagtcctgaagctctctgcaaggctgtgctgcccttttgttgaggtgaataaggtgacagctctgcaactgtgttgtttccctttctgtgttggaaggtgaataaggtggcgtcttatgctttaacaaccatcaccagtccaagtcggagacctccacccctgggccctggcggcggagccacaggacgaggagagctagcaccggacggtcatcaggaagacgacaaaccgctgaggcgcagtcgatgccgacggtacaggtggtctctcaggtaggccaagccgccagggcttcgcatgcagtatcccagaaggctagaaacatagtttttcacttgatcgtgcagcgatgcaggtgtaaaatgtaagcatgaaacagttggttcaaaaaaaattaagtgatagagccctcctaacatgtcaaactaacaacacttaaagataggagtgttacaatctctctatgcagtgtggatgaagtctttccatgggaaatttcaaaacccaagtgatggccattgctttgaaagacaataataactactatgtttagggtacaagttttacttataattggtaaactgtaagctgatgtatgcaagaacagttgtacctttgttcctgaatatttatcatctggttcatatttgaactaaaacacgacaaataaaaaa

SEQ ID NO: 43169 - DNA, 1766 bp, Zea Mays
cacagccacccagctacgtaccgcgtgcacctgcaccatcggccgccggcgaccgccaccgccaccgtacgtactagcagctagctgcgccatgggcactactgccgcgcatcgtcgtcgaccgggcagtatcgtcgtcctctcaccatccgccgtcgcgctcgcgctgctgttcttgtcgacgacccttcgcctcgccgccgccgtccagccgtacggcggcggcggaccctgcgcgctggccgtggcgccgctcggctacccttgtgaagagcaccaggtgacgacggcggacgggtacatcctgagcctgcaaaggatcccgagtggcgggcgtggcgggcacggcggcggtgccggtgccggtgcctcgtcctcgcgcgcggggcagccggtgctcctgcagcacggggtcctcgtggacggcatgtcatggttgctggcctcgccggaggagtcgctgccgttcatcctcgccgaccgcggcttcgacgtctggatcgccaacaacaggggcacgcgctggagccgccgccacgtctcgctcgacccctccagccggctctactggaactggtcctgggatgacctggtagtcaacgacctgccggccatggtcgacttcgtcgtcaaacagaccggccagaagcctcactacgtcggacactccatggggacgctggtggcgctggcggccttctcggagggccgggtggtgagccagctgaaatccgcggcgctgctcacgccggtggcctacctcgcccacatcaccacccccatcggcatcctgctggccaaggcgttcgtcggcgaggtaataacaaacatgacgcaccctgcagccctgctcgtctgacgcagcgagccgttctcgttttcgtttctccctgcggccggcgactctctgctcttcatctgcatctgctctgctctgctctgaccgactcagtcactcacaggtgctctcggacttcctcggcatggccgagttcgacccgctagcgtacgtaacgtaccgcgctctcgtacaccccccactgcagatggatgcaggcatgcagctgagctgagctgacctgacctgacctgacctgacctgctctgctcgccgcgcaggccgccggtgacgaacctcatcagggcgttctgccgccgcccgggcatgagctgctacgacctcgtcggctccatcaccggcaagaactactgcctcaacagctccgccgtcgacgtcttcctcaagacctccggggccacgaccaggacaagctcacggtgcagtacctggacaagttcgcgcacctcgacttcatcatcggcgtctgcgccaaggactacgtctacaaggacatgatcgacttcctaaaccgcttcaactagtactagcatatatatttgcttcaatcggtgtcgtcttcagccccagcaggattagacaaaaaaagggggggacactgcagctcgtaaacgttgtccatacagattatcagaggtgaaaaccatacatgatgtaatttagcattagatagttaaaacatggagctgcctcagtatggaggattgtcaactactctccatcacagcagtaggtgtgatgtagaagagtgattgtcacactgtgtgtgttgcaaatttgcaacacagtgattactaatataaaaaatactcttgagttaacctttgacaaaaaactctctgtggctgaggtgctccgggcaaacttttcaaatttaaggtttcgaaggagattatttggagacaca

SEQ ID NO: 43170 - DNA, 1746 bp, Zea Mays
cacagccacccagctacgtaccgcgtgcacctgcaccatcggccgccggcgaccgccaccgccaccgtacgtactagcagctagctgcgccatgggcactactgccgcgcatcgtcgtcgaccgggcagtatcgtcgtcctctcaccatccgccgtcgcgctcgcgctgctgttcttgtcgacgacccttcgcctcgccgccgccgtccagccgtacggcggcggcggaccctgcgcgctggccgtggcgccgctcggctacccttgtgaagagcaccaggtgacgacggcggacgggtacatcctgagcctgcaaaggatcccgagtggcgggcgtggcgggcacggcggcggtgccggtgccggtgcctcgtcctcgcgcgcggggcagccggtgctcctgcagcacggggtcctcgtgcaggacggcatgtcatggttgctggcctcgccggaggagtcgctgccgttcatcctcgccgaccgcggcttcgacgtctggatcgccaacaacaggggcacgcgctggagccgccgccacgtctcgctcgacccctccagccggctctactggaactggtcctgggatgacctggtagtcaacgacctgccggccatggtcgacttcgtcgtcaaacagaccggccagaagcctcactacgtcggacactccatggggacgctggtggcgctggcggccttctcggagggccgggtggtgagccagctgaaatccgcggcgctgctcacgccggtggcctacctcgcccacatcaccacccccatcggcatcctgctggccaaggcgttcgtcggcgaggtgctctcggacttcctcggcatggccgagttcgacccgctagcgccgccggtgacgaacctcatcagggcgttctgccgccgcccgggcatgagctgctacgacctcgtcggctccatcaccggcaagaactactgcctcaacagctccgccgtcgacgtcttcctcaagtacgagccccagccgacctccaccaaaaccatggtccacttcgctcaaaccgtgcgcgacggcgtgctgaccaagtacgactacgtgctgccggagcggaacatcgccagctacggccaggccgagccgccggtgtaccggatgtccggcatcccgccgagcttcccgctcttcctcagctacggcggccgggactcgctcgccgaccccgccgacgtgcgcctcctcctgcaggacctccggggccacgaccaggacaagctcacggtgcagtacctggacaagttcgcgcacctcgacttcatcatcggcgtctgcgccaaggactacgtctacaaggacatgatcgacttcctaaaccgcttcaactagtactagcatatatatttgcttcaatcggtgtcgtcttcagccccagcaggattagacaaaaaaagggggggacactgcagctcgtaaacgttgtccatacagattatcagaggtgaaaaccatacatgatgtaatttagcattagatagttaaaacatggagctgcctcagtatggaggattgtcaactactctccatcacagcagtaggtgtgatgtagaagagtgattgtcacactgtgtgtgttgcaaatttgcaacacagtgattactaatataaaaaatactcttgagttaacctttgacaaaaaactctctgtggctgaggtgctccgggcaaacttttcaaatttaaggtttcgaaggagattatttggagacaca

SEQ ID NO: 43171 - DNA, 2307 bp, Zea Mays
ctagcatttactgtagacactgctacagcaggcttccccggttgactcgaccgaccgtgttgcatgtctcgagtggaaggaacaggaacacacgaacagaacgagaacgggaaagacttttcaacagtaaagtagcattattttctgtttcagttatgcatgcatgtatgcagcgcagtttgaggagtgatgaggaaatgaggcggtaataatggagtgattattacgagccagattcttttttctcgctctctcgtatagaatcaatcaagtgcgtgtggggggtggacgccgagatgccatgcgtgatgcggtgatgccaaaagctgtgtcgaacgaattgcaattgaaggtgtcacgtcacgttgaacggaaagcgaagcacaccacggtctgtcacgttcacatgtacgcgcacacacgcgttcgcgtgcaccccactgtgatcctgatccgagctagctagcgagtagtgcttctgatgacccatccatatccatgccggctcgcgcgcgcactttatatactgctcgtcacgatcgcgcactacgctgcacacagccacccagctacgtaccgcgtgcacctgcaccatcggccgccggcgaccgccaccgccaccgtacgtactagcagctagctgcgccatgggcactactgccgcgcatcgtcgtcgaccgggcagtatcgtcgtcctctcaccatccgccgtcgcgctcgcgctgctgttcttgtcgacgacccttcgcctcgccgccgccgtccagccgtacggcggcggcggaccctgcgcgctggccgtggcgccgctcggctacccttgtgaagagcaccaggtgacgacggcggacgggtacatcctgagcctgcaaaggatcccgagtggcgggcgtggcgggcacggcggcggtgccggtgccggtgcctcgtcctcgcgcgcggggcagccggtgctcctgcagcacggggtcctcgtggacagcaggacggcatgtcatggttgctggcctcgccggaggagtcgctgccgttcatcctcgccgaccgcggcttcgacgtctggatcgccaacaacaggggcacgcgctggagccgccgccacgtctcgctcgacccctccagccggctctactggaactggtcctgggatgacctggtagtcaacgacctgccggccatggtcgacttcgtcgtcaaacagaccggccagaagcctcactacgtcggacactccatggggacgctggtggcgctggcggccttctcggagggccgggtggtgagccagctgaaatccgcggcgctgctcacgccggtggcctacctcgcccacatcaccacccccatcggcatcctgctggccaaggcgttcgtcggcgaggtgctctcggacttcctcggcatggccgagttcgacccgctagcgccgccggtgacgaacctcatcagggcgttctgccgccgcccgggcatgagctgctacgacctcgtcggctccatcaccggcaagaactactgcctcaacagctccgccgtcgacgtcttcctcaagtacgagccccagccgacctccaccaaaaccatggtccacttcgctcaaaccgtgcgcgacggcgtgctgaccaagtacgactacgtgctgccggagcggaacatcgccagctacggccaggccgagccgccggtgtaccggatgtccggcatcccgccgagcttcccgctcttcctcagctacggcggccgggactcgctcgccgaccccgccgacgtgcgcctcctcctgcaggacctccggggccacgaccaggacaagctcacggtgcagtacctggacaagttcgcgcacctcgacttcatcatcggcgtctgcgccaaggactacgtctacaaggacatgatcgacttcctaaaccgcttcaactagtactagcatatatatttgcttcaatcggtgtcgtcttcagccccagcaggattagacaaaaaaagggggggacactgcagctcgtaaacgttgtccatacagattatcagaggtgaaaaccatacatgatgtaatttagcattagatagttaaaacatggagctgcctcagtatggaggattgtcaactactctccatcacagcagtaggtgtgatgtagaagagtgattgtcacactgtgtgtgttgcaaatttgcaacacagtgattactaatataaaaaatactcttgagttaacctttgacaaaaaactctctgtggctgaggtgctccgggcaaacttttcaaatttaaggtttcgaaggagattatttggagacaca

SEQ ID NO: 43172 - DNA, 2244 bp, Zea Mays
atgccggagccccaggccatcctcccgctgcgcgctctcccgccggacgcgccgctgcccttccccgtccccgcgccgttccacccccaagcccccggccccggtgggaccgccccggccacgcccccgaacccgacccctccgcaaccgttaacccccgccgcgccgccttcctcctcttcgacgcggccgccgcacccatgggagatctccgcgcgagcatggctagagtccttccccgacggacggccgcccaccgagcccgaggtcgacgcctacatcgacgtgcaccgccccgagctcccttccctcccccgctcccagctacaccagcgcctcctcgccctccgcggcgaccaggttctggatgcagaccagagcgcattcccgtacaggttccagcgtactgatctatggaagcctgtgtaccagtggttggaatctcttgagctggactcactagttgctacacagcagatatcagactggcttacatcgaacccaaagataatggacagaatggttgagaaacattcaaaataccatttgattcactacacccagaggatgcacttgaagatgctaaaaaagaagggaaagttgccaaagactctgcaactttctgcggctagagccacagttcgaccaattgctgctccgttcactccagaagaaaacattgtgccgttacagaaaactataactccagtgacagggagacaacagagcggtaccacaggcagattttccagtgccagttcagggagacaacagagctgtaccccaggcagatttcaaggtggaaatgcaactcttagggacaagaagacgtcattgtccaaaaagaaagaagctttgctcaaatacgaacttttgacagacttacagaaccaattgactgctgtgctgttaaagcaatgccgtactgttgccattaaagaaacagattcatcatatgtggaatctccaaatccagagactaacatgagtatacaagggaccactactgcaaatgcttcagccccttcagaggcaaagaatgtgtttatcaatgaacagtcagttccagcaggagccacagaaagtgaacctgggcataagaggaagagaaaccctatcatcgttacacctgcatggtgttatagtgaagcatcagcaggaaccttgcagaatgaaataaatcctagctcaaatagtgatgtttcaagaaatttcaatatttggagaggacatgctaatccactagtttcacatagagatactaagaaaaatatattattctgtcttgagggacgcgaaactggtgtcagctgctctcaagctgcttcttatggaggttatgctggacgaaattgtgaaagatggactccatttcttgaaggatggaattcacctgcattccagtttgaagggcctgctgtacatgttgttagaaaaagttacctatcttggtgtccaacatcatgtgcttatacgtcaagtgcaccttctgctcagcctcatggcagggtatccgcaaagttcttgatgtaaaatttcatccagaagggttgcctcagcttgtttctagctctaatgaggcacccaatgaattactgctattcaatctgctttctggaagggcaattcagcttagaggccacaatactaagatccagtctatcgcctttgcagtcaaaggagcaagtgtagtgtcttgtgcttctaatttattaaaggtatgggactgcattactgggtcttgcctctatacgctgggtggcgatgatcaaaattcagtggggcatactcagaaaataaatgctatggcagtgaataaatggcaatcctgtcttgttgtcaccagtggagcaaaaggtgatgggaagcttctactatggaatgctttaagaggtgaacttgcttctgatctaaattcgaacttgaggtctcaggatatgatctatccctcagttgatacaatggagttctatagtgagaatcatctggcatgtggaagtgattgtgactatggtggctcagctgtggtacaattatgggatattgattctccagagtcttatttatctttctctgcaagtgactcttacattacttcccttaaagtcaaccctgctggcaacactctcattactggttctggcgatgggactattggcttatttgacatccgtacttgttctgcaattagccacttgtcagtgggatctagttgtgaggttacatctgtttcatttagcaaaa

SEQ ID NO: 43173 - DNA, 2268 bp, Zea Mays
atgccggagccccaggccatcctcccgctgcgcgctctcccgccggacgcgccgctgcccttccccgtccccgcgccgttccacccccaagcccccggccccggtgggaccgccccggccacgcccccgaacccgacccctccgcaaccgttaacccccgccgcgccgccttcctcctcttcgacgcggccgccgcacccatgggagatctccgcgcgagcatggctagagtccttccccgacggacggccgcccaccgagcccgaggtcgacgcctacatcgacgtgcaccgccccgagctcccttccctcccccgctcccagctacaccagcgcctcctcgccctccgcggcgaccaggttctggatgcagaccagagcgcattcccgtacaggttccagcgtactgatctatggaagcctgtgtaccagtggttggaatctcttgagctggactcactagttgctacacagcagatatcagactggcttacatcgaacccaaagataatggacagaatggttgagaaacattcaaaataccatttgattcactacacccagaggatgcacttgaagatgctaaaaaagaagggaaagttgccaaagactctgcaactttctgcggctagagccacagttcgaccaattgctgctccgttcactccagaagaaaacattgtgccgttacagaaaactataactccagtgacaggtagacttcccagtgccagttcagggagacaacagagcggtaccacaggcagattttccagtgccagttcagggagacaacagagctgtaccccaggcagatttcaaggtggaaatgcaactcttagggacaagaagacgtcattgtccaaaaagaaagaagctttgctcaaatacgaacttttgacagacttacagaaccaattgactgctgtgctgttaaagcaatgccgtactgttgccattaaagaaacagattcatcatatgtggaatctccaaatccagagactaacatgagtatacaagggaccactactgcaaatgcttcagccccttcagaggcaaagaatgtgtttatcaatgaacagtcagttccagcaggagccacagaaagtgaacctgggcataagaggaagagaaaccctatcatcgttacacctgcatggtgttatagtgaagcatcagcaggaaccttgcagaatgaaataaatcctagctcaaatagtgatgtttcaagaaatttcaatatttggagaggacatgctaatccactagtttcacatagagatactaagaaaaatatattattctgtcttgagggacgcgaaactggtgtcagctgctctcaagctgcttcttatggaggttatgctggacgaaattgtgaaagatggactccatttcttgaaggatggaattcacctgcattccagtttgaagggcctgctgtacatgttgttagaaaaagttacctatcttggtgtccaacatcatgtgcttatacgtcaagtgcaccttctgctcagcctcatggcagggtatccgcaaagttcttgatgtaaaatttcatccagaagggttgcctcagcttgtttctagctctaatgaggcacccaatgaattactgctattcaatctgctttctggaagggcaattcagcttagaggccacaatactaagatccagtctatcgcctttgcagtcaaaggagcaagtgtagtgtcttgtgcttctaatttattaaaggtatgggactgcattactgggtcttgcctctatacgctgggtggcgatgatcaaaattcagtggggcatactcagaaaataaatgctatggcagtgaataaatggcaatcctgtcttgttgtcaccagtggagcaaaaggtgatgggaagcttctactatggaatgctttaagaggtgaacttgcttctgatctaaattcgaacttgaggtctcaggatatgatctatccctcagttgatacaatggagttctatagtgagaatcatctggcatgtggaagtgattgtgactatggtggctcagctgtggtacaattatgggatattgattctccagagtcttatttatctttctctgcaagtgactcttacattacttcccttaaagtcaaccctgctggcaacactctcattactggttctggcgatgggactattggcttatttgacatccgtacttgttctgcaattagccacttgtcagtgggatctagttgtgaggttacatctgtttcatttagcaaaa

SEQ ID NO: 43174 - DNA, 2173 bp, Zea Mays
atgccggagccccaggccatcctcccgctgcgcgctctcccgccggacgcgccgctgcccttccccgtccccgcgccgttccacccccaagcccccggccccggtgggaccgccccggccacgcccccgaacccgacccctccgcaaccgttaacccccgccgcgccgccttcctcctcttcgacgcggccgccgcacccatgggagatctccgcgcgagcatggctagagtccttccccgacggacggccgcccaccgagcccgaggtcgacgcctacatcgacgtgcaccgccccgagctcccttccctcccccgctcccagctacaccagcgcctcctcgccctccgcggcgaccaggttctggatgcagaccagagcgcattcccgtacaggttccagcgtactgatctatggaagcctgtgtaccagtggttggaatctcttgagctggactcactagttgctacacagcagatatcagactggcttacatcgaacccaaagataatggacagaatggttgagaaacattcaaaataccatttgattcactacacccagaggatgcacttgaagatgctaaaaaagaagggaaagttgccaaagactctgcaactttctgcggctagagccacagttcgaccaattgctgctccgttcactccagaagaaaacattgtgccgttacagaaaactataactccagtgacagggagacaacagagcggtaccacaggcagattttccagtgccagttcagggagacaacagagctgtaccccaggcagatttcaaggtggaaatgcaactcttagggacaagaagacgtcattgtccaaaaagaaagaagctttgctcaaatacgaacttttgacagacttacagaaccaattgactgctgtgctgttaaagcaatgccgtactgttgccattaaagaaacagattcatcatatgtggaatctccaaatccagagactaacatgagtatacaagggaccactactgcaaatgcttcagccccttcagaggcaaagaatgtgtttatcaatgaacagtcagttccagcaggagccacagaaagtgaacctgggcataagaggaagagaaaccctatcatcgttacacctgcatggtgttatagtgaagcatcagcaggaaccttgcagaatgaaataaatcctagctcaaatagtgatgtttcaagaaatttcaatatttggagaggacatgctaatccactagtttcacatagagatactaagaaaaatatattattctgtcttgagggacgcgaaactggtgtcagctgctctcaagctgcttcttatggaggttatgctggacgaaattgtgaaagatggactccatttcttgaaggatggaattcacctgcattccagtttgaagggcctgctgtacatgttgttagaaaaagttacctatcttggtgtccaacatcatgtgcttatacgtcaagtgcaccttctgctcagcctcatggcagggcacccaatgaattactgctattcaatctgctttctggaagggcaattcagcttagaggccacaatactaagatccagtctatcgcctttgcagtcaaaggagcaagtgtagtgtcttgtgcttctaatttattaaaggtatgggactgcattactgggtcttgcctctatacgctgggtggcgatgatcaaaattcagtggggcatactcagaaaataaatgctatggcagtgaataaatggcaatcctgtcttgttgtcaccagtggagcaaaaggtgatgggaagcttctactatggaatgctttaagaggtgaacttgcttctgatctaaattcgaacttgaggtctcaggatatgatctatccctcagttgatacaatggagttctatagtgagaatcatctggcatgtggaagtgattgtgactatggtggctcagctgtggtacaattatgggatattgattctccagagtcttatttatctttctctgcaagtgactcttacattacttcccttaaagtcaaccctgctggcaacactctcattactggttctggcgatgggactattggcttatttgacatccgtacttgttctgcaattagccacttgtcagtgggatctagttgtgaggttacatctgtttcatttagcaaaa

SEQ ID NO: 43175 - DNA, 2360 bp, Zea Mays
atgccggagccccaggccatcctcccgctgcgcgctctcccgccggacgcgccgctgcccttccccgtccccgcgccgttccacccccaagcccccggccccggtgggaccgccccggccacgcccccgaacccgacccctccgcaaccgttaacccccgccgcgccgccttcctcctcttcgacgcggccgccgcacccatgggagatctccgcgcgagcatggctagagtccttccccgacggacggccgcccaccgagcccgaggtcgacgcctacatcgacgtgcaccgccccgagctcccttccctcccccgctcccagctacaccagcgcctcctcgccctccgcggcgaccaggttctggatgcagaccagagcgcattcccgtacaggttccagcgtactgatctatggaagcctgtgtaccagtggttggaatctcttgagctggactcactagttgctacacagcagatatcagactggcttacatcgaacccaaagataatggacagaatggttgagaaacattcaaaataccatttgattcactacacccagaggatgcacttgaagatgctaaaaaagaagggaaagttgccaaagactctgcaactttctgcggctagagccacagttcgaccaattgctgctccgttcactccagaagaaaacattgtgccgttacagaaaactataactccagtgacaggtagacttcccagtgccagttcagggagacaacagagcggtaccacaggcagattttccagtgccagttcagggagacaacagagctgtaccccaggcagatttcaaggtggaaatgcaactcttagggacaagaagacgtcattgtccaaaaagaaagaagctttgctcaaatacgaacttttgacagacttacagaaccaattgactgctgtgctgttaaagcaatgccgtactgttgccattaaagaaacagattcatcatatgtggaatctccaaatccagagactaacatgagtatacaagggaccactactgcaaatgcttcagccccttcagaggcaaagaatgtgtttatcaatgaacagtcagttccagcaggagccacagaaagtgaacctgggcataagaggaagagaaaccctatcatcgttacacctgcatggtgttatagtgaagcatcagcaggaaccttgcagaatgaaataaatcctagctcaaatagtgatgtttcaagaaatttcaatatttggagaggacatgctaatccactagtttcacatagagatactaagaaaaatatattattctgtcttgagggacgcgaaactggtgtcagctgctctcaagctgcttcttatggaggttatgctggacgaaattgtgaaagatggactccatttcttgaaggatggaattcacctgcattccagtttgaagggcctgctgtacatgttgttagaaaaagttacctatcttggtgtccaacatcatgtgcttatacgtcaagtgcaccttctgctcagcctcatggcaggcaaggtatccgcaaagttcttgatgtaaaatttcatccagaagggttgcctcagcttgtttctagctctaatgagtttgctctatcctcggatgcttggacactcctgtgacctgtctcactggcggctacccaggggtcggagatgagcacctcttctgaaggcacccaatgaattactgctattcaatctgctttctggaagggcaattcagcttagaggccacaatactaagatccagtctatcgcctttgcagtcaaaggagcaagtgtagtgtcttgtgcttctaatttattaaaggtatgggactgcattactgggtcttgcctctatacgctgggtggcgatgatcaaaattcagtggggcatactcagaaaataaatgctatggcagtgaataaatggcaatcctgtcttgttgtcaccagtggagcaaaaggtgatgggaagcttctactatggaatgctttaagaggtgaacttgcttctgatctaaattcgaacttgaggtctcaggatatgatctatccctcagttgatacaatggagttctatagtgagaatcatctggcatgtggaagtgattgtgactatggtggctcagctgtggtacaattatgggatattgattctccagagtcttatttatctttctctgcaagtgactcttacattacttcccttaaagtcaaccctgctggcaacactctcattactggttctggcgatgggactattggcttatttgacatccgtacttgttctgcaattagccacttgtcagtgggatctagttgtgaggttacatctgtttcatttagcaaaa

SEQ ID NO: 43176 - DNA, 2266 bp, Zea Mays
atgccggagccccaggccatcctcccgctgcgcgctctcccgccggacgcgccgctgcccttccccgtccccgcgccgttccacccccaagcccccggccccggtgggaccgccccggccacgcccccgaacccgacccctccgcaaccgttaacccccgccgcgccgccttcctcctcttcgacgcggccgccgcacccatgggagatctccgcgcgagcatggctagagtccttccccgacggacggccgcccaccgagcccgaggtcgacgcctacatcgacgtgcaccgccccgagctcccttccctcccccgctcccagctacaccagcgcctcctcgccctccgcggcgaccaggttctggatgcagaccagagcgcattcccgtacaggttccagcgtactgatctatggaagcctgtgtaccagtggttggaatctcttgagctggactcactagttgctacacagcagatatcagactggcttacatcgaacccaaagataatggacagaatggttgagaaacattcaaaataccatttgattcactacacccagaggatgcacttgaagatgctaaaaaagaagggaaagttgccaaagactctgcaactttctgcggctagagccacagttcgaccaattgctgctccgttcactccagaagaaaacattgtgccgttacagaaaactataactccagtgacaggtagacttcccagtgccagttcagggagacaacagagcggtaccacaggcagattttccagtgccagttcagggagacaacagagctgtaccccaggcagatttcaaggtggaaatgcaactcttagggacaagaagacgtcattgtccaaaaagaaagaagctttgctcaaatacgaacttttgacagacttacagaaccaattgactgctgtgctgttaaagcaatgccgtactgttgccattaaagaaacagattcatcatatgtggaatctccaaatccagagactaacatgagtatacaagggaccactactgcaaatgcttcagccccttcagaggcaaagaatgtgtttatcaatgaacagtcagttccagcaggagccacagaaagtgaacctgggcataagaggaagagaaaccctatcatcgttacacctgcatggtgttatagtgaagcatcagcaggaaccttgcagaatgaaataaatcctagctcaaatagtgatgtttcaagaaatttcaatatttggagaggacatgctaatccactagtttcacatagagatactaagaaaaatatattattctgtcttgagggacgcgaaactggtgtcagctgctctcaagctgcttcttatggaggttatgctggacgaaattgtgaaagatggactccatttcttgaaggatggaattcacctgcattccagtttgaagggcctgctgtacatgttgttagaaaaagttacctatcttggtgtccaacatcatgtgcttatacgtcaagtgcaccttctgctcagcctcatggcaggcaaggtatccgcaaagttcttgatgtaaaatttcatccagaagggttgcctcagcttgtttctagctctaatgaggcacccaatgaattactgctattcaatctgctttctggaagggcaattcagcttagaggccacaatactaagtctatcgcctttgcagtcaaaggagcaagtgtagtgtcttgtgcttctaatttattaaaggtatgggactgcattactgggtcttgcctctatacgctgggtggcgatgatcaaaattcagtggggcatactcagaaaataaatgctatggcagtgaataaatggcaatcctgtcttgttgtcaccagtggagcaaaaggtgatgggaagcttctactatggaatgctttaagaggtgaacttgcttctgatctaaattcgaacttgaggtctcaggatatgatctatccctcagttgatacaatggagttctatagtgagaatcatctggcatgtggaagtgattgtgactatggtggctcagctgtggtacaattatgggatattgattctccagagtcttatttatctttctctgcaagtgactcttacattacttcccttaaagtcaaccctgctggcaacactctcattactggttctggcgatgggactattggcttatttgacatccgtacttgttctgcaattagccacttgtcagtgggatctagttgtgaggttacatctgtttcatttagcaaaa

SEQ ID NO: 43177 - DNA, 2238 bp, Zea Mays
atgccggagccccaggccatcctcccgctgcgcgctctcccgccggacgcgccgctgcccttccccgtccccgcgccgttccacccccaagcccccggccccggtgggaccgccccggccacgcccccgaacccgacccctccgcaaccgttaacccccgccgcgccgccttcctcctcttcgacgcggccgccgcacccatgggagatctccgcgcgagcatggctagagtccttccccgacggacggccgcccaccgagcccgaggtcgacgcctacatcgacgtgcaccgccccgagctcccttccctcccccgctcccagctacaccagcgcctcctcgccctccgcggcgaccaggttctggatgcagaccagagcgcattcccgtacaggttccagcgtactgatctatggaagcctgtgtaccagtggttggaatctcttgagctggactcactagttgctacacagcagatatcagactggcttacatcgaacccaaagataatggacagaatggttgagaaacattcaaaataccatttgattcactacacccagaggatgcacttgaagatgctaaaaaagaagggaaagttgccaaagactctgcaactttctgcggctagagccacagttcgaccaattgctgctccgttcactccagaagaaaacattgtgccgttacagaaaactataactccagtgacaggtagacttcccagtgccagttcagggagacaacagagcggtaccacaggcagattttccagtgccagttcagggagacaacagagctgtaccccaggcagatttcaaggtggaaatgcaactcttagggacaagaagacgtcattgtccaaaaagaaagaagctttgctcaaatacgaacttttgacagacttacagaaccaattgactgctgtgctgttaaagcaatgccgtactgttgccattaaagaaacagattcatcatatgtggaatctccaaatccagagactaacatgagtatacaagggaccactactgcaaatgcttcagccccttcagaggcaaagaatgtgtttatcaatgaacagtcagttccagcaggagccacagaaagtgaacctgggcataagaggaagagaaaccctatcatcgttacacctgcatggtgttatagtgaagcatcagcaggaaccttgcagaatgaaataaatcctagctcaaatagtgatgtttcaagaaatttcaatatttggagaggacatgctaatccactagtttcacatagagatactaagaaaaatatattattctgtcttgagggacgcgaaactggtgtcagctgctctcaagctgcttcttatggaggttatgctggacgaaattgtgaaagatggactccatttcttgaaggatggaattcacctgcattccagtttgaagggcctgctgtacatgttgttagaaaaagttacctatcttggtgtccaacatcatgtgcttatacgtcaagtgcaccttctgctcagcctcatggcaggcaaggtatccgcaaagttcttgatgtaaaatttcatccagaagggttgcctcagcttgtttctagctctaatgaggcacccaatgaattactgctattcaatctgctttctggaagggcaattcagcttagaggccacaatactaagatccagtctatcgcctttgcagtcaaaggagcaagtgtagtgtcttgtgcttctaatttattaaaggtatgggactgcattactgggtcttgcctctatacgctgggtggcgatgatcaaaattcagtggggcatactcagaaaataaatgctatggcagtgaataaatggcaatcctgtcttgttgtcaccagtggagcaaaaggtgatgggaagcttctactatggaatgctttaagaggtctcaggatatgatctatccctcagttgatacaatggagttctatagtgagaatcatctggcatgtggaagtgattgtgactatggtggctcagctgtggtacaattatgggatattgattctccagagtcttatttatctttctctgcaagtgactcttacattacttcccttaaagtcaaccctgctggcaacactctcattactggttctggcgatgggactattggcttatttgacatccgtacttgttctgcaattagccacttgtcagtgggatctagttgtgaggttacatctgtttcatttagcaaaa

SEQ ID NO: 43178 - DNA, 2323 bp, Zea Mays
gcaaaacccatcaggtccccgccacacctcgatactctaacttcggccgccgccgccgccgccgccgccgcgaatgccggagccccaggccatcctcccgctgcgcgctctcccgccggacgcgccgctgcccttccccgtccccgcgccgttccacccccaagcccccggccccggtgggaccgccccggccacgcccccgaacccgacccctccgcaaccgttaacccccgccgcgccgccttcctcctcttcgacgcggccgccgcacccatgggagatctccgcgcgagcatggctagagtccttccccgacggacggccgcccaccgagcccgaggtcgacgcctacatcgacgtgcaccgccccgagctcccttccctcccccgctcccagctacaccagcgcctcctcgccctccgcggcgaccaggttctggatgcagaccagagcgcattcccgtacaggttccagcgtactgatctatggaagcctgtgtaccagtggttggaatctcttgagctggactcactagttgctacacagcagatatcagactggcttacatcgaacccaaagataatggacagaatggttgagaaacattcaaaataccatttgattcactacacccagaggatgcacttgaagatgctaaaaaagaagggaaagttgccaaagactctgcaactttctgcggctagagccacagttcgaccaattgctgctccgttcactccagaagaaaacattgtgccgttacagaaaactataactccagtgacaggtagacttcccagtgccagttcagggagacaacagagcggtaccacaggcagattttccagtgccagttcagggagacaacagagctgtaccccaggcagatttcaaggtggaaatgcaactcttagggacaagaagacgtcattgtccaaaaagaaagaagctttgctcaaatacgaacttttgacagacttacagaaccaattgactgctgtgctgttaaagcaatgccgtactgttgccattaaagaaacagattcatcatatgtggaatctccaaatccagagactaacatgagtatacaagggaccactactgcaaatgcttcagccccttcagaggcaaagaatgtgtttatcaatgaacagtcagttccagcaggagccacagaaagtgaacctgggcataagaggaagagaaaccctatcatcgttacacctgcatggtgttatagtgaagcatcagcaggaaccttgcagaatgaaataaatcctagctcaaatagtgatgtttcaagaaatttcaatatttggagaggacatgctaatccactagtttcacatagagatactaagaaaaatatattattctgtcttgagggacgcgaaactggtgtcagctgctctcaagctgcttcttatggaggttatgctggacgaaattgtgaaagatggactccatttcttgaaggatggaattcacctgcattccagtttgaagggcctgctgtacatgttgttagaaaaagttacctatcttggtgtccaacatcatgtgcttatacgtcaagtgcaccttctgctcagcctcatggcaggcaaggtatccgcaaagttcttgatgtaaaatttcatccagaagggttgcctcagcttgtttctagctctaatgaggcacccaatgaattactgctattcaatctgctttctggaagggcaattcagcttagaggccacaatactaagtcaaaggagcaagtgtagtgtcttgtgcttctaatttattaaaggtatgggactgcattactgggtcttgcctctatacgctgggtggcgatgatcaaaattcagtggggcatactcagaaaataaatgctatggcagtgaataaatggcaatcctgtcttgttgtcaccagtggagcaaaaggtgatgggaagcttctactatggaatgctttaagaggtgaacttgcttctgatctaaattcgaacttgaggtctcaggatatgatctatccctcagttgatacaatggagttctatagtgagaatcatctggcatgtggaagtgattgtgactatggtggctcagctgtggtacaattatgggatattgattctccagagtcttatttatctttctctgcaagtgactcttacattacttcccttaaagtcaaccctgctggcaacactctcattactggttctggcgatgggactattggcttatttgacatccgtacttgttctgcaattagccacttgtcagtgggatctagttgtgaggttacatctgtttcatttagcaaaa

SEQ ID NO: 43179 - DNA, 2357 bp, Zea Mays
caccccaaaacggcaaaacccatcaggtccccgccacacctcgatactctaacttcggccgccgccgccgccgccgccgccgcgaatgccggagccccaggccatcctcccgctgcgcgctctcccgccggacgcgccgctgcccttccccgtccccgcgccgttccacccccaagcccccggccccggtgggaccgccccggccacgcccccgaacccgacccctccgcaaccgttaacccccgccgcgccgccttcctcctcttcgacgcggccgccgcacccatgggagatctccgcgcgagcatggctagagtccttccccgacggacggccgcccaccgagcccgaggtcgacgcctacatcgacgtgcaccgccccgagctcccttccctcccccgctcccagctacaccagcgcctcctcgccctccgcggcgaccaggttctggatgcagaccagagcgcattcccgtacaggttccagcgtactgatctatggaagcctgtgtaccagtggttggaatctcttgagctggactcactagttgctacacagcagatatcagactggcttacatcgaacccaaagataatggacagaatggttgagaaacattcaaaataccatttgattcactacacccagaggatgcacttgaagatgctaaaaaagaagggaaagttgccaaagactctgcaactttctgcggctagagccacagttcgaccaattgctgctccgttcactccagaagaaaacattgtgccgttacagaaaactataactccagtgacaggtagacttcccagtgccagttcagggagacaacagagcggtaccacaggcagattttccagtgccagttcagggagacaacagagctgtaccccaggcagatttcaaggtggaaatgcaactcttagggacaagaagacgtcattgtccaaaaagaaagaagctttgctcaaatacgaacttttgacagacttacagaaccaattgactgctgtgctgttaaagcaatgccgtactgttgccattaaagaaacagattcatcatatgtggaatctccaaatccagagactaacatgagtatacaagggaccactactgcaaatgcttcagccccttcagaggcaaagaatgtgtttatcaatgaacagtcagttccagcaggagccacagaaagtgaacctgggcataagaggaagagaaaccctatcatcgttacacctgcatggtgttatagtgaagcatcagcaggaaccttgcagaatgaaataaatcctagctcaaatagtgatgtttcaagaaatttcaatatttggagaggacatgctaatccactagtttcacatagagatactaagaaaaatatattattctgtcttgagggacgcgaaactggtgtcagctgctctcaagctgcttcttatggaggttatgctggacgaaattgtgaaagatggactccatttcttgaaggatggaattcacctgcattccagtttgaagggcctgctgtacatgttgttagaaaaagttacctatcttggtgtccaacatcatgtgcttatacgtcaagtgcaccttctgctcagcctcatggcaggcaaggtatccgcaaagttcttgatgtaaaatttcatccagaagggttgcctcagcttgtttctagctctaatgaggcacccaatgaattactgctattcaatctgctttctggaagggcaattcagcttagaggccacaatactaagatccagtctatcgcctttgcagtcaaaggagcaagtgtagtgtcttgtgcttctaatttattaaaggtatgggactgcattactgggtcttgcctctatacgctgggtggcgatgatcaaaattcagtggggcatactcagaaaataaatgctatggcagtgaataaatggcaatcctgtcttgttgtcaccagtggagcaaaaggtgatgggaagcttctactatggaatgctttaagaggtgaacttgcttctgatctaaattcgaacttgaggtctcaggatatgatctatccctcagttgatacaatggagttctatagtgagaatcatctggcatgtggaagtgattgtgactatggtggctcagctgtggtacaattatgggatattgattctccagagtcttatttatctttctctgcaagtgactcttacattacttcccttaaagtcaaccctgctggcaacactctcattactggttctggcgatgggactattggcttatttgacatccgtacttgttctgcaattagccacttgtcagtgggatctagttgtgaggttacatctgtttcatttagcaaaa

SEQ ID NO: 43180 - DNA, 2333 bp, Zea Mays
caccccaaaacggcaaaacccatcaggtccccgccacacctcgatactctaacttcggccgccgccgccgccgccgccgccgcgaatgccggagccccaggccatcctcccgctgcgcgctctcccgccggacgcgccgctgcccttccccgtccccgcgccgttccacccccaagcccccggccccggtgggaccgccccggccacgcccccgaacccgacccctccgcaaccgttaacccccgccgcgccgccttcctcctcttcgacgcggccgccgcacccatgggagatctccgcgcgagcatggctagagtccttccccgacggacggccgcccaccgagcccgaggtcgacgcctacatcgacgtgcaccgccccgagctcccttccctcccccgctcccagctacaccagcgcctcctcgccctccgcggcgaccaggttctggatgcagaccagagcgcattcccgtacaggttccagcgtactgatctatggaagcctgtgtaccagtggttggaatctcttgagctggactcactagttgctacacagcagatatcagactggcttacatcgaacccaaagataatggacagaatggttgagaaacattcaaaataccatttgattcactacacccagaggatgcacttgaagatgctaaaaaagaagggaaagttgccaaagactctgcaactttctgcggctagagccacagttcgaccaattgctgctccgttcactccagaagaaaacattgtgccgttacagaaaactataactccagtgacagggagacaacagagcggtaccacaggcagattttccagtgccagttcagggagacaacagagctgtaccccaggcagatttcaaggtggaaatgcaactcttagggacaagaagacgtcattgtccaaaaagaaagaagctttgctcaaatacgaacttttgacagacttacagaaccaattgactgctgtgctgttaaagcaatgccgtactgttgccattaaagaaacagattcatcatatgtggaatctccaaatccagagactaacatgagtatacaagggaccactactgcaaatgcttcagccccttcagaggcaaagaatgtgtttatcaatgaacagtcagttccagcaggagccacagaaagtgaacctgggcataagaggaagagaaaccctatcatcgttacacctgcatggtgttatagtgaagcatcagcaggaaccttgcagaatgaaataaatcctagctcaaatagtgatgtttcaagaaatttcaatatttggagaggacatgctaatccactagtttcacatagagatactaagaaaaatatattattctgtcttgagggacgcgaaactggtgtcagctgctctcaagctgcttcttatggaggttatgctggacgaaattgtgaaagatggactccatttcttgaaggatggaattcacctgcattccagtttgaagggcctgctgtacatgttgttagaaaaagttacctatcttggtgtccaacatcatgtgcttatacgtcaagtgcaccttctgctcagcctcatggcaggcaaggtatccgcaaagttcttgatgtaaaatttcatccagaagggttgcctcagcttgtttctagctctaatgaggcacccaatgaattactgctattcaatctgctttctggaagggcaattcagcttagaggccacaatactaagatccagtctatcgcctttgcagtcaaaggagcaagtgtagtgtcttgtgcttctaatttattaaaggtatgggactgcattactgggtcttgcctctatacgctgggtggcgatgatcaaaattcagtggggcatactcagaaaataaatgctatggcagtgaataaatggcaatcctgtcttgttgtcaccagtggagcaaaaggtgatgggaagcttctactatggaatgctttaagaggtgaacttgcttctgatctaaattcgaacttgaggtctcaggatatgatctatccctcagttgatacaatggagttctatagtgagaatcatctggcatgtggaagtgattgtgactatggtggctcagctgtggtacaattatgggatattgattctccagagtcttatttatctttctctgcaagtgactcttacattacttcccttaaagtcaaccctgctggcaacactctcattactggttctggcgatgggactattggcttatttgacatccgtacttgttctgcaattagccacttgtcagtgggatctagttgtgaggttacatctgtttcatttagcaaaa

SEQ ID NO: 43181 - DNA, 1738 bp, Zea Mays
atgccggagccccaggccatcctcccgctgcgcgctctcccgccggacgcgccgctgcccttccccgtccccgcgccgttccacccccaagcccccggccccggtgggaccgccccggccacgcccccgaacccgacccctccgcaaccgttaacccccgccgcgccgccttcctcctcttcgacgcggccgccgcacccatgggagatctccgcgcgagcatggctagagtccttccccgacggacggccgcccaccgagcccgaggtcgacgcctacatcgacgtgcaccgccccgagctcccttccctcccccgctcccagctacaccagcgcctcctcgccctccgcggcgaccaggttctggatgcagaccagagcgcattcccgtacaggttccagcgtactgatctatggaagcctgtgtaccagtggttggaatctcttgagctggactcactagttgctacacagcagatatcagactggcttacatcgaacccaaagataatggacagaatggttgagaaacattcaaaataccatttgattcactacacccagaggatgcacttgaagatgctaaaaaagaagggaaagttgccaaagactctgcaactttctgcggctagagccacagttcgaccaattgctgctccgttcactccagaagaaaacattgtgccgttacagaaaactataactccagtgacaggtagacttcccagtgccagttcagggagacaacagagcggtaccacaggcagattttccagtgccagttcagggagacaacagagctgtaccccaggcagatttcaaggtggaaatgcaactcttagggacaagaagacgtcattgtccaaaaagaaagaagctttgctcaaatacgaacttttgacagacttacagaaccaattgactgctgtgctgttaaagcaatgccgtactgttgccattaaagaaacagattcatcatatgtggaatctccaaatccagagactaacatgagtatacaagggaccactactgcaaatgcttcagccccttcagaggcaaagaatgtgtttatcaatgaacagtcagttccagcaggagccacagaaagtgaacctgggcataagaggaagagaaaccctatcatcgttacacctgcatggtgttatagtgaagcatcagcaggaaccttgcagaatgaaataaatcctagctcaaatagtgatgtttcaagaaatttcaatatttggagaggacatgctaatccactagtttcacatagagatactaagaaaaatatattattctgtcttgagggacgcgaaactggtgtcagctgctctcaagctgcttcttatggaggttatgctggacgaaattgtgaaagatggactccatttcttgaaggatggaattcacctgcattccagtttgaagggcctgctgtacatgttgttagaaaaagttacctatcttggtgtccaacatcatgtgcttatacgtcaagtgcaccttctgctcagcctcatggcaggcaaggtatccgcaaagttcttgatgtaaaatttcatccagaagggttgcctcagcttgtttctagctctaatgaggcacccaatgaattactgctattcaatctgctttctggaagggcaattcagcttagaggccacaatactaagccctgctccaccagtcctgcagcttgtaatcttggaaatctggagccaaggaatgaag

SEQ ID NO: 43182 - DNA, 163 bp, Zea Mays
atctggtagggagatactggctttagtgatcactgatcagcattgatccccccccccccccccccactttttgtcgaatcggctctgctagccagcattattgtggacattttttgaatcgtctctagaatagtcgccgatgcgtgccttagcagcgcacaga

SEQ ID NO: 43183 - DNA, 1409 bp, Zea Mays
gacaggtctcacagtattttcctgtctctaagcgctgatggacgtacgtgaggagcatcttagtatacgaccactggatcatgtgcccacctacctaggaccatctattcttctccccattggagaaaaaaaactgaattccatttacttgcggagttcgacgccgacaagcgcagctgcagaaagcgtctggacggccataatcgccgccgcaggaagccacagccagacaccatggcttctgctagctctatcacaagccagcaaggtcattttcgtacactcaccaattctgctctgggtttttccccccggtctgtacttggttcaaatacatctacattgttgtagatcttgcgtagcatttcagcatgtttcagaactcaaattcggttcataagaaggtcctcacagccccaacaaaagattagtagtgtgatatactatgtttctttgcctttaagatgtgttctactacaaattatactagtatgcttcaccacttgtggtgcttacataactgcaaattaatcgacagccgccgtccatattatgagtccgaaactttcgccacagttaccagcagaattggcatgtagaactgcaagaaaattctgattcacattgaatgaaacggggcacagaatcaatttatcagttatgtcccctaatcgacatttcttcccaattgatcaggcacacgattctcaccatttgcgcctccaagactggaggcgagctggccgggggtgatgaaaaccgaggagagtccatatcgcatcactcaccaaatccatctgggctccagcagcagcagcaggcagcagcatttcgtgggagccgccacgtctgcctacgccaaagaaggcccgcgcttccctttcctgcaggagggcgagataagcttcgccaccggcgtggtgttggagccgccggcggcggctccagcgtgccagccgctcctcaagtcgggagcaccaccacccgagagcagcagcgccggcggcgggaagatgttctccgatcaggggctgactcgcgtgctcgactcggactgtgctctctctcttctgtcagcgccggccaactactccggcatcgacgtcagcaggatggtccgcccgactgaacacgtccccatggcccagcagctcgtggtctcgggcctgcagttcggcagcgcgtcgtggttcccgcgcccccaggcttccacgggcggctccttcgtctcatcctgccccgccgtgcaggtggagggcgagcagcagctgaacgccgtgctgggccccaacgacagcgaggtgagcatgaactacggcgggatgttccacgtcggcggcggcagcggcggcggcgagggctcctcggacggcggcacctcgtcgtcgatgcccttctcgtggcagtag

SEQ ID NO: 43184 - DNA, 1799 bp, Zea Mays
caccttccattcctcctcctccgaagcagcaggcagcagctgcatcgcacctcacacctctcgtgtccatcgatccagccgcccgccgcagctgcagctctcactgttgctgtgccacctcctcgtcgcctgtagtgtcgacagaaaaacgcccgctgaatgagagggaaggaacggaaagccgcccgcccggagcaggggcacccgccgagtgctctgtggacttgaagctgggcgggatgggcgagtgcgagctcggcgcgggcgcggcgacggcctgcagggagagggaggccgcggcgggggcgacgaagcggccgcgccccgccgggcagcagcagcagcagtgcccgtcgtgcgcggtggatgggtgcagagcggacctgagcaagtgccgcgactaccaccggcggcacaaggtgtgcgaggcgcactccaagacccccgtcgtcgtcgtggccggccgcgagatgcgcttctgccagcagtgcagcagcgctgttacgcttttccgttccctgcggtcgctgctcctgcagtccccacacagcaaactgctcagcagcgtttccttcactcttctctctgacgccctgatgcgaattaaacatctgctgccattgccaaagtctgggctctggagacggggcggatccacggacacacttcgtagctttctttatccgtatggagaacgaaactgctgtacagtataccatcgtgtggtccaagaattatccaaattcaaagaatcctgtggccataattcattggttcatggccatatgactgtgagagtggcacactacacctactgccaccaaatgtgcaaaacactgctaagaaataataaccatgggcttgttcatttcgatgggtttaaatccataccaagtcaaaatcttttaaatttttcaatcccatcgaatacacgtgaggtaggaagtcctataagattccatttacttgcggagttcgacgccgacaagcgcagctgcagaaagcgtctggacggccataatcgccgccgcaggaagccacagccagacaccatggcttctgctagctctatcacaagccagcaaggcacacgattctcaccatttgcgcctccaagactggaggcgagctggccgggggtgatgaaaaccgaggagagtccatatcgcatcactcaccaaatccatctgggctccagcagcagcagcaggcagcagcatttcgtgggagccgccacgtctgcctacgccaaagaaggcccgcgcttccctttcctgcaggagggcgagataagcttcgccaccggcgtggtgttggagccgccggcggcggctccagcgtgccagccgctcctcaagtcgggagcaccaccacccgagagcagcagcgccggcggcgggaagatgttctccgatcaggggctgactcgcgtgctcgactcggactgtgctctctctcttctgtcagcgccggccaactactccggcatcgacgtcagcaggatggtccgcccgactgaacacgtccccatggcccagcagctcgtggtctcgggcctgcagttcggcagcgcgtcgtggttcccgcgcccccaggcttccacgggcggctccttcgtctcatcctgccccgccgtgcaggtggagggcgagcagcagctgaacgccgtgctgggccccaacgacagcgaggtgagcatgaactacggcgggatgttccacgtcggcggcggcagcggcggcggcgagggctcctcggacggcggcacctcgtcgtcgatgcccttctcgtggcagtag

SEQ ID NO: 43185 - DNA, 1888 bp, Zea Mays
tgccttgctatctatctatacaccgcccgcaccttccattcctcctcctccgaagcagcaggcagcagctgcatcgcacctcacacctctcgtgtccatcgatccagccgcccgccgcagctgcagctctcactgttgctgtgccacctcctcgtcgcctgtagtgtcgacagaaaaacgcccgctgaatgagagggaaggaacggaagctgcagcgggcgcgcgagtgcaaggactaggactagcggttgcaacgtcggcgcgcgcgcgcgtgcggcgtacgtcgggcatggattgggatctcaaggcggtgggcgcgtgggacctcgcggagctggagcaggaccacgcggccgccacggcagcagcggggccgtccgagggccacgccaccgatactgccgcggcgggcacgggcacggggacggggacggagagccgcccgcccggagcaggggcacccgccgagtgctctgtggacttgaagctgggcgggatgggcgagtgcgagctcggcgcgggcgcggcgacggcctgcagggagagggaggccgcggcgggggcgacgaagcggccgcgccccgccgggcagcagcagcagcagtgcccgtcgtgcgcggtggatgggtgcagagcggacctgagcaagtgccgcgactaccaccggcggcacaaggtgtgcgaggcgcactccaagacccccgtcgtcgtcgtggccggccgcgagatgcgcttctgccagcagtgcagcagacttcgtagctttctttatccgtatggagaacgaaactgctgtacagtataccatcgtgtggtccaagaattatccaaattcaaagaatcctgtggccataattcattggttcatggccatatgactgtgagagtggcacactacacctactgccaccaaatgtgcaaaacactgctaagaaataataaccatgggcttgttcatttcgatgggtttaaatccataccaagtcaaaatcttttaaatttttcaatcccatcgaatacacgtgaggtaggaagtcctataagattccatttacttgcggagttcgacgccgacaagcgcagctgcagaaagcgtctggacggccataatcgccgccgcaggaagccacagccagacaccatggcttctgctagctctatcacaagccagcaaggcacacgattctcaccatttgcgcctccaagactggaggcgagctggccgggggtgatgaaaaccgaggagagtccatatcgcatcactcaccaaatccatctgggctccagcagcagcagcaggcagcagcatttcgtgggagccgccacgtctgcctacgccaaagaaggcccgcgcttccctttcctgcaggagggcgagataagcttcgccaccggcgtggtgttggagccgccggcggcggctccagcgtgccagccgctcctcaagtcgggagcaccaccacccgagagcagcagcgccggcggcgggaagatgttctccgatcaggggctgactcgcgtgctcgactcggactgtgctctctctcttctgtcagcgccggccaactactccggcatcgacgtcagcaggatggtccgcccgactgaacacgtccccatggcccagcagctcgtggtctcgggcctgcagttcggcagcgcgtcgtggttcccgcgcccccaggcttccacgggcggctccttcgtctcatcctgccccgccgtgcaggtggagggcgagcagcagctgaacgccgtgctgggccccaacgacagcgaggtgagcatgaactacggcgggatgttccacgtcggcggcggcagcggcggcggcgagggctcctcggacggcggcacctcgtcgtcgatgcccttctcgtggcagtag

SEQ ID NO: 43186 - DNA, 2353 bp, Zea Mays
ctgctgccttgctatctatctatacaccgcccgcaccttccattcctcctcctccgaagcagcaggcagcagctgcatcgcacctcacacctctcgtgtccatcgatccagccgcccgccgcagctgcagctctcactgttgctgtgccacctcctcgtcgcctgtagtgtcgacagaaaaacgcccgctgaatgagagggaaggaacggaagctgcagcgggcgcgcgagtgcaaggactaggactagcggttgcaacgtcggcgcgcgcgcgcgtgcggcgtacgtcgggcatggattgggatctcaaggcggtgggcgcgtgggacctcgcggagctggagcaggaccacgcggccgccacggcagcagcggggccgtccgagggccacgccaccgatactgccgcggcgggcacgggcacggggacggggacggagagccgcccgcccggagcaggggcacccgccgagtgctctgtggacttgaagctgggcgggatgggcgagtgcgagctcggcgcgggcgcggcgacggcctgcagggagagggaggccgcggcgggggcgacgaagcggccgcgccccgccgggcagcagcagcagcagtgcccgtcgtgcgcggtggatgggtgcagagcggacctgagcaagtgccgcgactaccaccggcggcacaaggtgtgcgaggcgcactccaagacccccgtcgtcgtcgtggccggccgcgagatgcgcttctgccagcagtgcagcagcgctgttacgcttttccgttccctgcggtcgctgctcctgcagtccccacacagcaaactgctcagcagcgtttccttcactcttctctctgacgccctgatgcgaattaaacatctgctgccattgccaaagtctgggctctggagacggggcggatccacggacacacttcgtagctttctttatccgtatggagaacgaaactgctgtacagtataccatcgtgtggtccaaggtttgacaggtctcacagtattttcctgtctctaagcgctgatggacgtacggtacggattcatcgtcgacagggaacattggtccccggcgtgctgtgtattaactataacaagcatatatatgtgtgtgcgccacagtacattaaatattctgacaataattatgttgctgtttcttcagtgaggagcatcttagtatacgaccactggatcatgtgcccacctacctaggaccatctattcttctccccattggagaaaaaaaactgagtacagtatcttatttgttcagaattatccaaattcaaagaatcctgtggccataattcattggttcatggccatatgactgtgagagtggcacactacacctactgccaccaaatgtgcaaaacactgctaagaaataataaccatgggcttgttcatttcgatgggtttaaatccataccaagtcaaaatcttttaaatttttcaatcccatcgaatacacgtgaggtaggaagtcctataagattccatttacttgcggagttcgacgccgacaagcgcagctgcagaaagcgtctggacggccataatcgccgccgcaggaagccacagccagacaccatggcttctgctagctctatcacaagccagcaaggcacacgattctcaccatttgcgcctccaagactggaggcgagctggccgggggtgatgaaaaccgaggagagtccatatcgcatcactcaccaaatccatctgggctccagcagcagcagcaggcagcagcatttcgtgggagccgccacgtctgcctacgccaaagaaggcccgcgcttccctttcctgcaggagggcgagataagcttcgccaccggcgtggtgttggagccgccggcggcggctccagcgtgccagccgctcctcaagtcgggagcaccaccacccgagagcagcagcgccggcggcgggaagatgttctccgatcaggggctgactcgcgtgctcgactcggactgtgctctctctcttctgtcagcgccggccaactactccggcatcgacgtcagcaggatggtccgcccgactgaacacgtccccatggcccagcagctcgtggtctcgggcctgcagttcggcagcgcgtcgtggttcccgcgcccccaggcttccacgggcggctccttcgtctcatcctgccccgccgtgcaggtggagggcgagcagcagctgaacgccgtgctgggccccaacgacagcgaggtgagcatgaactacggcgggatgttccacgtcggcggcggcagcggcggcggcgagggctcctcggacggcggcacctcgtcgtcgatgcccttctcgtggcagtag

SEQ ID NO: 43187 - DNA, 2223 bp, Zea Mays
ctgctgctgccttgctatctatctatacaccgcccgcaccttccattcctcctcctccgaagcagcaggcagcagctgcatcgcacctcacacctctcgtgtccatcgatccagccgcccgccgcagctgcagctctcactgttgctgtgccacctcctcgtcgcctgtagtgtcgacagaaaaacgcccgctgaatgagagggaaggaacggaagctgcagcgggcgcgcgagtgcaaggactaggactagcggttgcaacgtcggcgcgcgcgcgcgtgcggcgtacgtcgggcatggattgggatctcaaggcggtgggcgcgtgggacctcgcggagctggagcaggaccacgcggccgccacggcagcagcggggccgtccgagggccacgccaccgatactgccgcggcgggcacgggcacggggacggggacggagagccgcccgcccggagcaggggcacccgccgagtgctctgtggacttgaagctgggcgggatgggcgagtgcgagctcggcgcgggcgcggcgacggcctgcagggagagggaggccgcggcgggggcgacgaagcggccgcgccccgccgggcagcagcagcagcagtgcccgtcgtgcgcggtggatgggtgcagagcggacctgagcaagtgccgcgactaccaccggcggcacaaggtgtgcgaggcgcactccaagacccccgtcgtcgtcgtggccggccgcgagatgcgcttctgccagcagtgcagcagacttcgtagctttctttatccgtatggagaacgaaactgctgtacagtataccatcgtgtggtccaaggtttgacaggtctcacagtattttcctgtctctaagcgctgatggacgtacggtacggattcatcgtcgacagggaacattggtccccggcgtgctgtgtattaactataacaagcatatatatgtgtgtgcgccacagtacattaaatattctgacaataattatgttgctgtttcttcagtgaggagcatcttagtatacgaccactggatcatgtgcccacctacctaggaccatctattcttctccccattggagaaaaaaaactgagtacagtatcttatttgttcagaattatccaaattcaaagaatcctgtggccataattcattggttcatggccatatgactgtgagagtggcacactacacctactgccaccaaatgtgcaaaacactgctaagaaataataaccatgggcttgttcatttcgatgggtttaaatccataccaagtcaaaatcttttaaatttttcaatcccatcgaatacacgtgaggtaggaagtcctataaggtttgtctgatcaagagtttttgtttgttatttagattccatttacttgcggagttcgacgccgacaagcgcagctgcagaaagcgtctggacggccataatcgccgccgcaggaagccacagccagacaccatggcttctgctagctctatcacaagccagcaaggcacacgattctcaccatttgcgcctccaagactggaggcgagctggccgggggtgatgaaaaccgaggagagtccatatcgcatcactcaccaaatccatctgggctccagcagcagcagcaggcagcagcatttcgtgggagccgccacgtctgcctacgccaaagaaggcccgcgcttccctttcctgcaggagggcgagataagcttcgccaccggcgtggtgttggagccgccggcggcggctccagcgtgccagccgctcctcaagtcgggagcaccaccacccgagagcagcagcgccggcggcgggaagatgttctccgatcaggggctgactcgcgtgctcgactcggactgtgctctctctcttctgtcagcgccggccaactactccggcatcgacgtcagcaggatggtccgcccgactgaacacgtccccatggcccagcagctcgtggtctcgggcctgcagttcggcagcgcgtcgtggttcccgcgcccccaggcttccacgggcggctccttcgtctcatcctgccccgccgtgcaggtggagggcgagcagcagctgaacgccgtgctgggccccaacgacagcgaggtgagcatgaactacggcgggatgttccacgtcggcggcggcagcggcggcggcgagggctcctcggacggcggcacctcgtcgtcgatgcccttctcgtggcagtag

SEQ ID NO: 43188 - DNA, 1665 bp, Zea Mays
ccacaacagcttttggtggccagaagctcaaaaaagctgaaacaaacaggggctttgttgcctgctgctgccttgctatctatctatacaccgcccgcaccttccattcctcctcctccgaagcagcaggcagcagctgcatcgcacctcacacctctcgtgtccatcgatccagccgcccgccgcagctgcagctctcactgttgctgtgccacctcctcgtcgcctgtagtgtcgacagaaaaacgcccgctgaatgagagggaaggaacggaagctgcagcgggcgcgcgagtgcaaggactaggactagcggttgcaacgtcggcgcgcgcgcgcgtgcggcgtacgtcgggcatggattgggatctcaaggcggtgggcgcgtgggacctcgcggagctggagcaggaccacgcggccgccacggcagcagcggggccgtccgagggccacgccaccgatactgccgcggcgggcacgggcacggggacggggacggagagccgcccgcccggagcaggggcacccgccgagtgctctgtggacttgaagctgggcgggatgggcgagtgcgagctcggcgcgggcgcggcgacggcctgcagggagagggaggccgcggcgggggcgacgaagcggccgcgccccgccgggcagcagcagcagcagtgcccgtcgtgcgcggtggatgggtgcagagcggacctgagcaagtgccgcgactaccaccggcggcacaaggtgtgcgaggcgcactccaagacccccgtcgtcgtcgtggccggccgcgagatgcgcttctgccagcagtgcagcagattccatttacttgcggagttcgacgccgacaagcgcagctgcagaaagcgtctggacggccataatcgccgccgcaggaagccacagccagacaccatggcttctgctagctctatcacaagccagcaaggcacacgattctcaccatttgcgcctccaagactggaggcgagctggccgggggtgatgaaaaccgaggagagtccatatcgcatcactcaccaaatccatctgggctccagcagcagcagcaggcagcagcatttcgtgggagccgccacgtctgcctacgccaaagaaggcccgcgcttccctttcctgcaggagggcgagataagcttcgccaccggcgtggtgttggagccgccggcggcggctccagcgtgccagccgctcctcaagtcgggagcaccaccacccgagagcagcagcgccggcggcgggaagatgttctccgatcaggggctgactcgcgtgctcgactcggactgtgctctctctcttctgtcagcgccggccaactactccggcatcgacgtcagcaggatggtccgcccgactgaacacgtccccatggcccagcagctcgtggtctcgggcctgcagttcggcagcgcgtcgtggttcccgcgcccccaggcttccacgggcggctccttcgtctcatcctgccccgccgtgcaggtggagggcgagcagcagctgaacgccgtgctgggccccaacgacagcgaggtgagcatgaactacggcgggatgttccacgtcggcggcggcagcggcggcggcgagggctcctcggacggcggcacctcgtcgtcgatgcccttctcgtggcagtag

SEQ ID NO: 43189 - DNA, 941 bp, Zea Mays
atggactgtttttcttctaatttcggcccccaagcagcccataggcccgtccggatagtgccaggactgccagcccgatctcgcgtcgaacgatgtgaaagaactcctttcttctacgcggacggattcctctcgtctcgatcagctcgcttcgtgacttctctctcctctcgatcgattgcttcctccaccgaggcgggggaaagcgccgcccagatcgccgtaggcaagcggcgatcactccagctttgagcataaggttaaggatcctaatggcgctcaagtccgtgattctcgagataagactagtgataagtttgagttcatagttcagaagagaggcgtccatcgcttctgcttcacgaataaatccccgtaccacgaaactatagacttcgacgtgcatgttggccatttttcatacttcgagcagcatgccaaagatgagcattttgcaccacttttcgagcaaatagccaagttagatgaggcactttacaatatccagtttgaacagcactggctagaggcccaaactgaccgtcaagcaatattgaacgagaacatgagcaggagggcagtccacaaggcactcttcgagtcggcggcactgatcgtggccagcgtcatccaggtctatctcctgcgccggctcttcgagcgcaagctggggacgtctagggtataaggctccactggtatccaactctcccttgtagtagccaccatgatcgtatcgacataaccgttaatggtcgctagatcagctaatactgcttccttgtgggctttagttacatgtaatcttttgtggtgccacagatgagaactcttcggatttaaaccgtcaatctttcagccttcattttgtctctcgtgaacaacaaggctctctgtacagaataggagattttcttcgccgtctctgttttcagggacca

SEQ ID NO: 43190 - DNA, 969 bp, Zea Mays
taccccttctggttctgcgcgttctatcggcaatcaacgatggcgcgtctcgacggtactgctaattagcctcctagccagcctccgcctggaggtccatccccgaccttgacgcttcccggccaaacgcggatgcccctcaccctcggcgcagcgccgcggtgctccatacccatccctctccatggtcggcgcctgcatcccccggcatcgcggtgctggatcccctccctctctcgcgttatgctagagttcgagaaggggaaaagcgatgtagggttcggcaacgacacctctgtgtcccctcctccctcgcgcactcattttccttcgtcccgttgctactcagagtgtgttccatccgagcggtgatgtgagatgtgtcccccctgttcttcatcggtttgcttgcaatgattgagatagatgtgctcatttgccttgcagaaaatgaaaaataaagatatctttgtgcccagattcagagatggtttgactacctaatcatatatgcatggtacaacagccataaaactgaatattatttggctagaacctaaaatggcggaaactcttaggaatcatgtgcaaaccgtctaaagctgactgttggatggggttggcgaaggtgtgcttgaataaggatcacctgaaggcgtggagtccctagctgctggttgttgtgtgtcctagcgggcggcagtttgagtcccctgcaggcagtggcggctgtaatatgtactagtataggcatgcggacaacaattggaaattgtatgattcatgtgatcattttccttgtattcttttctattgttggttatatatcagattttagaagaatattgtgatccttttccttgtattcttttctattgttggttatatatcatattttagaagattcttgtgatcattttccttgtattcttttctattgttggttatatatcagattttagaagattc

SEQ ID NO: 43191 - DNA, 900 bp, Zea Mays
taccccttctggttctgcgcgttctatcggcaatcaacgatggcgcgtctcgacggtactgctaattagcctcctagccagcctccgcctggaggtccatccccgaccttgacgcttcccggccaaacgcggatgcccctcaccctcggcgcagcgccgcggtgctccatacccatccctctccatggtcggcgcctgcatcccccggcatcgcggtgctggatcccctccctctctcgcgttatgctagagttcgagaaggggaaaagcgatgtagggttcggcaacgacacctctgtgtcccctcctccctcgcgcactcattttccttcgtcccgttgctactcagagtgtgttccatccgagcggtgatgtgagatgtgtcccccctgttcttcatcggtttgcttgcaatgattgagatagatgtgctcatttgccttgcagaaaatgaaaaataaagatatctttgtgcccagattcagagatggtttgactacctaatcatatatgcatgtgcaaaccgtctaaagctgactgttggatggggttggcgaaggtgtgcttgaataaggatcacctgaaggcgtggagtccctagctgctggttgttgtgtgtcctagcgggcggcagtttgagtcccctgcaggcagtggcggctgtaatatgtactagtataggcatgcggacaacaattggaaattgtatgattcatgtgatcattttccttgtattcttttctattgttggttatatatcagattttagaagaatattgtgatccttttccttgtattcttttctattgttggttatatatcatattttagaagattcttgtgatcattttccttgtattcttttctattgttggttatatatcagattttagaagattc

SEQ ID NO: 43192 - DNA, 807 bp, Zea Mays
gctatcttctccacctaatcacgcacacgtgttgcaatcagtcttgcaacaccacaatctgccaacaatggttccaaaccttagtctaacagcacattggacgactcgaggttgcagcggactaacctcggattgcactaaaaaatacgagtgcctcaagctgcctcagcacgtcgaggagacagggccggagtccggcgcaggggcctgggcgctggcgaggtccgctgccggcgatgagaggcgaggagctgggcatccatggcagagcgaggtcgacggcgctcggtcttgggcgcgatggaggagtccggcggcttggcgacttcggacccggcgagcagaggaggggcatggtgccaacgccggttcttggacagggtcgacggcgagctcgcggcagagcacggcgaggcgaggtttgaggtacggcggtgcacggtccggcgacagcacgtctaggctaagggagggaggagcaggggacagccggtcccgcggtcaccatggcgcggtgcagggaggccgagtggaggacggcgttgcagccatggggatgacggtcgggcgaatcggcggcacggatgtcagagcatggagctcgcggcggcgcacccatggaggacgagcgggaggaaggcgaggagcggcctggcgactggctagggttctcggccggtccaggacgacggcaagctccatgggcagggagagacgagggcgaccaccagggcgcggtgcttggggatggaggccgagcgcgtggaagggggaggcagccggcgtttgaagacgtggtgagtcgat

SEQ ID NO: 43193 - DNA, 1369 bp, Zea Mays
tcgcgcttcgcgagagtctgtgctacgagaaataataatccagtgtcagtcattcagcattcagtgttcaatagagcactaatttagtcagtcaaaaatttaggaatattaagcaaggaaaacgaaacaaaatcattttctgggtagaagtctgaaaaggacaaacttcaagttcctattaccattccagcgcctattttcttctctctagtgatttcatttcttccagaatcaatcatatgtgcaaccatttcttcaacatgtattcagcatttttgcaaccatttttacaacttgaccatcacactgttctaacctaaacatcaaaaggttgtgaagtcacctgaatctaccatttcattttgttagccatatcataggaagaatttgaaggaaagcaaagaaagcatgatagggcaccacgacatctcacaaatgttctattatttatcactatattgcaggtggatatctgcagagtcagcagcgaagcttattgtcatgcttgttctgctagaattctagcaacaatgaatatgaccgacaaaaaagttatggtaacatttcatcggaaatcgaaacatatatatcagtgtcataatcagtcatatatgcagccatatgctagatccatagaggtaagtagatgcaagagaaatacatatgcaagatgtaggtctgttggctaatgcctgcagctgtgagaagaatgggccaatgttgaactcatcttttaccaatttggaattatttacctcataaactaatttaatatcgaatagaatgtgaaaaaatgttgtcaaaaaaatttctgttgtggctcgctatgtagaataatatggaggtgtttattataacatcacagaaggttacctctcggatatggattatggtaaggacgtagccctggttctttagcagcttggataaccttgtttgcataggtttcttcgctgcttcctttttcctgcacagtagaaatagaatgttcacatagtttatagataacatgcaaaagcgagtagggggttctctcccctcctctctcatcaaaaaaattaaagcatgcaaaagggtacggacagatccatttgcatcttaacattctaggtattgcacaatgctcaattaagccattgcagagcatagtatactctaaagacaagcaaaaggaaaaacaacaatcggataagccatatgaagatacattgtcaattaggggcacataaacaaagtagctagtcagctctccttgccagaatagatagcaagcaccaaaagcaggtgcaaccagaataatctgagtaaaatagtttttgaaaaagaagaacattgtttcaatcgatacagtagaaataggtaagcaaaa

SEQ ID NO: 43194 - DNA, 330 bp, Zea Mays
cttgtattgattggaggaaggtaaaaaaaacataatacttgtccacaaaatacaattgatatttacattgatacgattctagagaataagttaagtctataaaggtcaaaatgaaatataactacaaataagaaatattcttggtattcattgcttcttcgtcccatctcatgcgcatctaaatctataaattcatccaatgatcatttcaacctgcatagagaatggtcgttatatcattgatcatttcattctacctagacaaaggaatttatacgtaacaatacgtatttataaaacttagcatacacaaagcaaaggccaagcaac

SEQ ID NO: 43195 - DNA, 1759 bp, Zea Mays
aggccttccaaatatcctcccaaggcccaaagaggatagaaccttgaaaggaattcttcttgcagggaagattcatatttgggcctgatgtgagatctgtgtttctcactatgatcctcatcatcgcaccagtggttgtcttctgtctgtttgttgcaaggcatctcataaatgatttccccgatagctggggaatctcagtgatggtagtagtggttgtcttcactatttatagatcctggtataataccccggaattctcatcctcctgaacctgaatccattgatgggatcaacgacacgggtgttcagactccacaacaatttcgtttgcctcgcacaaaggaagtacttgtaaatgggatcagtgtacgggtcaaatactgtgatacttgcatgctgtaccgaccacctcgatgctcacactgttccatttgcaataactgtgtggaacggtttgatcatcactgtccatgggtcggccagtgcataggactgcgtaattatcggttcttctatatgtttgtattctcgacgacattgctctgcctctatgtatttgccttctgttgggtgtatgtgatcaagattagagctgctgagcaatcgtcagtttggaaggccttgctgaagacaccagcatcagttgctctgattatctactgttttctctgtgtatggtttgtgggtggtttatctgtcttccatttatacctgatgagcactaaccagacaacatatgagaatttcagatatcgctatgatcggcgcgataacccatataacaaaggtgttctgaacaattttctagagatattctgcactgctatccccccttcgaagaacaatttccgggcaagggtgacagcggggcaagggctgcagcaaacgcgctcacagtccaggggtttcatgagccccagcatgggcaagcccattggagatcttgaaatggacaggaagccagtagcaccttgggacgagccaaggacggcggctgatatcagggacttggaagcagggcttggggtcatgttcgatgagaaagagggcagggtagctcatgcatccccagatctgagcagagaccttccagcagagttcgtggaaggccgatctggtatgcactcgaggcagtcaagctgggttcagagaggagacgcaatcgaagcgtcggcggtgcaaatggctaatgcgcgcaccacggaagctagcaacaatgttgcctggagcggtacacattaacccaaaaaatgataaaaagaaaaggaggaactatggtgtgttggcgatgtctccaagtgaacccccgtgtgtttgttgccacgtgtgctgctccgggtaaggccctggatcattctgtaatgtataaatcctaagcacaagcttgctgctattgtttcatccctggtagcgtaccaggtccctgcggctgctgctgctgtcttgtgtgtgtttgtttgggtgacaaattgatgaagtggccgacgagcttaagctcccgccaggttcggatgatgtatacaaaattgttgtcaggttccaacggatgctgtgcttggtttgccacaccagcgctgcgtgctttgggtactcgcaagtggcatctgggcaccccgctcccatgcaaacttgttcttggtgtaagcctggaaatctgctctgtatggttggcattgttgtatttgcagatgtggacatggtacttgctagtgtagaagaatgacattgctgagaaattggcttggaactttttgca

SEQ ID NO: 43196 - DNA, 2017 bp, Zea Mays
tgactttagagccttgctctaccaatccaggaaacctcagatggctggggagagagtgcagctagtccctagtcccattcgctgaagtaggaaataacaaaattgccttgcaaagacacaattaatgagcagatgattgatggattcatcctcttgatgacataacatgcataggtccaaatatgcgccaccaactacataaaaaaggagcatttgctaggcgcccaggccttccaaatatcctcccaaggcccaaagaggatagaaccttgaaaggaattcttcttgcagggaagattcatatttgggcctgatgtgagatctgtgtttctcactatgatcctcatcatcgcaccagtggttgtcttctgtctgtttgttgcaaggcatctcataaatgatttccccgatagctggggaatctcagtgatggtagtagtggttgtcttcactatttatgatttgacgttgcttctttgtacctctggtagagatcctggtataataccccggaattctcatcctcctgaacctgaatccattgatgggatcaacgacacgggtgttcagactccacaacaatttcgtttgcctcgcacaaaggaagtacttgtaaatgggatcagtgtacgggtcaaatactgtgatacttgcatgctgtaccgaccacctcgatgctcacactgttccatttgcaataactgtgtggaacggtttgatcatcactgtccatgggtcggccagtgcataggactgcgtaattatcggttcttctatatgtttgtattctcgacgacattgctctgcctctatgtatttgccttctgttgggtgtatgtgatcaagattagagctgctgagcaatcgtcagtttggaaggccttgctgaagacaccagcatcagttgctctgattatctactgttttctctgtgtatggtttgtgggtggtttatctgtcttccatttatacctgatgagcactaaccagacaacatatgagaatttcagatatcgctatgatcggcgcgataacccatataacaaaggtgttctgaacaattttctagagatattctgcactgctatccccccttcgaagaacaatttccgggcaagggtgacagcggggcaagggctgcagcaaacgcgctcacagtccaggggtttcatgagccccagcatgggcaagcccattggagatcttgaaatggacaggaagccagtagcaccttgggacgagccaaggacggcggctgatatcagggacttggaagcagggcttggggtcatgttcgatgagaaagagggcagggtagctcatgcatccccagatctgagcagagaccttccagcagagttcgtggaaggccgatctggtatgcactcgaggcagtcaagctgggttcagagaggagacgcaatcgaagcgtcggcggtgcaaatggctaatgcgcgcaccacggaagctagcaacaatgttgcctggagcggtacacattaacccaaaaaatgataaaaagaaaaggaggaactatggtgtgttggcgatgtctccaagtgaacccccgtgtgtttgttgccacgtgtgctgctccgggtaaggccctggatcattctgtaatgtataaatcctaagcacaagcttgctgctattgtttcatccctggtagcgtaccaggtccctgcggctgctgctgctgtcttgtgtgtgtttgtttgggtgacaaattgatgaagtggccgacgagcttaagctcccgccaggttcggatgatgtatacaaaattgttgtcaggttccaacggatgctgtgcttggtttgccacaccagcgctgcgtgctttgggtactcgcaagtggcatctgggcaccccgctcccatgcaaacttgttcttggtgtaagcctggaaatctgctctgtatggttggcattgttgtatttgcagatgtggacatggtacttgctagtgtagaagaatgacattgctgagaaattggcttggaactttttgca

SEQ ID NO: 43197 - DNA, 1861 bp, Zea Mays
caggcgctgaggcgcagacgagccgagccaagccgcgagacgggacacacacgagcgcacgtcccgaggccaactcgagagcgtggagagtcgagagcccaccacccgcgacctaacccggaattcttcttgcagggaagattcatatttgggcctgatgtgagatctgtgtttctcactatgatcctcatcatcgcaccagtggttgtcttctgtctgtttgttgcaaggcatctcataaatgatttccccgatagctggggaatctcagtgatggtagtagtggttgtcttcactatttatgatttgacgttgcttctttgtacctctggtagagatcctggtataataccccggaattctcatcctcctgaacctgaatccattgatgggatcaacgacacgggtgttcagactccacaacaatttcgtttgcctcgcacaaaggaagtacttgtaaatgggatcagtgtacgggtcaaatactgtgatacttgcatgctgtaccgaccacctcgatgctcacactgttccatttgcaataactgtgtggaacggtttgatcatcactgtccatgggtcggccagtgcataggactgcgtaattatcggttcttctatatgtttgtattctcgacgacattgctctgcctctatgtatttgccttctgttgggtgtatgtgatcaagattagagctgctgagcaatcgtcagtttggaaggccttgctgaagacaccagcatcagttgctctgattatctactgttttctctgtgtatggtttgtgggtggtttatctgtcttccatttatacctgatgagcactaaccagacaacatatgagaatttcagatatcgctatgatcggcgcgataacccatataacaaaggtgttctgaacaattttctagagatattctgcactgctatccccccttcgaagaacaatttccgggcaagggtgacagcggggcaagggctgcagcaaacgcgctcacagtccaggggtttcatgagccccagcatgggcaagcccattggagatcttgaaatggacaggaagccagtagcaccttgggacgagccaaggacggcggctgatatcagggacttggaagcagggcttggggtcatgttcgatgagaaagagggcagggtagctcatgcatccccagatctgagcagagaccttccagcagagttcgtggaaggccgatctggtatgcactcgaggcagtcaagctgggttcagagaggagacgcaatcgaagcgtcggcggtgcaaatggctaatgcgcgcaccacggaagctagcaacaatgttgcctggagcggtacacattaacccaaaaaatgataaaaagaaaaggaggaactatggtgtgttggcgatgtctccaagtgaacccccgtgtgtttgttgccacgtgtgctgctccgggtaaggccctggatcattctgtaatgtataaatcctaagcacaagcttgctgctattgtttcatccctggtagcgtaccaggtccctgcggctgctgctgctgtcttgtgtgtgtttgtttgggtgacaaattgatgaagtggccgacgagcttaagctcccgccaggttcggatgatgtatacaaaattgttgtcaggttccaacggatgctgtgcttggtttgccacaccagcgctgcgtgctttgggtactcgcaagtggcatctgggcaccccgctcccatgcaaacttgttcttggtgtaagcctggaaatctgctctgtatggttggcattgttgtatttgcagatgtggacatggtacttgctagtgtagaagaatgacattgctgagaaattggcttggaactttttgca

SEQ ID NO: 43198 - DNA, 4847 bp, Zea Mays
cagccgtccctcctctatctaccctctgcgcgcttcatctccctggccagagcttccctgcacgcgcgcctgctcccatgccgcgcgcccctcccctgctcactcctcttcttctcccacgcgcataggctcctccatttgcgcatctccctacgtccggccgagttctccacaccgtgctccactgctcggccaaccactgcccaagtccggccagccgaagtgctccatctcccagccaagctccgtgcacgcgcattctccctgcgcccagccgctcctctacttccctctctactcgccgtggagcttcctctgccggcgctctcttcctctcatttatctgtggctcgccggcgtcgagtccctgctcatcttcctccacgtgacgcgcgcccacccgagcagctccctggcgcgcgcccagatctttttcctccctgtgcccctctctctggctgctctctgcgccggatctccttctctggtgctcaccgactccttggctcaccccctcatctcgccgctcaccgagctccttgcgcgccatggccgccttgcttgctccctggccggcgtttggcttcaggctcgcccacgatgcccggcgtcctgcctgctctgctcgccgcgcccatgtcgagctcccctgcgcgctggtcgccgagtcctctccctgcttttcccctggtcgtcgcatcgctgtgcgcagcggaagcgtggtgggttttggtcgcgggcatggtcgtgcgacgcgggatctgggcatgccgttgtggactccccattgatgcgcctcctgtcctaactggaccatcctagcctgcgcacgtcatcgaatcgtcggattccatcccccatggcgcttccatttcctcgccattccacgtcgccagcttcgttccagttcactggccatctttctctccacgtcgtagttctgttaagggaaacgatgttgcttgagtagtggttaggatgtgtgtggagatgagcttgaagatgggactgtggatagggaagacagtgaagttccgtatgtcactcatcagatgttcgacgaaaaccccgaaccaaaaaaaatcatcggcgttcttgcaaatttgaaccgggtatagttcgggagaagtctaaggatgttaattggtaaagaagcgaggcccgtgtgcatcgctcatcaagtgctcggtcgaagacatcaatcgaaggtcgtcatcattcgtgtgatgatcgagtcaaattgcaatatggtacgataattaatcgtgtgatgcggaagacgacccaagtcgaccccaagatgatgtaacggctggattaatttcaaggtaatgcggatgatgatcctgaagatggatgacccgaacaagtgtcagaccaaaagctaatcgtcaagtgatcgacgtctaacaacactaacgtagtgttatccaggcaagccccggtacatttgccacctccttgctgttttaaaatctttatcacctgtttgatgcattaggtgataggagttgtgtgctaaacaattgatgcatttccttccatggaaaattgcttacccttccttgattcccttttatgaaaaggatttttatgatgcttagtcgtgctttagaaaaacaaaatgttttattttaaaacaaaaagtgatgcttcaaattggatgggaatttttacaaagaaaaacttgtgatggtggatccatcagggccttgatgggttcaatatcagaaaagatgtacctctgccatgtaccaaactttgggtttaaataataaagctgagacctggcgggtgacttgcacgagaaggaagtctcggtgtagtgtctccgtccgagtcaattaaggaccgtaccgatgtaggcttgatgatcgaggaccttttaactagtcacatgcctcatcatgggtaagctttgcctcgggcagactaataccagaaaggccaacatgcaatgggagtggagagatggcgagagtagcgtgtaccctccgtggcaagaggttggacggtggtgtatctgtgctctcggttggtgtgaacccggtatggtcttaagaaacccagtggcgagttgacatttgcaagggttaagggcgtgtttggtacctggcctaagccgccgccaccagccacacttttcccgccgcagttgtggcggccgatttggtcgccgcaacttaagtgtggcgtggcgtgcggcaccacacaccaaacacgccctaagtgctacatatgtcatgtgattggagatccccagctgggtattaatcgattcagattgccgttacttctcggatatgaagacttggtcactgacttacacgtagcaatccagtgaactgatgggatgataaaagacagctagtataggcgaagtgcttgaactaggatagaaagaactctagaggcaggtaactttacttaacctgacaagtaaaaatggatttttaaggatccactcatagtaagcttttctgcaaacagagtccttgattcttgataagccttaccttgaatccctttaaaactagcatacccttgagagtcttttctttagtcgggtaagtcttgctgagtacttgcgtacttagggttttattcccattgttgctgcaggttacgagtcactttgattgtgattggtgttaagcgctggtgggcacgaccttcttataagtctaagtacttcttctatacttcttattgaggactgtcactgagccagcatatatttcaaacttataaataatttataacagttcaaagtttattctttgaaccacttttgtaaccactccgataaatataatgtaaatttgttgtaacttgtaaaatttggtaataagatttccgctgcaaattgttggtgtgtgatttgtgtttacttaatcctgtggtcctagttgtaagtggtttatccggggtccatgggacactcgaacatatcctgttaagttatctggtgcacatgcatagccatctgaggtctttgagacaagggcaggtgcatatgggcccaattacttgggaggttctgccacacgatccacatggatcactcagggggctgcatttaacggatgcgctcgcgcgcaccggaagtcctgaacaacaacaaagtacagaattgcaacaggctagtgctctaagcgcgtcgaccatcgtaggaagggtccgctcctaaactgcactcccgccgagtggaccccatgcgacccacatggtttactcaggggcatggggacaacatccaacagcagcgcttgcgcgcacccaagatcccaaccacaggaggaagccaagaaattatggacccacgatcagcgcatggcgacaatcgcaggaggggtctgtccccaaactactccgtcactgagcaaacccccaacaatccttatggatcactcgggggctcaggggctacttctagcagatgcacttgcatgcaactaagcgtatagggcaccgagcataagcctccgtgcaactccaaggattcgcccaatggctcgggggctgttgtcggatacctaggaatggggtacccaaggtaaggcccataacctctttccggcccatttgtcgagcaagtctgcgaggcggacgaccaagtctccgtcaagcaagtccacgaggcggagcggacgaccaagaccccgcggagcaagtccgcgaggcaaggcgaacgacggagttcccaccgagtggacccacaaggaaggaaccccatcctgacgctgctggcccacgtcggctacgacaggacacaccatccttaggccacacccgggtaaatgtgcggcgcaccaaagtctagccgagcgaacgccatcagaacatgaactgtgcgcccctgcatacagacttaggcatgccatctctgtgttgttgggccagtcaagcccagccgtcgattgatctcagtaccaaaatcccaacaatgacccgaacacctggaaggtcattagctttcttatgctaatatcagatatcatcaaatctttatgacaaaaaagatacatctaaaatggcctttgtatatccaagctttattggtttatttgagtggggtgtcatgacttttgggctaaaaatgagagcgcaacttatcaaagggctatgaatttgattttaaatgagatattaggagacattgtcgaggtctactgttgggggcctttgtcttccgaaggtcctcaaaaacatgattaacaatgtttcccaagtgtaatatatgtacaggaaccttcagactcggaatgaagctatacacaatatgaaaaagcatggtcgggatgaaggttgaaccagctccgaagctacgcgcaaggaagcttcggatcagtagcagaaaaaggagccgacttaaagaggaaaaggctatctagtccttgatagattgtccttaagtcaatagtaaacatgaaggacatgaatgtaattttacacaggctacgccctgtgcctataaatagatgaacagtaccctcgtactgttcacgctgacttgtattcactcgtgcgtcacgcttggacttttgccttctgtcaagccgaatgtacaaatgtaattcaatattgttcatgttcattcatgatgatataaaaaagatatattagtaatgtcatatgattatttatgtcatttctcatgtttcatatgcttcttctttcattaatatatgttgtgatgatgaaggtacgtccttcatgaccttcgtttgaagatcattatgtcctaagggagataatgcttcgaaggacgaagggccttaaccattaacattttgtgttgccttgttcttaactcatagcatttgagaacaagtccccaacattgg

SEQ ID NO: 43199 - DNA, 502 bp, Zea Mays
tctcccctcgcgtgtggcgtggacggtatacctgctccgccggaatcctcgcgcgggctggttgaccgcgagttccgcgggactcacccacctatgcgccgtcgggggggataaagggggagcacctcgtccccacgttctcccttccatccgccggctttacacaaccagagagtaggggagagaaagatcgggcgctgccattgccgtcgttgactctcatctccatcaccgctttgtgtctgtgacccgatccctggtgttcgggtgtgggcgtggatcgttctcggggaagaatccgggtgcgtgggtcctcggggccgggagaattcctcgtcgtcgttacaccgccgctgcggaccgcacttcgccgtagcctgcttccgccgccgttctgtgcatgttagccagtagctgaggatcctggtgcccagcagatagaagttgctgagcaggagctcattgaaggcaagttatgcccttgatcacatttattacccaa

SEQ ID NO: 43200 - DNA, 1239 bp, Zea Mays
ctcccctcgcgtgtggcgtggacggtatacctgctccgccggaatcctcgcgcgggctggttgaccgcgagttccgcgggactcacccacctatgcgccgtcgggggggataaagggggagcacctcgtccccacgttctcccttccatccgccggctttacacaaccagagagtaggggagagaaagatcgggcgctgccattgccgtcgttgactctcatctccatcaccgctttgtgtctgtgacccgatccctggtgttcgggtgtgggcgtggatcgttctcggggaagaatccgggtgcgtgggtcctcggggccgggagaattcctcgtcgtcgttacaccgccgctgcggaccgcacttcgccgtagcctgcttccgccgccgttctgtgcatgttgtaagtccctccatggcattctctgttaagcatatgttgcgtaggaagtctcgggtgggaattggtccgttagcttgccatgttggccgtaccccggtgacacctcgccgtatttccggcggcgctgccgctgttcgcagggagtaagacgacgatcaggtgccgttagatctctttttgatggctcggatgtgatagtgtgtagcgtttcagataggggtaacaggaaccgttcgatcgggatcggatgtgagtcactcgctctgggcttcataaatcagggacgtaggatttggatccgagggaccgcgttgcgtaccagttcgcgcgggtgtagaatctaatcggagtcgttcggacggctctgaatgaaggatgccccttcggcctggcgtttttacataaaaaaccttatggaattagataatgaacccgcgattcagttctgatttgtctgagtcttaagaatttttaccccgagactcctgcgcttcacagtatttggcgcccagtccagagaacagaaaaccagagaaagtaaattagaaatagatttttagtgcaacaataattgctagaacttgtataaatcatagaaaattcatgtgagctccaaattgatccattccggtttctaaaattttgtaatattattgtttatcacctagagtctcagttttgacatgaaaacagtagtaaagttaatttctcgcttaatcatatctcaagcacataaaacctttggaaattcataatttaaaatccataactccaaaattaatgattcttatgcctatgatcttattttaatatgtagattattaatatgtatttt

SEQ ID NO: 43201 - DNA, 409 bp, Zea Mays
caccaccgtgtccggcgtcttccgtctccgtttgtcgtgaaggttctggaccccgcgagcgtcgtcgcctctgctccttggtgcttcgtcctcctcccacgtgtgtgcgcccggaggacccaatctgaggggtcatcggctaccagcgctaggatcatgtgtgaccaatcgctgcttgcgatttgcgaaccgccggatcaaggcgtgggagcaaagctttagctgccaaaggggcggaagcggaagagggcagcacattctgtagtctctatccattttttggcaccataaacgagccaatcgtatcaaaaattttatccaaagcaatctaaagccacctctcgagtgcagggatgtcaaggacatcttattctctaattggatagcagcatatattctagctttctta

SEQ ID NO: 43202 - DNA, 527 bp, Zea Mays
ctccattttagtgaacctgcatcttggtgtccgcccgcaccccacgcacacgtcaccaccgtgtccggcgtcttccgtctccgtttgtcgtgaaggttctggaccccgcgagcgtcgtcgcctctgctccttggtgcttcgtcctcctcccacgtgtgtgcgcccggaggacccaatctgaggggtcatcggctaccagcgctaggatcatgtgtgaccaatcgctgcttgcgatttgcgaaccgccggatcaaggcgtgggagcaaagctttagctgccaaaggggcggaagcggaagagggcagcacattctgtagtctctatccattttttggcaccataaacgagccaatcgtatcaaaaattttatccaaagcaatctaaagccacctctcgagtgcagggatgtcaagctacaagaaactctcacagataaagaaaagaaggttgaccctccacttcaatctcctccaaaaaggacatcttattctctaattggatagcagcatatattctagctttctta

SEQ ID NO: 43203 - DNA, 842 bp, Zea Mays
cagaatctccattttagtgaacctgcatcttggtgtccgcccgcaccccacgcacacgtcaccaccgtgtccggcgtcttccgtctccgtttgtcgtgaaggttctggaccccgcgagcgtcgtcgcctctgctccttggtgcttcgtcctcctcccacgtgtgtgcgcccggaggacccaatctgaggtaggagaagcaccccctcctcgcatcgcgtcacgcccccaccaccactgccgtaggcttctctccggcgctcccactcggccgcacgctcagcctcagcatgccaccgccatcgccgtctcgcccgctattgcccgcttcccgctgtcccctgcaccgctgccgcttgtaggctcctccacctccgccgcctcctcgagctctgtcgcgcgaggccattttttagtggggaatgcgatgtccactttctcatctcctgtggcctgcaccatttgcgtacatcactagggcctcaatcattgaacacaggggtcatcggctaccagcgctaggatcatgtgtgaccaatcgctgcttgcgatttgcgaaccgccggatcaaggcgtgggagcaaagctttagctgccaaaggggcggaagcggaagagggcagcacattctgtagtctctatccattttttggcaccataaacgagccaatcgtatcaaaaattttatccaaagcaatctaaagccacctctcgagtgcagggatgtcaagctacaagaaactctcacagataaagaaaagaaggttgaccctccacttcaatctcctccaaaaaggacatcttattctctaattggatagcagcatatattctagctttctta

SEQ ID NO: 43204 - DNA, 979 bp, Zea Mays
cagaatctccattttagtgaacctgcatcttggtgtccgcccgcaccccacgcacacgtcaccaccgtgtccggcgtcttccgtctccgtttgtcgtgaaggttctggaccccgcgagcgtcgtcgcctctgctccttggtgcttcgtcctcctcccacgtgtgtgcgcccggaggacccaatctgaggtaggagaagcaccccctcctcgcatcgcgtcacgcccccaccaccactgccgtaggcttctctccggcgctcccactcggccgcacgctcagcctcagcatgccaccgccatcgccgtctcgcccgctattgcccgcttcccgctgtcccctgcaccgctgccgcttgtaggctcctccacctccgccgcctcctcgagctctgtcgcgcgaggccattttttagtggggaatgcgatgtccactttctcatctcctgtggcctgcaccatttgcgtacatcactagggcctcaatcattgaacacaggggtcatcggctaccagcgctaggatcatgtgtgaccaatcgctgcttgcgatttgcgaaccgccggatcaaggcgtgggagcaaagctttagctgccaaaggggcggaagcggaagagggcagcacattctgtagtctctatccattttttggcaccataaacgagccaatcgtatcaaaaattttatccaaagcaatctaaagccacctctcgagtgcagggatgtcaagctacaagaaactctcacagataaagaaaagaaggttgaccctccacttcaatctcctccaaaaagccgccgaggagcgtaaaatagatttgcttgcacccgcacattccgggcgcagccgtgcagccaaccaatcagaaatgcaggcgcagtcaacactcgtgaggagcctaggcgttgagagctgggcaaccaatcacacggacatcttattctctaattggatagcagcatatattctagctttctta

SEQ ID NO: 43205 - DNA, 1090 bp, Zea Mays
cagaatctccattttagtgaacctgcatcttggtgtccgcccgcaccccacgcacacgtcaccaccgtgtccggcgtcttccgtctccgtttgtcgtgaaggttctggaccccgcgagcgtcgtcgcctctgctccttggtgcttcgtcctcctcccacgtgtgtgcgcccggaggacccaatctgaggtaggagaagcaccccctcctcgcatcgcgtcacgcccccaccaccactgccgtaggcttctctccggcgctcccactcggccgcacgctcagcctcagcatgccaccgccatcgccgtctcgcccgctattgcccgcttcccgctgtcccctgcaccgctgccgcttgtaggctcctccacctccgccgcctcctcgagctctgtcgcgcgaggccattttttagtggggaatgcgatgtccactttctcatctcctgtggcctgcaccatttgcgtacatcactagggcctcaatcattgaacacaggggtcatcggctaccagcgctaggatcatgtgtgaccaatcgctgcttgcgatttgcgaaccgccggatcaaggcgtgggagcaaagctttagctgccaaaggggcggaagcggaagagggcagcacattctgtagtctctatccattttttggcaccataaacgagccaatcgtatcaaaaattttatccaaagcaatctaaagccacctctcgagtgcagggatgtcaagctacaagaaactctcacagataaagaaaagaaggttgaccctccacttcaatctcctccaaaaaggacatcttattctctaattggatagcagcatatattctagctttcttactatatggaaacttggatggccttgctcgaggcacgagtagatgtcaacgatagtgacagcaatcctaatatatagagtcaagagcaggtttcgccagaggagggctatttcgatgagttcggagaggtctaggtggtcgatggtgtaatttatttagatattttgtatagaaattgtattatgcaatacatattgtgacattgatttttgtacactgagtcatcatatgtgtgagacttgatcctgg

SEQ ID NO: 43206 - DNA, 1355 bp, Zea Mays
cagaatctccattttagtgaacctgcatcttggtgtccgcccgcaccccacgcacacgtcaccaccgtgtccggcgtcttccgtctccgtttgtcgtgaaggttctggaccccgcgagcgtcgtcgcctctgctccttggtgcttcgtcctcctcccacgtgtgtgcgcccggaggacccaatctgaggtaggagaagcaccccctcctcgcatcgcgtcacgcccccaccaccactgccgtaggcttctctccggcgctcccactcggccgcacgctcagcctcagcatgccaccgccatcgccgtctcgcccgctattgcccgcttcccgctgtcccctgcaccgctgccgcttgtaggctcctccacctccgccgcctcctcgagctctgtcgcgcgaggccattttttagtggggaatgcgatgtccactttctcatctcctgtggcctgcaccatttgcgtacatcactagggcctcaatcattgaacacaggggtcatcggctaccagcgctaggatcatgtgtgaccaatcgctgcttgcgatttgcgaaccgccggatcaaggcgtgggagcaaagctttagctgccaaaggggcggaagcggaagagggcagcacattctgtagtctctatccattttttggcaccataaacgagccaatcgtatcaaaaattttatccaaagcaatctaaagccacctctcgagtgcagggatgtcaagctacaagaaactctcacagataaagaaaagaaggttgaccctccacttcaatctcctccaaaaaggacatcttattctctaattggatagcagcatatattctagctttcttactatatggaaacttggatggccttgctcgaggcacgagtagatgtcaacgatagtgacagcaatcctaatatatagaacgcttctgtgatagagaatcaagatcagtttaaaggagaaccttaggaattttgtgaagaaagcaagtggactttctgcccctacatattctatttgatcacaattgcgccatgacaactaagtttacttttttgtgatatgcataatttgaagggattacctattagcaatgcatagtatttaccaaccctaataccttgttcaagctaggagttatgctttgctataatagtgtgttactgcttttaactaagtttgacgatgccactctctttaatgatgctcatgttccaaagttgaagttacgttgttgataattaacaagatcatatgagttaattggaacatggagtgaccacccaagataattgtgcaatcatgagtggtatcatggctctggctttggtaattaacttaatatgcttagttcttag

SEQ ID NO: 43207 - DNA, 1231 bp, Zea Mays
ccagaatctccattttagtgaacctgcatcttggtgtccgcccgcaccccacgcacacgtcaccaccgtgtccggcgtcttccgtctccgtttgtcgtgaaggttctggaccccgcgagcgtcgtcgcctctgctccttggtgcttcgtcctcctcccacgtgtgtgcgcccggaggacccaatctgaggtaggagaagcaccccctcctcgcatcgcgtcacgcccccaccaccactgccgtaggcttctctccggcgctcccactcggccgcacgctcagcctcagcatgccaccgccatcgccgtctcgcccgctattgcccgcttcccgctgtcccctgcaccgctgccgcttgtaggctcctccacctccgccgcctcctcgagctctgtcgcgcgaggccattttttagtggggaatgcgatgtccactttctcatctcctgtggcctgcaccatttgcgtacatcactagggcctcaatcattgaacacaggggtcatcggctaccagcgctaggatcatgtgtgaccaatcgctgcttgcgatttgcgaaccgccggatcaaggcgtgggagcaaagctttagctgccaaaggggcggaagcggaagagggcagcacattctgtagtctctatccattttttggcaccataaacgagccaatcgtatcaaaaattttatccaaagcaatctaaagccacctctcgagtgcagggatgtcaagctacaagaaactctcacagataaagaaaagaaggttgaccctccacttcaatctcctccaaaaagacgcttctgtgatagagaatcaagatcagtttaaaggagaaccttaggaattttgtgaagaaagcaagtggactttctgcccctacatattctatttgatcacaattgcgccatgacaactaagtttacttttttgtgatatgcataatttgaagggattacctattagcaatgcatagtatttaccaaccctaataccttgttcaagctaggagttatgctttgctataatagtgtgttactgcttttaactaagtttgacgatgccactctctttaatgatgctcatgttccaaagttgaagttacgttgttgataattaacaagatcatatgagttaattggaacatggagtgaccacccaagataattgtgcaatcatgagtggtatcatggctctggctttggtaattaacttaatatgcttagttcttag

SEQ ID NO: 43208 - DNA, 536 bp, Zea Mays
attttagtgaacctgcatcttggtgtccgcccgcaccccacgcacacgtcaccaccgtgtccggcgtcttccgtctccgtttgtcgtgaaggttctggaccccgcgagcgtcgtcgcctctgctccttggtgcttcgtcctcctcccacgtgtgtgcgcccggaggacccaatctgaggggtcatcggctaccagcgctaggatcatgtgtgaccaatcgctgcttgcgatttgcgaaccgccggatcaaggcgtgggagcaaagctttagctgccaaaggggcggaagcggaagagggcagcacattctgtagtctctatccattttttggcaccataaacgagccaatcgtatcaaaaattttatccaaagcaatctaaagccacctctcgagtgcagggatgtcaaggacatcttattctctaattggatagcagcatatattctagctttcttactatatggaaacttggatggccttgctcgaggcacgagtagatgtcaacgatagtgacagcaatcctaatatatagag

SEQ ID NO: 43209 - DNA, 1407 bp, Zea Mays
ctccattttagtgaacctgcatcttggtgtccgcccgcaccccacgcacacgtcaccaccgtgtccggcgtcttccgtctccgtttgtcgtgaaggttctggaccccgcgagcgtcgtcgcctctgctccttggtgcttcgtcctcctcccacgtgtgtgcgcccggaggacccaatctgagggcctcaatcattgaacacaggggtcatcggctaccagcgctaggatcatgtgtgaccaatcgctgcttgcgatttgcgaaccgccggatcaaggcgtgggagcaaagctttagctgccaaaggggcggaagcggaagagggcagcacattctgtagtctctatccattttttggcaccataaacgagccaatcgtatcaaaaattttatccaaagcaatctaaagccacctctcgagtgcagggatgtcaagctacaagaaactctcacagataaagaaaagaaggttgaccctccacttcaatctcctccaaaaagctttagggtttggacttcggtgaccaaaggggctggcgagcaacataacaatagatcagtagacacgatgagcagtgaaactctccgcctgaagcatctttctgcaaattggcgagacaccgaaatgttaatctgctctactttaggccctttcgtttttattaacgcacatggcaaaagaccacaagttaaaactggatgctagctgtttttcacccccaagatgaacaaagacatgatgcaggtaaactagctaaaagttgcagttatatcaggtcctgtttagcgatctatatatgttcttgcaaaagtttccgggtttaagggatcaactggctctgaaagataaaaaagttcatgtgactgaaatagcaaaagctgagagaaccaattaaggcatgatgctgtttcaaaatgctggtcatactatagatccgtacgtattctgcagcgtgcatgtgcatgcatagataaaaaaatcaggtcaagaacattgtgtgctgctgattgtttccagagaaactggcacgctatactgccctttcaaacagaaaatgctaggaatggagcatgcatggacactgaaacacagctacatgcatatgacaaaggtcgtgtctaacctcttgattggttgccggcagccgccgaggagcgtaaaatagatttgcttgcacccgcacattccgggcgcagccgtgcagccaaccaatcagaaatgcaggcgcagtcaacactcgtgaggagcctaggcgttgagagctgggcaaccaatcacacggacatcttattctctaattggatagcagcatatattctagctttcttactatatggaaacttggatggccttgctcgaggcacgagtagatgtcaacgatagtgacagcaatcctaatatatagag

SEQ ID NO: 43210 - DNA, 849 bp, Zea Mays
ctccattttagtgaacctgcatcttggtgtccgcccgcaccccacgcacacgtcaccaccgtgtccggcgtcttccgtctccgtttgtcgtgaaggttctggaccccgcgagcgtcgtcgcctctgctccttggtgcttcgtcctcctcccacgtgtgtgcgcccggaggacccaatctgaggtaggagaagcaccccctcctcgcatcgcgtcacgcccccaccaccactgccgtaggcttctctccggcgctcccactcggccgcacgctcagcctcagcatgccaccgccatcgccgtctcgcccgctattgcccgcttcccgctgtcccctgcaccgctgccgcttgtaggctcctccacctccgccgcctcctcgagctctgtcgcgcgaggccattttttagtggggaatgcgatgtccactttctcatctcctgtggcctgcaccatttgcgtacatcactagggcctcaatcattgaacacaggggtcatcggctaccagcgctaggatcatgtgtgaccaatcgctgcttgcgatttgcgaaccgccggatcaaggcgtgggagcaaagctttagctgccaaaggggcggaagcggaagagggcagcacattctgtagtctctatccattttttggcaccataaacgagccaatcgtatcaaaaattttatccaaagcaatctaaagccacctctcgagtgcagggatgtcaaggacatcttattctctaattggatagcagcatatattctagctttcttactatatggaaacttggatggccttgctcgaggcacgagtagatgtcaacgatagtgacagcaatcctaatatatagag

SEQ ID NO: 43211 - DNA, 1134 bp, Zea Mays
ctccattttagtgaacctgcatcttggtgtccgcccgcaccccacgcacacgtcaccaccgtgtccggcgtcttccgtctccgtttgtcgtgaaggttctggaccccgcgagcgtcgtcgcctctgctccttggtgcttcgtcctcctcccacgtgtgtgcgcccggaggacccaatctgagggcctcaatcattgaacacaggggtcatcggctaccagcgctaggatcatgtgtgaccaatcgctgcttgcgatttgcgaaccgccggatcaaggcgtgggagcaaagctttagctgccaaaggggcggaagcggaagagggcagcacattctgtagtctctatccattttttggcaccataaacgagccaatcgtatcaaaaattttatccaaagcaatctaaagccacctctcgagtgcagggatgtcaagctacaagaaactctcacagataaagaaaagaaggttgaccctccacttcaatctcctccaaaaagccgccgaggagcgtaaaatagatttgcttgcacccgcacattccgggcgcagccgtgcagccaaccaatcagaaatgcaggcgcagtcaacactcgtgaggagcctaggcgttgagagctgggcaaccaatcacacggtaattgtatgcacccatgcacaggtcgaggaggctcctgtgtctaattgtgtgcagcaagtcaaagagtctcgattgagcctagcatgagcaataggggccactcaggctagccaaggagactgcctacgaaccaacacaaaggtccacaattctgatcctttgtaaacaaaggacataggcaagtcatccttggctatcagaggcaggcccttattgacatgtaaggcttctgctctgcttgtcacctctagctagcttggtagcttctgtgactggtctgttgtgctccttccatggaacatctatttatacatgtatctcgtagagagaaccgtatcattttttccttttttttgttgttgttccaggacatcttattctctaattggatagcagcatatattctagctttcttactatatggaaacttggatggccttgctcgaggcacgagtagatgtcaacgatagtgacagcaatcctaatatatagag

SEQ ID NO: 43212 - DNA, 1113 bp, Zea Mays
ctccattttagtgaacctgcatcttggtgtccgcccgcaccccacgcacacgtcaccaccgtgtccggcgtcttccgtctccgtttgtcgtgaaggttctggaccccgcgagcgtcgtcgcctctgctccttggtgcttcgtcctcctcccacgtgtgtgcgcccggaggacccaatctgaggggtcatcggctaccagcgctaggatcatgtgtgaccaatcgctgcttgcgatttgcgaaccgccggatcaaggcgtgggagcaaagctttagctgccaaaggggcggaagcggaagagggcagcacattctgtagtctctatccattttttggcaccataaacgagccaatcgtatcaaaaattttatccaaagcaatctaaagccacctctcgagtgcagggatgtcaagctacaagaaactctcacagataaagaaaagaaggttgaccctccacttcaatctcctccaaaaagccgccgaggagcgtaaaatagatttgcttgcacccgcacattccgggcgcagccgtgcagccaaccaatcagaaatgcaggcgcagtcaacactcgtgaggagcctaggcgttgagagctgggcaaccaatcacacggtaattgtatgcacccatgcacaggtcgaggaggctcctgtgtctaattgtgtgcagcaagtcaaagagtctcgattgagcctagcatgagcaataggggccactcaggctagccaaggagactgcctacgaaccaacacaaaggtccacaattctgatcctttgtaaacaaaggacataggcaagtcatccttggctatcagaggcaggcccttattgacatgtaaggcttctgctctgcttgtcacctctagctagcttggtagcttctgtgactggtctgttgtgctccttccatggaacatctatttatacatgtatctcgtagagagaaccgtatcattttttccttttttttgttgttgttccaggacatcttattctctaattggatagcagcatatattctagctttcttactatatggaaacttggatggccttgctcgaggcacgagtagatgtcaacgatagtgacagcaatcctaatatatagag

SEQ ID NO: 43213 - DNA, 1357 bp, Zea Mays
ctccattttagtgaacctgcatcttggtgtccgcccgcaccccacgcacacgtcaccaccgtgtccggcgtcttccgtctccgtttgtcgtgaaggttctggaccccgcgagcgtcgtcgcctctgctccttggtgcttcgtcctcctcccacgtgtgtgcgcccggaggacccaatctgaggtaggagaagcaccccctcctcgcatcgcgtcacgcccccaccaccactgccgtaggcttctctccggcgctcccactcggccgcacgctcagcctcagcatgccaccgccatcgccgtctcgcccgctattgcccgcttcccgctgtcccctgcaccgctgccgcttgtaggctcctccacctccgccgcctcctcgagctctgtcgcgcgaggccattttttagtggggaatgcgatgtccactttctcatctcctgtggcctgcaccatttgcgtacatcactagggcctcaatcattgaacacaggggtcatcggctaccagcgctaggatcatgtgtgaccaatcgctgcttgcgatttgcgaaccgccggatcaaggcgtgggagcaaagctttagctgccaaaggggcggaagcggaagagggcagcacattctgtagtctctatccattttttggcaccataaacgagccaatcgtatcaaaaattttatccaaagcaatctaaagccacctctcgagtgcagggatgtcaagccgccgaggagcgtaaaatagatttgcttgcacccgcacattccgggcgcagccgtgcagccaaccaatcagaaatgcaggcgcagtcaacactcgtgaggagcctaggcgttgagagctgggcaaccaatcacacggtaattgtatgcacccatgcacaggtcgaggaggctcctgtgtctaattgtgtgcagcaagtcaaagagtctcgattgagcctagcatgagcaataggggccactcaggctagccaaggagactgcctacgaaccaacacaaaggtccacaattctgatcctttgtaaacaaaggacataggcaagtcatccttggctatcagaggcaggcccttattgacatgtaaggcttctgctctgcttgtcacctctagctagcttggtagcttctgtgactggtctgttgtgctccttccatggaacatctatttatacatgtatctcgtagagagaaccgtatcattttttccttttttttgttgttgttccaggacatcttattctctaattggatagcagcatatattctagctttcttactatatggaaacttggatggccttgctcgaggcacgagtagatgtcaacgatagtgacagcaatcctaatatatagag

SEQ ID NO: 43214 - DNA, 626 bp, Zea Mays
ctccattttagtgaacctgcatcttggtgtccgcccgcaccccacgcacacgtcaccaccgtgtccggcgtcttccgtctccgtttgtcgtgaaggttctggaccccgcgagcgtcgtcgcctctgctccttggtgcttcgtcctcctcccacgtgtgtgcgcccggaggacccaatctgagggcctcaatcattgaacacaggggtcatcggctaccagcgctaggatcatgtgtgaccaatcgctgcttgcgatttgcgaaccgccggatcaaggcgtgggagcaaagctttagctgccaaaggggcggaagcggaagagggcagcacattctgtagtctctatccattttttggcaccataaacgagccaatcgtatcaaaaattttatccaaagcaatctaaagccacctctcgagtgcagggatgtcaagctacaagaaactctcacagataaagaaaagaaggttgaccctccacttcaatctcctccaaaaaggacatcttattctctaattggatagcagcatatattctagctttcttactatatggaaacttggatggccttgctcgaggcacgagtagatgtcaacgatagtgacagcaatcctaatatatagag

SEQ ID NO: 43215 - DNA, 1428 bp, Zea Mays
cagaatctccattttagtgaacctgcatcttggtgtccgcccgcaccccacgcacacgtcaccaccgtgtccggcgtcttccgtctccgtttgtcgtgaaggttctggaccccgcgagcgtcgtcgcctctgctccttggtgcttcgtcctcctcccacgtgtgtgcgcccggaggacccaatctgaggtaggagaagcaccccctcctcgcatcgcgtcacgcccccaccaccactgccgtaggcttctctccggcgctcccactcggccgcacgctcagcctcagcatgccaccgccatcgccgtctcgcccgctattgcccgcttcccgctgtcccctgcaccgctgccgcttgtaggctcctccacctccgccgcctcctcgagctctgtcgcgcgaggccattttttagtggggaatgcgatgtccactttctcatctcctgtggcctgcaccatttgcgtacatcactagggcctcaatcattgaacacaggggtcatcggctaccagcgctaggatcatgtgtgaccaatcgctgcttgcgatttgcgaaccgccggatcaaggcgtgggagcaaagctttagctgccaaaggggcggaagcggaagagggcagcacattctgtagtctctatccattttttggcaccataaacgagccaatcgtatcaaaaattttatccaaagcaatctaaagccacctctcgagtgcagggatgtcaagctacaagaaactctcacagataaagaaaagaaggttgaccctccacttcaatctcctccaaaaagccgccgaggagcgtaaaatagatttgcttgcacccgcacattccgggcgcagccgtgcagccaaccaatcagaaatgcaggcgcagtcaacactcgtgaggagcctaggcgttgagagctgggcaaccaatcacacggtaattgtatgcacccatgcacaggtcgaggaggctcctgtgtctaattgtgtgcagcaagtcaaagagtctcgattgagcctagcatgagcaataggggccactcaggctagccaaggagactgcctacgaaccaacacaaaggtccacaattctgatcctttgtaaacaaaggacataggcaagtcatccttggctatcagaggcaggcccttattgacatgtaaggcttctgctctgcttgtcacctctagctagcttggtagcttctgtgactggtctgttgtgctccttccatggaacatctatttatacatgtatctcgtagagagaaccgtatcattttttccttttttttgttgttgttccaggacatcttattctctaattggatagcagcatatattctagctttcttactatatggaaacttggatggccttgctcgaggcacgagtagatgtcaacgatagtgacagcaatcctaatatatagag

SEQ ID NO: 43216 - DNA, 618 bp, Zea Mays
ttgtgcccagaatctccattttagtgaacctgcatcttggtgtccgcccgcaccccacgcacacgtcaccaccgtgtccggcgtcttccgtctccgtttgtcgtgaaggttctggaccccgcgagcgtcgtcgcctctgctccttggtgcttcgtcctcctcccacgtgtgtgcgcccggaggacccaatctgaggggtcatcggctaccagcgctaggatcatgtgtgaccaatcgctgcttgcgatttgcgaaccgccggatcaaggcgtgggagcaaagctttagctgccaaaggggcggaagcggaagagggcagcacattctgtagtctctatccattttttggcaccataaacgagccaatcgtatcaaaaattttatccaaagcaatctaaagccacctctcgagtgcagggatgtcaagctacaagaaactctcacagataaagaaaagaaggttgaccctccacttcaatctcctccaaaaaggacatcttattctctaattggatagcagcatatattctagctttcttactatatggaaacttggatggccttgctcgaggcacgagtagatgtcaacgatagtgacagcaatcctaatatatagag

SEQ ID NO: 43217 - DNA, 1262 bp, Zea Mays
cttcggtgaccaaaggggctggcgagcaacataacaatagatcagtagacacgatgagcagtgaaactctccgcctgaagcatctttctgcaaattggcgagacaccgaaatgttaatctgctctactttaggccctttcgtttttattaacgcacatggcaaaagaccacaagttaaaactggatgctagctgtttttcacccccaagatgaacaaagacatgatgcaggtaaactagctaaaagttgcagttatatcaggtcctgtttagcgatctatatatgttcttgcaaaagtttccgggtttaagggatcaactggctctgaaagataaaaaagttcatgtgactgaaatagcaaaagctgagagaaccaattaaggcatgatgctgtttcaaaatgctggtcatactatagatccgtacgtattctgcagcgtgcatgtgcatgcatagataaaaaaatcaggtcaagaacattgtgtgctgctgattgtttccagagaaactggcacgctatactgccctttcaaacagaaaatgctaggaatggagcatgcatggacactgaaacacagctacatgcatatgacaaaggtcgtgtctaacctcttgattggttgccggcagccgccgaggagcgtaaaatagatttgcttgcacccgcacattccgggcgcagccgtgcagccaaccaatcagaaatgcaggcgcagtcaacactcgtgaggagcctaggcgttgagagctgggcaaccaatcacacggtaattgtatgcacccatgcacaggtcgaggaggctcctgtgtctaattgtgtgcagcaagtcaaagagtctcgattgagcctagcatgagcaataggggccactcaggctagccaaggagactgcctacgaaccaacacaaaggtccacaattctgatcctttgtaaacaaaggacataggcaagtcatccttggctatcagaggcaggcccttattgacatgtaaggcttctgctctgcttgtcacctctagctagcttggtagcttctgtgactggtctgttgtgctccttccatggaacatctatttatacatgtatctcgtagagagaaccgtatcattttttccttttttttgttgttgttccaggacatcttattctctaattggatagcagcatatattctagctttcttactatatggaaacttggatggccttgctcgaggcacgagtagatgtcaacgatagtgacagcaatcctaatatatag

SEQ ID NO: 43218 - DNA, 2020 bp, Zea Mays
ctccattttagtgaacctgcatcttggtgtccgcccgcaccccacgcacacgtcaccaccgtgtccggcgtcttccgtctccgtttgtcgtgaaggttctggaccccgcgagcgtcgtcgcctctgctccttggtgcttcgtcctcctcccacgtgtgtgcgcccggaggacccaatctgaggggtcatcggctaccagcgctaggatcatgtgtgaccaatcgctgcttgcgatttgcgaaccgccggatcaaggcgtgggagcaaagctttagctgccaaaggggcggaagcggaagagggcagcacattctgtagtctctatccattttttggcaccataaacgagccaatcgtatcaaaaattttatccaaagcaatctaaagccacctctcgagtgcagggatgtcaagctacaagaaactctcacagataaagaaaagaaggttgaccctccacttcaatctcctccaaaaaggtgagcttctatacaattaactccctaccgatcaatacagatatttgcttactacaaatacacacacatatatatatacacatacatagtagaattaacatccagtacaaaaaaatactttcaatgaatatatacatacctacacacgttctattcacctcaccgataaagttgatacaggtttaatggtaaaatgaatcacaggaatcatttgaatgacaaaacaggaatcacaccaacgaagttgtatcaaccacaataaaatgaatgacacgattatatcaattgtatcggtgaatggtacaattttatcaattttaccattcattttacatgatcaaacaggaaccactatgcatcaaagaatttacaatccagaaggaccaccatgaatgatagacaaaaccataaggaccaccatgaatgatagacaaaactatttttctttttgatggacctttttttgtatgcctgctactggcctccataaagaggtgttgtatttggtccatctttgagtctaaacttttgttaagtgcgtgttcaaggaaaaaaaatacatatgtcatcatttttgtccaattagcctttaaactgtgcaacctactatccaaaggtaagtgataaatgcagtatttttgactataaacaatttagaattcatatcagtatttacaattgtgttctatttgcataacaatactgatttacacccagacataacgcgcgcaaggcgcgcgtcagccactagtcacacacaaaactagaagccaacgggtgtcggagagagccactgatagggctggataacgagcccgcttagctcgattgacctcgcagtagtacaaaacggctctatgtcgatctatgataacatctaatttttacaggcggctttagttatcaagcgcctgtgaaaaaattgtcgtctcaactcaagaaccgccagtgaaaacacattttatatgcggttttctaaaaatccatcattgcaaatcgtgcatttctacacacggtttccttaagaaaatcacctatagaaatcatatttgtataggtggttccttaaatcgcatgtaaatccatgatttctactaggggttttcttaaggaatctcctatataaatatgatttctgcatgtagttttcttaagaaaccaacactagaaatcattattatcctatttttttgagttttaaaaatgatctcgtatgaaaaagcacccaaaaaagttgtagacctttaaaagttacgaaactttgtagttgataactttttatttgaaattatttcagctctcaaaatttgcatcttaattcgacaaatttacaatgcaaattttgcaaatgaccttggactcaaaaagtagcaaaataaaagttgtagaactttaaaagttattcaactttgtagttgacaacttttttgtttgaatttgtttacggcctcatgcaatcaatttacactcattgtgctataatatgtgggcaacaaaaatagtatgtagacatgaagtaagcgattgcttgagttgtagag

SEQ ID NO: 43219 - DNA, 1696 bp, Zea Mays
ctccattttagtgaacctgcatcttggtgtccgcccgcaccccacgcacacgtcaccaccgtgtccggcgtcttccgtctccgtttgtcgtgaaggttctggaccccgcgagcgtcgtcgcctctgctccttggtgcttcgtcctcctcccacgtgtgtgcgcccggaggacccaatctgagggcctcaatcattgaacacaggggtcatcggctaccagcgctaggatcatgtgtgaccaatcgctgcttgcgatttgcgaaccgccggatcaaggcgtgggagcaaagctttagctgccaaaggggcggaagcggaagagggcagcacattctgtagtctctatccattttttggcaccataaacgagccaatcgtatcaaaaattttatccaaagcaatctaaagccacctctcgagtgcagggatgtcaagctacaagaaactctcacagataaagaaaagaaggttgaccctccacttcaatctcctccaaaaaggaaccactatgcatcaaagaatttacaatccagaaggaccaccatgaatgatagacaaaaccataaggaccaccatgaatgatagacaaaactatttttctttttgatggacctttttttgtatgcctgctactggcctccataaagaggtgttgtatttggtccatctttgagtctaaacttttgttaagtgcgtgttcaaggaaaaaaaatacatatgtcatcatttttgtccaattagcctttaaactgtgcaacctactatccaaaggtaagtgataaatgcagtatttttgactataaacaatttagaattcatatcagtatttacaattgtgttctatttgcataacaatactgatttacacccagacataacgcgcgcaaggcgcgcgtcagccactagtcacacacaaaactagaagccaacgggtgtcggagagagccactgatagggctggataacgagcccgcttagctcgattgacctcgcagtagtacaaaacggctctatgtcgatctatgataacatctaatttttacaggcggctttagttatcaagcgcctgtgaaaaaattgtcgtctcaactcaagaaccgccagtgaaaacacattttatatgcggttttctaaaaatccatcattgcaaatcgtgcatttctacacacggtttccttaagaaaatcacctatagaaatcatatttgtataggtggttccttaaatcgcatgtaaatccatgatttctactaggggttttcttaaggaatctcctatataaatatgatttctgcatgtagttttcttaagaaaccaacactagaaatcattattatcctatttttttgagttttaaaaatgatctcgtatgaaaaagcacccaaaaaagttgtagacctttaaaagttacgaaactttgtagttgataactttttatttgaaattatttcagctctcaaaatttgcatcttaattcgacaaatttacaatgcaaattttgcaaatgaccttggactcaaaaagtagcaaaataaaagttgtagaactttaaaagttattcaactttgtagttgacaacttttttgtttgaatttgtttacggcctcatgcaatcaatttacactcattgtgctataatatgtgggcaacaaaaatagtatgtagacatgaagtaagcgattgcttgagttgtagag

SEQ ID NO: 43220 - DNA, 2335 bp, Zea Mays
cagaatctccattttagtgaacctgcatcttggtgtccgcccgcaccccacgcacacgtcaccaccgtgtccggcgtcttccgtctccgtttgtcgtgaaggttctggaccccgcgagcgtcgtcgcctctgctccttggtgcttcgtcctcctcccacgtgtgtgcgcccggaggacccaatctgaggtaggagaagcaccccctcctcgcatcgcgtcacgcccccaccaccactgccgtaggcttctctccggcgctcccactcggccgcacgctcagcctcagcatgccaccgccatcgccgtctcgcccgctattgcccgcttcccgctgtcccctgcaccgctgccgcttgtaggctcctccacctccgccgcctcctcgagctctgtcgcgcgaggccattttttagtggggaatgcgatgtccactttctcatctcctgtggcctgcaccatttgcgtacatcactagggcctcaatcattgaacacaggggtcatcggctaccagcgctaggatcatgtgtgaccaatcgctgcttgcgatttgcgaaccgccggatcaaggcgtgggagcaaagctttagctgccaaaggggcggaagcggaagagggcagcacattctgtagtctctatccattttttggcaccataaacgagccaatcgtatcaaaaattttatccaaagcaatctaaagccacctctcgagtgcagggatgtcaagctacaagaaactctcacagataaagaaaagaaggttgaccctccacttcaatctcctccaaaaaggtgagcttctatacaattaactccctaccgatcaatacagatatttgcttactacaaatacacacacatatatatatacacatacatagtagaattaacatccagtacaaaaaaatactttcaatgaatatatacatacctacacacgttctattcacctcaccgataaagttgatacaggtttaatggtaaaatgaatcacaggaatcatttgaatgacaaaacaggaatcacaccaacgaagttgtatcaaccacaataaaatgaatgacacgattatatcaattgtatcggtgaatggtacaattttatcaattttaccattcattttacatgatcaaacaggaaccactatgcatcaaagaatttacaatccagaaggaccaccatgaatgatagacaaaaccataaggaccaccatgaatgatagacaaaactatttttctttttgatggacctttttttgtatgcctgctactggcctccataaagaggtgttgtatttggtccatctttgagtctaaacttttgttaagtgcgtgttcaaggaaaaaaaatacatatgtcatcatttttgtccaattagcctttaaactgtgcaacctactatccaaaggtaagtgataaatgcagtatttttgactataaacaatttagaattcatatcagtatttacaattgtgttctatttgcataacaatactgatttacacccagacataacgcgcgcaaggcgcgcgtcagccactagtcacacacaaaactagaagccaacgggtgtcggagagagccactgatagggctggataacgagcccgcttagctcgattgacctcgcagtagtacaaaacggctctatgtcgatctatgataacatctaatttttacaggcggctttagttatcaagcgcctgtgaaaaaattgtcgtctcaactcaagaaccgccagtgaaaacacattttatatgcggttttctaaaaatccatcattgcaaatcgtgcatttctacacacggtttccttaagaaaatcacctatagaaatcatatttgtataggtggttccttaaatcgcatgtaaatccatgatttctactaggggttttcttaaggaatctcctatataaatatgatttctgcatgtagttttcttaagaaaccaacactagaaatcattattatcctatttttttgagttttaaaaatgatctcgtatgaaaaagcacccaaaaaagttgtagacctttaaaagttacgaaactttgtagttgataactttttatttgaaattatttcagctctcaaaatttgcatcttaattcgacaaatttacaatgcaaattttgcaaatgaccttggactcaaaaagtagcaaaataaaagttgtagaactttaaaagttattcaactttgtagttgacaacttttttgtttgaatttgtttacggcctcatgcaatcaatttacactcattgtgctataatatgtgggcaacaaaaatagtatgtagacatgaagtaagcgattgcttgagttgtagag

SEQ ID NO: 43221 - DNA, 1990 bp, Zea Mays
cagaatctccattttagtgaacctgcatcttggtgtccgcccgcaccccacgcacacgtcaccaccgtgtccggcgtcttccgtctccgtttgtcgtgaaggttctggaccccgcgagcgtcgtcgcctctgctccttggtgcttcgtcctcctcccacgtgtgtgcgcccggaggacccaatctgaggtaggagaagcaccccctcctcgcatcgcgtcacgcccccaccaccactgccgtaggcttctctccggcgctcccactcggccgcacgctcagcctcagcatgccaccgccatcgccgtctcgcccgctattgcccgcttcccgctgtcccctgcaccgctgccgcttgtaggctcctccacctccgccgcctcctcgagctctgtcgcgcgaggccattttttagtggggaatgcgatgtccactttctcatctcctgtggcctgcaccatttgcgtacatcactagggcctcaatcattgaacacaggggtcatcggctaccagcgctaggatcatgtgtgaccaatcgctgcttgcgatttgcgaaccgccggatcaaggcgtgggagcaaagctttagctgccaaaggggcggaagcggaagagggcagcacattctgtagtctctatccattttttggcaccataaacgagccaatcgtatcaaaaattttatccaaagcaatctaaagccacctctcgagtgcagggatgtcaagctacaagaaactctcacagataaagaaaagaaggttgaccctccacttcaatctcctccaaaaaggaaccactatgcatcaaagaatttacaatccagaaggaccaccatgaatgatagacaaaaccataaggaccaccatgaatgatagacaaaactatttttctttttgatggacctttttttgtatgcctgctactggcctccataaagaggtgttgtatttggtccatctttgagtctaaacttttgttaagtgcgtgttcaaggaaaaaaaatacatatgtcatcatttttgtccaattagcctttaaactgtgcaacctactatccaaaggtaagtgataaatgcagtatttttgactataaacaatttagaattcatatcagtatttacaattgtgttctatttgcataacaatactgatttacacccagacataacgcgcgcaaggcgcgcgtcagccactagtcacacacaaaactagaagccaacgggtgtcggagagagccactgatagggctggataacgagcccgcttagctcgattgacctcgcagtagtacaaaacggctctatgtcgatctatgataacatctaatttttacaggcggctttagttatcaagcgcctgtgaaaaaattgtcgtctcaactcaagaaccgccagtgaaaacacattttatatgcggttttctaaaaatccatcattgcaaatcgtgcatttctacacacggtttccttaagaaaatcacctatagaaatcatatttgtataggtggttccttaaatcgcatgtaaatccatgatttctactaggggttttcttaaggaatctcctatataaatatgatttctgcatgtagttttcttaagaaaccaacactagaaatcattattatcctatttttttgagttttaaaaatgatctcgtatgaaaaagcacccaaaaaagttgtagacctttaaaagttacgaaactttgtagttgataactttttatttgaaattatttcagctctcaaaatttgcatcttaattcgacaaatttacaatgcaaattttgcaaatgaccttggactcaaaaagtagcaaaataaaagttgtagaactttaaaagttattcaactttgtagttgacaacttttttgtttgaatttgtttacggcctcatgcaatcaatttacactcattgtgctataatatgtgggcaacaaaaatagtatgtagacatgaagtaagcgattgcttgagttgtagag

SEQ ID NO: 43222 - DNA, 1687 bp, Zea Mays
tgtgcccagaatctccattttagtgaacctgcatcttggtgtccgcccgcaccccacgcacacgtcaccaccgtgtccggcgtcttccgtctccgtttgtcgtgaaggttctggaccccgcgagcgtcgtcgcctctgctccttggtgcttcgtcctcctcccacgtgtgtgcgcccggaggacccaatctgaggggtcatcggctaccagcgctaggatcatgtgtgaccaatcgctgcttgcgatttgcgaaccgccggatcaaggcgtgggagcaaagctttagctgccaaaggggcggaagcggaagagggcagcacattctgtagtctctatccattttttggcaccataaacgagccaatcgtatcaaaaattttatccaaagcaatctaaagccacctctcgagtgcagggatgtcaagctacaagaaactctcacagataaagaaaagaaggttgaccctccacttcaatctcctccaaaaaggaaccactatgcatcaaagaatttacaatccagaaggaccaccatgaatgatagacaaaaccataaggaccaccatgaatgatagacaaaactatttttctttttgatggacctttttttgtatgcctgctactggcctccataaagaggtgttgtatttggtccatctttgagtctaaacttttgttaagtgcgtgttcaaggaaaaaaaatacatatgtcatcatttttgtccaattagcctttaaactgtgcaacctactatccaaaggtaagtgataaatgcagtatttttgactataaacaatttagaattcatatcagtatttacaattgtgttctatttgcataacaatactgatttacacccagacataacgcgcgcaaggcgcgcgtcagccactagtcacacacaaaactagaagccaacgggtgtcggagagagccactgatagggctggataacgagcccgcttagctcgattgacctcgcagtagtacaaaacggctctatgtcgatctatgataacatctaatttttacaggcggctttagttatcaagcgcctgtgaaaaaattgtcgtctcaactcaagaaccgccagtgaaaacacattttatatgcggttttctaaaaatccatcattgcaaatcgtgcatttctacacacggtttccttaagaaaatcacctatagaaatcatatttgtataggtggttccttaaatcgcatgtaaatccatgatttctactaggggttttcttaaggaatctcctatataaatatgatttctgcatgtagttttcttaagaaaccaacactagaaatcattattatcctatttttttgagttttaaaaatgatctcgtatgaaaaagcacccaaaaaagttgtagacctttaaaagttacgaaactttgtagttgataactttttatttgaaattatttcagctctcaaaatttgcatcttaattcgacaaatttacaatgcaaattttgcaaatgaccttggactcaaaaagtagcaaaataaaagttgtagaactttaaaagttattcaactttgtagttgacaacttttttgtttgaatttgtttacggcctcatgcaatcaatttacactcattgtgctataatatgtgggcaacaaaaatagtatgtagacatgaagtaagcgattgcttgagttgtagag

SEQ ID NO: 43223 - DNA, 385 bp, Zea Mays
cgcacacgtcaccaccgtgtccggcgtcttccgtctccgtttgtcgtgaaggttctggaccccgcgagcgtcgtcgcctctgctccttggtgcttcgtcctcctcccacgtgtgtgcgcccggaggacccaatctgaggggtcatcggctaccagcgctaggatcatgtgtgaccaatcgctgcttgcgatttgcgaaccgccggatcaaggcgtgggagcaaagctttagctgccaaaggggcggaagcggaagagggcagcacattctgtagtctctatccattttttggcaccataaacgagccaatcgtatcaaaaattttatccaaagcaatctaaagccacctctcgagtgcagggatgtcaagctcactcatttcatt

SEQ ID NO: 43224 - DNA, 1136 bp, Zea Mays
cacagaccgaggcctggtcattgcatatgcagagtctggttgtgctcgtgcatacaaccaaacatatgtatgtaaacaaagaattcttacggaaccgtagcatggatgagaatcagctagctcagcagatgtggaatagtgtagctgcaaatgacaagaaagcagcatacagtctcattgtgagatcacgcgccaatgtaaatttagttcatggagagatacattctagcccatttttgactctcggaaaagcacttcagcaagagcaaccggcttcaccacctgttggaagtcctagatttttcgattgcaactcgcatgacaagatttctcgagagcccctttcccctgctagcacgagttcatgcagagatggcatggaggacggttgcgaaggtctctccttgctccatcttgcatgccgtgttgcagatgttgggatggttgaattacttttgcagtatggtgctagtgtaaacatgaatgattctatgggtcggacaccccttcatcactgcattctgaaaggaagacatcggcatgcaaagcttctcctctccagaggtgctgattcacaagccatggatcgagatggtaggacagcattacagtatgcaatcaatggcggaacaagtgacgaagacattcttgcgttattacaggatcatagtagataatcttgcaaccaataccttcagtaaatcgaggcactcttggtgtggtcgactcaactaacaaggcaccagccccgccaggccccagcttgtcgtgcagacaatcctaaatttatggcatgaaagcaacctatgtacatgtcgttatagggcttcagtatcatgacgcgcctgttgtttcttcccccaccttgtgcttgtttaggataagtcatccatatttagtcatctggcaaacggtttggttttgtttgctgcaggtgatgcatagtaagcctgtaaatggagttatttctctttattttctagtcatcttccgtcacgaagtagatttggcattctgatgaaagatgattgtacatatcgagatgtgtgatgttggggacttgttctcaaatgctatgaattaagaacgaggcaacataaaatgttaaatgattttgtccttcgtccgtgaagcat

SEQ ID NO: 43225 - DNA, 1182 bp, Zea Mays
caggcttcctcactctttagagagggattccttttgaacatcttcgtggcaagatacctgactattcaagtctttgtctgtttggccgtgtctgctatgtgctgctcccacctctatgtaaacaaagaattcttacggaaccgtagcatggatgagaatcagctagctcagcagatgtggaatagtgtagctgcaaatgacaagaaagcagcatacagtctcattgtgagatcacgcgccaatgtaaatttagttcatggagagatacattctagcccatttttgactctcggaaaagcacttcagcaagagcaaccggcttcaccacctgttggaagtcctagatttttcgattgcaactcgcatgacaagatttctcgagagcccctttcccctgctagcacgagttcatgcagagatggcatggaggacggttgcgaaggtctctccttgctccatcttgcatgccgtgttgcagatgttgggatggttgaattacttttgcagtatggtgctagtgtaaacatgaatgattctatgggtcggacaccccttcatcactgcattctgaaaggaagacatcggcatgcaaagcttctcctctccagaggtgctgattcacaagccatggatcgagatggtaggacagcattacagtatgcaatcaatggcggaacaagtgacgaagacattcttgcgttattacaggatcatagtagataatcttgcaaccaataccttcagtaaatcgaggcactcttggtgtggtcgactcaactaacaaggcaccagccccgccaggccccagcttgtcgtgcagacaatcctaaatttatggcatgaaagcaacctatgtacatgtcgttatagggcttcagtatcatgacgcgcctgttgtttcttcccccaccttgtgcttgtttaggataagtcatccatatttagtcatctggcaaacggtttggttttgtttgctgcaggtgatgcatagtaagcctgtaaatggagttatttctctttattttctagtcatcttccgtcacgaagtagatttggcattctgatgaaagatgattgtacatatcgagatgtgtgatgttggggacttgttctcaaatgctatgaattaagaacgaggcaacataaaatgttaaatgattttgtccttcgtccgtgaagcat

SEQ ID NO: 43226 - DNA, 1112 bp, Zea Mays
caacaatctgttgtccatgaagccaacgatcattccaaaacaagtatgtaaacaaagaattcttacggaaccgtagcatggatgagaatcagctagctcagcagatgtggaatagtgtagctgcaaatgacaagaaagcagcatacagtctcattgtgagatcacgcgccaatgtaaatttagttcatggagagatacattctagcccatttttgactctcggaaaagcacttcagcaagagcaaccggcttcaccacctgttggaagtcctagatttttcgattgcaactcgcatgacaagatttctcgagagcccctttcccctgctagcacgagttcatgcagagatggcatggaggacggttgcgaaggtctctccttgctccatcttgcatgccgtgttgcagatgttgggatggttgaattacttttgcagtatggtgctagtgtaaacatgaatgattctatgggtcggacaccccttcatcactgcattctgaaaggaagacatcggcatgcaaagcttctcctctccagaggtgctgattcacaagccatggatcgagatggtaggacagcattacagtatgcaatcaatggcggaacaagtgacgaagacattcttgcgttattacaggatcatagtagataatcttgcaaccaataccttcagtaaatcgaggcactcttggtgtggtcgactcaactaacaaggcaccagccccgccaggccccagcttgtcgtgcagacaatcctaaatttatggcatgaaagcaacctatgtacatgtcgttatagggcttcagtatcatgacgcgcctgttgtttcttcccccaccttgtgcttgtttaggataagtcatccatatttagtcatctggcaaacggtttggttttgtttgctgcaggtgatgcatagtaagcctgtaaatggagttatttctctttattttctagtcatcttccgtcacgaagtagatttggcattctgatgaaagatgattgtacatatcgagatgtgtgatgttggggacttgttctcaaatgctatgaattaagaacgaggcaacataaaatgttaaatgattttgtccttcgtccgtgaagcat

SEQ ID NO: 43227 - DNA, 1577 bp, Zea Mays
atgtgtgctgactgtggtgcttcagaacctgattgggcatcattaaaccttggcgcacttctatgcatagagtgttctggggtgcacagaaatcttggagtgcatatatcaaaggttagatctctgacacttgatgtcagagtttggggagccatctgtaatcaatctctttcagtcattaggcaacatgtttgtcaacagtatttgggaagagacgctgccagatgataattcaagtgctgatggatcagacacatcacagtacctctctgttagcaagcctaaacacaaagatgtattctctgccaaggagaagtttattcatgccaagatgaatatctctcttatgcttttcgtcgggtactttctaagcaagggactcttgcccatttttcatgtcgtaacgctcatgctcaaaatggtgtggctgagcgcaagcatcatcatcatcttgagtctatgggggctcttatgcttgcctcttttgttcctcctcactttgggatgagtatgtaaacaaagaattcttacggaaccgtagcatggatgagaatcagctagctcagcagatgtggaatagtgtagctgcaaatgacaagaaagcagcatacagtctcattgtgagatcacgcgccaatgtaaatttagttcatggagagatacattctagcccatttttgactctcggaaaagcacttcagcaagagcaaccggcttcaccacctgttggaagtcctagatttttcgattgcaactcgcatgacaagatttctcgagagcccctttcccctgctagcacgagttcatgcagagatggcatggaggacggttgcgaaggtctctccttgctccatcttgcatgccgtgttgcagatgttgggatggttgaattacttttgcagtatggtgctagtgtaaacatgaatgattctatgggtcggacaccccttcatcactgcattctgaaaggaagacatcggcatgcaaagcttctcctctccagaggtgctgattcacaagccatggatcgagatggtaggacagcattacagtatgcaatcaatggcggaacaagtgacgaagacattcttgcgttattacaggatcatagtagataatcttgcaaccaataccttcagtaaatcgaggcactcttggtgtggtcgactcaactaacaaggcaccagccccgccaggccccagcttgtcgtgcagacaatcctaaatttatggcatgaaagcaacctatgtacatgtcgttatagggcttcagtatcatgacgcgcctgttgtttcttcccccaccttgtgcttgtttaggataagtcatccatatttagtcatctggcaaacggtttggttttgtttgctgcaggtgatgcatagtaagcctgtaaatggagttatttctctttattttctagtcatcttccgtcacgaagtagatttggcattctgatgaaagatgattgtacatatcgagatgtgtgatgttggggacttgttctcaaatgctatgaattaagaacgaggcaacataaaatgttaaatgattttgtccttcgtccgtgaagcat

SEQ ID NO: 43228 - DNA, 1615 bp, Zea Mays
atgtgtgctgactgtggtgcttcagaacctgattgggcatcattaaaccttggcgcacttctatgcatagagtgttctggggtgcacagaaatcttggagtgcatatatcaaaggttagatctctgacacttgatgtcagagtttggggagccatctgtaatcaatctctttcagtcattaggcaacatgtttgtcaacagtatttgggaagagacgctgccagatgataattcaagtgctgatggatcagacacatcacagtacctctctgttagcaagcctaaacacaaagatgtattctctgccaaggagaagtttattcatgccaagggaaggctatggacgagaaggagttgcttaccaactataatgctcagatgccctcttatgactcccagtttaatgcttacatgacttggttagatgaggatgttcatgcccatgctattcttgcctctagtatggaagactgtcttgctgctgattttgagttcgagtttacaaatcagatgtgggcttttgtgcatgatcgttatgagcctactgtatgtaaacaaagaattcttacggaaccgtagcatggatgagaatcagctagctcagcagatgtggaatagtgtagctgcaaatgacaagaaagcagcatacagtctcattgtgagatcacgcgccaatgtaaatttagttcatggagagatacattctagcccatttttgactctcggaaaagcacttcagcaagagcaaccggcttcaccacctgttggaagtcctagatttttcgattgcaactcgcatgacaagatttctcgagagcccctttcccctgctagcacgagttcatgcagagatggcatggaggacggttgcgaaggtctctccttgctccatcttgcatgccgtgttgcagatgttgggatggttgaattacttttgcagtatggtgctagtgtaaacatgaatgattctatgggtcggacaccccttcatcactgcattctgaaaggaagacatcggcatgcaaagcttctcctctccagaggtgctgattcacaagccatggatcgagatggtaggacagcattacagtatgcaatcaatggcggaacaagtgacgaagacattcttgcgttattacaggatcatagtagataatcttgcaaccaataccttcagtaaatcgaggcactcttggtgtggtcgactcaactaacaaggcaccagccccgccaggccccagcttgtcgtgcagacaatcctaaatttatggcatgaaagcaacctatgtacatgtcgttatagggcttcagtatcatgacgcgcctgttgtttcttcccccaccttgtgcttgtttaggataagtcatccatatttagtcatctggcaaacggtttggttttgtttgctgcaggtgatgcatagtaagcctgtaaatggagttatttctctttattttctagtcatcttccgtcacgaagtagatttggcattctgatgaaagatgattgtacatatcgagatgtgtgatgttggggacttgttctcaaatgctatgaattaagaacgaggcaacataaaatgttaaatgattttgtccttcgtccgtgaagcat

SEQ ID NO: 43229 - DNA, 393 bp, Zea Mays
tcaaacttgagagccgactggaaaagaaggttctttgtacttgatagtcgaggaatgttgtactactatcggaaacaaattactaggccacctgctggttgctccatgcaaagaagtgttaacccccctgaacatggttctgggttgttgagcagattgttctcatctcattaccatggcattgtacatgatgaaaagtctgttgcacggcatactgtaaatttattgacatcaaccattaaagttgatgctgaccaatcagatctgaggttctgcttcagaatcatttcacccacaaaaatctacacattgcagagagtgcagtagatcagatggattggattgaaaagataactggtgttattgcctctttgctgaactcacaatccccag

SEQ ID NO: 43230 - DNA, 397 bp, Zea Mays
tcaaacttgagagccgactggaaaagaaggttctttgtacttgatagtcgaggaatgttgtactactatcggaaacaaattactaggccacctgctggttgctccatgcaaagaagtgttaacccccctgaacatggttctgggttgttgagcagattgttctcatctcattaccatggcattgtacatgatgaaaagtctgttgcacggcatactgtaaatttattgacatcaaccattaaagttgatgctgaccaatcagatctgaggttctgcttcagaatcatttcacccacaaaaatctacacattgcaggcagagagtgcagtagatcagatggattggattgaaaagataactggtgttattgcctctttgctgaactcacaatccccag

SEQ ID NO: 43231 - DNA, 941 bp, Zea Mays
attccgaagcgggtaatcaattgcaggacagttcaagaagcaattgttagcgccaaatggatttctgacatcagaggggctttgtcagtaggggttttgacagattaccttcagctttgggatttgctatctggcatcgagctacagccggaggttgacgacaagcatactttcagtattgcctcgaatggtgtgtactcagccaaatcagcatatgaaggactgttcctaggatctgtgacatttgagcattataaaagaatctggaagtcctgggccttgccaaaatgtcgcttcttcctttggttggtggcccataagagatgttggacggctgatagattggcaaagcgaggcctaaatcatccagagaaatgtctgttatgtgaccaagaggaagaaaatatagaccacctccttgtgcaatgttcttttgcccgagagttctggtaccttttactcaggaaatttggtcttcattctcttgcaccacagccgactacaaactccttcctgggatggtgggaagtggtgggaggagcagttcatggtctcacaaaaaagggccttaactctctcatcattctaggagcttggactttatggaatcatcgaaataaatgcatttttgatggctgcaacccaagtatgtcttcaagcctcagagctgctgatgaggaaagaagaagatgggaagtggctggtgcaaaaggcctcacacatctggctgcacccttggtagagccttaggaagatttgagtagtttgatttttttgatccccttatggatctttatttgtatgcctgtttctggcctccgtaaggaggactgtaaaaccttttttgttttgttctgttttttctattcctctgcttaatatataatggggcgcagttctcctgcgcgttcgagaaaaaaatagaaattgataggattaat

SEQ ID NO: 43232 - DNA, 785 bp, Zea Mays
aagctatcagctggaggcaaaatattcattgaactgctggaaagtgttctgcagggacatgaaactcctatagggtttgtcacttctggtgaaattcaaaggaggtctgacttctttgaaccgttcatatctggcttgacaaattcaaccgtggttcagttctgcaaggcttctgtggaacctatgggtgaggaaagtgaccatgtgcacataattgccctatcagatgcactaggcgtaccaatccgtgttatgtacctagaccgaagctcgtgtgacactggcaacctgagcgtgaatcaccacgatttcatcccgtcggccaatgattcggagggtgatgcggccacgacacctgctcctgccacagagaaaccgtacatcactttgctctaccgtcctggccactacgatattctctacccaaagtgaattttgcgcatggttagtttcacgacttcggttgagaaagcacactgcccagaaaactcgtcatgtttcgcctgtgtgctgccaaaggtggcaaacttgcttttgagtgcttaatgccaatgccctcgttcaatctagatgttctctacctgctgtaagtcttactctggtacaaggatttaacattgtgttgactgcagagaagttcccgtggatatttgctactcatcagttattcgttcatgttttttttttcttttaccttgatctgtcgttgcaaaccaagttcataaagtttaaacctcgttgaggaatgctagtctttcatcgatgcatgaatacctgtcaaaaca

SEQ ID NO: 43233 - DNA, 860 bp, Zea Mays
aaaggacataagctatcagctggaggcaaaatattcattgaactgctggaaagtgttctgcagggacatgaaactcctatagggcctgaagagcttctagaaagaaccagagatccacaagtttctgattatgttgtcatgttctttaggtttgtcacttctggtgaaattcaaaggaggtctgacttctttgaaccgttcatatctggcttgacaaattcaaccgtggttcagttctgcaaggcttctgtggaacctatgggtgaggaaagtgaccatgtgcacataattgccctatcagatgcactaggcgtaccaatccgtgttatgtacctagaccgaagctcgtgtgacactggcaacctgagcgtgaatcaccacgatttcatcccgtcggccaatgattcggagggtgatgcggccacgacacctgctcctgccacagagaaaccgtacatcactttgctctaccgtcctggccactacgatattctctacccaaagtgaattttgcgcatggttagtttcacgacttcggttgagaaagcacactgcccagaaaactcgtcatgtttcgcctgtgtgctgccaaaggtggcaaacttgcttttgagtgcttaatgccaatgccctcgttcaatctagatgttctctacctgctgtaagtcttactctggtacaaggatttaacattgtgttgactgcagagaagttcccgtggatatttgctactcatcagttattcgttcatgttttttttttcttttaccttgatctgtcgttgcaaaccaagttcataaagtttaaacctcgttgaggaatgctagtctttcatcgatgcatgaatacctgtcaaaaca

SEQ ID NO: 43234 - DNA, 1097 bp, Zea Mays
aaattgttgggtataagttggccgagcaccacatggttgccactaaagaacctctctcctctttagcagctgagtttcagtctggcagccccattttacaagagaaaattaagttgcttggcgagcaatatggtgctttaagacgtacacgtggagatggaaactgcttttatcgaagctttatgttttcctacctggaacacatcctagagacacaagacaaagctgaggctgatcgcatcatggtaaaaattgaggaatgcaagaaaacactcctctctcttggatatattgagttcacttttgaggacttcttttcggcctgaagagcttctagaaagaaccagagatccacaagtttctgattatgttgtcatgttctttaggtttgtcacttctggtgaaattcaaaggaggtctgacttctttgaaccgttcatatctggcttgacaaattcaaccgtggttcagttctgcaaggcttctgtggaacctatgggtgaggaaagtgaccatgtgcacataattgccctatcagatgcactaggcgtaccaatccgtgttatgtacctagaccgaagctcgtgtgacactggcaacctgagcgtgaatcaccacgatttcatcccgtcggccaatgattcggagggtgatgcggccacgacacctgctcctgccacagagaaaccgtacatcactttgctctaccgtcctggccactacgatattctctacccaaagtgaattttgcgcatggttagtttcacgacttcggttgagaaagcacactgcccagaaaactcgtcatgtttcgcctgtgtgctgccaaaggtggcaaacttgcttttgagtgcttaatgccaatgccctcgttcaatctagatgttctctacctgctgtaagtcttactctggtacaaggatttaacattgtgttgactgcagagaagttcccgtggatatttgctactcatcagttattcgttcatgttttttttttcttttaccttgatctgtcgttgcaaaccaagttcataaagtttaaacctcgttgaggaatgctagtctttcatcgatgcatgaatacctgtcaaaaca

SEQ ID NO: 43235 - DNA, 1814 bp, Zea Mays
gcaaaacgacacggacgtatttccgcttccacctgcgccgagatctcggaagaggattcagaagaagcaggcttccgctgctgcttcccccactcgaatccaagcaaccacgcccccacgcccagtccaaccccaacccgcgaagctggcgcgcgaggcggccgacgcgagcgcccgcaagcgcaaggcgggggacggcggcgaggtccccgacgccaccgcctcggcagaggtggccgcagcgccgacccccggagaggacgcggccatgggcgacgttccacaggcgccgcacgctgcgggaggtggagaagagtgggcggggccggaccctaaccctagcccgagcctcggcggctgctcggaccccgtgtcggtggagctctccatgggcggggactactaccgcgcctgctgcggcgagcccgatcccgacatccccgaggggcccaagctgccgtgcgttggggacaaggaacctctctcctctttagcagctgagtttcagtctggcagccccattttacaagagaaaattaagttgcttggcgagcaatatggtgctttaagacgtacacgtggagatggaaactgcttttatcgaagctttatgttttcctacctggtagtatctgcagtgtacttttcacaagtatattatatcttgcatttctcagtacggtgttcataattgtggcgacaatcctatcttatgctgtcttcagcagcttacccattctatctcccatttcatcttctatttcaaactccactcggtgaacaatacagtctatagtgcaaaatagtgttttgcacaccatatgcacgatctactgaagacggccttatatttgcttccaggaacacatcctagagacacaagacaaagctgaggctgatcgcatcatggtaaaaattgaggaatgcaagaaaacactcctctctcttggatatattgagttcacttttgaggacttcttttcgatattcattgaactgctggaaagtgttctgcagggacatgaaactcctatagggcctgaagagcttctagaaagaaccagagatccacaagtttctgattatgttgtcatgttctttaggtttgtcacttctggtgaaattcaaaggaggtctgacttctttgaaccgttcatatctggcttgacaaattcaaccgtggttcagttctgcaaggcttctgtggaacctatgggtgaggaaagtgaccatgtgcacataattgccctatcagatgcactaggcgtaccaatccgtgttatgtacctagaccgaagctcgtgtgacactggcaacctgagcgtgaatcaccacgatttcatcccgtcggccaatgattcggagggtgatgcggccacgacacctgctcctgccacagagaaaccgtacatcactttgctctaccgtcctggccactacgatattctctacccaaagtgaattttgcgcatggttagtttcacgacttcggttgagaaagcacactgcccagaaaactcgtcatgtttcgcctgtgtgctgccaaaggtggcaaacttgcttttgagtgcttaatgccaatgccctcgttcaatctagatgttctctacctgctgtaagtcttactctggtacaaggatttaacattgtgttgactgcagagaagttcccgtggatatttgctactcatcagttattcgttcatgttttttttttcttttaccttgatctgtcgttgcaaaccaagttcataaagtttaaacctcgttgaggaatgctagtctttcatcgatgcatgaatacctgtcaaaaca

SEQ ID NO: 43236 - DNA, 2803 bp, Zea Mays
cgtcactattcattcatctcccttctcacgcatcgtatgtggtggatccactgcggattttcctgttgtagcacttgaggctgcagtaggacagggagcaaccgccaccatagctgttcgccatttcttccatcaacaccaacatgagcagcaacaaggaaagggccaagaaggcattgaacgccatgaagctgcttggtttctctaagaagcaggccaccccagtactcaaggaactcctcaacatcttcaacaacaactgggagcccattgaggatgagtgctatcgtgccctcgctgatgccatcctcgataggcaagacaacaaacaaacccctccctcccaacagggcaaccaagcagcacatgcgcactcggagcacgatcggcaacaatatgtttctgctattcacgatgacagaggcgaagatgataatgaaacgcccctggtgaagaggcccaggatgggcacggctaatttcagggcagagttgcagccatttgagtctggaccacagcaacccactgtttcaacccaaggtgctctgtctgtttcgccacaaaacagtcgtggagtaactaggtccttgactgtagtgctgcaagatgctgggtgtgaatatcctttagctgtcgatgattctttcatcgtgaaagaacccaaaccagaaccacaaattgatatagcagaaatcaacattggtgaccatttaactgaaccacaagttgatatagcagaaatcagtgtcggtgaccatttaactgatcgagattttctgactggtcctgatgccatacagctcagtgatggatcttcaggttctggtgcaagaggcagcatggtcaaacaagctcaaagtctgggtaggagcaagcaaaaagccccattgtgcaagaatggggtagggtctatgattcaaaatactcaggagacatcgtttgtggaggtggatgttgcttcttccgccaatggcgaggtgaagatgtcattgaaatgcagcttggaatcttcgaatttcagcattagtatggaggaggttttcaaaatggttgaggagaaatgccttcactcatacaaggtgctacctccagatttttctattggcaagctgatgagtgaggtatgccaatctgttgtgcagttgggcactatgcattctgaggttaatagggacagtggcagcttgcataatgaagtagttgctccttttgtgaagccaattgcttgtgaggctgctgtggacataaatgataatgtggctggtggatcatcagtgcttgattcctcagaaccttgtttgcaaaattcgcttgttgcttgggatcctgagtttgctcattgtaagcaaaaaacaacccatgataccactgatatatccaaaggggaagagcgggtaagaatacctatagtaaatgaatttggcagcgagaaatgtcctccatccttttattacgtaccaagaaatcttgtcttccaaaatgcttatgtcaacatctcgattgctcggattggtgatgaagattgttgtgctgattgttctggcaactgtttgtcatccttagttccatgtggctgtgcaagagtgacggggggcgaattcccctatacaccagagggcctgcttaagacagaattccttgatgaatgcacctcagttaatcatttcccacaagagcatcataggttctactgtacagtttgccctcttgaaagatctaagaataaagcctcacctggtccgtgtaaaggccatcttatgagaaaattcattaaagaatgctggagtaaatgtggatgtggcatgcagtgtggaaatcgtgtgattcagcgtggtataacatgcaaattgcaggtgttctttacacgcgagggcaaaggctggggagtacgcacagtagaggatctcccaaaaggttcctttgtctgtgaatatgttggagaggtactaacaagttctgaattgcacgaaagagcaattgaaaatgcaagaaatggtaaacataagcatcaagtactcctggatgctggttggggttcaggtgtattgagggatgaagatgcccttagccttgatggttcattttatgggaacgttgggcgatttatcaaccacagatgctatgatgcgaatttagttcagatccctgttgaagttgagacgcctgatcatcattattaccatctggcatttttcacgaacaagaaagtagaggcatttgaagagctaacatgggattatggcattggttttgatgatacggaagggcccagtaaaccattcagatgcatgtgtggaagtagatattgccgcgatccgaataatctgaggaggatggctagagcagctgcaaagcggaagtaggcggggaagctgaacttggttggagattagcacatcaacttttgctgtggtatttggttccgtatttgatgtgcagcagcatcacatcagttagtacttagtattagtgtagatagatggagatgagggcggatgttttggacccttgcccgtggctgagcaacacgattgcgaccttaacctacggcatattggcatgtaaattagcctgggattgagtaggcgtagaaagaacgcgtaatagtacttagttatgtcatgtcatcttggtagagggcaagttaaattacatgccatgtcgttgcatcatctatgccatgctgggttggatgcttgtgctgaatgatttgttgaagcgactagcctaggcacttgtttttggcggtatcttctaaaaaaatttcttccctatatgtcatttttcttcatcagtgattttt

SEQ ID NO: 43237 - DNA, 3012 bp, Zea Mays
cttgttgccttcctttgttgttggttggggggacctgggaagaagagagaaaccccagcagacgccagaggaagagagaaaaccccaagtcctcctcgcctcttccgcctttcctcttcccccttcctagtatagacaatcatcaatctgtgagattggcgagcgaatcacgcatacaactgtaggatggagcggggaatgaatgcctcccctgattgcagttaatccttcccattccagtccgttcctcgtccactggagtccgttgaagtacaggctgcagtaggacagggagcaaccgccaccatagctgttcgccatttcttccatcaacaccaacatgagcagcaacaaggaaagggccaagaaggcattgaacgccatgaagctgcttggtttctctaagaagcaggccaccccagtactcaaggaactcctcaacatcttcaacaacaactgggagcccattgaggatgagtgctatcgtgccctcgctgatgccatcctcgataggcaagacaacaaacaaacccctccctcccaacagggcaaccaagcagcacatgcgcactcggagcacgatcggcaacaatatgtttctgctattcacgatgacagaggcgaagatgataatgaaacgcccctggtgaagaggcccaggatgggcacggctaatttcagggcagagttgcagccatttgagtctggaccacagcaacccactgtttcaacccaaggtgctctgtctgtttcgccacaaaacagtcgtggagtaactaggtccttgactgtagtgctgcaagatgctgggtgtgaatatcctttagctgtcgatgattctttcatcgtgaaagaacccaaaccagaaccacaaattgatatagcagaaatcaacattggtgaccatttaactgaaccacaagttgatatagcagaaatcagtgtcggtgaccatttaactgatcgagattttctgactggtcctgatgccatacagctcagtgatggatcttcagaacaaactgcaggttctggtgcaagaggcagcatggtcaaacaagctcaaagtctgggtaggagcaagcaaaaagccccattgtgcaagaatggggtagggtctatgattcaaaatactcaggagacatcgtttgtggaggtggatgttgcttcttccgccaatggcgaggtgaagatgtcattgaaatgcagcttggaatcttcgaatttcagcattagtatggaggaggttttcaaaatggttgaggagaaatgccttcactcatacaaggtgctacctccagatttttctattggcaagctgatgagtgaggtatgccaatctgttgtgcagttgggcactatgcattctgaggttaatagggacagtggcagcttgcataatgaagtagttgctccttttgtgaagccaattgcttgtgaggctgctgtggacataaatgataatgtggctggtggatcatcagtgcttgattcctcagaaccttgtttgcaaaattcgcttgttgcttgggatcctgagtttgctcattgtaagcaaaaaacaacccatgataccactgatatatccaaaggggaagagcgggtaagaatacctatagtaaatgaatttggcagcgagaaatgtcctccatccttttattacgtaccaagaaatcttgtcttccaaaatgcttatgtcaacatctcgattgctcggattggtgatgaagattgttgtgctgattgttctggcaactgtttgtcatccttagttccatgtggctgtgcaagagtgacggggggcgaattcccctatacaccagagggcctgcttaagacagaattccttgatgaatgcacctcagttaatcatttcccacaagagcatcataggttctactgtacagtttgccctcttgaaagatctaagaataaagcctcacctggtccgtgtaaaggccatcttatgagaaaattcattaaagaatgctggagtaaatgtggatgtggcatgcagtgtggaaatcgtgtgattcagcgtggtataacatgcaaattgcaggtgttctttacacgcgagggcaaaggctggggagtacgcacagtagaggatctcccaaaaggttcctttgtctgtgaatatgttggagaggtactaacaagttctgaattgcacgaaagagcaattgaaaatgcaagaaatggtaaacataagcatcaagtactcctggatgctggttggggttcaggtgtattgagggatgaagatgcccttagccttgatggttcattttatgggaacgttgggcgatttatcaaccacagatgctatgatgcgaatttagttcagatccctgttgaagttgagacgcctgatcatcattattaccatctggcatttttcacgaacaagaaagtagaggcatttgaagagctaacatgggattatggcattggttttgatgatacggaagggcccagtaaaccattcagatgcatgtgtggaagtagatattgccgcgatccgaataatctgaggaggatggctagagcagctgcaaagcggaagtaggcggggaagctgaacttggttggagattagcacatcaacttttgctgtggtatttggttccgtatttgatgtgcagcagcatcacatcagttagtacttagtattagtgtagatagatggagatgagggcggatgttttggacccttgcccgtggctgagcaacacgattgcgaccttaacctacggcatattggcatgtaaattagcctgggattgagtaggcgtagaaagaacgcgtaatagtacttagttatgtcatgtcatcttggtagagggcaagttaaattacatgccatgtcgttgcatcatctatgccatgctgggttggatgcttgtgctgaatgatttgttgaagcgactagcctaggcacttgtttttggcggtatcttctaaaaaaatttcttccctatatgtcatttttcttcatcagtgattttt

SEQ ID NO: 43238 - DNA, 2843 bp, Zea Mays
cgctcgccgcgccttgttgccttcctttgttgttggttggggggacctgggaagaagagagaaaccccagcagacgccagaggaagagagaaaaccccaagtcctcctcgcctcttccgcctttcctcttcccccttcctagtatagacaatcatcaatctgtgagattggcgagcgaatcacgcatacaactgtaggatggagcggggaatgaatgcctcccctgattgcagttaatccttcccattccagtccgttcctcgtccactggagtccgttgaagtacaggctgcagtaggacagggagcaaccgccaccatagctgttcgccatttcttccatcaacaccaacatgagcagcaacaaggaaagggccaagaaggcattgaacgccatgaagctgcttggtttctctaagaagcaggccaccccagtactcaaggaactcctcaacatcttcaacaacaactgggagcccattgaggatgagtgctatcgtgccctcgctgatgccatcctcgataggcaagacaacaaacaaacccctccctcccaacagggcaaccaagcagcacatgcgcactcggagcacgatcggcaacaatatgtttctgctattcacgatgacagaggcgaagatgataatgaaacgcccctggtgaagaggcccaggatgggcacggctaatttcagggcagagttgcagccatttgagtctggaccacagcaacccactgtttcaacccaaggtgctctgtctgtttcgccacaaaacagtcgtggagtaactaggtccttgactgtagtgctgcaagatgctgggtgtgaatatcctttagctgtcgatgattctttcatcgtgaaagaacccaaaccagaaccacaaattgatatagcagaaatcaacattggtgaccatttaactgaaccacaagttgatatagcagaaatcagtgtcggtgaccatttaactgatcgagattttctgactggtcctgatgccatacagctcagtgatggatcttcaggttctggtgcaagaggcagcatggtcaaacaagctcaaagtctgggtaggagcaagcaaaaagccccattgtgcaagaatggggtagggtctatgattcaaaatactcaggagacatcgtttgtggaggtggatgttgcttcttccgccaatggcgaggtgaagatgtcattgaaatgcagcttggaatcttcgaatttcagcattagtatggaggaggttttcaaaatggttgaggagaaatgccttcactcatacaaggtgctacctccagatttttctattggcaagctgatgagtgaggtatgccaatctgttgtgcagttgggcactatgcattctgaggttaatagggacagtggcagcttgcataatgaagtagttgctccttttgtgaagccaattgcttgtgaggctgctgtggacataaatgataatgtggctggtggatcatcagtgcttgattcctcagaaccttgtttgcaaaattcgcttgttgcttgggatcctgagtttgctcattgtaagcaaaaaacaacccatgataccactgatatatccaaaggggaagagcggttccatgtggctgtgcaagagtgacggggggcgaattcccctatacaccagagggcctgcttaagacagaattccttgatgaatgcacctcagttaatcatttcccacaagagcatcataggttctactgtacagtttgccctcttgaaagatctaagaataaagcctcacctggtccgtgtaaaggccatcttatgagaaaattcattaaagaatgctggagtaaatgtggatgtggcatgcagtgtggaaatcgtgtgattcagcgtggtataacatgcaaattgcaggtgttctttacacgcgagggcaaaggctggggagtacgcacagtagaggatctcccaaaaggttcctttgtctgtgaatatgttggagaggtactaacaagttctgaattgcacgaaagagcaattgaaaatgcaagaaatggtaaacataagcatcaagtactcctggatgctggttggggttcaggtgtattgagggatgaagatgcccttagccttgatggttcattttatgggaacgttgggcgatttatcaaccacagatgctatgatgcgaatttagttcagatccctgttgaagttgagacgcctgatcatcattattaccatctggcatttttcacgaacaagaaagtagaggcatttgaagagctaacatgggattatggcattggttttgatgatacggaagggcccagtaaaccattcagatgcatgtgtggaagtagatattgccgcgatccgaataatctgaggaggatggctagagcagctgcaaagcggaagtaggcggggaagctgaacttggttggagattagcacatcaacttttgctgtggtatttggttccgtatttgatgtgcagcagcatcacatcagttagtacttagtattagtgtagatagatggagatgagggcggatgttttggacccttgcccgtggctgagcaacacgattgcgaccttaacctacggcatattggcatgtaaattagcctgggattgagtaggcgtagaaagaacgcgtaatagtacttagttatgtcatgtcatcttggtagagggcaagttaaattacatgccatgtcgttgcatcatctatgccatgctgggttggatgcttgtgctgaatgatttgttgaagcgactagcctaggcacttgtttttggcggtatcttctaaaaaaatttcttccctatatgtcatttttcttcatcagtgattttt

SEQ ID NO: 43239 - DNA, 2221 bp, Zea Mays
gccactttctgcccgcttggagtccccgtcttcgtcgtcttgtagtagcactgagtgcgggagtactggccggccggcggcgaggctcctccactttctctgcacccatacatacgtatatgcttgttctccgccgtctccgcctccgcctcccactgccacgccctcttctcgtctcctccttctcctccacctccccctcctcctcaccctcgacctctagctcctcctcctgttggtcgtcgacaggcgaaagtagaagggccatggcgtcatctccttctcccgattcggccgcggtcgttgccgagggctccgcggctcgccgcttctggatcgctgcctccacgcgcgaggccgccttcgccgcatacacgcccttcctcctctccctcgccgccggcaatctgcggctcaacgtgtttcgccactacatcgcgcaggacgcgcacttccttcacgccttcgctcgcgcgtacgaaatggccgaggactgcgctgatgatgacgacgacatggccaccatagccgccctcaggaaggccatcctccaagagctcaacctccactcctccgttctgaaggagtggggagttgatcctaccaaagagatacctccaagtgcagctacaaccaaatatactgatttcctacttgcaactgcggctggaaaagttgatggcacaaaaggttctgacaaaatggttactccatttgagaagactaaaattgctgcatacactgttggggccatgactccatgcatgaggctttatgcatatctaggcaaagaactcatggttttccttaaacaagatgaaaatcatccatacaagaaatggattaacacatatgcatccagtgattttgaggacaccacactccaaatagaagaattgctagacaaactaagtgtctcattaactggtgaggaacttgagattattggcaagctctaccagcaagctatgaaactggaagtggagttcttttcttctcagcttatagaccaacctgttgtagctccactttcaagatactgtgatccaaaatataaactcttgatcttttctgattttgatttgacgtgcactattgttgattcatctgccattttggcggagattgcaattttgtcattccaaaaggcaaatcaaagtgggattgataataacctcgaccgtgcaaaatcgggagacctgagaagttcgtggaacatgctctctaagcaatacatggaagagtatgagaaatgcatggaaagactacttcctccagaagaatggttgtcgactctggtgtgctgaggggaatgaatttggaagacatcaggaaagctggtgagcgtcttattcttcaaggtggctgtaaaaatttctttcagaagattgtaaaaacaagggagaacctcaatttggatgtccatattctttcctattgctggtgtgcagaacttataagatcagccttctcatcagccggttgtctagatggtttgaacatacattcaaatgagtttgcctttgaggattctgtttcaactggtgagatcgacagaaagatgcagtctccgctagacaaagttgaaaagttcaagagcatcagaagtgacgtggacagtacagtgccattcctatctgtttatattggagactcggttggagatttgctctatacggtttctagctggtcagaaatacacgccttcgtactgggaagtgatttcagctgatggatgtgctgcttcttttcttccattttttttccgcttgagaagcaaaattgccggccgatgctgatgcacatgatacgtgaatcctcaatgtggtcattttatgaaagccacatgtcaattctggctaccagtatgtatgaatgaataccgataccagtttgtggtgtggaatgggttgagtttgtacccttgaattgtgatcaatgtttcattgattcgtctgtccttgttccattcggggctaatttctgggtggttgctggcattatactgcaccaacaacaacagtataaacatagtggtatatatcccaagtccaagtgtaacgacgactgcataaatgtagagatgtttgtttttaattggcaataaatgaaatgtgatgagactgttgcgcgtttgcttgttgtctgactgctacatgacctttatattatcagagagagagagatgtgtgtatgcttactttgaacgatgaattacagc

SEQ ID NO: 43240 - DNA, 2292 bp, Zea Mays
gccactttctgcccgcttggagtccccgtcttcgtcgtcttgtagtagcactgagtgcgggagtactggccggccggcggcgaggctcctccactttctctgcacccatacatacgtatatgcttgttctccgccgtctccgcctccgcctcccactgccacgccctcttctcgtctcctccttctcctccacctccccctcctcctcaccctcgacctctagctcctcctcctgttggtcgtcgacaggcgaaagtagaagggccatggcgtcatctccttctcccgattcggccgcggtcgttgccgagggctccgcggctcgccgcttctggatcgctgcctccacgcgcgaggccgccttcgccgcatacacgcccttcctcctctccctcgccgccggcaatctgcggctcaacgtgtttcgccactacatcgcgcaggacgcgcacttccttcacgccttcgctcgcgcgtacgaaatggccgaggactgcgctgatgatgacgacgacatggccaccatagccgccctcaggaaggccatcctccaagagctcaacctccactcctccgttctgaaggagtggggagttgatcctaccaaagagatacctccaagtgcagctacaaccaaatatactgatttcctacttgcaactgcggctggaaaagttgatggcacaaaaggttctgacaaaatggttactccatttgagaagactaaaattgctgcatacactgttggggccatgactccatgcatgaggctttatgcatatctaggcaaagaactcatggttttccttaaacaagatgaaaatcatccatacaagaaatggattaacacatatgcatccagtgattttgaggacaccacactccaaatagaagaattgctagacaaactaagtgtctcattaactggtgaggaacttgagattattggcaagctctaccagcaagctatgaaactggaagtggagttcttttcttctcagcttatagaccaacctgttgtagctccactttcaagatactgtgatccaaaatataaactcttgatcttttctgattttgatttgacgtgcactattgttgattcatctgccattttggcggagattgcaattttgtcattccaaaaggcaaatcaaagtgggattgataataacctcgaccgtgcaaaatcgggagacctgagaagttcgtggaacatgctctctaagcaatacatggaagagtatgagaaatgcatggaaagactacttcctccagaagaattcactagattatgataaactgtataaaggcctggaggtgctagctgagtttgagaagcttgcaaattctagggttgtcgactctggtgtgctgaggggaatgaatttggaagacatcaggaaagctggtgagcgtcttattcttcaaggtggctgtaaaaatttctttcagaagattgtaaaaacaagggagaacctcaatttggatgtccatattctttcctattgctggtgtgcagaacttataagatcagccttctcatcagccggttgtctagatggtttgaacatacattcaaatgagtttgcctttgaggattctgtttcaactggtgagatcgacagaaagatgcagtctccgctagacaaagttgaaaagttcaagagcatcagaagtgacgtggacagtacagtgccattcctatctgtttatattggagactcggttggagatttgctctatacggtttctagctggtcagaaatacacgccttcgtactgggaagtgatttcagctgatggatgtgctgcttcttttcttccattttttttccgcttgagaagcaaaattgccggccgatgctgatgcacatgatacgtgaatcctcaatgtggtcattttatgaaagccacatgtcaattctggctaccagtatgtatgaatgaataccgataccagtttgtggtgtggaatgggttgagtttgtacccttgaattgtgatcaatgtttcattgattcgtctgtccttgttccattcggggctaatttctgggtggttgctggcattatactgcaccaacaacaacagtataaacatagtggtatatatcccaagtccaagtgtaacgacgactgcataaatgtagagatgtttgtttttaattggcaataaatgaaatgtgatgagactgttgcgcgtttgcttgttgtctgactgctacatgacctttatattatcagagagagagagatgtgtgtatgcttactttgaacgatgaattacagc

SEQ ID NO: 43241 - DNA, 2186 bp, Zea Mays
gccactttctgcccgcttggagtccccgtcttcgtcgtcttgtagtagcactgagtgcgggagtactggccggccggcggcgaggctcctccactttctctgcacccatacatacgtatatgcttgttctccgccgtctccgcctccgcctcccactgccacgccctcttctcgtctcctccttctcctccacctccccctcctcctcaccctcgacctctagctcctcctcctgttggtcgtcgacaggcgaaagtagaagggccatggcgtcatctccttctcccgattcggccgcggtcgttgccgagggctccgcggctcgccgcttctggatcgctgcctccacgcgcgaggccgccttcgccgcatacacgcccttcctcctctccctcgccgccggcaatctgcggctcaacgtgtttcgccactacatcgcgcaggacgcgcacttccttcacgccttcgctcgcgcgtacgaaatggccgaggactgcgctgatgatgacgacgacatggccaccatagccgccctcaggaaggccatcctccaagagctcaacctccactcctccgttctgaaggagtggggagttgatcctaccaaagagatacctccaagtgcagctacaaccaaatatactgatttcctacttgcaactgcggctggaaaagttgatggcacaaaaggttctgacaaaatggttactccatttgagaagactaaaattgctgcatacactgttggggccatgactccatgcatgaggctttatgcatatctaggcaaagaactcatggttttccttaaacaagatgaaaatcatccatacaagaaatggattaacacatatgcatccagtgattttgaggacaccacactccaaatagaagaattgctagacaaactaagtgtctcattaactggtgaggaacttgagattattggcaagctctaccagcaagctatgaaactggaagtggagttcttttcttctcagcttatagaccaacctgttgtagctccactttcaagatactgtgatccaaaatataaactcttgatcttttctgattttgatttgacgtgcactattgttgattcatctgccattttggcggagattgcaattttgtcattccaaaaggcaaatcaaagtgggattgataataacctcgaccgtgcaaaatcgggagacctgagaagttcgtggaacatgctctctaagcaatacatggaagagtatgagaaatgcatggaaagactacttcctccagaagaatcgaagtcactagattatgataaactgtataaaggcctggaggtgctagctgagtttgagaagcttgcaaattctagggttgtcgactctggtgtgctgaggggaatgaatttggaagacatcaggaaagctgaacttataagatcagccttctcatcagccggttgtctagatggtttgaacatacattcaaatgagtttgcctttgaggattctgtttcaactggtgagatcgacagaaagatgcagtctccgctagacaaagttgaaaagttcaagagcatcagaagtgacgtggacagtacagtgccattcctatctgtttatattggagactcggttggagatttgctctatacggtttctagctggtcagaaatacacgccttcgtactgggaagtgatttcagctgatggatgtgctgcttcttttcttccattttttttccgcttgagaagcaaaattgccggccgatgctgatgcacatgatacgtgaatcctcaatgtggtcattttatgaaagccacatgtcaattctggctaccagtatgtatgaatgaataccgataccagtttgtggtgtggaatgggttgagtttgtacccttgaattgtgatcaatgtttcattgattcgtctgtccttgttccattcggggctaatttctgggtggttgctggcattatactgcaccaacaacaacagtataaacatagtggtatatatcccaagtccaagtgtaacgacgactgcataaatgtagagatgtttgtttttaattggcaataaatgaaatgtgatgagactgttgcgcgtttgcttgttgtctgactgctacatgacctttatattatcagagagagagagatgtgtgtatgcttactttgaacgatgaattacagc

SEQ ID NO: 43242 - DNA, 1576 bp, Zea Mays
gccactttctgcccgcttggagtccccgtcttcgtcgtcttgtagtagcactgagtgcgggagtactggccggccggcggcgaggctcctccactttctctgcacccatacatacgtatatgcttgttctccgccgtctccgcctccgcctcccactgccacgccctcttctcgtctcctccttctcctccacctccccctcctcctcaccctcgacctctagctcctcctcctgttggtcgtcgacaggcgaaagtagaagggccatggcgtcatctccttctcccgattcggccgcggtcgttgccgagggctccgcggctcgccgcttctggatcgctgcctccacgcgcgaggccgccttcgccgcatacacgcccttcctcctctccctcgccgccggcaatctgcggctcaacgtgtttcgccactacatcgcgcaggacgcgcacttccttcacgccttcgctcgcgcgtacgaaatggccgaggactgcgctgatgatgacgacgacatggccaccatagccgccctcaggaaggccatcctccaagagctcaacctccactcctccgttctgaaggagtggggagttgatcctaccaaagagatacctccaagtgcagctacaaccaaatatactgatttcctacttgcaactgcggctggaaaagttgatggcacaaaaggttctgacaaaatggttactccatttgagaagactaaaattgctgcatacactgttggggccatgactccatgcatgaggctttatgcatatctaggcaaagaactcatggttttccttaaacaagatgaaaatcatccatacaagaaatggattaacacatatgcatccagtgattttgaggacaccacactccaaatagaagaattgctagacaaactaagtgtctcattaactggtgaggaacttgagattattggcaagctctaccagcaagctatgaaactggaagtggagttcttttcttctcagcttatagaccaacctgttgtagctccactttcaagatactgtgatccaaaatataaactcttgatcttttctgattttgatttgacgtgcactattgttgattcatctgccattttggcggagattgcaattttgtcattccaaaaggcaaatcaaagtgggattgataataacctcgaccgtgcaaaatcgggagacctgagaagttcgtggaacatgctctctaagcaatacatggaagagtatgagaaatgcatggaaagactacttcctccagaagaatcgaagtcactagattatgataaactgtataaaggcctggaggtgctagctgagtttgagaagcttgcaaattctagggttgtcgactctggtgtgctgaggggaatgaatttggaagacatcaggaaagctggtgagcgtcttattcttcaaggtggctgtaaaaatttctttcagaagattgtaaaaacaagggagaacctcaatttggatgtccatattctttcctattgctggtgtgcagaacttataagatcagccttctcatcagacagttaactggcagtttcttt

SEQ ID NO: 43243 - DNA, 1496 bp, Zea Mays
cgaagagaatccatcccaatagtctgcccggtccattctatcttcgtcgatatcgccgtctgcccgtctctactgggaagggaagggagcacctgcctgctcctgcgcggcggcggttggtaagccccacctccggtcccagcctggccagacttctgcccttctcctccgcctctctaatggtgattcgcagttactcttctttccactgtgggttgctgatttccagagcggcgtggaggaggcactacccgttcttctgggctgtcaggccttccgtaccgccgccgccgtcgccactcccactcccacagccgcgcacgcgcttctcctcctcctcctcactgcgctccaccaagagatccgccgcaaagacgtcaatggactcgtcttcagtcggtgaacccttctacgtcgtccgcaagggggacgtcatcggcatctacaaaaccctcagcgaatgccaagctcaagtcagcaattcggttcgcgacccttctgtcaccgtcttcaaaggctactcgctgcgtaaagacaccgaggaatacctcgccgcgcgcgggttaaggaacgctctctacgccattgatgcaacagatgcacgagatgaattgttcgacgatctagttccctgccctttccagcaacctgatggagctgcatcgtctactctgaaaagatcacaggagattgaaatcggaccatcaaagaagcatcccaaagttgatgagcaggtaccattacctgatagtcatctctcttgtattcttgaatttgatggtgcctctaaaggaaatccagggaaagccggtgctggagcaataataaggcaggtagatggttccgtgccaagaaagggttcaagtatattcgtgctcaaggcgactctaagcttgtttgtaaccaggtccaagatatctggcgtgttaagaatgataatatggctagcttctgcaagaaagtgaaggagctaaagggaacatttcatttatttcaaatcagacatgttttgagggaatataattcggctgctgatgctcaagctaactttgcagtagaacttcctgttggtgaagttcaagagcagtcgaacttcccatgctagcagttgtgttgtggtcaagtgtggtttgtgcatcgctaaggttctgggactgaagctatgtcacatttgttcagttctcattgacacaaaaggaagagacgaaacaacagttgtattggaagtggtagtgggtctgatatatctgcggagtattgaacagacagatgcaatattgagtagattcttaggaaatttaatcgtctcaaacttctagatagtgcgagttgatttgtccaggaccagtgtttgctgatatacgatgtttgtattcagaacagtattagtaccggaaactttaattgctcctttctctatgttggttacttggttaaggttgagtgttgcttttaataaattggtcaaaattttattatcacttaataagtataag

SEQ ID NO: 43244 - DNA, 1651 bp, Zea Mays
cgaagagaatccatcccaatagtctgcccggtccattctatcttcgtcgatatcgccgtctgcccgtctctactgggaagggaagggagcacctgcctgctcctgcgcggcggcggttggtaagccccacctccggtcccagcctggccagacttctgcccttctcctccgcctctctaatggtgattcgcagttactcttctttccactgtgggttgctgatttccagagcggcgtggaggaggcactacccgttcttctgggctgtcaggccttccgtaccgccgccgccgtcgccactcccactcccacagccgcgcacgcgcttctcctcctcctcctcactgcgctccaccaagagatccgccgcaaagacgtcaatggactcgtcttcagtcggtgaacccttctacgtcgtccgcaagggggacgtcatcggcatctacaaaaccctcagcgaatgccaagctcaagtcagcaattcggttcgcgacccttctgtcaccgtcttcaaaggctactcgctgcgtaaagacaccgaggaatacctcgccgcgcgcgggttaaggaacgctctctacgccattgatgcaacagatgcacgagatgaattgttcgacgatctagttccctgccctttccagcaacctgatggagctgcatcgtctactctgaaaagatcacaggagattgaaatcggaccatcaaagaagcatcccaaagttgatgagcaggtaccattacctgatagtcatctctcttgtattcttgaatttgatggtgcctctaaaggaaatccagggaaagccggtgctggagcaataataaggcagattgctcaactacgtgagggtctgggcattgcaaccaacaatgctgctgaatatcgtgcattgatcctagggctaacatatgcagccaagaaagggttcaagtatattcgtgctcaaggcgactctaagcttgtttgtaaccaggtataatacctcgaatgtgatttggccatacaattttcttcattcttgtatcacggaaggttgttgcttcattcaacatgccaaagtccaagatatctggcgtgttaagaatgataatatggctagcttctgcaagaaagtgaaggagctaaagggaacatttcatttatttcaaatcagacatgttttgagggaatataattcggctgctgatgctcaagctaactttgcagtagaacttcctgttggtgaagttcaagagcagtcgaacttcccatgctagcagttgtgttgtggtcaagtgtggtttgtgcatcgctaaggttctgggactgaagctatgtcacatttgttcagttctcattgacacaaaaggaagagacgaaacaacagttgtattggaagtggtagtgggtctgatatatctgcggagtattgaacagacagatgcaatattgagtagattcttaggaaatttaatcgtctcaaacttctagatagtgcgagttgatttgtccaggaccagtgtttgctgatatacgatgtttgtattcagaacagtattagtaccggaaactttaattgctcctttctctatgttggttacttggttaaggttgagtgttgcttttaataaattggtcaaaattttattatcacttaataagtataag

SEQ ID NO: 43245 - DNA, 1449 bp, Zea Mays
cgaagagaatccatcccaatagtctgcccggtccattctatcttcgtcgatatcgccgtctgcccgtctctactgggaagggaagggagcacctgcctgctcctgcgcggcggcggttgttactcttctttccactgtgggttgctgatttccagagcggcgtggaggaggcactacccgttcttctgggctgtcaggccttccgtaccgccgccgccgtcgccactcccactcccacagccgcgcacgcgcttctcctcctcctcctcactgcgctccaccaagagatccgccgcaaagacgtcaatggactcgtcttcagtcggtgaacccttctacgtcgtccgcaagggggacgtcatcggcatctacaaaaccctcagcgaatgccaagctcaagtcagcaattcggttcgcgacccttctgtcaccgtcttcaaaggctactcgctgcgtaaagacaccgaggaatacctcgccgcgcgcgggttaaggaacgctctctacgccattgatgcaacagatgcacgagatgaattgttcgacgatctagttccctgccctttccagcaacctgatggagctgcatcgtctactctgaaaagatcacaggagattgaaatcggaccatcaaagaagcatcccaaagttgatgagcaggaaatccagggaaagccggtgctggagcaataataaggcaggtagatggttccgtgattgctcaactacgtgagggtctgggcattgcaaccaacaatgctgctgaatatcgtgcattgatcctagggctaacatatgcagccaagaaagggttcaagtatattcgtgctcaaggcgactctaagcttgtttgtaaccaggtccaagatatctggcgtgttaagaatgataatatggctagcttctgcaagaaagtgaaggagctaaagggaacatttcatttatttcaaatcagacatgttttgagggaatataattcggctgctgatgctcaagctaactttgcagtagaacttcctgttggtgaagttcaagagcagtcgaacttcccatgctagcagttgtgttgtggtcaagtgtggtttgtgcatcgctaaggttctgggactgaagctatgtcacatttgttcagttctcattgacacaaaaggaagagacgaaacaacagttgtattggaagtggtagtgggtctgatatatctgcggagtattgaacagacagatgcaatattgagtagattcttaggaaatttaatcgtctcaaacttctagatagtgcgagttgatttgtccaggaccagtgtttgctgatatacgatgtttgtattcagaacagtattagtaccggaaactttaattgctcctttctctatgttggttacttggttaaggttgagtgttgcttttaataaattggtcaaaattttattatcacttaataagtataag

SEQ ID NO: 43246 - DNA, 1498 bp, Zea Mays
cgaagagaatccatcccaatagtctgcccggtccattctatcttcgtcgatatcgccgtctgcccgtctctactgggaagggaagggagcacctgcctgctcctgcgcggcggcggttgagcggcgtggaggaggcactacccgttcttctgggctgtcaggccttccgtaccgccgccgccgtcgccactcccactcccacagccgcgcacgcgcttctcctcctcctcctcactgcgctccaccaagagatccgccgcaaagacgtcaatggactcgtcttcagtcggtgaacccttctacgtcgtccgcaagggggacgtcatcggcatctacaaaaccctcagcgaatgccaagctcaagtcagcaattcggttcgcgacccttctgtcaccgtcttcaaaggctactcgctgcgtaaagacaccgaggaatacctcgccgcgcgcgggttaaggaacgctctctacgccattgatgcaacagatgcacgagatgaattgttcgacgatctagttccctgccctttccagcaacctgatggagctgcatcgtctactctgaaaagatcacaggagattgaaatcggaccatcaaagaagcatcccaaagttgatgagcaggaaatccagggaaagccggtgctggagcaataataaggcaggtagatggttccgtgattgctcaactacgtgagggtctgggcattgcaaccaacaatgctgctgaatatcgtgcattgatcctagggctaacatatgcagccaagaaagggttcaagtatattcgtgctcaaggcgactctaagcttgtttgtaaccaggtataatacctcgaatgtgatttggccatacaattttcttcattcttgtatcacggaaggttgttgcttcattcaacatgccaaagtccaagatatctggcgtgttaagaatgataatatggctagcttctgcaagaaagtgaaggagctaaagggaacatttcatttatttcaaatcagacatgttttgagggaatataattcggctgctgatgctcaagctaactttgcagtagaacttcctgttggtgaagttcaagagcagtcgaacttcccatgctagcagttgtgttgtggtcaagtgtggtttgtgcatcgctaaggttctgggactgaagctatgtcacatttgttcagttctcattgacacaaaaggaagagacgaaacaacagttgtattggaagtggtagtgggtctgatatatctgcggagtattgaacagacagatgcaatattgagtagattcttaggaaatttaatcgtctcaaacttctagatagtgcgagttgatttgtccaggaccagtgtttgctgatatacgatgtttgtattcagaacagtattagtaccggaaactttaattgctcctttctctatgttggttacttggttaaggttgagtgttgcttttaataaattggtcaaaattttattatcacttaataagtataag

SEQ ID NO: 43247 - DNA, 1456 bp, Zea Mays
cgaagagaatccatcccaatagtctgcccggtccattctatcttcgtcgatatcgccgtctgcccgtctctactgggaagggaagggagcacctgcctgctcctgcgcggcggcggttgagcggcgtggaggaggcactacccgttcttctgggctgtcaggccttccgtaccgccgccgccgtcgccactcccactcccacagccgcgcacgcgcttctcctcctcctcctcactgcgctccaccaagagatccgccgcaaagacgtcaatggactcgtcttcagtcggtgaacccttctacgtcgtccgcaagggggacgtcatcggcatctacaaaaccctcagcgaatgccaagctcaagtcagcaattcggttcgcgacccttctgtcaccgtcttcaaaggctactcgctgcgtaaagacaccgaggaatacctcgccgcgcgcgggttaaggaacgctctctacgccattgatgcaacagatgcacgagatgaattgttcgacgatctagttccctgccctttccagcaacctgatggagctgcatcgtctactctgaaaagatcacaggagattgaaatcggaccatcaaagaagcatcccaaagttgatgagcaggtaccattacctgatagtcatctctcttgtattcttgaatttgatggtgcctctaaaggaaatccagggaaagccggtgctggagcaataataaggcagattgctcaactacgtgagggtctgggcattgcaaccaacaatgctgctgaatatcgtgcattgatcctagggctaacatatgcagccaagaaagggttcaagtatattcgtgctcaaggcgactctaagcttgtttgtaaccaggtccaagatatctggcgtgttaagaatgataatatggctagcttctgcaagaaagtgaaggagctaaagggaacatttcatttatttcaaatcagacatgttttgagggaatataattcggctgctgatgctcaagctaactttgcagtagaacttcctgttggtgaagttcaagagcagtcgaacttcccatgctagcagttgtgttgtggtcaagtgtggtttgtgcatcgctaaggttctgggactgaagctatgtcacatttgttcagttctcattgacacaaaaggaagagacgaaacaacagttgtattggaagtggtagtgggtctgatatatctgcggagtattgaacagacagatgcaatattgagtagattcttaggaaatttaatcgtctcaaacttctagatagtgcgagttgatttgtccaggaccagtgtttgctgatatacgatgtttgtattcagaacagtattagtaccggaaactttaattgctcctttctctatgttggttacttggttaaggttgagtgttgcttttaataaattggtcaaaattttattatcacttaataagtataag

SEQ ID NO: 43248 - DNA, 1401 bp, Zea Mays
cgaagagaatccatcccaatagtctgcccggtccattctatcttcgtcgatatcgccgtctgcccgtctctactgggaagggaagggagcacctgcctgctcctgcgcggcggcggttgagcggcgtggaggaggcactacccgttcttctgggctgtcaggccttccgtaccgccgccgccgtcgccactcccactcccacagccgcgcacgcgcttctcctcctcctcctcactgcgctccaccaagagatccgccgcaaagacgtcaatggactcgtcttcagtcggtgaacccttctacgtcgtccgcaagggggacgtcatcggcatctacaaaaccctcagcgaatgccaagctcaagtcagcaattcggttcgcgacccttctgtcaccgtcttcaaaggctactcgctgcgtaaagacaccgaggaatacctcgccgcgcgcgggttaaggaacgctctctacgccattgatgcaacagatgcacgagatgaattgttcgacgatctagttccctgccctttccagcaacctgatggagctgcatcgtctactctgaaaagatcacaggagattgaaatcggaccatcaaagaagcatcccaaagttgatgagcaggtaccattacctgatagtcatctctcttgtattcttgaatttgatggtgcctctaaaggaaatccagggaaagccggtgctggagcaataataaggcaggtagatggttccgtgggctaacatatgcagccaagaaagggttcaagtatattcgtgctcaaggcgactctaagcttgtttgtaaccaggtccaagatatctggcgtgttaagaatgataatatggctagcttctgcaagaaagtgaaggagctaaagggaacatttcatttatttcaaatcagacatgttttgagggaatataattcggctgctgatgctcaagctaactttgcagtagaacttcctgttggtgaagttcaagagcagtcgaacttcccatgctagcagttgtgttgtggtcaagtgtggtttgtgcatcgctaaggttctgggactgaagctatgtcacatttgttcagttctcattgacacaaaaggaagagacgaaacaacagttgtattggaagtggtagtgggtctgatatatctgcggagtattgaacagacagatgcaatattgagtagattcttaggaaatttaatcgtctcaaacttctagatagtgcgagttgatttgtccaggaccagtgtttgctgatatacgatgtttgtattcagaacagtattagtaccggaaactttaattgctcctttctctatgttggttacttggttaaggttgagtgttgcttttaataaattggtcaaaattttattatcacttaataagtataag

SEQ ID NO: 43249 - DNA, 1488 bp, Zea Mays
cgaagagaatccatcccaatagtctgcccggtccattctatcttcgtcgatatcgccgtctgcccgtctctactgggaagggaagggagcacctgcctgctcctgcgcggcggcggttgttactcttctttccactgtgggttgctgatttccagagcggcgtggaggaggcactacccgttcttctgggctgtcaggccttccgtaccgccgccgccgtcgccactcccactcccacagccgcgcacgcgcttctcctcctcctcctcactgcgctccaccaagagatccgccgcaaagacgtcaatggactcgtcttcagtcggtgaacccttctacgtcgtccgcaagggggacgtcatcggcatctacaaaaccctcagcgaatgccaagctcaagtcagcaattcggttcgcgacccttctgtcaccgtcttcaaaggctactcgctgcgtaaagacaccgaggaatacctcgccgcgcgcgggttaaggaacgctctctacgccattgatgcaacagatgcacgagatgaattgttcgacgatctagttccctgccctttccagcaacctgatggagctgcatcgtctactctgaaaagatcacaggagattgaaatcggaccatcaaagaagcatcccaaagttgatgagcaggtaccattacctgatagtcatctctcttgtattcttgaatttgatggtgcctctaaaggaaatccagggaaagccggtgctggagcaataataagattgctcaactacgtgagggtctgggcattgcaaccaacaatgctgctgaatatcgtgcattgatcctagggctaacatatgcagccaagaaagggttcaagtatattcgtgctcaaggcgactctaagcttgtttgtaaccaggtccaagatatctggcgtgttaagaatgataatatggctagcttctgcaagaaagtgaaggagctaaagggaacatttcatttatttcaaatcagacatgttttgagggaatataattcggctgctgatgctcaagctaactttgcagtagaacttcctgttggtgaagttcaagagcagtcgaacttcccatgctagcagttgtgttgtggtcaagtgtggtttgtgcatcgctaaggttctgggactgaagctatgtcacatttgttcagttctcattgacacaaaaggaagagacgaaacaacagttgtattggaagtggtagtgggtctgatatatctgcggagtattgaacagacagatgcaatattgagtagattcttaggaaatttaatcgtctcaaacttctagatagtgcgagttgatttgtccaggaccagtgtttgctgatatacgatgtttgtattcagaacagtattagtaccggaaactttaattgctcctttctctatgttggttacttggttaaggttgagtgttgcttttaataaattggtcaaaattttattatcacttaataagtataag

SEQ ID NO: 43250 - DNA, 1450 bp, Zea Mays
cgaagagaatccatcccaatagtctgcccggtccattctatcttcgtcgatatcgccgtctgcccgtctctactgggaagggaagggagcacctgcctgctcctgcgcggcggcggttgagcggcgtggaggaggcactacccgttcttctgggctgtcaggccttccgtaccgccgccgccgtcgccactcccactcccacagccgcgcacgcgcttctcctcctcctcctcactgcgctccaccaagagatccgccgcaaagacgtcaatggactcgtcttcagtcggtgaacccttctacgtcgtccgcaagggggacgtcatcggcatctacaaaaccctcagcgaatgccaagctcaagtcagcaattcggttcgcgacccttctgtcaccgtcttcaaaggctactcgctgcgtaaagacaccgaggaatacctcgccgcgcgcgggttaaggaacgctctctacgccattgatgcaacagatgcacgagatgaattgttcgacgatctagttccctgccctttccagcaacctgatggagctgcatcgtctactctgaaaagatcacaggagattgaaatcggaccatcaaagaagcatcccaaagttgatgagcagctctcttgtattcttgaatttgatggtgcctctaaaggaaatccagggaaagccggtgctggagcaataataaggcaggtagatggttccgtgattgctcaactacgtgagggtctgggcattgcaaccaacaatgctgctgaatatcgtgcattgatcctagggctaacatatgcagccaagaaagggttcaagtatattcgtgctcaaggcgactctaagcttgtttgtaaccaggtccaagatatctggcgtgttaagaatgataatatggctagcttctgcaagaaagtgaaggagctaaagggaacatttcatttatttcaaatcagacatgttttgagggaatataattcggctgctgatgctcaagctaactttgcagtagaacttcctgttggtgaagttcaagagcagtcgaacttcccatgctagcagttgtgttgtggtcaagtgtggtttgtgcatcgctaaggttctgggactgaagctatgtcacatttgttcagttctcattgacacaaaaggaagagacgaaacaacagttgtattggaagtggtagtgggtctgatatatctgcggagtattgaacagacagatgcaatattgagtagattcttaggaaatttaatcgtctcaaacttctagatagtgcgagttgatttgtccaggaccagtgtttgctgatatacgatgtttgtattcagaacagtattagtaccggaaactttaattgctcctttctctatgttggttacttggttaaggttgagtgttgcttttaataaattggtcaaaattttattatcacttaataagtataag

SEQ ID NO: 43251 - DNA, 1413 bp, Zea Mays
cgaagagaatccatcccaatagtctgcccggtccattctatcttcgtcgatatcgccgtctgcccgtctctactgggaagggaagggagcacctgcctgctcctgcgcggcggcggttgagcggcgtggaggaggcactacccgttcttctgggctgtcaggccttccgtaccgccgccgccgtcgccactcccactcccacagccgcgcacgcgcttctcctcctcctcctcactgcgctccaccaagagatccgccgcaaagacgtcaatggactcgtcttcagtcggtgaacccttctacgtcgtccgcaagggggacgtcatcggcatctacaaaaccctcagcgaatgccaagctcaagtcagcaattcggttcgcgacccttctgtcaccgtcttcaaaggctactcgctgcgtaaagacaccgaggaatacctcgccgcgcgcgggttaaggaacgctctctacgccattgatgcaacagatgcacgagatgaattgttcgacgatctagttccctgccctttccagcaacctgatggagctgcatcgtctactctgaaaagatcacaggagattgaaatcggaccatcaaagaagcatcccaaagttgatgagcaggaaatccagggaaagccggtgctggagcaataataaggcaggtagatggttccgtgattgctcaactacgtgagggtctgggcattgcaaccaacaatgctgctgaatatcgtgcattgatcctagggctaacatatgcagccaagaaagggttcaagtatattcgtgctcaaggcgactctaagcttgtttgtaaccaggtccaagatatctggcgtgttaagaatgataatatggctagcttctgcaagaaagtgaaggagctaaagggaacatttcatttatttcaaatcagacatgttttgagggaatataattcggctgctgatgctcaagctaactttgcagtagaacttcctgttggtgaagttcaagagcagtcgaacttcccatgctagcagttgtgttgtggtcaagtgtggtttgtgcatcgctaaggttctgggactgaagctatgtcacatttgttcagttctcattgacacaaaaggaagagacgaaacaacagttgtattggaagtggtagtgggtctgatatatctgcggagtattgaacagacagatgcaatattgagtagattcttaggaaatttaatcgtctcaaacttctagatagtgcgagttgatttgtccaggaccagtgtttgctgatatacgatgtttgtattcagaacagtattagtaccggaaactttaattgctcctttctctatgttggttacttggttaaggttgagtgttgcttttaataaattggtcaaaattttattatcacttaataagtataag

SEQ ID NO: 43252 - DNA, 1998 bp, Zea Mays
ggacatgaagagttaagttgatgttcgccttcccctgtcagcttcccgttaccacaatcctagtcttgtggtggtgtgctgtgctgtcgtctctctccgatcttcccgattcttcttaccccttcttcgtcaagccgcagccgtcgcctcccttgctcaccaccatggtgtcggacgccgccgccgccaagaggggagccaaggtcccgaccccttcatcttcgtcctctgccgacgctaaatccatcggtgccgtggccgcgctcaagctctccgatcgcacctgcaccggcgtcctcgcctcccacccgctctccagagatatccacatagagtctctttcattaacgtttcatggccatgacctcattgtagattctgagttggagctcaactatgggaggcgttatggtttgcttggccttaatggctgtggaaaatctactcttctcactgcgataggctgcagagaactccctatacctgaacacatggacatataccatctcacccatgagatcgaggcttcagacatgtctgcactacaagctgttgtctgttgtgatgaagaaagaatgaagttggaaaaggaagcagagattttggctgcacaggatgacggtggtggtgatgctttggatcgtgtatatgagcgtctagaagctattgatgcatcaactgctgaaaagcgtgctgctgagatattatatggtttaggttttaacaagcaaatgcaagctaagaaaactcgagatttttctggtggttggcgtatgaggattgctttggctagagcactcttcatgaatccaacaatccttttgcttgatgagcctacgaatcatcttgatcttgaggcatgtgtctggttggaagagacgctaaagaaatttgaccgcatactggttgtcatatcgcactcccaggactttctgaatggtgtgtgcactaacatcatccatatgcagaacaagaagctaaagttatatactgggaattatgaccaatacattcagacacgctccgagcttgaagaaaatcagatgaagcagttcaggtgggagcaggagcagattgcatcaatgaaggagtacattgcacggtttggccatgggtctgcaaagcttgcacgtcaggctcagagcaaggagaaaactctggcaaagatggagcgtggtgggctcaccgagaaggttgttagggacaaaatactggtcttccgcttcacaaatgttggcaaacttccaccaccagtgcttcagtttgttgaggtcacgtttgggtacacaccagataatctcttgtacaagaagcttgactttggtgttgacctggactctaggattgcattggttggtcccaatggcgcagggaagagcactcttctgaagctgatgacaggtgagctggttccattggacggtatggtgagacggcacaatcacctgcgcatcgcacagttccaccagcatctggcagagaagctggacctggacatgtcggccctgcaatacatgatgaaggaataccctgggaacgaagaagagcggatgagagccgcagttggtaagtttgggctgtcagggaaggctcaggtgatgccgatgaggaatctgtctgacgggcagaggagccgtgtcatctttgcgtggctggcatacaggcagccgcagctattgctgctggacgagccgacgaaccatcttgatatcgagaccatcgactccctagcggaggcgctgaacgagtgggacggcggtctggtcctggtgagccatgacttcaggctgatcaaccaggttgctcatgagatctgggtttgtgagaatcaggcagtgacaaggtgggaaggcgatatcatggatttcaaggagcacttgagaagcaaggcttgtctatcggattaagggaaggccttggctttccttaccttctctttggagatgaagtgccatggagagcaaggatgcgggagaagagaggctgggagactgaaga

SEQ ID NO: 43253 - DNA, 2090 bp, Zea Mays
ggacatgaagagttaagttgatgttcgccttcccctgtcagcttcccgttaccacaatcctagtcttgtggtggtgtgctgtgctgtcgtctctctccgatcttcccgattcttcttaccccttcttcgtcaagccgcagccgtcgcctcccttgctcaccaccatggtgtcggacgccgccgccgccaagaggggagccaaggtcccgaccccttcatcttcgtcctctgccgacgctaaatccatcggtgccgtggccgcgctcaagctctccgatcgcacctgcaccggcgtcctcgcctcccacccgctctccagagatatccacatagagtctctttcattaacgtttcatggccatgacctcattgtagattctgagttggagctcaactatgggaggctgcagagaactccctatacctgaacacatggacatataccatctcacccatgagatcgaggcttcagacatgtctgcactacaagctgttgtctgttgtgatgaagaaagaatgaagttggaaaaggaagcagagattttggctgcacaggtcaccgcttggacttcctcacacagttgttatcttacacctttctctggccctgtctattttctgctgtgctgctcttgcaaattataacttgatgctggagaatgtcctataacatagtaacatgtattatgattgctcacatgtttaggatgacggtggtggtgatgctttggatcgtgtatatgagcgtctagaagctattgatgcatcaactgctgaaaagcgtgctgctgagatattatatggtttaggttttaacaagcaaatgcaagctaagaaaactcgagatttttctggtggttggcgtatgaggattgctttggctagagcactcttcatgaatccaacaatccttttgcttgatgagcctacgaatcatcttgatcttgaggcatgtgtctggttggaagagacgctaaagaaatttgaccgcatactggttgtcatatcgcactcccaggactttctgaatggtgtgtgcactaacatcatccatatgcagaacaagaagctaaagttatatactgggaattatgaccaatacattcagacacgctccgagcttgaagaaaatcagatgaagcagttcaggtgggagcaggagcagattgcatcaatgaaggagtacattgcacggtttggccatgggtctgcaaagcttgcacgtcaggctcagagcaaggagaaaactctggcaaagatggagcgtggtgggctcaccgagaaggttgttagggacaaaatactggtcttccgcttcacaaatgttggcaaacttccaccaccagtgcttcagtttgttgaggtcacgtttgggtacacaccagataatctcttgtacaagaagcttgactttggtgttgacctggactctaggattgcattggttggtcccaatggcgcagggaagagcactcttctgaagctgatgacaggtgagctggttccattggacggtatggtgagacggcacaatcacctgcgcatcgcacagttccaccagcatctggcagagaagctggacctggacatgtcggccctgcaatacatgatgaaggaataccctgggaacgaagaagagcggatgagagccgcagttggtaagtttgggctgtcagggaaggctcaggtgatgccgatgaggaatctgtctgacgggcagaggagccgtgtcatctttgcgtggctggcatacaggcagccgcagctattgctgctggacgagccgacgaaccatcttgatatcgagaccatcgactccctagcggaggcgctgaacgagtgggacggcggtctggtcctggtgagccatgacttcaggctgatcaaccaggttgctcatgagatctgggtttgtgagaatcaggcagtgacaaggtgggaaggcgatatcatggatttcaaggagcacttgagaagcaaggcttgtctatcggattaagggaaggccttggctttccttaccttctctttggagatgaagtgccatggagagcaaggatgcgggagaagagaggctgggagactgaaga

SEQ ID NO: 43254 - DNA, 2023 bp, Zea Mays
ggacatgaagagttaagttgatgttcgccttcccctgtcagcttcccgttaccacaatcctagtcttgtggtggtgtgctgtgctgtcgtctctctccgatcttcccgattcttcttaccccttcttcgtcaagccgcagccgtcgcctcccttgctcaccaccatggtgtcggacgccgccgccgccaagaggggagccaaggtcccgaccccttcatcttcgtcctctgccgacgctaaatccatcggtgccgtggccgcgctcaagctctccgatcgcacctgcaccggcgtcctcgcctcccacccgctctccagagatatccacatagagtctctttcattaacgtttcatggccatgacctcattgtagattctgagttggagctcaactatgggaggcgttatggtttgcttggccttaatggctgtggaaaatctactcttctcactgcgataggctgcagagaactccctatacctgaacacatggacatataccatctcacccatgagatcgaggcttcagacatgtctgcactacaagctgttgtctgttgtgatgaagaaagaatgaagttggaaaaggaagcagagattttggctgcacaggtcaccgcttggacttcctcacacagatgacggtggtggtgatgctttggatcgtgtatatgagcgtctagaagctattgatgcatcaactgctgaaaagcgtgctgctgagatattatatggtttaggttttaacaagcaaatgcaagctaagaaaactcgagatttttctggtggttggcgtatgaggattgctttggctagagcactcttcatgaatccaacaatccttttgcttgatgagcctacgaatcatcttgatcttgaggcatgtgtctggttggaagagacgctaaagaaatttgaccgcatactggttgtcatatcgcactcccaggactttctgaatggtgtgtgcactaacatcatccatatgcagaacaagaagctaaagttatatactgggaattatgaccaatacattcagacacgctccgagcttgaagaaaatcagatgaagcagttcaggtgggagcaggagcagattgcatcaatgaaggagtacattgcacggtttggccatgggtctgcaaagcttgcacgtcaggctcagagcaaggagaaaactctggcaaagatggagcgtggtgggctcaccgagaaggttgttagggacaaaatactggtcttccgcttcacaaatgttggcaaacttccaccaccagtgcttcagtttgttgaggtcacgtttgggtacacaccagataatctcttgtacaagaagcttgactttggtgttgacctggactctaggattgcattggttggtcccaatggcgcagggaagagcactcttctgaagctgatgacaggtgagctggttccattggacggtatggtgagacggcacaatcacctgcgcatcgcacagttccaccagcatctggcagagaagctggacctggacatgtcggccctgcaatacatgatgaaggaataccctgggaacgaagaagagcggatgagagccgcagttggtaagtttgggctgtcagggaaggctcaggtgatgccgatgaggaatctgtctgacgggcagaggagccgtgtcatctttgcgtggctggcatacaggcagccgcagctattgctgctggacgagccgacgaaccatcttgatatcgagaccatcgactccctagcggaggcgctgaacgagtgggacggcggtctggtcctggtgagccatgacttcaggctgatcaaccaggttgctcatgagatctgggtttgtgagaatcaggcagtgacaaggtgggaaggcgatatcatggatttcaaggagcacttgagaagcaaggcttgtctatcggattaagggaaggccttggctttccttaccttctctttggagatgaagtgccatggagagcaaggatgcgggagaagagaggctgggagactgaaga

SEQ ID NO: 43255 - DNA, 2147 bp, Zea Mays
ggacatgaagagttaagttgatgttcgccttcccctgtcagcttcccgttaccacaatcctagtcttgtggtggtgtgctgtgctgtcgtctctctccgatcttcccgattcttcttaccccttcttcgtcaagccgcagccgtcgcctcccttgctcaccaccatggtgtcggacgccgccgccgccaagaggggagccaaggtcccgaccccttcatcttcgtcctctgccgacgctaaatccatcggtgccgtggccgcgctcaagctctccgatcgcacctgcaccggcgtcctcgcctcccacccgctctccagagatatccacatagagtctctttcattaacgtttcatggccatgacctcattgtagattctgagttggagctcaactatgggaggcgttatggtttgcttggccttaatggctgtggaaaatctactcttctcactgcgataggctgcagagaactccctatacctgaacacatggacatataccatctcacccatgagatcgaggcttcagacatgtctgcactacaagctgttgtctgttgtgatgaagaaagaatgaagttggaaaaggaagcagagattttggctgcacaggatgacggtggtggtgatgctttggatcgtgtatatgagcgtctagaagctattgatgcatcaactgctgaaaagcgtgctgctgagatattatatggtttaggttttaacaagcaaatgcaagctaagaaaactcgagatttttctggtggttggcgtatgaggattgctttggctagagcactcttcatgaatccaacaatccttttgcttgatgagcctacgaatcatcttgatcttgaggcatgtgtctggttggaagagacgctaaagaaatttgaccgcatactggttgtcatatcgcactcccaggactttctgaatggtgtgtgcactaacatcatccatatgcagaacaagaagctaaagttatatactgggaattatgaccaatacattcagacacgctccgagcttgaagaaaatcagatgaagcagttcaggtgggagcaggagcagattgcatcaatgaaggagtacattgcacggtttggccatgggtctgcaaagcttgcacgtcaggctcagagcaaggagaaaactctggcaaagatggagcgtggtgggctcaccgagaaggttgttagggacaaaatactggtcttccgcttcacaaatgttggcaaacttccaccaccagtgcttcagtttgttgaggtcacgtttgggtacacaccagataatctcttgtacaagaagcttgactttggtgttgacctggactctaggattgcattggttggtcccaatggcgcagggaagagcactcttctgaagctgatgacaggtgagctggttccattggacggtatggtgagacggcacaatcacctgcgcatcgcacagttccaccagcatctggcagagaagctggacctggacatgtcggccctgcaatacatgatgaaggaataccctgggaacgaagaagagcggatgagagccgcagttggtaagtttgggctgtcagggaaggctcaggtgatgccgatgaggaatctgtctgacgggcagaggagccgtgtcatctttgcgtggctggcatacaggcagccgcagctattgctgctggacgagccgacgaaccatcttgatatcgagaccatcgactccctagcggaggcgctgaacgagtgggacggcggtctggtcctggtgagccatgacttcaggctgatcaaccaggttgctcatgagatctgggtttgtgagaatcaggcagtgacaaggtgggaaggcgatatcatggatttcaaggagcacttgagaagcaaggcttgtctatcggattaagggaaggccttggctttccttaccttctctttggagatgaagtgccatggagagcaaggatgcgggagaagagaggctgggagactgaagaagcaggaagtgcgtggtgtgcgtgctgttgggctcaatgtgtgtgggcgtgagtttggtgggttcggcccatgtaagtgacctataattctgtagcgaactgagaataaggcagacaagaaatagaaccagagaaaagttcccaaccgt

SEQ ID NO: 43256 - DNA, 728 bp, Zea Mays
aagaccaagaatgctcaacagattcttcagctcggttcatttttcagttctcactcaagacctcactctgtcggttgttgtgcaaccctttgccatctacaactagaagaaagcacatacctgctcaacacagacaaaggatgccctgccactctcacccacccctagcagaacaacacgtcaacacaggcacaagaatacttgccgcctgtttatggtgctttgtgcttcagacggcaacacacaacatagatacatgcatgtatactccgaatcgaaagacaagaaaattcagagccagatactatcgtttcacgttcagacttcagaaacatgccactgaggatcaaataattcagagccaaacacagcttgtattcctgcttcacagttccacaaatacatgtgcatctggcgttgccctgagggcacgtcgctctccatggcgcagcattatcggatcagatccactgcccatagctgcatacaccctccctcacagaacctgggccattcgatccctctctcaaggaaggaagggcgttcaagtaaccatgctacctgtaatccagttgcaatgctgaaaaggtcaagtacccaccatgccaccatccatcattacgacaagtaaaatgactagttaagtagcagcattatgattctcctttaggaattcactccggctcaatcaatgtaccaaggtcagcaatggcagcaggccaagtgtc

SEQ ID NO: 43257 - DNA, 353 bp, Zea Mays
cagcaacaaacacgaccccagtagagagaacgcagagagagagggccacgggtgtagcgggttctggtggcgctgcggcttcaagcaaggtgccgggcaaggtcgttggggagtacgcgcgaagcattgccgcatgacaacctggaagcgagggtctcggcttaattgtaccacggtggggatttcacagcgcacgccaggcggacgaaccgtggacgggcgcggttggcatctcactggaccggccttcatcgccaaatcgagccgagcgttgagaattctgatgagcaagctacagaggatccagggcctcagctggtagaatctgttgagcaggagctcattgaaggcaa

SEQ ID NO: 43258 - DNA, 2084 bp, Zea Mays
aagggttcattcttacgtgtagttttgtgtttatacaatataggtttatggagaggcgaggggcctaaatcgaaaacatccatggttggatggtcttcaattttctctgttttacccgccaccggcctccgtcgtcgtcgtgtccatcactccatccatatgagagaggagaatatgcgccatgctcccggagtccctgtagcacaatactgtcagtacatactcctatatagatatgcaggcttccccgtaagacaagccgctcttcacctcggattgcgccttcaattcgttcgtccttccatgtcgattgattcttgattgattgggagtgggggaaaaggagagccggggagggaaaggcaaagcagagcccgtagcgtccttgtcacagacagacagacagatagatagattgttggctatggcgtcgtcgagggggcctctcgccgcgctgctactgctggccgcctgcgccgccttcttccctgccgccggagccgccggcacgccggacgggtcggaggagtggggctacgtggaagtccggcccaaggcgcacatgttctggtggctgtaccacagcccacagcgcgtggacaacggcaagacgccatggccgacagtgctgtggctacagggagggccgggcgcgtccggcgtcgggtacggcaacttcatggagatcgggccgctggacgagaagcttaagccccgcgcaaccacatggctcgccaaggccgacctcctcttcgtggacaacccggttggcacggggttcagctacgtggacggcggcgacaagagcctgatggcgtccacctcgccggcgtcgccctcggggatagctggatctcgccgctcgacttcgtgttgtcgtgggggccgttgctgtaccaggtgtcccgggtggacgagaagggcctgcagcagtgcaacagcgtggcggccaagatcaaggagcagctggagaaggggcagttcgcggacgccgaggcctcgtggtcggagctggagggcgtcgtcctcgccagctccaactccgtcaacttctacaactttctcaaggacgaggcgtcgggggacgccaccgccactgccacagcggcggtgtcgacactggcgtccttcaggcgccggggcggctactcgggctacctcagctccatggcggcgtcttcgtcgtcgtcagcaggcggcttcgacgggctcatgaacacggtcatcaagaagaagctcggcatcatcccaaaggatctcaagtggggagagcagtcagacgacgtgttcgatgctctggctggagacttcatgaagcccaggatacaggaggtggaccagctcctcaagctggcgtcaatgtcaccatctacagcggacagctcgacctcatctgcgcgaccaaaggcaccatggactgggttcagaagctcaagtgggacgacctcaacagtttcctgagctctcctagaacgcccatctactgcgacaaggaggggcagtccggcacccaggccttcgtcaagtcctacaagaacctcaatttctactggatactcgaagccggacacatggtacccctggacaacccttgccctgcgctcaagatgctggctgacattacgcgatctcctgccgagtagcaggaggaagaaaacaaggcgacggaatggaacggcctgacaccagttcttcaagattcttctcttttcatacagtcagagaaaaataagtcattggtggtagcattcatacatgcaacaataaacacaaaggaaaaggtagtgataggatcagacagatatttaattcggcagatattattgtgtagcaccgctatagagcttgcagctgaatttccaacatgatgatctgattgacagtgcttctcctgtctcaactcaacacctgagctgacacgatctcgcctcctttctgaattgcctctgctcccttgtattaaccgtaacgactaatatgcaattagacctatgtataagcctgcaaacgagcatcctagtctgtttaatcatgatttaactgtatatagttatagtttgttaggggcttctttataaatctat

SEQ ID NO: 43259 - DNA, 616 bp, Zea Mays
gcaaacgcggaggtgcatccacacgatcgatcggcgtatttacatgcttgatgcagtgcacatattttcgaccccctgcatctgaatctacatctgatcaagtgctagcacaacttcttatttgaatagaaggctaaaggcacaacaaggcatatttgcaaggagtgaatggtttcttagcttttgcattttggaaagaggcaagtgaagtgcgtgagcacttgatatgttatgggtttctcaaagggtacatgatatggaacttacatggagaagctagctcttctgtgaatcagggaactatgacgacattgaggttacagaggagcctaacgaagatgatgacatatccggtttgcttaaagatttagctgctggtttagatgatagaggtgattttgaggacaatagttctattattgggtgttgtgatgagctagcggccattgaaaaattggtagcagaaaacaaaaaagagttgtaccctaattgcaagaaatatacacagttgcgtttcctagttagattgcttcacatcaaactccttggaggatggattggtagatctatgaacctgctactagatctacttaatgatgcactccctgagagttca

SEQ ID NO: 43260 - DNA, 1617 bp, Zea Mays
cagttggtcgagggtggggacactcagctagtgtcagtggagggtttatgggagcaagggctctgtgctagcaattttgaagggacatggatatcgaagacctgggcgaagggtgttggcaacttgaatgttgaggacttcttggaccgatctcagaattttgccagatcggtaggggtgaaggagatgcagaaaatatgtgaatgcctaagggctagcgtttctgatttgagcaagttttctaagggtgaaattgctgcgcccaagctaaaggccctgttgtttaagcctttgaaccaggttaacccagtcattaaaccccatcagaaaactattaagaggaagcgtactaatccaaataagaccagaactaaccctattcagaaaaatgctaagaaaaagaaggcccttgagcaggataaattagccatttctcctggtcagaaagatggtaagaagacccttgatcaagagaagtcagttagttctcccattcagaaaggtgctaagaagaccaaaccccttaaccaggataagttagtcatttctcccggccaggaagatgacaagaagccccttgtgcaggatgagccaatagtagtgtctcccatccagaagaataacaataagtatgttgatcaggagaagtcccttcagcaggagaagcaaatcatctctcccggacagaaagatgataagaagagcagcaaggtgggacctgactcagcatgtaatcatgtgcaacagaagaaagtgaaggctactgtatctaccggccgtgctgctaatactcatgtttctagttccaggcctcgctctgtttttatcccccaagcacattggcccagccagccaattgttgatcggtttgcgcatatacctgagcacctgatcagcccttctgcttttagttatgggttgccacaaccacttatgcatccagcctatcctcatcctcattctcatcagggattggtaggtcaaggacagggtaatttccttcatttcaatcctggtattgagctgcagcatcaaggccaggctttcttcggtcctccagctgtctaccaccccatggtgaatgggtttcacccattcggtatcaatggtgctcagcaagtgcagtacatcgacaataggatggtgcagaggccaccatatggttttggcccaggtttctggggatgatggttgcagcctgaggaaaggttggttgctaactagtgggggtttgaggtgaaagttgtcagttcaaagaaaaaaaagctgttgtgtctaatatactcaaagatttagctttaaataggggccagtggaaaatagctaaccatgtgtctgaaccttgatttgtggtttttgttcggtttcagctctagcttaccttagaagtaaaatgttctgttgatgttggattttaactctagcctatcctgggattaaaaggttttgttgttgttgttgtaagttgtaattgtaactgttaggtttgtactctagtctgatttaaaagtaaaaaggctatattgttgttgttgtatctagacctgtacaaggagaaataatcaaataaggaaaaaaacacaatgtgggaaagaaagctgtaatgtcgtttgatct

SEQ ID NO: 43261 - DNA, 4736 bp, Zea Mays
cggagggagtactgaggagggaggagggggcccggcgggcggcggcatacctggagcctggagggcagccgacggcgtctggcgcgatggcggctgtctaggcgcgatagctggagcgcgcgatggttggcgcctggcggctgggtaaaggcccattaaggcccactagtggatatgcgcgcagaacgtccaaataacagcgaaaacgtccagaacggacgttcccgacgtgtaaacggcgtttaaacgtctaggacggacgttctacgcgttttttgtaaaacgtgcggacgttttagccgctaatcacgttttagcgtttaaacgacgcttaatcgtcgtttaaacgacgttttaataaccatggcgagtttcttaaccaagcacaagggttgccgctgagtcgcctctttgggcagcagcatcatcgttcgtcgttgacccccactgttgcatctacatcgtcgtcgactccgtcggtgcgcgtctcctgcgcacggtttgcgagctgttcgacacctgtgagctgcgtcggcacacccgtcgatttgcgctgcacctgcatgctgcgtcgacaccatctgtcgctggtctgcaccacattcgtcatcgagttcttcgccgataagtaccgccatcgcgctccactagcgtcgtcgagtctcttcttcctgtgtgtgtcgtggctctcgccgtcgcgactccaggatcctcgatgcgtaacgcctacctcttcgccttcttctagcacaatcttgttgccattgtcgtcgtctcatcctcgactacgttactccgctctgacaaccgtgagctgcgacgacactcctgccataccgcaccacaaccgtcgttgaggtcttctctactggtcccttcagacgctgacacatggttggggccttctacctagtacgtgcggtaccgacaacaccgacacgtgcattcgtatacgacgcgtttccaggagtggcaaacctggagcacgcctcgtccacgacggtttgacaacatcgtcctcgacatcggctacttcctctacgactgtctcaactgtgttgccgtcttcgtctatggcacccttcttctgcgccaccgtcaccctggcgcctactggcgcgccgcgggccttcccgcgtgttgcgcctgcgcccgcgacttgtgcgccttgtcttcttcggtgtcctcgacagctacatcgaccacaactactcgatgcacgacacctcgacaacggctcggtgcccttgcactcggctatctcgacataatcggcacaaaggtcatctgcatgggctactccagtcgcagcattcgcaccgacgttctaactgtgtgggggggggatatatccattgttctccagcctgtccgtttgtgttgctaacgctatgaccgcggggggatgttagagtatattagacaacttctgatatggttggtttaggattgattgtaatccagggataaccttccttgtatctaggataaccttccttatctctaggatatccttcttgccctccaagtcatgtactcctatatattctccttagaggctcaatgcaatacatccaacacattatacataatccttccttcttacagtttcttcttgtggatggttgctcataacaagtgctggactgctgatcacctagcccgacgtggtttggatcaccttgagagatgtcccttatgtgatcaggagatggaaacagtcaatcacttgctggttagatgtgttttctctaggcaattctggttctgctggttacagcaagctggtctccatgcatttgtgccacagccgcatgagagaagctttgtagcttggtggagacatgccattgaagctacaaccgaacaatctaggaaggggttaaactctctagttattcttggcgcctggattatttggaaacattgcgacttgtgtcactttgatggtcatacccccaacctcaatctggccttagctcaagctgcggagaagaggtggtgttgggagctagctggagccaaaggtaccactcacttaatggctccccaaatgggaaatgaagcggtcgtgtcttaggttgtagcctaagattagtattaatggatgatttcttgtattttcggtattggccgccgtaaagggccttgtattttggtactcatggaccttaaactcccttttcttcttaatatatgagatgcgcagttctcctgcgcgttcgagaaaaaatgaactgcagacgcccacatcatgtaaccgtttcctgtgcatgcgtgtagctcgttacatttattttaagagtcattagtaggttcattcaatagttgcttgcttaatgttgctttagttgcttcagactttgcatattggagatatattttttaggagcgcaaattttttgcctatctgagcgcataaaagacaaatagttgcaaagatatatcttatcgtactttccacctagaaggacttgcacctgaaagttctatatatttagtgtctaatctaaattttggataacatgcagcactacacagccatgcagaaaggtgtgagatagagtcaaaagtgtgtgtcattgatccttctctgcttccagctctagatgatttattgcaggacatctatgaatcattgcaaccacagccagtggactatgaacaccgaaaccttatggttaatgttttcaacaaaattgttggagaaatttttggtaaaaataatgagcttccaattgtggaaccatttggatctttcacaatggatctatttactcctcaaagtgacctggacctctctgtgaacttcaatactgatgcaaatgatcagtatcctcgcaagaacaagatttctgctattaggaagcttgcacatgttctattttctcatcagcatgaagttctgggctaaggtacatgatgtgaactgccccaaagatcgaacaatgagctctatggcaattatttctttagtttcttttcatttacagactcggtgtcctccaatattacctgcattttctgccgtattgaaagatggtacagattttgcaagtattgagaagaatgtatcactattccagggttttgggcacagcaataaagagtctattgctgaactttttgtatcactaatgagtaaactagtgtcagtggagggtttatgggagcaagggctctgtgctagcaattttgaagggacatggatatcgaagacctgggcgaagggtgttggcaacttgaatgttgaggacttcttggaccgatctcagaattttgccagatcggtaggggtgaaggagatgcagaaaatatgtgaatgcctaagggctagcgtttctgatttgagcaagttttctaagggtgaaattgctgcgcccaagctaaaggccctgttgtttaagcctttgaaccaggttaacccagtcattaaaccccatcagaaaactattaagaggaagcgtactaatccaaataagaccagaactaaccctattcagaaaaatgctaagaaaaagaaggcccttgagcaggataaattagccatttctcctggtcagaaagatggtaagaagacccttgatcaagagaagtcagttagttctcccattcagaaaggtgctaagaagaccaaaccccttaaccaggataagttagtcatttctcccggccaggaagatgacaagaagccccttgtgcaggatgagccaatagtagtgtctcccatccagaagaataacaataagtatgttgatcaggagaagtcccttcagcaggagaagcaaatcatctctcccggacagaaagatgataagaagagcagcaaggtgggacctgactcagcatgtaatcatgtgcaacagaagaaagtgaaggctactgtatctaccggccgtgctgctaatactcatgtttctagttccaggcctcgctctgtttttatcccccaagcacattggcccagccagccaattgttgatcggtttgcgcatatacctgagcacctgatcagcccttctgcttttagttatgggttgccacaaccacttatgcatccagcctatcctcatcctcattctcatcagggattggtaggtcaaggacagggtaatttccttcatttcaatcctggtattgagctgcagcatcaaggccaggctttcttcggtcctccagctgtctaccaccccatggtgaatgggtttcacccattcggtatcaatggtgctcagcaagtgcagtacatcgacaataggatggtgcagaggccaccatatggttttggcccaggtttctggggatgatggttgcagcctgaggaaaggttggttgctaactagtgggggtttgaggtgaaagttgtcagttcaaagaaaaaaaagctgttgtgtctaatatactcaaagatttagctttaaataggggccagtggaaaatagctaaccatgtgtctgaaccttgatttgtggtttttgttcggtttcagctctagcttaccttagaagtaaaatgttctgttgatgttggattttaactctagcctatcctgggattaaaaggttttgttgttgttgttgtaagttgtaattgtaactgttaggtttgtactctagtctgatttaaaagtaaaaaggctatattgttgttgttgtatctagacctgtacaaggagaaataatcaaataaggaaaaaaacacaatgtgggaaagaaagctgtaatgtcgtttgatct

SEQ ID NO: 43262 - DNA, 4838 bp, Zea Mays
cggagggagtactgaggagggaggagggggcccggcgggcggcggcatacctggagcctggagggcagccgacggcgtctggcgcgatggcggctgtctaggcgcgatagctggagcgcgcgatggttggcgcctggcggctgggtaaaggcccattaaggcccactagtggatatgcgcgcagaacgtccaaataacagcgaaaacgtccagaacggacgttcccgacgtgtaaacggcgtttaaacgtctaggacggacgttctacgcgttttttgtaaaacgtgcggacgttttagccgctaatcacgttttagcgtttaaacgacgcttaatcgtcgtttaaacgacgttttaataaccatggcgagtttcttaaccaagcacaagggttgccgctgagtcgcctctttgggcagcagcatcatcgttcgtcgttgacccccactgttgcatctacatcgtcgtcgactccgtcggtgcgcgtctcctgcgcacggtttgcgagctgttcgacacctgtgagctgcgtcggcacacccgtcgatttgcgctgcacctgcatgctgcgtcgacaccatctgtcgctggtctgcaccacattcgtcatcgagttcttcgccgataagtaccgccatcgcgctccactagcgtcgtcgagtctcttcttcctgtgtgtgtcgtggctctcgccgtcgcgactccaggatcctcgatgcgtaacgcctacctcttcgccttcttctagcacaatcttgttgccattgtcgtcgtctcatcctcgactacgttactccgctctgacaaccgtgagctgcgacgacactcctgccataccgcaccacaaccgtcgttgaggtcttctctactggtcccttcagacgctgacacatggttggggccttctacctagtacgtgcggtaccgacaacaccgacacgtgcattcgtatacgacgcgtttccaggagtggcaaacctggagcacgcctcgtccacgacggtttgacaacatcgtcctcgacatcggctacttcctctacgactgtctcaactgtgttgccgtcttcgtctatggcacccttcttctgcgccaccgtcaccctggcgcctactggcgcgccgcgggccttcccgcgtgttgcgcctgcgcccgcgacttgtgcgccttgtcttcttcggtgtcctcgacagctacatcgaccacaactactcgatgcacgacacctcgacaacggctcggtgcccttgcactcggctatctcgacataatcggcacaaaggtcatctgcatgggctactccagtcgcagcattcgcaccgacgttctaactgtgtgggggggggatatatccattgttctccagcctgtccgtttgtgttgctaacgctatgaccgcggggggatgttagagtatattagacaacttctgatatggttggtttaggattgattgtaatccagggataaccttccttgtatctaggataaccttccttatctctaggatatccttcttgccctccaagtcatgtactcctatatattctccttagaggctcaatgcaatacatccaacacattatacataatccttccttcttacagtttcttcttgtggatggttgctcataacaagtgctggactgctgatcacctagcccgacgtggtttggatcaccttgagagatgtcccttatgtgatcaggagatggaaacagtcaatcacttgctggttagatgtgttttctctaggcaattctggttctgctggttacagcaagctggtctccatgcatttgtgccacagccgcatgagagaagctttgtagcttggtggagacatgccattgaagctacaaccgaacaatctaggaaggggttaaactctctagttattcttggcgcctggattatttggaaacattgcgacttgtgtcactttgatggtcatacccccaacctcaatctggccttagctcaagctgcggagaagaggtggtgttgggagctagctggagccaaaggtaccactcacttaatggctccccaaatgggaaatgaagcggtcgtgtcttaggttgtagcctaagattagtattaatggatgatttcttgtattttcggtattggccgccgtaaagggccttgtattttggtactcatggaccttaaactcccttttcttcttaatatatgagatgcgcagttctcctgcgcgttcgagaaaaaatgaactgcagacgcccacatcatgtaaccgtttcctgtgcatgcgtgtagctcgttacatttattttaagagtcattagtaggttcattcaatagttgcttgcttaatgttgctttagttgcttcagactttgcatattggagatatattttttaggagcgcaaattttttgcctatctgagcgcataaaagacaaatagttgcaaagatatatcttatcgtactttccacctagaaggacttgcacctgaaagttctatatatttagtgtctaatctaaattttggataacatgcagcactacacagccatgcagaaaggtgtgagatagagtcaaaagtgtgtgtcattgatccttctctgcttccagctctagatgatttattgcaggacatctatgaatcattgcaaccacagccagtggactatgaacaccgaaaccttatggttaatgttttcaacaaaattgttggagaaatttttggtaaaaataatgagcttccaattgtggaaccatttggatctttcacaatggatctatttactcctcaaagtgacctggacctctctgtgaacttcaatactgatgcaaatgatcagtatcctcgcaagaacaagatttctgctattaggaagcttgcacatgttctattttctcatcagcgtcatggtcgctgttatggtgtttcacctattgtgactgctagagttcctgtactgaaggttattgataagggaactggtgtagagtgtgatatttcagtagaaaacaaagacggcatgtcaagatcagccatatttaaatttatttcatcaattgataaaagattccggatactttgttatctgatgaagttctgggctaaggtacatgatgtgaactgccccaaagatcgaacaatgagctctatggcaattatttctttagtttcttttcatttacagactcggtgtcctccaatattacctgcattttctgccgtattgaaagatggtacagattttgcaagtattgagaagaatgtatcactattccagggttttgggcacagcaataaagagtctattgctgaactttttgtatcactaatgagtaaactagtgtcagtggagggtttatgggagcaagggctctgtgctagcaattttgaagggacatggatatcgaagacctgggcgaagggtgttggcaacttgaatgttgaggacttcttggaccgatctcagaattttgccagatcggtaggggtgaaggagatgcagaaaatatgtgaatgcctaagggctagcgtttctgatttgagcaagttttctaagggtgaaattgctgcgcccaagctaaaggccctgttgtttaagcctttgaaccaggttaacccagtcattaaaccccatcagaaaactattaagaggaagcgtactaatccaaataagaccagaactaaccctattcagaaaaatgctaagaaaaagaaggcccttgagcaggataaattagccatttctcctggtcagaaagatggtaagaagacccttgatcaagagaagtcagttagttctcccattcagaaaggatgagccaatagtagtgtctcccatccagaagaataacaataagtatgttgatcaggagaagtcccttcagcaggagaagcaaatcatctctcccggacagaaagatgataagaagagcagcaaggtgggacctgactcagcatgtaatcatgtgcaacagaagaaagtgaaggctactgtatctaccggccgtgctgctaatactcatgtttctagttccaggcctcgctctgtttttatcccccaagcacattggcccagccagccaattgttgatcggtttgcgcatatacctgagcacctgatcagcccttctgcttttagttatgggttgccacaaccacttatgcatccagcctatcctcatcctcattctcatcagggattggtaggtcaaggacagggtaatttccttcatttcaatcctggtattgagctgcagcatcaaggccaggctttcttcggtcctccagctgtctaccaccccatggtgaatgggtttcacccattcggtatcaatggtgctcagcaagtgcagtacatcgacaataggatggtgcagaggccaccatatggttttggcccaggtttctggggatgatggttgcagcctgaggaaaggttggttgctaactagtgggggtttgaggtgaaagttgtcagttcaaagaaaaaaaagctgttgtgtctaatatactcaaagatttagctttaaataggggccagtggaaaatagctaaccatgtgtctgaaccttgatttgtggtttttgttcggtttcagctctagcttaccttagaagtaaaatgttctgttgatgttggattttaactctagcctatcctgggattaaaaggttttgttgttgttgttgtaagttgtaattgtaactgttaggtttgtactctagtctgatttaaaagtaaaaaggctatattgttgttgttgtatctagacctgtacaaggagaaataatcaaataaggaaaaaaacacaatgtgggaaagaaagctgtaatgtcgtttgatct

SEQ ID NO: 43263 - DNA, 1910 bp, Zea Mays
ataaacgaacaacaaacttgttattccttatttacttcatattttttatcaattggtgaatgtatcagtagtcggtgagagtgttgcttgcttgatattatagtttttactagcgttatatatgtggtggatggataacttagtgcaaggtcacttaattatacaacttattatttgtatttcattctctctactaataatttttataccaaatcatgaactcgttgtttattacatagattttggatcatgatatcattaatcattacgatacttattgattatgagaagaacaagtatattagcgatgaaacccgcgggtaacccatgggtacccgttaacccgatgggtacgagtttgggcaaaatctcaaacccgtcatgggtacgggttttttaatgggcatagatatttttcacgggtacgggtttgggacggtaaaacccagcgggtttgtacccgttgccatctctaatccagggggtggatgatgctcactttttccagttctctgtcactagcaaatatttggctaaggtggcttatgatagattgttcctaggctcaatccatttcgagccttatgaacaaatctggaaaagttgggcgccttctaagtgttgtttctgttagagtatattaggcaactcctgatatggttggtttaggattgattgtaatccagcgataaccttccttgtatctaggataaccatccttatctctaggatattcttcttgacctccaagtcatgtattcctatatattctccctagaggctcaatgcaatacatccaacacattatacgcaatccttcattcttacatgttatcacgagtttaggttacaccctagcctcccttccgccgcccccaccgcgccgcccccggggagatcgctctccgccgggggcagcgtccttgtaggatgcaccgtggatccatctgatccgatgcgttcgtcgtcgcgtcgtcaagcacaacatcagatcggaactcacaatcaagtctcccatcggtggcctctgtccaccttgccatcaactagcccagcctagctagatctggcccgttacatgtcgtcgtggcggtggctatgatggggctgtatccgcaccgccggcaacatcgcacgccgccatggaggcagatgcgaccaccgctgccgggcgggttacccgatgatgtaccagatctgttgttgctgcgtcttttcgtcttttccggtcagtgatagggtttgcgtctccatcgcccatcgtttcgcgcgtcatcaacatcggcctcgagccctcaacaacaccagctccatcttcttcggttgtgctgcatggcatggctagtggcgtgccaggggatgcccacatgctatttttgcgcctcttcgtcggcacgtcgatctctgccggttcatcgtcgccactactgaccgggaggttctgacatcgacatcaccatcatcgtctttgcctcgcacaccgtcggtctggcaaaccgatcgcgtgcccgaactcaccttcacgtgatgtttgttgtctgctacgagtttcatggttattaaaacggtaaaacgttatgaaccaacttttcaaagtttaaacgtttaaacgaacgttgaaacgacttttcagacttgacatagaatttcaaatatagaataagttcatacataagttgagttcactaccacactttagcttgcaacacacagtagaatggtgctgattattcagttatcacactggttatactaagctaagcagtttatgaacatcagcagccaagggattaggacttaggagtggtggtgattattcaatatgagccaagggattatgaacatcagcagcaagggattaggagtggatcataggagccaagggattatgaacatcagcagcaagggat

SEQ ID NO: 43264 - DNA, 1087 bp, Zea Mays
ctgccaatgaaggtgggtcactgacataactggagctctcatgaccgtcgttctttgtgattatgttgtattcgggaacttcattggaataactgccaatgaaggtttttctgtagtagcgtcttaagcaagtctctgctctagtgctctctatctctctcgctccttgcgccggtgaaacgtgtggatgggcagctcacccggcaataggggaagccatgtaacttttctaccttctttatgaaatacgtgctaagcacgttcaataaaaaaacccgaagctatactgtctgttgtgcagttcgaaaagaatcccctcatcaaaggagaaagaaataacattccttccattgttctcttctttccttgtgaaagtatggaagcttagaatctctccaatatttttggtgatatcttgattcctgatattgtcaagttcatccaaatattgtgttttgtcgtgtgcaccctggtatgaatgcaattgtggaaagtcttacatgtgttactcaaacaccattgtcctaatttttttccaagtcagataccctgcacaagtgttggatctcagttggtatttggtgtttccgtaaaatcctgccatatgagacacctctttctcaagagatggggtgggcactgcgcatgagatggctttggctagccaaagctgatccggactgatcttggtcggctcgtccaattcaagtcccagacaaggtccatgcatttttccattgttgtgatctcgaaaataggaagtggagaccataccatgttctggaatgatcgatggcttaatggctaaaggattgtggacttggctccaagatcatatgaagccgtccctaggaaaatagcatctaagagaactatggcagaagctttaaccaatggggtttggatttcagacataagaggagttcttgctgtaggagctgttattgagtacctgcacctctacgatctgcttgctgatgtggaattgcatccagggtagagatggcaatgggtacccgaaacccgaaacccgatgggtttttaccccattagggtacgggtttggatcaattttcatacccatggg

SEQ ID NO: 43265 - DNA, 1631 bp, Zea Mays
gttggacctgtttgttcagtccgagcttagcaactagtaggaagaaatgccaggtacaataatggcaatgggacggcttaatcgacctagtatcatgatatatggtggaactattaagcctggtcactttcagggcaattcctacgatatagtttctgctttccagtgctatggagaatatgttagtggttcaatcactgatgagcaaagaaagaatgtgctccgcaattcatgtccaggggcaggtgcctgtggtggtatgtacacagcaaacactatggcatctgctattgagacattgggcatgagccttccatacagttcttcgacacctgctgaagacccgctaaagctagaagagtgccgtcttgctgggaagtatcttctagagttgctaaagatggatttgaagcccaaggacattataactgagaagtcattgcgaaatgcaatggttatcgttatggcacttgacctcaagcccagtggcaaatatgtcatggaagatctacataagattggtgggacaccggcagtcattcattatcttctggagcaaggtcttcttgatggtgattgcatgactgttactgcaaaaactctagctgagaatgccaaaattttccctcctttgtctgaagggcagcaaataattcgaccacttgacaatcctatcaaaccaactggccatattcaaatactttatggcaatcttgcaccagaaggttctgtagcaaaaataactggcaaagagggactatacttctcaggtcctgcattagtttttgagggtgaagagtccatgattacagctatctcagaaaacccagcaaatttcaagggaaaggtagtagtgatccgaggagaaggaccaaaaggcgggccagggatgcccgaaatgttgactccaacaagcgcaataatgggtgctggtcttggaaaggagtgcgccctgctgacagatggtagattttctggagggtcacatggatttgttgtcggtcacatatgccctgaagcacaggaaggtggtccaattggccttgtccagagtggtgatataatcaccatcgatgtaagtaagagggtaatcgatgttgaccttaccgaacagcagctcgaagaaaggcggaggaaatggaccccaccgccatacaagtcgaccagtggagctctttggaagtacatcaagcttgtggctccagcgtccagaggatgcgtcactgatgagtaggctgtgttacattctgttaggttgtgcacatgatgtgttttcaatcaaaggctgtttgccaggaacaaccatcctgttagagtgattcatgatagtgcggtttgcgtatggcagagatgatcaattggattcttcttagtccaccatcggcgatcacttgagcatctggtctgcttaaatctttgctgagattctaaaaaacacgcatatcctgcccatgggagcagctaacaagttactgtttaactggagtagaagtgcaatgaaggtagtttaccagtgctacaaatctacaacagaacactcttgtagcttgtaacgtcggcgttgccacctgcattacttcatgaaaatgttcttcgaagttctcaatcaatcgttcaaataccaaatttac

SEQ ID NO: 43266 - DNA, 2526 bp, Zea Mays
gcgaggactcagaaacaactaaagaaagagctaaaaagtcttaaatacttggaaaacatccaaaagcctagaaacgattagagaaagagataaaaagttcaggttttctacgcaatttagataaaataataaaaagcgtctcgattttctaaaagttgggtataattatatgagatcgaggcaaaaacaggggcgcgccaccctgtccagttctcaacccggctgtgctgtctcgtcgccttcctcccctcctgccggctgctgccgccgccagccgctgcaggcacgcttgccctctgctccctgtccatccactcatcattccccgtcatccaccaattcacaacccaaaaccctaaacccatttacctcaacgccaccgccgccgccgcgatgcagtccatggcgcccacctctccctcactcccggtggcaggccccgttccccgccgccgcctccagcgcgtccgcgccgccgcggtctccgacgagcccaaactcaacaagtacagcgcgcgcatcacggagcccaagtcgcagggcgcctcgcaggccgtgctctacggggttggcctcaccgacgccgacctccgcaagccgcaggtcggcgtctcttcggtgtggtacgaagggaacacctgcaacatgcacctgctccgcctcgccgaggccgtccgcgacggcgtccgtgaggccggcatggtcggcttccgattcaacaccgtcggtgtcagcgacgccatctccatgggcacccggggcatgtgctacagcctccagtcccgcgacctcatcgccgacagcatcgagaccgtcatgggcgcgcaacactacgacgccaacatctccatacctgggtgcgacaagaacatgccaggtacaataatggcaatgggacggcttaatcgacctagtatcatgatatatggtggaactattaagcctggtcactttcagggcaattcctacgatatagtttctgctttccagtgctatggagaatatgttagtggttcaatcactgatgagcaaagaaagaatgtgctccgcaattcatgtccaggggcaggtgcctgtggtggtatgtacacagcaaacactatggcatctgctattgagacattgggcatgagccttccatacagttcttcgacacctgctgaagacccgctaaagctagaagagtgccgtcttgctgggaagtatcttctagagttgctaaagatggatttgaagcccaaggacattataactgagaagtcattgcgaaatgcaatggttatcgttatggcacttggtggtccgtaggtctgcatttgactcttgatgatttccagaaggttagtgaccaagttcctttccttgcagacctcaagcccagtggcaaatatgtcatggaagatctacataagattggtgggacaccggcagtcattcattatcttctggagcaaggtcttcttgatggtgattgcatgactgttactgcaaaaactctagctgagaatgccaaaattttccctcctttgtctgaagggcagcaaataattcgaccacttgacaatcctatcaaaccaactggccatattcaaatactttatggcaatcttgcaccagaaggttctgtagcaaaaataactggcaaagagggactatacttctcaggtcctgcattagtttttgagggtgaagagtccatgattacagctatctcagaaaacccagcaaatttcaagggaaaggtagtagtgatccgaggagaaggaccaaaaggcgggccagggatgcccgaaatgttgactccaacaagcgcaataatgggtgctggtcttggaaaggagtgcgccctgctgacagatggtagattttctggagggtcacatggatttgttgtcggtcacatatgccctgaagcacaggaaggtggtccaattggccttgtccagagtggtgatataatcaccatcgatgtaagtaagagggtaatcgatgttgaccttaccgaacagcagctcgaagaaaggcggaggaaatggaccccaccgccatacaagtcgaccagtggagctctttggaagtacatcaagcttgtggctccagcgtccagaggatgcgtcactgatgagtaggctgtgttacattctgttaggttgtgcacatgatgtgttttcaatcaaaggctgtttgccaggaacaaccatcctgttagagtgattcatgatagtgcggtttgcgtatggcagagatgatcaattggattcttcttagtccaccatcggcgatcacttgagcatctggtctgcttaaatctttgctgagattctaaaaaacacgcatatcctgcccatgggagcagctaacaagttactgtttaactggagtagaagtgcaatgaaggtagtttaccagtgctacaaatctacaacagaacactcttgtagcttgtaacgtcggcgttgccacctgcattacttcatgaaaatgttcttcgaagttctcaatcaatcgttcaaataccaaatttac

SEQ ID NO: 43267 - DNA, 2448 bp, Zea Mays
gcgaggactcagaaacaactaaagaaagagctaaaaagtcttaaatacttggaaaacatccaaaagcctagaaacgattagagaaagagataaaaagttcaggttttctacgcaatttagataaaataataaaaagcgtctcgattttctaaaagttgggtataattatatgagatcgaggcaaaaacaggggcgcgccaccctgtccagttctcaacccggctgtgctgtctcgtcgccttcctcccctcctgccggctgctgccgccgccagccgctgcaggcacgcttgccctctgctccctgtccatccactcatcattccccgtcatccaccaattcacaacccaaaaccctaaacccatttacctcaacgccaccgccgccgccgcgatgcagtccatggcgcccacctctccctcactcccggtggcaggccccgttccccgccgccgcctccagcgcgtccgcgccgccgcggtctccgacgagcccaaactcaacaagtacagcgcgcgcatcacggagcccaagtcgcagggcgcctcgcaggccgtgctctacggggttggcctcaccgacgccgacctccgcaagccgcaggtcggcgtctcttcggtgtggtacgaagggaacacctgcaacatgcacctgctccgcctcgccgaggccgtccgcgacggcgtccgtgaggccggcatggtcggcttccgattcaacaccgtcggtgtcagcgacgccatctccatgggcacccggggcatgtgctacagcctccagtcccgcgacctcatcgccgacagcatcgagaccgtcatgggcgcgcaacactacgacgccaacatctccatacctgggtgcgacaagaacatgccaggtacaataatggcaatgggacggcttaatcgacctagtatcatgatatatggtggaactattaagcctggtcactttcagggcaattcctacgatatagtttctgctttccagtgctatggagaatatgttagtggttcaatcactgatgagcaaagaaagaatgtgctccgcaattcatgtccaggggcaggtgcctgtggtggtatgtacacagcaaacactatggcatctgctattgagacattgggcatgagccttccatacagttcttcgacacctgctgaagacccgctaaagctagaagagtgccgtcttgctgggaagtatcttctagagttgctaaagatggatttgaagcccaaggacattataactgagaagtcattgcgaaatgcaatggttatcgttatggcacttggtggttcgactaatgctgttctgcatttgattgccattgctcggtccgtaggtctgcatttgactcttgatgatttccagaaggttagtgaccaagttcctttccttgcagacctcaagcccagtggcaaatatgtcatggaagatctacataagattggtgggacaccggcagtcattcattatcttctggagcaaggtcttcttgatggtgattgcatgactgttactgcaaaaactctagctgagaatgccaaaattttccctcctttgtctgaagggcagcaaataattcgaccacttgacaatcctatcaaaccaactggccatattcaaatactttatggcaatcttgcaccagaaggttctgtagcaaaaataactggcaaagagggactatacttctcaggtcctgcattagtttttgagggtgaagagtccatgattacagctatctcagaaaacccagcaaatttcaagggaaaggtagtagtgatccgaggagaaggaccaaaaggcgggccagggatgcccgaaatgttgactccaacaagcgcaataatgggtgctggtcttggaaaggagtgcgccctgctgacagatggtagattttctggagggtcacatggatttgttgtcggtcacatatgccctgaagcacaggaaggtggtccaattggccttgtccagagtggtgatataatcaccatcgatgtaagtaagagggtaatcgatgttgaccttaccgaacagcagctcgaagaaaggcggaggaaatggaccccaccgccatacaagtcgaccagtggagctctttggaagtacatcaagcttgtggctccagcgtccagaggatgcgtcactgatgaagatgatcaattggattcttcttagtccaccatcggcgatcacttgagcatctggtctgcttaaatctttgctgagattctaaaaaacacgcatatcctgcccatgggagcagctaacaagttactgtttaactggagtagaagtgcaatgaaggtagtttaccagtgctacaaatctacaacagaacactcttgtagcttgtaacgtcggcgttgccacctgcattacttcatgaaaatgttcttcgaagttctcaatcaatcgttcaaataccaaatttac

SEQ ID NO: 43268 - DNA, 2657 bp, Zea Mays
gcgaggactcagaaacaactaaagaaagagctaaaaagtcttaaatacttggaaaacatccaaaagcctagaaacgattagagaaagagataaaaagttcaggttttctacgcaatttagataaaataataaaaagcgtctcgattttctaaaagttgggtataattatatgagatcgaggcaaaaacaggggcgcgccaccctgtccagttctcaacccggctgtgctgtctcgtcgccttcctcccctcctgccggctgctgccgccgccagccgctgcaggcacgcttgccctctgctccctgtccatccactcatcattccccgtcatccaccaattcacaacccaaaaccctaaacccatttacctcaacgccaccgccgccgccgcgatgcagtccatggcgcccacctctccctcactcccggtggcaggccccgttccccgccgccgcctccagcgcgtccgcgccgccgcggtctccgacgagcccaaactcaacaagtacagcgcgcgcatcacggagcccaagtcgcagggcgcctcgcaggccgtgctctacggggttggcctcaccgacgccgacctccgcaagccgcaggtcggcgtctcttcggtgtggtacgaagggaacacctgcaacatgcacctgctccgcctcgccgaggccgtccgcgacggcgtccgtgaggccggcatggtcggcttccgattcaacaccgtcggtgtcagcgacgccatctccatgggcacccggggcatgtgctacagcctccagtcccgcgacctcatcgccgacagcatcgagaccgtcatgggcgcgcaacactacgacgccaacatctccatacctgggtgcgacaagaacatgccaggtacaataatggcaatgggacggcttaatcgacctagtatcatgatatatggtggaactattaagcctggtcactttcagggcaattcctacgatatagtttctgctttccagtgctatggagaatatgttagtggttcaatcactgatgagcaaagaaagaatgtgctccgcaattcatgtccaggggcaggtgcctgtggtggtatgtacacagcaaacactatggcatctgctattgagacattgggcatgagccttccatacagttcttcgacacctgctgaagacccgctaaagctagaagagtgccgtcttgctgggaagtatcttctagagttgctaaagatggatttgaagcccaaggacattataactgagaagtcattgcgaaatgcaatggttatcgttatggcacttggtggttcgactaatgctgttctgcatttgattgccattgctcgacctcaagcccagtggcaaatatgtcatggaagatctacataagattggtgggacaccggcagtcattcattatcttctggagcaaggtcttcttgatggtgattgcatgactgttactgcaaaaactctagctgagaatgccaaaattttccctcctttgtctgaagggcagcaaataattcgaccacttgacaatcctatcaaaccaactggccatattcaaatactttatggcaatcttgcaccagaaggttctgtagcaaaaataactggcaaagagggactatacttctcaggtcctgcattagtttttgagggtgaagagtccatgattacagctatctcagaaaacccagcaaatttcaagggaaaggtagtagtgatccgaggagaaggaccaaaaggcgggccagggatgcccgaaatgttgactccaacaagcgcaataatgggtgctggtcttggaaaggagtgcgccctgctgacagatggtagattttctggagggtcacatggatttgttgtcggtcacatatgccctgaagcacaggaaggtggtccaattggccttgtccagagtggtgatataatcaccatcgatgtaagtaagagggtaatcgatgttgaccttaccgaacagcagctcgaagaaaggcggaggaaatggaccccaccgccatacaagtcgaccagtggagctctttggaagtacatcaagcttgtggctccagcgtccagaggatgcgtcactgatgagtaggctgtgttacattctgttaggttgtgcacatgatgtgttttcaatcaaaggctgtttgccaggaacaaccatcctgttagagtgattcatgatagtgcggtttgcgtatggcaggtataataataaaatgccggtttctattagcttagcaatgctacagaagctgctgaataatcgagcgtaatatgtctgtttaagcttgtgagcaatcacatccttttcagtctctcacttgttttgtttgtcccattgtttctactaccttgttcacagagatgatcaattggattcttcttagtccaccatcggcgatcacttgagcatctggtctgcttaaatctttgctgagattctaaaaaacacgcatatcctgcccatgggagcagctaacaagttactgtttaactggagtagaagtgcaatgaaggtagtttaccagtgctacaaatctacaacagaacactcttgtagcttgtaacgtcggcgttgccacctgcattacttcatgaaaatgttcttcgaagttctcaatcaatcgttcaaataccaaatttac

SEQ ID NO: 43269 - DNA, 2721 bp, Zea Mays
gcgaggactcagaaacaactaaagaaagagctaaaaagtcttaaatacttggaaaacatccaaaagcctagaaacgattagagaaagagataaaaagttcaggttttctacgcaatttagataaaataataaaaagcgtctcgattttctaaaagttgggtataattatatgagatcgaggcaaaaacaggggcgcgccaccctgtccagttctcaacccggctgtgctgtctcgtcgccttcctcccctcctgccggctgctgccgccgccagccgctgcaggcacgcttgccctctgctccctgtccatccactcatcattccccgtcatccaccaattcacaacccaaaaccctaaacccatttacctcaacgccaccgccgccgccgcgatgcagtccatggcgcccacctctccctcactcccggtggcaggccccgttccccgccgccgcctccagcgcgtccgcgccgccgcggtctccgacgagcccaaactcaacaagtacagcgcgcgcatcacggagcccaagtcgcagggcgcctcgcaggccgtgctctacggggttggcctcaccgacgccgacctccgcaagccgcaggtcggcgtctcttcggtgtggtacgaagggaacacctgcaacatgcacctgctccgcctcgccgaggccgtccgcgacggcgtccgtgaggccggcatggtcggcttccgattcaacaccgtcggtgtcagcgacgccatctccatgggcacccggggcatgtgctacagcctccagtcccgcgacctcatcgccgacagcatcgagaccgtcatgggcgcgcaacactacgacgccaacatctccatacctgggtgcgacaagaacatgccaggtacaataatggcaatgggacggcttaatcgacctagtatcatgatatatggtggaactattaagcctggtcactttcagggcaattcctacgatatagtttctgctttccagtgctatggagaatatgttagtggttcaatcactgatgagcaaagaaagaatgtgctccgcaattcatgtccaggggcaggtgcctgtggtggtatgtacacagcaaacactatggcatctgctattgagacattgggcatgagccttccatacagttcttcgacacctgctgaagacccgctaaagctagaagagtgccgtcttgctgggaagtatcttctagagttgctaaagatggatttgaagcccaaggacattataactgagaagtcattgcgaaatgcaatggttatcgttatggcacttggtggttcgactaatgctgttctgcatttgattgccattgctcggtccgtaggtctgcatttgactcttgatgatttccagaaggttagtgaccaagttcctttccttgcagacctcaagcccagtggcaaatatgtcatggaagatctacataagattggtgggacaccggcagtcattcattatcttctggagcaaggtcttcttgatggtgattgcatgactgttactgcaaaaactctagctgagaatgccaaaattttccctcctttgtctgaagggcagcaaataattcgaccacttgacaatcctatcaaaccaactggccatattcaaatactttatggcaatcttgcaccagaaggttctgtagcaaaaataactggcaaagagggactatacttctcaggtcctgcattagtttttgagggtgaagagtccatgattacagctatctcagaaaacccagcaaatttcaagggaaaggtagtagtgatccgaggagaaggaccaaaaggcgggccagggatgcccgaaatgttgactccaacaagcgcaataatgggtgctggtcttggaaaggagtgcgccctgctgacagatggtagattttctggagggtcacatggatttgttgtcggtcacatatgccctgaagcacaggtggtccaattggccttgtccagagtggtgatataatcaccatcgatgtaagtaagagggtaatcgatgttgaccttaccgaacagcagctcgaagaaaggcggaggaaatggaccccaccgccatacaagtcgaccagtggagctctttggaagtacatcaagcttgtggctccagcgtccagaggatgcgtcactgatgagtaggctgtgttacattctgttaggttgtgcacatgatgtgttttcaatcaaaggctgtttgccaggaacaaccatcctgttagagtgattcatgatagtgcggtttgcgtatggcaggtataataataaaatgccggtttctattagcttagcaatgctacagaagctgctgaataatcgagcgtaatatgtctgtttaagcttgtgagcaatcacatccttttcagtctctcacttgttttgtttgtcccattgtttctactaccttgttcacagagatgatcaattggattcttcttagtccaccatcggcgatcacttgagcatctggtctgcttaaatctttgctgagattctaaaaaacacgcatatcctgcccatgggagcagctaacaagttactgtttaactggagtagaagtgcaatgaaggtagtttaccagtgctacaaatctacaacagaacactcttgtagcttgtaacgtcggcgttgccacctgcattacttcatgaaaatgttcttcgaagttctcaatcaatcgttcaaataccaaatttac

SEQ ID NO: 43270 - DNA, 2113 bp, Zea Mays
gcgaggactcagaaacaactaaagaaagagctaaaaagtcttaaatacttggaaaacatccaaaagcctagaaacgattagagaaagagataaaaagttcaggttttctacgcaatttagataaaataataaaaagcgtctcgattttctaaaagttgggtataattatatgagatcgaggcaaaaacaggggcgcgccaccctgtccagttctcaacccggctgtgctgtctcgtcgccttcctcccctcctgccggctgctgccgccgccagccgctgcaggcacgcttgccctctgctccctgtccatccactcatcattccccgtcatccaccaattcacaacccaaaaccctaaacccatttacctcaacgccaccgccgccgccgcgatgcagtccatggcgcccacctctccctcactcccggtggcaggccccgttccccgccgccgcctccagcgcgtccgcgccgccgcggtctccgacgagcccaaactcaacaagtacagcgcgcgcatcacggagcccaagtcgcagggcgcctcgcaggccgtgctctacggggttggcctcaccgacgccgacctccgcaagccgcaggtcggcgtctcttcggtgtggtacgaagggaacacctgcaacatgcacctgctccgcctcgccgaggccgtccgcgacggcgtccgtgaggccggcatggtcggcttccgattcaacaccgtcggtgtcagcgacgccatctccatgggcacccggggcatgtgctacagcctccagtcccgcgacctcatcgccgacagcatcgagaccgtcatgggcgcgcaacactacgacgccaacatctccatacctgggtgcgacaagaacatgccaggtacaataatggcaatgggacggcttaatcgacctagtatcatgatatatggtggaactattaagcctggtcactttcagggcaattcctacgatatagtttctgctttccagtgctatggagaatatgttagtggttcaatcactgatgagcaaagaaagaatgtgctccgcaattcatgtccaggggcaggtgcctgtggtggtatgtacacagcaaacactatggcatctgctattgagacattgggcatgagccttccatacagttcttcgacacctgctgaagacccgctaaagctagaagagtgccgtcttgctgggaagtatcttctagagttgctaaagatggatttgaagcccaaggacattataactgagaagtcattgcgaaatgcaatggttatcgttatggcacttggtggttcgactaatgctgttctgcatttgattgccattgctcggtccgtaggtctgcatttgactcttgatgatttccagaaggttagtgaccaagttcctttccttgcagacctcaagcccagtggcaaatatgtcatggaagatctacataagattggtgggacaccggcagtcattcattatcttctggagcaaggtcttcttgatggtgattgcatgactgttactgcaaaaactctagctgagaatgccaaaattttccctcctttgtctgaagggcagcaaataattcgaccacttgacaatcctatcaaaccaactggccatattcaaatactttatggcaatcttgcaccagaaggttctgtagcaaaaataactggcaaagagggactatacttctcaggtcctgcattagtttttgagggtgaagagtccatgattacagctatctcagaaaacccagcaaatttcaagggaaaggtagtagtgatccgaggagaaggaccaaaaggcgggccagggatgcccgaaatgttgactccaacaagcgcaataatgggtgctggtcttggaaagaactcagaagatgcacaattctggtttcttctgctctcagaaattgttgaattttcaaagcgacgagagatctgcacattcttaaatacaatacaaaggatcagattttctttgcctaccccctttatatttgcattatctggtgcttcctaagttttggttcctagttgcatgtgtgcctggcaactatcctcctttcatcagattagttattcttcactacagttgatgtgat

SEQ ID NO: 43271 - DNA, 630 bp, Zea Mays
aaaacctagcgctggcgccgcagacccctccccttcgcttccttccctagcgccgacgcccaccagacgagatggccccgaagaaggacaaggccccgccgccgtcgtcgaagccggccaagtccggtggtggcaagcaaaagaagaagaagtggagcaagggaaagctaaaggagaaggtaaacaacgcggtgctgttcgaccaggctacctacgacaagctgctctcggaggtgcccaagtacaagcaaatcaccccttccatcctctccgagcgtctgaggatcaacggctcccttgctcggagggccatcaaggacttgatggcgcgtggcctcattcggatggtctcggtccactcaagccagcagatctacaccagggcaaccaatacataaggatggggaagaggtctaaaatgcattgtctgccctctctgcaggaggagctcgtctttagaacagttgccatctttgtcaagagttgccaatgttatgttactggtgatgagttccagatggttcgtcgtcggaatccgtccgtgatcaatttcagcagtgatgaggatgagattcaggaggaatctctggctccctcccctccatctcatcgttcactctccaagaaggg

SEQ ID NO: 43272 - DNA, 2245 bp, Zea Mays
cgttttcatccctatctgtgtggacggtaaaggtggcgggggcaacggtgccacaagattgtgggccctcttagattggcccacatgtcagccactggctaacccatggccggttgtcgttatccatttaaccgaccaggcccatggccatccactccactagtccacttgcacttgcgacagtgcagtcaatcgcttcgtctccgcgtctcgcgcgccccgccgcataggcgccagtcctccacagaaattcccacacctccacgccgtacggccagagtcgcggtccccgtcgaatccattccatggctccacccgccgcccccaccgcaccgcaccaccgcactcctctctttctcccccgccgcgccgccgccaccgcgcgcgctgccagggccgcttccctcgccgtcagggcccagccgaacaccgccgccgcctccacctccgcccccgagccgccggagaagttcaagccgcctccagggttcaaggtgcccgagcccaagaggttcgagatcaagtccggccagcagagcagtgtcctcggcgctttgctcgccatccccctccgcctcggcaccggcgtcttcgtcctcgggtactcgccatcacttgtttctccatcagagataccatcggaccaatatgcgcttgaattcggagcttggaaggtgaaggaggaatcaaaaataggacagtgcaaacgaccggaaaagccgatcgagatatatgaatttgaaggttgtccattttgtcgaaaggtgaatacgtccagcttcctgcaagtctgcaactgcattttgaagctgtcattcttcatgcacatgaacagttttgttgtttgtgttcaccatgaaaacattgcaggttagagagatggtatcagtcttggacctagatgtactattttacccctgtcctcgaaaaggcccaacattccgacctaaagtccttgaaatgggtggaaagaaacagtttccttacatggtatgcaaccatcctacataagttccttacctaaagtcattcggttgatagcgcccccacagccatgtctatgaaatacggaaatgtggcgtatgaattatattgataaataagcgtcctcatatgatgaccattgagtataaactgtgggcctctggcaagatggattaacttacccattatatttgataaacaaactttgatgtgcatctcataattttctgttggggaaaatacgggtgtcatctgagatttcccgagaaataaattgcgtgatgaaagcaaatcagttgccagtctgtgttaacagttatataagatacatgtctattgcaggtggatccaaacactggggtcgccatgtatgaatcagatgacatcataaaatacctagctgacacatatggtgatggaagtgttccaattatgctatcgcttggtctgttgacagcaattacagcagggcttgctactcttggtcgtattggaaagggaaattcctatactgcttcaagaatcccaccgcagcctatagagatatgggcattcgagggatctcccttctgtagattagtacgagagacgcttgttgagttggaattgccacatctgctacacagctgcgcacgtggcagcctcaaacgacaagaagttttcaagaaaaagggagttttccaggcgccttacatcgaagatcctaacacgggagtccagatgttcgaaagcgcagaaatcatagactacctgaaggcaacatatgtcctgtaccaaagctcatagtgacgttatctccaatagtcattgtaaagttgcatggaccgtgtaaattcaattctttccggtaataaaaggaaaagataaagtaaaccacaagttctgtatgatgcacagccgatttttatctatgcaagtctgaactttgaagttacttcaaactccgttctcctggttaatctagtgaatgagtgagttcccttgtgctggagaagttcggatcttggactggtgttgattgtagactcgactgttctgttcccttgtagttcggatcgtgaaattcgtcatcagtgtttggccatctcttggaagttcaactcggagcgtggcaaatcaaactgttggttcacgaatcaacgtcaagactcaagactcaagagtcaattatggatcaagttgccgtcacggcgtcaccgaagcatcgctacacactgtttgtagctttttctgacgagtttttcgagaatctgactgtggg

SEQ ID NO: 43273 - DNA, 1999 bp, Zea Mays
cgttttcatccctatctgtgtggacggtaaaggtggcgggggcaacggtgccacaagattgtgggccctcttagattggcccacatgtcagccactggctaacccatggccggttgtcgttatccatttaaccgaccaggcccatggccatccactccactagtccacttgcacttgcgacagtgcagtcaatcgcttcgtctccgcgtctcgcgcgccccgccgcataggcgccagtcctccacagaaattcccacacctccacgccgtacggccagagtcgcggtccccgtcgaatccattccatggctccacccgccgcccccaccgcaccgcaccaccgcactcctctctttctcccccgccgcgccgccgccaccgcgcgcgctgccagggccgcttccctcgccgtcagggcccagccgaacaccgccgccgcctccacctccgcccccgagccgccggagaagttcaagccgcctccagggttcaaggtgcccgagcccaagaggttcgagatcaagtccggccagcagagcagtgtcctcggcgctttgctcgccatccccctccgcctcggcaccggcgtcttcgtcctcgggtactcgccatcacttgtttctccatcagagataccatcggaccaatatgcgcttgaattcggagcttggaaggtgaaggaggaatcaaaaataggacagtgcaaacgaccggaaaagccgatcgagatatatgaatttgaaggttgtccattttgtcgaaaggttagagagatggtatcagtcttggacctagatgtactattttacccctgtcctcgaaaaggcccaacattccgacctaaagtccttgaaatgggtggaaagaaacagtttccttacatggtggatccaaacactggggtcgccatgtatgaatcagatgacatcataaaatacctagctgacacatatggtgatggaagtgttccaattatgctatcgcttggtctgttgacagcaattacagcagggcttgctactcttggtcgtattggaaagggaaattcctatactgcttcaagaatcccaccgcagcctatagagatatgggcattcgaggtctgaagcacatgagctctcttcttagtatacagggatctcccttctgtagattagtacgagagacgcttgttgagttggaattgccacatctgctacacaggtatccaaaatactttaaaaccacaagtcaacgaatggcattataacagcgtggaagctgttgctaaacatcaccttagtagaattacacattagtttggttattctggattgagatatgtgctcgacaagagtgttagtaactgaaaattattcctgcagctgcgcacgtggcagcctcaaacgacaagaagttttcaagaaaaagggagttttccaggcgccttacatcgaagatcctaacacgggagtccagatgttcgaaagcgcagaaatcatagactacctgaaggcaacatatgtcctgtaccaaagctcatagtgacgttatctccaatagtcattgtaaagttgcatggaccgtgtaaattcaattctttccggtaataaaaggaaaagataaagtaaaccacaagttctgtatgatgcacagccgatttttatctatgcaagtctgaactttgaagttacttcaaactccgttctcctggttaatctagtgaatgagtgagttcccttgtgctggagaagttcggatcttggactggtgttgattgtagactcgactgttctgttcccttgtagttcggatcgtgaaattcgtcatcagtgtttggccatctcttggaagttcaactcggagcgtggcaaatcaaactgttggttcacgaatcaacgtcaagactcaagactcaagagtcaattatggatcaagttgccgtcacggcgtcaccgaagcatcgctacacactgtttgtagctttttctgacgagtttttcgagaatctgactgtggg

SEQ ID NO: 43274 - DNA, 1803 bp, Zea Mays
cgttttcatccctatctgtgtggacggtaaaggtggcgggggcaacggtgccacaagattgtgggccctcttagattggcccacatgtcagccactggctaacccatggccggttgtcgttatccatttaaccgaccaggcccatggccatccactccactagtccacttgcacttgcgacagtgcagtcaatcgcttcgtctccgcgtctcgcgcgccccgccgcataggcgccagtcctccacagaaattcccacacctccacgccgtacggccagagtcgcggtccccgtcgaatccattccatggctccacccgccgcccccaccgcaccgcaccaccgcactcctctctttctcccccgccgcgccgccgccaccgcgcgcgctgccagggccgcttccctcgccgtcagggcccagccgaacaccgccgccgcctccacctccgcccccgagccgccggagaagttcaagccgcctccagggttcaaggtgcccgagcccaagaggttcgagatcaagtccggccagcagagcagtgtcctcggcgctttgctcgccatccccctccgcctcggcaccggcgtcttcgtcctcgggtactcgccatcacttgtttctccatcagagataccatcggaccaatatgcgcttgaattcggagcttggaaggtgaaggaggaatcaaaaataggacagtgcaaacgaccggaaaagccgatcgagatatatgaatttgaaggttgtccattttgtcgaaaggttagagagatggtatcagtcttggacctagatgtactattttacccctgtcctcgaaaaggcccaacattccgacctaaagtccttgaaatgggtggaaagaaacagtttccttacatggtggatccaaacactggggtcgccatgtatgaatcagatgacatcataaaatacctagctgacacatatggtgatggaagtgttccaattatgctatcgcttggtctgttgacagcaattacagcagggcttgctactcttggtcgtattggaaagggaaattcctatactgcttcaagaatcccaccgcagcctatagagatatgggcattcgagggatctcccttctgtagattagtacgagagacgcttgttgagttggaattgccacatctgctacacagctgcgcacgtggcagcctcaaacgacaagaagttttcaagaaaaagggagttttccaggcgccttacatcgaagatcctaacacgggagtccagatgttcgaaagcgcagaaatcatagactacctgaaggcaacatatgtcctgtaccaaagctcatagtgacgttatctccaatagtcattgtaaagttgcatggaccgtgtaaattcaattctttccggtaataaaaggaaaagataaagtaaaccacaagttctgtatgatgcacagccgatttttatctatgcaagtctgaactttgaagttacttcaaactccgttctcctggttaatctagtgaatgagtgagttcccttgtgctggagaagttcggatcttggactggtgttgattgtagactcgactgttctgttcccttgtagttcggatcgtgaaattcgtcatcagtgtttggccatctcttggaagttcaactcggagcgtggcaaatcaaactgttggttcacgaatcaacgtcaagactcaagactcaagagtcaattatggatcaagttgccgtcacggcgtcaccgaagcatcgctacacactgtttgtagctttttctgacgagtttttcgagaatctgactgtggg

SEQ ID NO: 43275 - DNA, 2619 bp, Zea Mays
cgttttcatccctatctgtgtggacggtaaaggtggcgggggcaacggtgccacaagattgtgggccctcttagattggcccacatgtcagccactggctaacccatggccggttgtcgttatccatttaaccgaccaggcccatggccatccactccactagtccacttgcacttgcgacagtgcagtcaatcgcttcgtctccgcgtctcgcgcgccccgccgcataggcgccagtcctccacagaaattcccacacctccacgccgtacggccagagtcgcggtccccgtcgaatccattccatggctccacccgccgcccccaccgcaccgcaccaccgcactcctctctttctcccccgccgcgccgccgccaccgcgcgcgctgccagggccgcttccctcgccgtcagggcccagccgaacaccgccgccgcctccacctccgcccccgagccgccggagaagttcaagccgcctccagggttcaaggtgcccgagcccaagaggttcgagatcaagtccggccagcagagcagtgtcctcggcgctttgctcgccatccccctccgcctcggcaccggcgtcttcgtcctcgggtactcgccatcacttgtttctccatcagagataccatcggaccaatatgcgcttgaattcggagcttggaaggtgaaggaggaatcaaaaataggacagtgcaaacgaccggaaaagccgatcgagatatatgaatttgaagggtacaacctctattgcctctgcctcctgtttatctctaactgtacctacatttgttgcaccaaaccctaataatttttgctgaacaatcatgctgacttattcctcttcttcattgtttgtgtattcttccaaatcttcagttgtccattttgtcgaaaggtgaatacgtccagcttcctgcaagtctgcaactgcattttgaagctgtcattcttcatgcacatgaacagttttgttgtttgtgttcaccatgaaaacattgcaggttagagagatggtatcagtcttggacctagatgtactattttacccctgtcctcgaaaaggcccaacattccgacctaaagtccttgaaatgggtggaaagaaacagtttccttacatggtatgcaaccatcctacataagttccttacctaaagtcattcggttgatagcgcccccacagccatgtctatgaaatacggaaatgtggcgtatgaattatattgataaataagcgtcctcatatgatgaccattgagtataaactgtgggcctctggcaagatggattaacttacccattatatttgataaacaaactttgatgtgcatctcataattttctgttggggaaaatacgggtgtcatctgagatttcccgagaaataaattgcgtgatgaaagcaaatcagttgccagtctgtgttaacagttatataagatacatgtctattgcaggtggatccaaacactggggtcgccatgtatgaatcagatgacatcataaaatacctagctgacacatatggtgatggaagtgttccaattatgctatcgcttggtctgttgacagtaagtaaataagtaccaagtaattcaaaagtatatgatatgttttaaccagtatacatattagtctaaagtacaaaatacattttaactatgtaacccaactattatctaggaatatatgacatatttacactgggctttctatatgcatcaatatttgcctatctgatgagtagaatgctttattttctgccaattttcagttttgataacttttaatctttgttttgtaggcaattacagcagggcttgctactcttggtcgtattggaaagggaaattcctatactgcttcaagaatcccaccgcagcctatagagatatgggcattcgagggatctcccttctgtagattagtacgagagacgcttgttgagttggaattgccacatctgctacacagctgcgcacgtggcagcctcaaacgacaagaagttttcaagaaaaagggagttttccaggcgccttacatcgaagatcctaacacgggagtccagatgttcgaaagcgcagaaatcatagactacctgaaggcaacatatgtcctgtaccaaagctcatagtgacgttatctccaatagtcattgtaaagttgcatggaccgtgtaaattcaattctttccggtaataaaaggaaaagataaagtaaaccacaagttctgtatgatgcacagccgatttttatctatgcaagtctgaactttgaagttacttcaaactccgttctcctggttaatctagtgaatgagtgagttcccttgtgctggagaagttcggatcttggactggtgttgattgtagactcgactgttctgttcccttgtagttcggatcgtgaaattcgtcatcagtgtttggccatctcttggaagttcaactcggagcgtggcaaatcaaactgttggttcacgaatcaacgtcaagactcaagactcaagagtcaattatggatcaagttgccgtcacggcgtcaccgaagcatcgctacacactgtttgtagctttttctgacgagtttttcgagaatctgactgtggg

SEQ ID NO: 43276 - DNA, 1930 bp, Zea Mays
cgttttcatccctatctgtgtggacggtaaaggtggcgggggcaacggtgccacaagattgtgggccctcttagattggcccacatgtcagccactggctaacccatggccggttgtcgttatccatttaaccgaccaggcccatggccatccactccactagtccacttgcacttgcgacagtgcagtcaatcgcttcgtctccgcgtctcgcgcgccccgccgcataggcgccagtcctccacagaaattcccacacctccacgccgtacggccagagtcgcggtccccgtcgaatccattccatggctccacccgccgcccccaccgcaccgcaccaccgcactcctctctttctcccccgccgcgccgccgccaccgcgcgcgctgccagggccgcttccctcgccgtcagggcccagccgaacaccgccgccgcctccacctccgcccccgagccgccggagaagttcaagccgcctccagggttcaaggtgcccgagcccaagaggttcgagatcaagtccggccagcagagcagtgtcctcggcgctttgctcgccatccccctccgcctcggcaccggcgtcttcgtcctcgggtactcgccatcacttgtttctccatcagagataccatcggaccaatatgcgcttgaattcggagcttggaaggtgaaggaggaatcaaaaataggacagtgcaaacgaccggaaaagccgatcgagatatatgaatttgaagggtacaacctctattgcctctgcctcctgtttatctctaactgtacctacatttgttgcaccaaaccctaataatttttgctgaacaatcatgctgacttattcctcttcttcattgtttgtgtattcttccaaatcttcagttgtccattttgtcgaaaggtgaatacgtccagcttcctgcaagtctgcaactgcattttgaagctgtcattcttcatgcacatgaacagttttgttgtttgtgttcaccatgaaaacattgcaggtggatccaaacactggggtcgccatgtatgaatcagatgacatcataaaatacctagctgacacatatggtgatggaagtgttccaattatgctatcgcttggtctgttgacagcaattacagcagggcttgctactcttggtcgtattggaaagggaaattcctatactgcttcaagaatcccaccgcagcctatagagatatgggcattcgagggatctcccttctgtagattagtacgagagacgcttgttgagttggaattgccacatctgctacacagctgcgcacgtggcagcctcaaacgacaagaagttttcaagaaaaagggagttttccaggcgccttacatcgaagatcctaacacgggagtccagatgttcgaaagcgcagaaatcatagactacctgaaggcaacatatgtcctgtaccaaagctcatagtgacgttatctccaatagtcattgtaaagttgcatggaccgtgtaaattcaattctttccggtaataaaaggaaaagataaagtaaaccacaagttctgtatgatgcacagccgatttttatctatgcaagtctgaactttgaagttacttcaaactccgttctcctggttaatctagtgaatgagtgagttcccttgtgctggagaagttcggatcttggactggtgttgattgtagactcgactgttctgttcccttgtagttcggatcgtgaaattcgtcatcagtgtttggccatctcttggaagttcaactcggagcgtggcaaatcaaactgttggttcacgaatcaacgtcaagactcaagactcaagagtcaattatggatcaagttgccgtcacggcgtcaccgaagcatcgctacacactgtttgtagctttttctgacgagtttttcgagaatctgactgtggg

SEQ ID NO: 43277 - DNA, 2036 bp, Zea Mays
cgttttcatccctatctgtgtggacggtaaaggtggcgggggcaacggtgccacaagattgtgggccctcttagattggcccacatgtcagccactggctaacccatggccggttgtcgttatccatttaaccgaccaggcccatggccatccactccactagtccacttgcacttgcgacagtgcagtcaatcgcttcgtctccgcgtctcgcgcgccccgccgcataggcgccagtcctccacagaaattcccacacctccacgccgtacggccagagtcgcggtccccgtcgaatccattccatggctccacccgccgcccccaccgcaccgcaccaccgcactcctctctttctcccccgccgcgccgccgccaccgcgcgcgctgccagggccgcttccctcgccgtcagggcccagccgaacaccgccgccgcctccacctccgcccccgagccgccggagaagttcaagccgcctccagggttcaaggtgcccgagcccaagaggttcgagatcaagtccggccagcagagcagtgtcctcggcgctttgctcgccatccccctccgcctcggcaccggcgtcttcgtcctcgggtactcgccatcacttgtttctccatcagagataccatcggaccaatatgcgcttgaattcggagcttggaaggtgaaggaggaatcaaaaataggacagtgcaaacgaccggaaaagccgatcgagatatatgaatttgaaggttgtccattttgtcgaaaggttagagagatggtatcagtcttggacctagatgtactattttacccctgtcctcgaaaaggcccaacattccgacctaaagtccttgaaatgggtggaaagaaacagtttccttacatggtggatccaaacactggggtcgccatgtatgaatcagatgacatcataaaatacctagctgacacatatggtgatggaagtgttccaattatgctatcgcttggtctgttgacagtaagtaaataagtaccaagtaattcaaaagtatatgatatgttttaaccagtatacatattagtctaaagtacaaaatacattttaactatgtaacccaactattatctaggaatatatgacatatttacactgggctttctatatgcatcaatatttgcctatctgatgagtagaatgctttattttctgccaattttcagttttgataacttttaatctttgttttgtaggcaattacagcagggcttgctactcttggtcgtattggaaagggaaattcctatactgcttcaagaatcccaccgcagcctatagagatatgggcattcgagggatctcccttctgtagattagtacgagagacgcttgttgagttggaattgccacatctgctacacagctgcgcacgtggcagcctcaaacgacaagaagttttcaagaaaaagggagttttccaggcgccttacatcgaagatcctaacacgggagtccagatgttcgaaagcgcagaaatcatagactacctgaaggcaacatatgtcctgtaccaaagctcatagtgacgttatctccaatagtcattgtaaagttgcatggaccgtgtaaattcaattctttccggtaataaaaggaaaagataaagtaaaccacaagttctgtatgatgcacagccgatttttatctatgcaagtctgaactttgaagttacttcaaactccgttctcctggttaatctagtgaatgagtgagttcccttgtgctggagaagttcggatcttggactggtgttgattgtagactcgactgttctgttcccttgtagttcggatcgtgaaattcgtcatcagtgtttggccatctcttggaagttcaactcggagcgtggcaaatcaaactgttggttcacgaatcaacgtcaagactcaagactcaagagtcaattatggatcaagttgccgtcacggcgtcaccgaagcatcgctacacactgtttgtagctttttctgacgagtttttcgagaatctgactgtggg

SEQ ID NO: 43278 - DNA, 2120 bp, Zea Mays
cgttttcatccctatctgtgtggacggtaaaggtggcgggggcaacggtgccacaagattgtgggccctcttagattggcccacatgtcagccactggctaacccatggccggttgtcgttatccatttaaccgaccaggcccatggccatccactccactagtccacttgcacttgcgacagtgcagtcaatcgcttcgtctccgcgtctcgcgcgccccgccgcataggcgccagtcctccacagaaattcccacacctccacgccgtacggccagagtcgcggtccccgtcgaatccattccatggctccacccgccgcccccaccgcaccgcaccaccgcactcctctctttctcccccgccgcgccgccgccaccgcgcgcgctgccagggccgcttccctcgccgtcagggcccagccgaacaccgccgccgcctccacctccgcccccgagccgccggagaagttcaagccgcctccagggttcaaggtgcccgagcccaagaggttcgagatcaagtccggccagcagagcagtgtcctcggcgctttgctcgccatccccctccgcctcggcaccggcgtcttcgtcctcgggtactcgccatcacttgtttctccatcagagataccatcggaccaatatgcgcttgaattcggagcttggaaggtgaaggaggaatcaaaaataggacagtgcaaacgaccggaaaagccgatcgagatatatgaatttgaagggttagagagatggtatcagtcttggacctagatgtactattttacccctgtcctcgaaaaggcccaacattccgacctaaagtccttgaaatgggtggaaagaaacagtttccttacatggtatgcaaccatcctacataagttccttacctaaagtcattcggttgatagcgcccccacagccatgtctatgaaatacggaaatgtggcgtatgaattatattgataaataagcgtcctcatatgatgaccattgagtataaactgtgggcctctggcaagatggattaacttacccattatatttgataaacaaactttgatgtgcatctcataattttctgttggggaaaatacgggtgtcatctgagatttcccgagaaataaattgcgtgatgaaagcaaatcagttgccagtctgtgttaacagttatataagatacatgtctattgcaggtggatccaaacactggggtcgccatgtatgaatcagatgacatcataaaatacctagctgacacatatggtgatggaagtgttccaattatgctatcgcttggtctgttgacagcaattacagcagggcttgctactcttggtcgtattggaaagggaaattcctatactgcttcaagaatcccaccgcagcctatagagatatgggcattcgagggatctcccttctgtagattagtacgagagacgcttgttgagttggaattgccacatctgctacacagctgcgcacgtggcagcctcaaacgacaagaagttttcaagaaaaagggagttttccaggcgccttacatcgaagatcctaacacgggagtccagatgttcgaaagcgcagaaatcatagactacctgaaggcaacatatgtcctgtaccaaagctcatagtgacgttatctccaatagtcattgtaaagttgcatggaccgtgtaaattcaattctttccggtaataaaaggaaaagataaagtaaaccacaagttctgtatgatgcacagccgatttttatctatgcaagtctgaactttgaagttacttcaaactccgttctcctggttaatctagtgaatgagtgagttcccttgtgctggagaagttcggatcttggactggtgttgattgtagactcgactgttctgttcccttgtagttcggatcgtgaaattcgtcatcagtgtttggccatctcttggaagttcaactcggagcgtggcaaatcaaactgttggttcacgaatcaacgtcaagactcaagactcaagagtcaattatggatcaagttgccgtcacggcgtcaccgaagcatcgctacacactgtttgtagctttttctgacgagtttttcgagaatctgactgtggg

SEQ ID NO: 43279 - DNA, 1890 bp, Zea Mays
cgttttcatccctatctgtgtggacggtaaaggtggcgggggcaacggtgccacaagattgtgggccctcttagattggcccacatgtcagccactggctaacccatggccggttgtcgttatccatttaaccgaccaggcccatggccatccactccactagtccacttgcacttgcgacagtgcagtcaatcgcttcgtctccgcgtctcgcgcgccccgccgcataggcgccagtcctccacagaaattcccacacctccacgccgtacggccagagtcgcggtccccgtcgaatccattccatggctccacccgccgcccccaccgcaccgcaccaccgcactcctctctttctcccccgccgcgccgccgccaccgcgcgcgctgccagggccgcttccctcgccgtcagggcccagccgaacaccgccgccgcctccacctccgcccccgagccgccggagaagttcaagccgcctccagggttcaaggtgcccgagcccaagaggttcgagatcaagtccggccagcagagcagtgtcctcggcgctttgctcgccatccccctccgcctcggcaccggcgtcttcgtcctcgggtactcgccatcacttgtttctccatcagagataccatcggaccaatatgcgcttgaattcggagcttggaaggtgaaggaggaatcaaaaataggacagtgcaaacgaccggaaaagccgatcgagatatatgaatttgaagggttagagagatggtatcagtcttggacctagatgtactattttacccctgtcctcgaaaaggcccaacattccgacctaaagtccttgaaatgggtggaaagaaacagtttccttacatggtggatccaaacactggggtcgccatgtatgaatcagatgacatcataaaatacctagctgacacatatggtgatggaagtgttccaattatgctatcgcttggtctgttgacagcaattacagcagggcttgctactcttggtcgtattggaaagggaaattcctatactgcttcaagaatcccaccgcagcctatagagatatgggcattcgaggtctgaagcacatgagctctcttcttagtatacaggtcatggatgtgatttattgcagcatagtgttagtcctggagtctgaatggctgatgatctattttctcagggatctcccttctgtagattagtacgagagacgcttgttgagttggaattgccacatctgctacacagctgcgcacgtggcagcctcaaacgacaagaagttttcaagaaaaagggagttttccaggcgccttacatcgaagatcctaacacgggagtccagatgttcgaaagcgcagaaatcatagactacctgaaggcaacatatgtcctgtaccaaagctcatagtgacgttatctccaatagtcattgtaaagttgcatggaccgtgtaaattcaattctttccggtaataaaaggaaaagataaagtaaaccacaagttctgtatgatgcacagccgatttttatctatgcaagtctgaactttgaagttacttcaaactccgttctcctggttaatctagtgaatgagtgagttcccttgtgctggagaagttcggatcttggactggtgttgattgtagactcgactgttctgttcccttgtagttcggatcgtgaaattcgtcatcagtgtttggccatctcttggaagttcaactcggagcgtggcaaatcaaactgttggttcacgaatcaacgtcaagactcaagactcaagagtcaattatggatcaagttgccgtcacggcgtcaccgaagcatcgctacacactgtttgtagctttttctgacgagtttttcgagaatctgactgtggg

SEQ ID NO: 43280 - DNA, 662 bp, Zea Mays
gtgcgccagatgaagctgcgtgcgcatgggccacagttgtctgccccacaccgccttggcctggacgctcggtctcgctgtcagtgggcccgtcgcgtcagacttatcccatcaccagaacgccgtgggcgccgccggggaatccgcggaatccgttcgctaccgcccgggattcctctccgtctggcgcgcgacctgtttctccaacgccgtccgcgattcatgggggctggggctcaacatccgcgccgaccgtggaaatcggctcacggttgccgatctcctcctcgccactcgactacataaacggaacgctacatccttgatagcaccgagcgcaccatcgccaagcttcaccatgcacctgagagagagaggatagagagaagggctgcaccggtgaaatcgaagggatgtcgccatcggggcttggcaagtttaccaccgttgaggtcctggagttgggtccatgagattcgccgtggtgcggcgaaggtggccgtggctcctgcgctaaggttgggggaccggtatcctggcaatttctgaccggtgccggtcttggccgcgatgtcgcgcccaagtacgggcggtgcttctgcgcgcccagttcacgtgaggacacgagtcacctgaagagcatgttggtacctgcaatttca

SEQ ID NO: 43281 - DNA, 665 bp, Zea Mays
gtgcgccagatgaagctgcgtgcgcatgggccacagttgtctgccccacaccgccttggcctggacgctcggtctcgctgtcagtgggcccgtcgcgtcagacttatcccatcaccagaacgccgtgggcgccgccggggaatccgcggaatccgttcgctaccgcccgggattcctctccgtctggcgcgcgacctgtttctccaacgccgtccgcgattcatgggggctggggctcaacatccgcgccgaccgtggaaatcggctcacggttgccgatctcctcctcgccactcgactacataaacggaacgctacatccttgatagcaccgagcgcaccatcgccaagcttcaccatgcacctgagagagagaggatagagagaagggctgcaccggtgaaatcgaagggatgtcgccatcggggcttggcaagtttaccaccgttgaggtcctggagttgggtccatgagattcgccgtggtgcggcgaaggtggccgtggctcctgcgctaaggttgggggaccggtatcctggcaatttctgaccggtgccggtcttggccgcgatgtcgcgcccaagtacgggcggtgcttctgcgcgcccagttcacgcagtgaggacacgagtcacctgaagagcatgttggtacctgcaatttca

SEQ ID NO: 43282 - DNA, 1040 bp, Zea Mays
gtgcgccagatgaagctgcgtgcgcatgggccacagttgtctgccccacaccgccttggcctggacgctcggtctcgctgtcagtgggcccgtcgcgtcagacttatcccatcaccagaacgccgtgggcgccgccggggaatccgcggaatccgttcgctaccgcccgggattcctctccgtctggcgcgcgacctgtttctccaacgccgtccgcgattcatgggggctggggctcaacatccgcgccgaccgtggaaatcggctcacggttgccgatctcctcctcgccactcgactacataaacggaacgctacatccttgatagcaccgagcgcaccatcgccaagcttcaccatgcacctgagagagagaggatagagagaagggctgcaccggtgaaatcgaagggatgtcgccatcggggcttggcaagtttaccaccgttgaggtcctggagttgggtccatgagattcgccgtggtgcggcgaaggtggccgtggctcctgcgctaaggttgggggaccggtatcctggcaatttctgaccggtgccggtcttggccgcgatgtcgcgcccaagtacgggcggtgcttctgcgcgcccagttcacggtgagaaccctctcaccagtctcgcccctgtctttgctccatgtagcatccttcatttgggagttctgggcgtttggtcatgggttgcgggagcctggtgatggcgccacggcgccaccgttggggcctgcatcgccgccgctgtccgtatacggtagagggcggcgccaccaggtctgctagcaagtgaaggagatgatactgtggcagtcggatcaataatgggcggcccagattaaaaacccgtgtacctctctgtttcatttaagggcttgttcggttaactctcaattcatgtggattgagtgggattgggtgggtttaaaccccaagcaagtcaaatttcttcacaatttttttcaatctcatccaatccatatgtaacgggattaaccgaacaagatctaatatggctgttggatat

SEQ ID NO: 43283 - DNA, 1621 bp, Zea Mays
ctagggttttgcttcgagaccgctcccaccgctcatataagctcatataacaacatccgtcgccgccgtttccatcccattttctctcctctctccgtcgccgcctcgggccaaaccctacgcagggagttgattgatcgattgcagccatgagtaagttgcattccgagcttctcaaggattgcatctcccagatagttcaggatgccaagaagaataggaagttcactgagactgttgagcttcagattagtctgaagaattatgatccacaaaaggacaagcgtttcagtggctctgttaagttgcctcacatccctcgtccaaagatgaaggtgtgcatgcttggtgatgcccagcacgttgaggaggtaaacaggcagttgatgatgcacttgaaaatgtacttatttatatgttgaacatgcttgcagtagtaaatctgcaaaaacaccaatgcttcgagttactcaactgtggctggcatgtattagtcagtccaagcccgcacttgattccatttgcaattaaatctgcttatacaaatcctgctcaactgcatggaagattgaaagttttgctaagataatgcaagtgcccttcctatctggatcaacttttctccacacaaaccattttactgcattctcaggctgagaagatgggacttgactacatggatgttgaggccctcaagaaaatgaacaagaacaagaagcttgttaagaagcttgccaagaagtaccatgcttttttggcatcagagaccatcatcaagcaaattccccgtctccttggtcctggtctcaacaaggcaggcaagttccccactctggtcactcaccaggaatccctggaatccaaggtgaatgagacgaaggctacagtcaagtttcaactgaagaaagtcctttgcatgggtgtcgcggtcggtaacctgtctatggaggagaagcagatccaacagaacatccagatgagcatcaacttcctcgtgtctcttctgaagaagaactggcagaatgtaagatgtctctacatcaagagcaccatggggaaaccattcaggattttctaagtctgtttttttgtgaagtctgctctttatgatatttggtttttgaaccgaggttgtcttgaactaaaactcttgttagatcatgtttggttggtaggatatttgagtctgggcaggtgtcttactcttgcgccatgtctttgtaatctctctatataagttttttgagaggctcagtataatatgcgtattatacgttatacccaatcgtttctgttactgtggaaaatgagtttccgccattgctgctgcgcccttgggtagcgcccctctacttacgggatagagccttgtaggaagtttttggtcactaatctggctgctattactagacattttgtgtaaagcgcaggcctagtgtcttaggttcttacgtgagttgggttaggagaagggattaacctggtgcttttgagtccaggtgctaggatttgaagggtcagtgaggtttggatagcctagtgtctgatggctatacatactatatttataaaaatattgtgtgatgactatacaaagtatctctataaaaatattaaaaaa

SEQ ID NO: 43284 - DNA, 436 bp, Zea Mays
atgacggcgatgacgcagagtgcggagacacgctacaaggatttgaagctgttggccacgacgaagttaaagccggacgaggagccgatggcgttgcggcctgaaggtgaggccgagggcgagtggccgggccaccagcaagctacgcgagctgaggggcgcggcgaccaagagattgaaggcgaggaaggagcgagctggagcactggcagctcggcggaggtggactcgcagccatgaatggagcagcagcatggtccgagtgaagaaaagaatctagatgtcagctgcttgaaggagctggggatgacatcgagcaaagggtggagtgcgctggaatgagctggagagggatgtcgtgttggagagatgaacgagctctgtacacggataagaccaagtacagctatgggagatggaactcctgggattagag

SEQ ID NO: 43285 - DNA, 632 bp, Zea Mays
ctatcatccttagttacaatatatcatcggaagtctaataaagttagactcaccattattgaaagccgaagtcttaaaatcagcatatgaacaatctaattagccttttaaatcgcatttctcaattatcttgaattccacacaaattaaataggtcgtgccattcactattaattactcgaggtaatttacacatccctcatgacatcgaactaaacaccaaacctagaataaactaactaattaagcagggcatcgactacatcaattaaccaaatcgacgtaataacactagaaaatctatcaactagccgatagaaatactaaacctatcttttacgtcatcaactcgcctaaacatcccatatatgtctatcaatacaaccacatttgacatctacacataaccatgatatttaatctactactacatataggataaaaagacaactaagacaggctatcgacttcactatataaatacaattagtacaatcaacaatatcgggacttaacagctaatcgcttcgaatactaaaactatacttcacgatattaattaaactacacaccgtatatatgaagcagtttaaccaatatctaacaccgccacaatgggtatatggcaaaca

SEQ ID NO: 43286 - DNA, 1314 bp, Zea Mays
ggaaaaattaagagagggaagaagaagccaaatatgcagcggttccagtgcaggctgtgcagcctccctgagctgtgccaggaatcgcattccccctgtaatccactataaataggtctcaatcatccctcactagtcactcactctattcccattccaagcccccgctctcggattcccgacgacgagctcagagctcctcctctcctcccctgctcggtgttcgacgcaacagctgccgccatgtctgccgccaaccagctcgccgccctcgtcagcaacatgtacgccacgggtttgcttgacgatcagttccagcagctccagatgctccagaacgccagtactcctgacttcgtctccgaggtcgtcacgctcttctgccaggacggcgagcggatcatcggagagctggccaaactgctggagaagcccaacgtggattttgacagggttgacgcctttgtgcatcagctcaaaggaagcagtgcaagtattggtgctcagaaggttaagaacacttgcattcagttccgcgaatcctgtcagcagaagagcaaagatgggtgcctcaagacactggagacagtgaagattaacttctatgacctgcgtgacaagtttcagaccatgcttcagctgcagcgtcaggtcaatggctgtccccccagcaagtgaacaagatggtggagtggagcttcatgttgggatgatgcgtgcatctttcaagttccagaacattctgaataagctcctcaattggcttctaggaagtctgtaatagcttagcagcaagattagcgttgacaccaccgtagcagaagtcaatgtcgtcgtttttgtgtcaccgtcttagtcatttttcaggttggtggcgacgtcaggggagggcagccagccacagatagcaatgagacatgttgctgtagcgtcagattcagggcttttgccccaagaaataactcagttactcagagtggtggaattgatggagttggatgttgggatgatgcatacaatacatctttcagaatcaagggacgtgttcaatgagctcctcacttggcttctaggcttcaaccatctaggaagtctgtaacagcctagcagcaagattagctgttgacgcttttgtgtcactgtaatagtctgtcttaaatttataaggggtggagaagcaaagcatgttatggttaataatacctaaggtagtgtttgttcgaaagtatgatggaacggagccggtccactcttaatttgttgttgtttggattcttaatttgttgttgtttggattggttacatatacgagag

SEQ ID NO: 43287 - DNA, 1428 bp, Zea Mays
gtaagccctgaatgcagatgcacagcgacgctgcaagactgccaggcttccacacgtgtgtgggcagcggtggagagagactacttcctgaatggtactctgagaaaggcattgaactgatcctgagtactgagattgtgaaggccgaccttgcttcaaagactctgaccagtgcagctgcggaaaccttcacatatgagaccttgctcattgctacgggctcctcggtcataaagctcactgattttggtgttcaaggagcagaatccaacaacatattgtatctaagggacattgcggatgccgacaagttggttgcagctatgcaggcaaagaagggtggaaaggctgtgattgttggaggtggttacatagggcttgagcttagcgctgccttgaaaatcaacaacttcgatgtgaccatggtgtaccctgaaccgtggtgcatgccccgtctcttcactgctggtattgctcatttctatgagggctactatgctaacaaaggaatcaaggttgtaaagggcacggttgctgttggtttcgacgctgatgccaacggagatgtcactacagtgaagttgaagaatggaagtgttctcgaagctgatattgttattgttggcgtcggcggcaggccattgacgcgtctcttcataggccaagctgctgacgagaaaggtggactcaagaccgatgcattcttcgaaacaagtgtagccggggtatacgcgatcggcgacgtggccaccttccctctgaagctctacaacgagcagaggagagttgagcacgtggaccacgcccggaagtccgccgagcaggccgtgagggcaatcaaggccaaggagtccggcgaatcggtggccgaatacgactacctgccctacttctactcccggtcgttcgacttggcgtggcagttctacggcgacaacgtcggcgacgacgtgctgttcggcgacaacgacccggcctcggccaagcccaagttcggcagctactgggtgaaggacggcaaggtcgtcggcgtgtttctcgagggcgggtcggccgaggagaaccaggccatcgccagggtcgccagggcgcagccgccggtggccgacgtccaggcgctgaagcaggaggggatcgatttcgcttccaaaatctgagctcttggaaaggtgtaaaaaaaagaaacattggtaccagttttagctgatttctttggcaattctactttgagccttttcagaccacttgggtgctttgttacacagtagttcagattagttgttagcccctccctaataatttggccttcgatgtgatgttgaaagaaccaccgtgggatgacgatcctattaataatgcatgtgatttgtagcgtctgttcatagtctacctatcgcaatgcgattttttttctttttagaatatttc

SEQ ID NO: 43288 - DNA, 1939 bp, Zea Mays
gcaaagccgccgcccgccgggatggtgtcgtggaggtggttaggtaggccgtgtctgctcgtgcttgctgccgcggagcgtccgctggctagctggatgacggattacacgcaacgcgacgtcgtttggccggggaccgcgcaacgtggaaacagggcgaggcaggacgcctcacgcccgcattagcacgaaacgactagcgggaccaatcggggaagggagtgcgcggaaggccggccctgccttctttttttcccccgcgaagcagggcgaggcaggcagcgtgtataaactgagcgaacgtgagcggtcttcgccttgtcctccgactcttccattccattctattcccgcttccacacgtcggtcggcgcccttcgcgatcgtgtcgtttcttcccgcagcctgcctgcgtgtggggtgatggctaggcacttcaagtacgtcatcctcggcggcggtctcgccatcatctccaaggaaccagtggccccttatgagcgccctgcactcagcaagggatacctcttccctcagaacgctgcaagactgccaggcttccacacgtgtgtgggcagcggtggagagagactacttcctgaatggtactctgagaaaggcattgaactgatcctgagtactgagattgtgaaggccgaccttgcttcaaagactctgaccagtgcagctgcggaaaccttcacatatgagaccttgctcattgctacgggctcctcggtcataaagctcactgattttggtgttcaaggagcagaatccaacaacatattgtatctaagggacattgcggatgccgacaagttggttgcagctatgcaggcaaagaagggtggaaaggctgtgattgttggaggtggttacatagggcttgagcttagcgctgccttgaaaatcaacaacttcgatgtgaccatggtgtaccctgaaccgtggtgcatgccccgtctcttcactgctggtattgctcatttctatgagggctactatgctaacaaaggaatcaaggttgtaaagggcacggttgctgttggtttcgacgctgatgccaacggagatgtcactacagtgaagttgaagaatggaagtgttctcgaagctgatattgttattgttggcgtcggcggcaggccattgacgcgtctcttcataggccaagctgctgacgagaaaggtggactcaagaccgatgcattcttcgaaacaagtgtagccggggtatacgcgatcggcgacgtggccaccttccctctgaagctctacaacgagcagaggagagttgagcacgtggaccacgcccggaagtccgccgagcaggccgtgagggcaatcaaggccaaggagtccggcgaatcggtggccgaatacgactacctgccctacttctactcccggtcgttcgacttggcgtggcagttctacggcgacaacgtcggcgacgacgtgctgttcggcgacaacgacccggcctcggccaagcccaagttcggcagctactgggtgaaggacggcaaggtcgtcggcgtgtttctcgagggcgggtcggccgaggagaaccaggccatcgccagggtcgccagggcgcagccgccggtggccgacgtccaggcgctgaagcaggaggggatcgatttcgcttccaaaatctgagctcttggaaaggtgtaaaaaaaagaaacattggtaccagttttagctgatttctttggcaattctactttgagccttttcagaccacttgggtgctttgttacacagtagttcagattagttgttagcccctccctaataatttggccttcgatgtgatgttgaaagaaccaccgtgggatgacgatcctattaataatgcatgtgatttgtagcgtctgttcatagtctacctatcgcaatgcgattttttttctttttagaatatttc

SEQ ID NO: 43289 - DNA, 2841 bp, Zea Mays
attgtctttgtgaataatctaaactatcaaacaactatatatggattataatatatttagattataatctagattatataatctataagctgaaacaaacggacctaaggctatacagctgagagatcgatggggggaggcggggacgcgcagcctttttgccctgccttcgcgagtcgcgccaaccccccccctccccccccccccccccaaaaaaaaacccccagaaccctagcagaggtctcgagcacgagcccgcgatggcgtcggacagcgaggcggcagcgcattctacctttaacgagcacgacagtggaggacggtggtgcgcacgagagcaagcaggaacacctcaatggcgcggtggggcacccccacggttgggcaggaggaagagataatcgggccgggcccagcgccggcgaagcagcggcggaagcgccctctccagttcgagcaggcgttcctcgacgccctcccctccgccgccatgtacgagaagagctatatgcatcgggatgtcgtcacgcacgtcgctgtatctcctgctgacttcttcatcactgggagcgcagatgggcatctgaagttttggaagaagaaacctgttggggttgaatttgctaaacattttcggtctcatctcagtcccatcgaaggtctagctgtgagtgttgatggattgctttgctgcacgatatcaaacgatcggtctgtgaagatatatgatgttgtaaactatgacatgatgttcatgatacgtctctcatttgttcctggggctattgagtgggttcatcgagaaggagatgttaaaccaaaacttgccgttagtgaccgaaatacacctttcgttcacatatttgatacccattctggttcaaatgacccaatcatgtccaaagagattcatggtggccctgtcaaagttatgaaatataaccacattcatgatgttgttatatctgctgatgccaaaggactgttggaatattggtctccatctaccctcatgtttccagaaaatgaggtgaggtttcgcctgaaatcagatacaaatctatttgaaattgcgaaatgcaagactactgtgtctgctattgaggtaagcaatgatggcactcaatttgctgtcacatcccctgatcgcaggatacgtgtattttggttcaaaactggaaaattaagacgtgtatatgacgagtccctagatgtggcgcaagatcttcaaagaagtgatgttccattgtatcaccttgatgctattgattttggacgacgaatggctgtggagaaggaaatagagaaaacagaaaatgttccacaacctaatgctgtctttgatgagagttgcaattttcttatttatgctacccttttgggtgtaaagattgtgaatttgcacacaaataaggtttcccgtatcctggggaaggtagagaacaatgagaggtttctgagaattgcactataccaaggagacaaaggcaacaagaaggttagaaaaattccttcagtagctgccaatgtcaatgatagcaaggaaccattatcagacccaacgctgctgtgttgtgctttcaagaagcatcggatatatctctttagtcgtagggaaccagaagagcctgaagatgcaactaagggtagagatgttttcaatgaaaaaccaccgccagaagagcttttgtctgcatcagacctaggaaaaactgctacaacatcattgcctgataatttggtgctacatacttctatgggtgacattcacttgagactatatccagaagagtgtccaaaaactgttgaaaacttcactacccattgtcggaatggttattatgacaatcttatatttcatcgtgtgattaaaggattcatgattcagactggagatcctttgggggatggtactggtggacaatcaatctggggcacagaatttgaagatgaatttcacaagagcttgaggcatgataggccttttacactttccatggccaatgcgggacctaacaccaatggttctcaattcttcttcaccactgtagcaactccatggctagataacaaacacacagtgtttggtagagttgtgaaagggatggatgttgtccagcaaattgagaaggtcaagactgacaagaatgacaaaccatatcaagatgtaaaaatcttgaatgttacagttcccaagacataagcgcgtgatcagttgggttcggaaattgtgcctgcactccttggttggacatattgctaaacctgtagaagctggagtcttacgagatcagctgtaatgctatgggtgaattgagcacaccttgggctgctcttgacgtcggggtattggaaccttgcaattttcaggatcgatgaatcctggggccaccgggcctgcggcgtagacactcactggttttgggcgctgacctggccttcccccaatttctgcgtcagcaaatgtacggcctgggaagaatctttgatgggtcgtcgctgtctgcagggtgcagctggcagaatggcctttgattacactacactaagaaatttctacttggggatgtggatctcatcacttcgataacttatctgaagtactacgtcgtttcgccaagtaactgcgtgtacgtcacttagcacattcatgtacaccgtattatatatccatgtaccctgaaagaatggtttgataaaaaggaagaagacaacggagatgaaaaaaaagtaaactaagagtctttgccatcacttcgctgtcatctcattcattagtgtcacgttaacttttctttgacggactcatttaaaacaaaacatgacccaattaaaacaaag

SEQ ID NO: 43290 - DNA, 2669 bp, Zea Mays
attgtctttgtgaataatctaaactatcaaacaactatatatggattataatatatttagattataatctagattatataatctataagctgaaacaaacggacctaaggctatacagctgagagatcgatggggggaggcggggacgcgcagcctttttgccctgccttcgcgagtcgcgccaaccccccccctccccccccccccccccaaaaaaaaacccccagaaccctagcagaggtctcgagcacgagcccgcgatggcgtcggacagcgaggcggcagcgcattctacctttaacgagcacgacagtggaggacggtggtgcgcacgagagcaagcaggaacacctcaatggcgcggtggggcacccccacggttgggcaggaggaagagataatcgggccgggcccagcgccggcgaagcagcggcggaagcgccctctccagttcgagcaggcgttcctcgacgccctcccctccgccgccatgtacgagaagagctatatgcatcgggatgtcgtcacgcacgtcgctgtatctcctgctgacttcttcatcactgggagcgcagatgggcatctgaagttttggaagaagaaacctgttggggttgaatttgctaaacattttcggtctcatctcagtcccatcgaaggtctagctgtgagtgttgatggattgctttgctgcacgatatcaaacgatcggtctgtgaagatatatgatgttgtaaactatgacatgatgttcatgatacgtctctcatttgttcctggggctattgagtgggttcatcgagaaggagatgttaaaccaaaacttgccgttagtgaccgaaatacacctttcgttcacatatttgatacccattctggttcaaatgacccaatcatgtccaaagagattcatggtggccctgtcaaagttatgaaatataaccacattcatgatgttgttatatctgctgatgccaaaggactgttggaatattggtctccatctaccctcatgtttccagaaaatgaggtgaggtttcgcctgaaatcagatacaaatctatttgaaattgcgaaatgcaagactactgtgtctgctattgaggtaagcaatgatggcactcaatttgctgtcacatcccctgatcgcaggatacgtgtattttggttcaaaactggaaaattaagacgtgtatatgacgagtccctagatgtggcgcaagatcttcaaagaagtgatgttccattgtatcaccttgatgctattgattttggacgacgaatggctgtggagaaggaaatagagaaaacagaaaatgttccacaacctaatgctgtctttgatgagagttgcaattttcttatttatgctacccttttgggtgtaaagattgtgaatttgcacacaaataaggtttcccgtatcctggggaaggtagagaacaatgagaggtttctgagaattgcactataccaaggagacaaaggcaacaagaaggttagaaaaattccttcagtagctgccaatgtcaatgatagcaaggaaccattatcagacccaacgctgctgtgttgtgctttcaagaagcatcggatatatctctttagtcgtagggaaccagaagagcctgaagatgcaactaagggtagagatgttttcaatgaaaaaccaccgccagaagagcttttgtctgcatcagacctaggaaaaactgctacaacatcattgcctgataatttggtgctacatacttctatgggtgacattcacttgagactatatccagaagagtgtccaaaaactgttgaaaacttcactacccattgtcggaatggttattatgacaatcttatatttcatcgtgtgattaaaggattcatgattcagactggagatcctttgggggatggtactggtggacaatcaatctggggcacagaatttgaagatgaatttcacaagagcttgaggcatgataggccttttacactttccatggccaatgcgggacctaacaccaatggttctcaattcttcttcaccactgtagcaactccatggctagataacaaacacacagtgtttggtagagttgtgaaagggatggatgttgtccagcaaattgagaaggtcaagactgacaagaatgacaaaccatatcaagatgtaaaaatcttgaatgttacagttcccaagacataagcgcgtgatcagttgggttcggaaattgtgcctgcactccttggttggacatattgctaaacctgtagaagctggagtcttacgagatcagctgtaatgctatgggtgaattgagcacaccttgggctgctcttgacgtcggggtattggaaccttgcaattttcaggatcgatgaaatttctacttggggatgtggatctcatcacttcgataacttatctgaagtactacgtcgtttcgccaagtaactgcgtgtacgtcacttagcacattcatgtacaccgtattatatatccatgtaccctgaaagaatggtttgataaaaaggaagaagacaacggagatgaaaaaaaagtaaactaagagtctttgccatcacttcgctgtcatctcattcattagtgtcacgttaacttttctttgacggactcatttaaaacaaaacatgacccaattaaaacaaag

SEQ ID NO: 43291 - DNA, 2941 bp, Zea Mays
attgtctttgtgaataatctaaactatcaaacaactatatatggattataatatatttagattataatctagattatataatctataagctgaaacaaacggacctaaggctatacagctgagagatcgatggggggaggcggggacgcgcagcctttttgccctgccttcgcgagtcgcgccaaccccccccctccccccccccccccccaaaaaaaaacccccagaaccctagcagaggtctcgagcacgagcccgcgatggcgtcggacagcgaggcggcagcgcattctacctttaacgagcacgacagtggaggacggtggtgcgcacgagagcaagcaggaacacctcaatggcgcggtggggcacccccacggttgggcaggaggaagagataatcgggccgggcccagcgccggcgaagcagcggcggaagcgccctctccagttcgagcaggcgttcctcgacgccctcccctccgccgccatgtacgagaagagctatatgcatcgggatgtcgtcacgcacgtcgctgtatctcctgctgacttcttcatcactgggagcgcagatgggcatctgaagttttggaagaagaaacctgttggggttgaatttgctaaacattttcggtctcatctcagtcccatcgaaggtgagtgttgatggattgctttgctgcacgatatcaaacgatcggtctgtgaagatatatgatgttgtaaactatgacatgatgttcatgatacgtctctcatttgttcctggggctattgagtgggttcatcgagaaggagatgttaaaccaaaacttgccgttagtgaccgaaatacacctttcgttcacatatttgatacccattctggttcaaatgacccaatcatgtccaaagagattcatggtggccctgtcaaagttatgaaatataaccacattcatgatgttgttatatctgctgatgccaaaggactgttggaatattggtctccatctaccctcatgtttccagaaaatgaggtgaggtttcgcctgaaatcagatacaaatctatttgaaattgcgaaatgcaagactactgtgtctgctattgaggtaagcaatgatggcactcaatttgctgtcacatcccctgatcgcaggatacgtgtattttggttcaaaactggaaaattaagacgtgtatatgacgagtccctagatgtggcgcaagatcttcaaagaagtgatgttccattgtatcaccttgatgctattgattttggacgacgaatggctgtggagaaggaaatagagaaaacagaaaatgttccacaacctaatgctgtctttgatgagagttgcaattttcttatttatgctacccttttgggtgtaaagattgtgaatttgcacacaaataaggtttcccgtatcctggggaaggtagagaacaatgagaggtttctgagaattgcactataccaaggagacaaaggcaacaagaaggttagaaaaattccttcagtagctgccaatgtcaatgatagcaaggaaccattatcagacccaacgctgctgtgttgtgctttcaagaagcatcggatatatctctttagtcgtagggaaccagaagagcctgaagatgcaactaagggtagagatgttttcaatgaaaaaccaccgccagaagagcttttgtctgcatcagacctaggaaaaactgctacaacatcattgcctgataatttggtgctacatacttctatgggtgacattcacttgagactatatccagaagagtgtccaaaaactgttgaaaacttcactacccattgtcggaatggttattatgacaatcttatatttcatcgtgtgattaaaggattcatgattcagactggagatcctttgggggatggtactggtggacaatcaatctggggcacagaatttgaagatgaatttcacaagagcttgaggcatgataggccttttacactttccatggccaatgcgggacctaacaccaatggttctcaattcttcttcaccactgtagcaactccatggctagataacaaacacacagtgtttggtagagttgtgaaagggatggatgttgtccagcaaattgagaaggtcaagactgacaagaatgacaaaccatatcaagatgtaaaaatcttgaatgttacagttcccaagacataagcgcgtgatcagttgggttcggaaattgtgcctgcactccttggttggacatattgctaaacctgtagaagctggagtcttacgagatcagctgtaatgctatgggtgaattgagcacaccttgggctgctcttgacgtcggggtattggaaccttgcaattttcaggatcgatggtaccacaggaattttaggtttacttgctttgattgcagaattatagggcagaaggttgtagttttgtaacgttgagttaattttaagtttagctgctttgattctagaatcctggggccaccgggcctgcggcgtagacactcactggttttgggcgctgacctggccttcccccaatttctgcgtcagcaaatgtacggcctgggaagaatctttgatgggtcgtcgctgtctgcagggtgcagctggcagaatggcctttgattacactacactaagaaatttctacttggggatgtggatctcatcacttcgataacttatctgaagtactacgtcgtttcgccaagtaactgcgtgtacgtcacttagcacattcatgtacaccgtattatatatccatgtaccctgaaagaatggtttgataaaaaggaagaagacaacggagatgaaaaaaaagtaaactaagagtctttgccatcacttcgctgtcatctcattcattagtgtcacgttaacttttctttgacggactcatttaaaacaaaacatgacccaattaaaacaaag

SEQ ID NO: 43292 - DNA, 2595 bp, Zea Mays
attgtctttgtgaataatctaaactatcaaacaactatatatggattataatatatttagattataatctagattatataatctataagctgaaacaaacggacctaaggctatacagctgagagatcgatggggggaggcggggacgcgcagcctttttgccctgccttcgcgagtcgcgccaaccccccccctccccccccccccccccaaaaaaaaacccccagaaccctagcagaggtctcgagcacgagcccgcgatggcgtcggacagcgaggcggcagcgcattctacctttaacgagcacgacagtggaggacggtggtgcgcacgagagcaagcaggaacacctcaatggcgcggtggggcacccccacggttgggcaggaggaagagataatcgggccgggcccagcgccggcgaagcagcggcggaagcgccctctccagttcgagcaggcgttcctcgacgccctcccctccgccgccatgtacgagaagagctatatgcatcgggatgtcgtcacgcacgtcgctgtatctcctgctgacttcttcatcactgggagcgcagatgggcatctgaagttttggaagaagaaacctgttggggttgaatttgctaaacattttcggtctcatctcagtcccatcgaaggtctagctgtgagtgttgatggattgctttgctgcacgatatcaaacgatcggtctgtgaagatatatgatgttgtaaactatgacatgatgttcatgatacgtctctcatttgttcctggggctattgagtgggttcatcgagaaggagatgttaaaccaaaacttgccgttagtgaccgaaatacacctttcgttcacatatttgatacccattctggttcaaatgacccaatcatgtccaaagagattcatggtggccctgtcaaagttatgaaatataaccacattcatgatgttgttatatctgctgatgccaaaggactgttggaatattggtctccatctaccctcatgtttccagaaaatgaggtgaggtttcgcctgaaatcagatacaaatctatttgaaattgcgaaatgcaagactactgtgtctgctattgaggtaagcaatgatggcactcaatttgctgtcacatcccctgatcgcaggatacgtgtattttggttcaaaactggaaaattaagacgtgtatatgacgagtccctagatgtggcgcaagatcttcaaagaagtgatgttccattgtatcaccttgatgctattgattttggacgacgaatggctgtggagaaggaaatagagaaaacagaaaatgttccacaacctaatgctgtctttgatgagagttgcaattttcttatttatgctacccttttgggtgtaaagattgtgaatttgcacacaaataaggtttcccgtatcctggggaaggtagagaacaatgagaggtttctgagaattgcactataccaaggagacaaaggcaacaagaaggttagaaaaattccttcagtagctgccaatgtcaatgatagcaaggaaccattatcagacccaacgctgctgtgttgtgctttcaagaagcatcggatatatctctttagtcgtagggaaccagaagagcctgaagatgcaactaagggtagagatgttttcaatgaaaaaccaccgccagaagagcttttgtctgcatcagacctaggaaaaactgctacaacatcattgcctgataatttggtgctacatacttctatgggtgacattcacttgagactatatccagaagagtgtccaaaaactgttgaaaacttcactacccattgtcggaatggttattatgacaatcttatatttcatcgtgtgattaaaggattcatgattcagactggagatcctttgggggatggtactggtggacaatcaatctggggcacagaatttgaagatgaatttcacaagagcttgaggcatgataggccttttacactttccatggccaatgcgggacctaacaccaatggttctcaattcttcttcaccactgtagcaactccatggctagataacaaacacacagtgtttggtagagttgtgaaagggatggatgttgtccagcaaattgagaaggtcaagactgacaagaatgacaaaccatatcaagatgtaaaaatcttgaatgttacagttcccaagacataagcgcgtgatcagttgggttcggaaattgtgcctgcactccttggttggacatattgctaaacctgtagaagctggagtcttacgagatcagctgtaatgctatgggtgaattgagcacaccttgggctgctcttgacgtcgggggtgcagctggcagaatggcctttgattacactacactaaggtcttgttcagttattttaatttcatgtgaattgaagtgtattaaaatggattgggataaattttgacttgttatgtatttaaaacaacataatatcacttaatccacatggattaatgatgaaaccaacaatccataatgtgagccgtgtgtaccgtgtatcacgatgcaaaccttgactatggagaaggaatgcatcgctcggtgg

SEQ ID NO: 43293 - DNA, 2758 bp, Zea Mays
attgtctttgtgaataatctaaactatcaaacaactatatatggattataatatatttagattataatctagattatataatctataagctgaaacaaacggacctaaggctatacagctgagagatcgatggggggaggcggggacgcgcagcctttttgccctgccttcgcgagtcgcgccaaccccccccctccccccccccccccccaaaaaaaaacccccagaaccctagcagaggtctcgagcacgagcccgcgatggcgtcggacagcgaggcggcagcgcattctacctttaacgagcacgacagtggaggacggtggtgcgcacgagagcaagcaggaacacctcaatggcgcggtggggcacccccacggttgggcaggaggaagagataatcgggccgggcccagcgccggcgaagcagcggcggaagcgccctctccagttcgagcaggcgttcctcgacgccctcccctccgccgccatgtacgagaagagctatatgcatcgggatgtcgtcacgcacgtcgctgtatctcctgctgacttcttcatcactgggagcgcagatgggcatctgaagttttggaagaagaaacctgttggggttgaatttgctaaacattttcggtctcatctcagtcccatcgaaggtctagctgtgagtgttgatggattgctttgctgcacgatatcaaacgatcggtctgtgaagatatatgatgttgtaaactatgacatgatgttcatgatacgtctctcatttgttcctggggctattgagtgggttcatcgagaaggagatgttaaaccaaaacttgccgttagtgaccgaaatacacctttcgttcacatatttgatacccattctggttcaaatgacccaatcatgtccaaagagattcatggtggccctgtcaaagttatgaaatataaccacattcatgatgttgttatatctgctgatgccaaaggactgttggaatattggtctccatctaccctcatgtttccagaaaatgaggtgaggtttcgcctgaaatcagatacaaatctatttgaaattgcgaaatgcaagactactgtgtctgctattgaggtaagcaatgatggcactcaatttgctgtcacatcccctgatcgcaggatacgtgtattttggttcaaaactggaaaattaagacgtgtatatgacgagtccctagatgtggcgcaagatcttcaaagaagtgatgttccattgtatcaccttgatgctattgattttggacgacgaatggctgtggagaaggaaatagagaaaacagaaaatgttccacaacctaatgctgtctttgatgagagttgcaattttcttatttatgctacccttttgggtgtaaagattgtgaatttgcacacaaataaggtttcccgtatcctggggaaggtagagaacaatgagaggtttctgagaattgcactataccaaggagacaaaggcaacaagaaggttagaaaaattccttcagtagctgccaatgtcaatgatagcaaggaaccattatcagacccaacgctgctgtgttgtgctttcaagaagcatcggatatatctctttagtcgtagggaaccagaagagcctgaagatgcaactaagggtagagatgttttcaatgaaaaaccaccgccagaagagcttttgtctgcatcagacctaggaaaaactgctacaacatcattgcctgataatttggtgctacatacttctatgggtgacattcacttgagactatatccagaagagtgtccaaaaactgttgaaaacttcactacccattgtcggaatggttattatgacaatcttatatttcatcgtgtgattaaaggattcatgattcagactggagatcctttgggggatggtactggtggacaatcaatctggggcacagaatttgaagatgaatttcacaagagcttgaggcatgataggccttttacactttccatggccaatgcgggacctaacaccaatggttctcaattcttcttcaccactgtagcaactccatggctagataacaaacacacagtgtttggtagagttgtgaaagggatggatgttgtccagcaaattgagaaggtcaagactgacaagaatgacaaaccatatcaagatgtaaaaatcttgaatgttacagttcccaagacataagcgcgtgatcagttgggttcggaaattgtgcctgcactccttggttggacatattgctaaacctgtagaagctggagtcttacgagatcagctgtaatgctatgggtgaattgagcacaccttgggctgctcttgacgtcggggtattggaaccttgcaattttcaggatcgatgaatcctggggccaccgggcctgcggcgtagacactcactggttttgggcgctgacctggccttcccccaatttctgcgtcagcaaatgtacggcctgggaagaatctttgatgggtcgtcgctgtctgcagggtgcagctggcagaatggcctttgattacactacactaaggtcttgttcagttattttaatttcatgtgaattgaagtgtattaaaatggattgggataaattttgacttgttatgtatttaaaacaacataatatcacttaatccacatggattaatgatgaaaccaacaatccataatgtgagccgtgtgtaccgtgtatcacgatgcaaaccttgactatggagaaggaatgcatcgctcggtgg

SEQ ID NO: 43294 - DNA, 1254 bp, Zea Mays
cactggagtgcttgatggctgccgcaaggggcattaaccagcttctgaagagaattctccacaaccagtccgctggtccatggctgctttcttcatttcggggaaatcatgaagagtcctctgctggattgagagcattggcgcttcttggagttggtgcctccggtcttttgagttttgctacaatagcatctgctgatgaagctgagcatggtttggcagccccagattatccgtggccacatgctggcatcatgagctcttatgatcatgcatcaattcgccgagggcatcaagtttacacacaagtttgtgcttcttgtcactccatgtccttgatttcataccgtgatttggttggggtggcctatactgaggaggaaacaaaggcaatggctgctgagattgaggtcgttgatggtcctaatgatgagggtgaaatgttcacccgccctggtaaactcagcgatcgctttccacagccttatgcaaatgagcaagcagcccgatttgctaatggtggcgcctacccgccggaccttagtcttatcacaaaggcaaggcacaatggtcagaactatgttttcgctcttcttactggataccgtgatccacctgctggtgttcagattcgtgagggtctgcactacaacccctacttccctggtggtgccatagccatgcccaagatgctcaatgatggagctgttgagtatgaggatggtactcctgcaactgaagcccagatgggtaaggatgttgtatcattcctttcatgggcagctgagcctgagatggaagagagaaagctgatgggagtgaaatggatctttctactatcactagcgcttcttcaagctgcatactaccgccgcatgaggtggtcagtcttgaagtcccgtaagctggtcctggatgttgtcaactgaggactaccattacccttttttatatttaaatatgagctgttaaggagtattcaaaataatgaatttgtgatgtacaattttgccactgggggctaggttccatgcctagagattattttgttttctttactctgctgagctgcaaaagcatttcaccaacgggtacatttcacgtttttttggtttgcaatgcctcgatgttatcagcaaccttgtaacttaacagctgatgagagttgataaattcttgtgctatgaaatacacctatcgtatgtcttggtctcgcttgcgggagtattgtgtttgctattcagttattcttgc

SEQ ID NO: 43295 - DNA, 1483 bp, Zea Mays
cccgtccggaaggcacggcgcgaggtgaccccacgtgtcagttgtcacgccccaaagaccggcaccccgccgggtccgaggtgcatcgcggcatcggcatcgccacaaagcccatctcacagccccgcagcctcttctcctcgtccatctcttccgcctccctccccgcgccgccgttcgccgaagccccgcgtcgcgtcgcgtaggtaacttctacgaacccctactcccattgagtgcttgatggctgccgcaaggggcattaaccagcttctgaagagaattctccacaaccagtccgctggtccatggctgctttcttcatttcggggaaatcatgaagagtcctctgctggattgagagcattggcgcttcttggagttggtgcctccggtcttttgagttttgctacaatagcatctgctgatgaagctgagcatggtttggcagccccagattatccgtggccacatgctggcatcatgagctcttatgatcatgcatcaattcgccgagggcatcaagtttacacacaagtttgtgcttcttgtcactccatgtccttgatttcataccgtgatttggttggggtggcctatactgaggaggaaacaaaggcaatggctgctgagattgaggtcgttgatggtcctaatgatgagggtgaaatgttcacccgccctggtaaactcagcgatcgctttccacagccttatgcaaatgagcaagcagcccgatttgctaatggtggcgcctacccgccggaccttagtcttatcacaaaggcaaggcacaatggtcagaactatgttttcgctcttcttactggataccgtgatccacctgctggtgttcagattcgtgagggtctgcactacaacccctacttccctggtggtgccatagccatgcccaagatgctcaatgatggagctgttgagtatgaggatggtactcctgcaactgaagcccagatgggtaaggatgttgtatcattcctttcatgggcagctgagcctgagatggaagagagaaagctgatgggagtgaaatggatctttctactatcactagcgcttcttcaagctgcatactaccgccgcatgaggtggtcagtcttgaagtcccgtaagctggtcctggatgttgtcaactgaggactaccattacccttttttatatttaaatatgagctgttaaggagtattcaaaataatgaatttgtgatgtacaattttgccactgggggctaggttccatgcctagagattattttgttttctttactctgctgagctgcaaaagcatttcaccaacgggtacatttcacgtttttttggtttgcaatgcctcgatgttatcagcaaccttgtaacttaacagctgatgagagttgataaattcttgtgctatgaaatacacctatcgtatgtcttggtctcgcttgcgggagtattgtgtttgctattcagttattcttgc

SEQ ID NO: 43296 - DNA, 722 bp, Zea Mays
cacagcgtttaggaaaggaggaaaattcgtcgtgtccctatctcctttgttgaaattggtcgtgcaccttggtctgccatccccttttggccgtatagcccaagcatagaagtctgactttgcctgaccttgccacaacatgccttgaccccatcggacctcgtcgtgccctctcgcacctgccccaccatagccaacactcttcgagataaacacacccaagtctttgtgtgttctgagttcctttatatgccgtgatgattatgagcccgcccgattgaactctaccgtagcagagcctcagaaacatcacgtcgccaccggtgaatgccgcttcggaccacctcctcgtcgaccggccaacccgaatgttctcctatcgagtgtgcacgagcgtcgtagctatggcacctgatctttgctttgggaaagaagggatgtagcagcacatccaccacacttttaaataaaggaaccactgcttaataatgatgttaaacaaggaggatcaagtctaggggattattacattctaatctttcatggtagttgaactgtttagtttggtgggctgagttgtctatcttttgtctggtcatgaatgttcatttctactgttgcatttcgtttatactatgtcaattatctgtcttttatatcctgtataaactttatgcttcccttgttatgctactttcaagggaggtgctgccggattttgc

SEQ ID NO: 43297 - DNA, 1038 bp, Zea Mays
gtaagctactacaaataatctaatcataaattagttatacataaaaaaatgtctcatcatttagtctttatttatataattattttctataattaaactatatttaaaactttttcttaatattaaaaaaacattcgatgtaagggcaggaccaattagaaagtacaaactcgcctataatatagacggaggagcaccaacggcattattggtttcgccaaaaacctcaccggctccattcgaccattccatcctttccttatcccctcccgcttcgtctcccttcctggcttcctttcttcgccatggcaaccatgtccctccgctgcctcgccatggccatggccgagttatctacaacagagaaactggccagagccgtgggtttggttttgttaccatgagcactgttgaggaagctgacaaagccattgagatgttcagccgctatgatattagcgggaggcttctgaatgtaaacagggcatcttctaggggcactcgcatggaaagacctcagagacaatttgcaccagctttcagagcttatgttggcaacttgccatggcaagttgatgactctaggctggtgcagttgttcagcgagcatggagaagttgttgatgctaaggttgtctacgacagagaaactgggcgctcacgaggattcggttttgtatcaatggtgtcaaaggaggaactcaatgatgctatttcggccctagatggacaggaattggacggccgccctcttcgagtgaatgttgcagcagagcggccacagaggggcttttgatgcggttgtatgagagagatgactgtttgtttgtaatgagcatggagacacagagacacaatggaggagcaatggtacaaattagcggaagcggatgctgtcacaagttgctagatctttctcccttagcttcctgacatttggttcttgccacagctttttgatgcttctcttggcagctggacttaatggtttgctattcttgtcgacatcacgagttgaattgtcaaactaaaaaacaa

SEQ ID NO: 43298 - DNA, 493 bp, Zea Mays
ctcattgttacgttgaattgcttcaaattttaattactttttaggggcaaagcatcaatctcaccaagattacatggaaaaggctaacaaggcgagatcagagaggctttcttctggacagtcatctgcactaaaagaatgaatgttgtattgcctattctggtccctgaccttcagagcttgtcatagatcatacactgtattgatttgcactcaacggatttgatctgttgttaaataagcaggttatctttctttctaatatcagttgtggaaacgaggtacgttccaagaattttgtctactggtgatctttttttgggtctaatgagcctattaccgtatcttcaagttgcaggtcactagacatgtatttgttctaaggaatctgtgtttaaggtcgacttggtcaaggatattatgaaatgcatgtttgcagcaaattggatgccatgagcatatctgggcaccttgttcgttaggatttaggaag

SEQ ID NO: 43299 - DNA, 1285 bp, Zea Mays
aaatcgtgagcacattattattttggaagcaccagcagaagtttatgctccgggtttaaaatattaatcttcggtatgcagctgccagtgaagtaaataaagcaatcaaaacatttgatgtcatggagaagtttaaaatcgagtcagatcaaagtgtattctactcccttcttcacgctctttgcaaaataaaaaacattgaggatgctgaggagttgctttttctgagaaagaaattcttcccacttactgcagaaggtttcaatataattctagatggttggtgtaatgtgatcaccgatgtggctgaagcaaagagagtttggagagaaatgtcaaatcactgcattactcccgatggcatgtcctatactctcatgatcagttgtttctcaaaagtaggaaacctttttgatactctaagggtttatgatgagatgaaaaagagaggttggattcctggtattgttgtttacaattcacttgtctatgttctgacaagagaaaattgtgtgaaggatgcacacaatatatttagcaaacttacagatgaaggcctccagccggatgttgaaacatataacaatatgatagttcctctctgtgaaagttgtaagcttgatgaagcgcgaaaggtaatggaaagcatgatacttagaggcattgttcctaccatttcgacttaccatgcatttttaaagcaagaaggcattgatgaatcactgaagctcttgcagaaaatgaaggaggatggttgtggccctaagagtgacacatttgtcatgcttattgataaatttttcttgctgaacgagtcggggaatgctctaagagtgtggaatgaaatgagaaaatatgagatcagccctgtccgtgcacactatatgacactggtccaaggtttagtgaaacatggatgtataccaagagctttagagtactatgacgaaatgaaggaaaaaggttttgcctctgatacacaacttgataaggaatttaaaacctttttgttgaaaaacagagaccactggagaggagcaggcaaatacaatatcattccccagcgtggcaaatattttacaaagcagtcaagaatgcaataacaaatgtggggttaataaatttgcttctagtgcctttgtgatatgaggacttcatttcaaaaaatttcaatatggaccacaatgaggggacaacaagacaaccttcagtcggaagcttctataagccaaagggagaaagggacatcttcgtcatcaggaattaatcatggtgtcgacacaca

SEQ ID NO: 43300 - DNA, 1219 bp, Zea Mays
aaacatgctttcagttgagacgtgcagtgattctaaaaaatcgtgagcacattattattttggaagcaccagcagaagtttatgctccgggtttaaaatattaatcttcggtatgcagctgccagtgaagtaaataaagcaatcaaaacatttgatgtcatggagaagtttaaaatcgagtcagatcaaagtgtattctactcccttcttcacgctctttgcaaaataaaaaacattgaggatgctgaggagttgctttttctgagaaagaaattcttcccacttactgcagaaggtttcaatataattctagatggttggtgtaatgtgatcaccgatgtggctgaagcaaagagagtttggagagaaatgtcaaatcactgcattactcccgatggcatgtcctatactctcatgatcagttgtttctcaaaagtaggaaacctttttgatactctaagggtttatgatgagatgaaaaagagaggttggattcctggtattgttgtttacaattcacttgtctatgttctgacaagagaaaattgtgtgaaggatgcacacaatatatttagcaaacttacagatgaaggcctccagccggatgttgaaacatataacaatatgatagttcctctctgtgaaagttgtaagcttgatgaagcgcgaaagaaaatgaaggaggatggttgtggccctaagagtgacacatttgtcatgcttattgataaatttttcttgctgaacgagtcggggaatgctctaagagtgtggaatgaaatgagaaaatatgagatcagccctgtccgtgcacactatatgacactggtccaaggtttagtgaaacatggatgtataccaagagctttagagtactatgacgaaatgaaggaaaaaggttttgcctctgatacacaacttgataaggaatttaaaacctttttgttgaaaaacagagaccactggagaggagcaggcaaatacaatatcattccccagcgtggcaaatattttacaaagcagtcaagaatgcaataacaaatgtggggttaataaatttgcttctagtgcctttgtgatatgaggacttcatttcaaaaaatttcaatatggaccacaatgagggacaacaagacaaccttcagtcggaagcttctataagccaaagggagaaagggacatcttcgtcatcaggaattaatcatggtgtcgacacaca

SEQ ID NO: 43301 - DNA, 1710 bp, Zea Mays
ggcttgttgagatcgacgcacctgtcccaagctccaaaatattcgcatctcctggcaatctgccatggcgccgccgctcgccgccgccctccgccctcacctctcccgcctcggccaaaccctctcgtctcgtcttcttcgcctctccacctcccattgtccctccgaccagagcgacttcgaaccagaccccgaccaccccatcctctctgcccctgacaatgacgacggtgagctcgcctccttcctccaccacctctccagcgcggcctccaatacctcatccccgaaggaggccctctccttcctcctttccatgtccacgggcccgttgccggcctcccacgctctcctagtccgcgcgctctgggatctgcgccgcgacccggacgctgccgcgttagcgctccggtacggagacgagtgcagcgccgtggatgggaccgatggggcgggtctaccgccgccgcctgaagcgtggcacctggccgtctgggccgcgggtaaggcgaggcggttcgacctcgcatgggagatcgtgcggcggatgcggaaccgcggtgtgctcacctgccgggtcatggttatcctgatggagaggtatgcagctgccagtgaagtaaataaagcaatcaaaacatttgatgtcatggagaagtttaaaatcgagtcagatcaaagtgtattctactcccttcttcacgctctttgcaaaataaaaaacattgaggatgctgaggagttgctttttctgagaaagaaattcttcccacttactgcagaaggtttcaatataattctagatggttggtgtaatgtgatcaccgatgtggctgaagcaaagagagtttggagagaaatgtcaaatcactgcattactcccgatggcatgtcctatactctcatgatcagttgtttctcaaaagtaggaaacctttttgatactctaagggtttatgatgagatgaaaaagagaggttggattcctggtattgttgtttacaattcacttgtctatgttctgacaagagaaaattgtgtgaaggatgcacacaatatatttagcaaacttacagatgaaggcctccagccggatgttgaaacatataacaatatgatagttcctctctgtgaaagttgtaagcttgatgaagcgcgaaagaaaatgaaggaggatggttgtggccctaagagtgacacatttgtcatgcttattgataaatttttcttgctgaacgagtcggggaatgctctaagagtgtggaatgaaatgagaaaatatgagatcagccctgtccgtgcacactatatgacactggtccaaggtttagtgaaacatggatgtataccaagagctttagagtactatgacgaaatgaaggaaaaaggttttgcctctgatacacaacttgataaggaatttaaaacctttttgttgaaaaacagagaccactggagaggagcaggcaaatacaatatcattccccagcgtggcaaatattttacaaagcagtcaagaatgcaataacaaatgtggggttaataaatttgcttctagtgcctttgtgatatgaggacttcatttcaaaaaatttcaatatggaccacaatgaggggacaacaagacaaccttcagtcggaagcttctataagccaaagggagaaagggacatcttcgtcatcaggaattaatcatggtgtcgacacaca

SEQ ID NO: 43302 - DNA, 1711 bp, Zea Mays
ctggcttgttgagatcgacgcacctgtcccaagctccaaaatattcgcatctcctggcaatctgccatggcgccgccgctcgccgccgccctccgccctcacctctcccgcctcggccaaaccctctcgtctcgtcttcttcgcctctccacctcccattgtccctccgaccagagcgacttcgaaccagaccccgaccaccccatcctctctgcccctgacaatgacgacggtgagctcgcctccttcctccaccacctctccagcgcggcctccaatacctcatccccgaaggaggccctctccttcctcctttccatgtccacgggcccgttgccggcctcccacgctctcctagtccgcgcgctctgggatctgcgccgcgacccggacgctgccgcgttagcgctccggtacggagacgagtgcagcgccgtggatgggaccgatggggcgggtctaccgccgccgcctgaagcgtggcacctggccgtctgggccgcgggtaaggcgaggcggttcgacctcgcatgggagatcgtgcggcggatgcggaaccgcggtgtgctcacctgccgggtcatggttatcctgatggagaggtatgcagctgccagtgaagtaaataaagcaatcaaaacatttgatgtcatggagaagtttaaaatcgagtcagatcaaagtgtattctactcccttcttcacgctctttgcaaaataaaaaacattgaggatgctgaggagttgctttttctgagaaagaaattcttcccacttactgcagaaggtttcaatataattctagatggttggtgtaatgtgatcaccgatgtggctgaagcaaagagagtttggagagaaatgtcaaatcactgcattactcccgatggcatgtcctatactctcatgatcagttgtttctcaaaagtaggaaacctttttgatactctaagggtttatgatgagatgaaaaagagaggttggattcctggtattgttgtttacaattcacttgtctatgttctgacaagagaaaattgtgtgaaggatgcacacaatatatttagcaaacttacagatgaaggcctccagccggatgttgaaacatataacaatatgatagttcctctctgtgaaagttgtaagcttgatgaagcgcgaaagaaaatgaaggaggatggttgtggccctaagagtgacacatttgtcatgcttattgataaatttttcttgctgaacgagtcggggaatgctctaagagtgtggaatgaaatgagaaaatatgagatcagccctgtccgtgcacactatatgacactggtccaaggtttagtgaaacatggatgtataccaagagctttagagtactatgacgaaatgaaggaaaaaggttttgcctctgatacacaacttgataaggaatttaaaacctttttgttgaaaaacagagaccactggagaggagcaggcaaatacaatatcattccccagcgtggcaaatattttacaaagcagtcaagaatgcaataacaaatgtggggttaataaatttgcttctagtgcctttgtgatatgaggacttcatttcaaaaaatttcaatatggaccacaatgagggacaacaagacaaccttcagtcggaagcttctataagccaaagggagaaagggacatcttcgtcatcaggaattaatcatggtgtcgacacaca

SEQ ID NO: 43303 - DNA, 402 bp, Zea Mays
tcccgcgacgggtccagggcccactcgcgcgtgacgctggtgccgtacttggatcccccgccgccggggaggtcctcggcgccctcgaagcacacgttgagggcgccgcccttgcggggcacgatgccgcagcggcggagcacgtcgcggaggcgcgcgccgcgccacacggacgtggacacgccggcggcgccccagttgaagcccaccgtctgctgcaccatgttctgctccttgcgccggttgcccgcgcacgccagcgtcacggggatctccacggcggggaagtcgcgcgccagctcctccatggtgagccgcgcgggccgcctcacgaggcccgtcacctccacggtccacgtcgcccagtccccccgcggcacggcgccgtggttgcgcacgtag

SEQ ID NO: 43304 - DNA, 3604 bp, Zea Mays
gaacacgacgaaagaattggccatgtcgtacttcatcttctccaagttgggcgagatggcgaactggatcatcggcggtggtccgcaggcaagggccagcgtgtcgtccccaccttccggaacgtgctcccgcaggacggcctccgtgacgaacccaacgctgtacttccacccctcctccgggcgctttacctggtcgatgacgtaccacaccttgagcctgtccgggtactcggccgcccaccggtcgagctcgtcgcggaggaggatgtcgtcctccgtccggttggcgtacacgaggtgcatctccgtgtggtcctccggctgctcgcgcagcaccgcctggatgatctggtacatgggcgtgatcccacttccgccgcagatcatggcgaggcggctcgcatggcgctgcttgccgttgatgacgaagctgccgcggccggtgtactccacgtggccaagcgggcccttgacgtcgatgtaggagccgacgggaagcgagtcgaggtactgggtcatgaggccgccgttggggaacttggggtgctcgttcttgaagtagaccttgacgaggaggtcgaagtggccgatctcgtccaccatgctcgtgggcgtgtacgcccgcatacacagcttcccttcaatactggcgcagacgaagatgtgcttgccgatggggaggccgagcacctggtcgggcgacggcagcgagaagcggaagaggcggacgtcgcgggacagctccttcttgccgacgaggcggcagtggatcttttcgcgcgggttggagagcgcgggagccctgacggcctcgcggatgggcgcgaggtgcgacaggacggagccgccgtggacggagttgtcggagctgtagccggtgcccgtggtgatgagctcgccgatgcggtaggtgtcgaggagcgccttggccttgtcggagtggatggcgtcgaactcctcggtgcagtcggtaccggcgttgatgaggatgctgtcggcgccgcccgggtggtccttgaggaacttggtgcagtcgtagacgtggccgtgcacgacgatccacgccgactcctgcgacgcgtgcttgcgcacctcggacatggtgaactgcttgccgacgtcggtggtgttcatgaacggcgtggacgtgctgcgcttgaggcccggcgcggccgcctccgccgtctccaggtgcttctgccgcgccatccacccgccgggctggttgccgggctgcgtcgggtgctcgaacaccagcccgatctcgcccttgtgcggacggcacacgttcaccttcaccttgaaccagcagttgttcatcatcccctgtgccatcatcagatttatatatcatcaggagcagaaacagaaacttattcagtattaatattatgtgctagtatatatatgtaccatgaggttccatatgagcttctcgggctgggtgttgagcgactggtcccatgcgcgcacggcgatctccttggcgccgagcaggtcgaggacctccacctcgacggaccagaagcaccagcaccagtacttgccgtacttgttgggcttctccgggtggtcgaggtggcacaccagccatgtctcgccgccgtccagcgtcacctccacccgcgtcaccttcttgccgccgcctacgtgtaccacaaaacaacgagaaaagtcgtaaggctcgcctaaccaccgctctaccctcatataacgtacctgaaacaagtgtagtgctccaaaattttgaaatactatattatttaaagtatttagagtattaaaacaaattaaaagctctaaatcatttattttagaaaataaattacattattaaaaagtaaaaatttgagaattgtctagagaaattactaatctagggtgtatatttatatttgtaattaaaaaatataaaataagatattgttggaactactttttatatgttaaaccatatatttttacaccatacctctatctctctatataaaaaattaaaaagtactaaaacggtaaaggtagctcaagtccagatatatgacgatatctttattttagcgggattggccactgaaatcgcgcaacttttcgaccacaaggacgaagaagaccttgtcctgtgttgggtagcagccaccatgcatgtgcgacctctctacagcgcacagattaataccgacaaaacagcactagctagctagcgacgtcgacgacctcagctctcgcaaatgcaacaaattgtttttgtggtgctcagaggagcagccttcggatgcaacgaagcgccaccagccccaccacctctggtttcatgcatatgccttctgaagcagaaaagtgcaaagcacacatgcatgcatgggtcatagcaaactactatcaacttgcagcagtgtgcatggttttccggatccctttaatctatatagctactactactataatcatatctgtgggaatctatacatgcactcattattggtctctgttccgttcaagtatagtactgtaattaatcatgaaagggtccctactatacttttgtttgcacacatgagtgacacatcgactgcatgctgcttagtaccatcatcagcgccccatgcatgcatgcatctggacttcctcagcagtcaaattgaagcgcacgcgtttcttgctacgtcatgtatcccgtttaagtttggtattgtcaaccttcatggaagaatcgatctctgtggtctgtgagatatgtgtatggcattgacagttcaatacatttaagatccttgtgtggtgctgatcgtcatcattgggggtttttttttgcagtgaactgcttaactgatttgtgggaacgatacaagtgtttgtatagaaagttatcaaatgtttgaaagctgtttattgtattaggtgaaaatttaaaactgaccacggattaaaaaggcccccctctcttcagacgcgtctcttcagaacaccaccggtcatggtcatggatgtctcctagctagtcagtctctctctcttttactgaattataagaatacgacaatatatgacagcctagctatctagttcaagatgcgtgcatggatctaacttgattatactatgtttaggtcaaacagggctacgagacacataacgatgcatggatgagagatactcctatttattgggttattatatacttactatatatgccaagtttcatatatattcagtttgtagtacctgcagctaactacttactaagtcaaaagtaggaaaagtcagtgatgcatgtctgttttttttaccggagtaggcgtatcctttcatggtgtagccgcgctgtgtggtaatgctgttgatgggcaggatctcgtcgtgccccggcgtcgttatcaccgagtttatgttcagctcgttgatgatgtactccggcttgtaccaccacgctgctcaatcatttgcaatagcaaagtcagacatcattttttttgcttgagtagtaataaattaaacatgaactgctaattaccttctgcgttggcgagctcggcgtcgacgtgcgacggcaggacgcggttgtccttgaaatggtagtaattgtcggactcggcgggggtga

SEQ ID NO: 43305 - DNA, 1121 bp, Zea Mays
gcttatcatccccatctccctgccatggtcgcgcccaggctttcctttgcctctcgtgctcggctcccaggagcgggtctcctcaccgtgaactctggtgctggtcgtcgtcgcgcccggggttttggtatgtctccctgctcgtcgtcgaacctaggttccctgctcagccttcacagctagcgtgtcgccttttcgtttgtggtcgagcgtctgctccatctcggcgccctgcactagtgctcgacaaaaagcccaaatgagtcatcatgccatcgtctgcatcgaatggaaattgtggtgccgacacgtcgacatcgtcgttcgtcgcctctccgggtctccaacaacatcgcctatccctctttggtgcttgtcgtcgatccgtcgccttgcctcgatgctggctcctacatgacgtctccaacttgtgttcacgccaaaaatccgagaagattaggcgtagaaggaaacaaatcagtacgcaaccggaaaattctcgatgtggatggagaaggcagtgaagttcgcgtggtgctcaccacgtgcttgaagtaatggaggaatcggaaaccatggttgtgttcatggccttcgagacagattaaattattggcgagctatcgttgctctcgctcttcgttttaatatttctcatcagtttggtatgcttgcgctgtccatgtgggctggtgacgtacacgtaaatcatagtggtgtgattagtgaaagaagctagctagtaaagatagtgtgatttcgtgtgacgctcaataggtgttcgccgatttgggggaaacagtgaacgttgtcgcttttgttaataccaagtcgcactgtgatgcggtaagctgatgtattattactgttagctgagtcattagatggattggctacctaggttggtcgcgatgattatcccgttgtaagcttacatgctgtagttatatttgtcgtacgaagaaatgtcttagtgtgcacagtgatatggttattgtttgtggcgacgatttgattgttcgttggcgtaggctcctcgaagtgatttgcgggtttagttgaagtaagctgacgaagaaccaaattaatgcgatatttaacatgtgatcgacgaaaaggcc

SEQ ID NO: 43306 - DNA, 656 bp, Zea Mays
atgacatgccgcggccgcgtggaactgcggcagatcgaggaccgggtgggctggcaagtgcgcttctccaagcgctgctcggggatcttcaagaaggccttcgagttctccctgctctgcgacgtcgaggtcgccctcatcgtcttctcccccaccggcaagctctgcgagcgccaccacgcatctctggtgctcgcttcccttcctaggtcccttatgtacccgtcgatagtctccagctcactctggccatgggcgccgtcgagcccatcgttctccttgtccagtgctcatgcgaccttgcccgaaccgcgctgccgtctcccaaccgcttgccgttgccccctgcacgtgcttgtcgcgccagtgaaccctgccttggtcatcgtcatcgataatgcgcttgccggtggcctagcccaaccgtctcctagttgccgagctgccagcacgttgctagcgtcctcccttcatcacgcctaggcgcccaatgctcctgcactagacatcgaatcctcacgcgtcttcaacactggtgtgtgtcgctgtctgtcctcagctcttggccatggcgcccgccctggacctagttccggccgagctcgacttcaactcgcgcccggccctagcttggtctctagctccctcttgtgcat

SEQ ID NO: 43307 - DNA, 327 bp, Zea Mays
gacggcgtcctcgtcagcttaccggctccgccgccgtgcccgtccatgcctccccgccgactctcgcccccgccgccgcgtcagctcctctcctgctctgcttcccccgcgacgaaccgtgctctcactctctttcgttgaacgtcgagctgcctcccaggcggtacggatcgatcgacgcggagggagtggttgggtagtgcaagagaaggaagagaggaaggggggccggagaggtgagttttataaccaccggacggcgatgggcagcttccttcccttcgcgggctgaatgaactcgctggcagcgcgaaccgccgcggcgag

SEQ ID NO: 43308 - DNA, 764 bp, Zea Mays
atggcagcgagggattattggctggtaaacacccatgtgcacgctcaagtacgattacgaatggagaatccctgcacgtggcgccacaagttcaaaccggcaagatttgccgtcggaacatctgatccgagcaagataacacagtgcatgtacaatgcacatacagtacagggcgatgcagaaaacagaaaagcactgacagatcatctccaccgaccaccattgatacacatggatggagtggagacatggactatggagcagtctgcacaaggaggaagaggaatagggtgaacttgctctcagcgatccagcacgaggtgaaccacttcaagaaaacagcagcagttcagcccattggtggctgccgccaaccgtactggtctctccaaccaacacggagcatgcggttgtgctgctccggtcgcgaaactcagcagctagtcactgccgctcttggctagtctatcctgttaacaggtgaagggcacaattcttgaacccaattcacacatcgatgaaacagagcttgccatctatcctgttctgcactgccttgatcgcagcgacacgggcagctgtagccgctctgtttgcagccatgacggccttgttcacctgctcttgtactcttgggaggtgaaaggcgctgtctgcagcccttcgagcagcctagttgcacaatgagagaatttgagcaactgaagcatggaggcggcgtatcaattataaatgttgggaattgttgaatacctgcagggcac

SEQ ID NO: 43309 - DNA, 606 bp, Zea Mays
attttcttccccgaattccaaccaaacggcatcattcgatcgatcgtccgcaccgtgtccaggcaccagctggagctgctcagggaagccgtgcacgacggcatggagaagaacgcgaggccggttcaggacgtcaacgacagggacatcagcatcttccgcccaaagccacacaagcactactagtactagctatggtataggttgcacagtccagcagcgcgcgtagttggtatcgatcagtagtgatgcacgagctagctgacgcggttcagtgttggggagaggtgtctgctgtatatggttacggttttgttttataattctttccatctatgttataggacgaaataaacagacgaggatcaccttcaggtccactcttcagaagaagaacaaaaaaaaaaggaaaagagaacatgtcgatgcgcatgtggctcgatcgatttgattattgttgttgagtagttggcactcaaacatgacctatctaactggcacggtcttttgttaaaaaaaatactatgatttgattgtcgtttagcaggacgagtcacatgtgtacagtataagcctatatatattcttcagccagctagatttgtg

SEQ ID NO: 43310 - DNA, 1712 bp, Zea Mays
gttgcatatattttattacaccaagatttggttacaagaatttgttgtttggttctgaggcatgaatcgtagtcctggctgcatgcctggcccacaccatcctctattaaaccgattttaatatcaaaatgttatagacattaaatataataataccatactgtatgatggaaagagactcgatcgtaaaagtatggagttttataagaataaaagtttcttttttaaaaacaatatgagtgtgttttggcattaacacactgacgagacgacggccttttatatactcggactcggtgcgggggggcacttcatcccaaaccagttcagcttccaaaaaggcaaagcagagcccgcaagcggagaggctacagaagggtatgggtcacctccgcggcctcaccgccgcgcggctcctcgcggcggccttcctgctctccgttgccgtcccggccgccagagcccaggaagaaaccgagcacgaggaggagttcagctacgtcgtcggcgacgagaacgggccggagcactggggcagcatcaaggcggagtggggcaactgcagcgccgggcggatgcagtcccccatcgacctctcccacgagcgcgtctcgctggtgcggtccctcggctacctcacccactcctaccgccccgccgaggccgccatcgccaaccgcggccacgacatcatggtgaggttcaagggcgacgccggcttcctggtgatcaacggcacggcgtactacctgaagcagatgcactggcactcgcccaccgagcacaccgtcgacggccgcaggtgagaacgaatgaatggtggtctgctggtctcgtcgtcgtcgttgagagccaataatataataaagactcgacgtgcgtacgacatggagctgcacctggtgcacgagagctcggcgaacaaggcggcggtgatcggcatgctctacgagatcggcgccgaggacccgttcctgcaagcgctggagccgtccatccaccggatcgccgacaggcaggaccgggaggaggccatcggcgtggtggacccccggcgcgcgcgcggcagggccagcgtctactaccgctacgtgggctccctcaccacgccgccctgcaccgagggggtcatctggaccgtcgtcaagagggtccgcaccgtgtccaggcaccagctggagctgctcagggaagccgtgcacgacggcatggagaagaacgcgaggccggttcaggacgtcaacgacagggacatcagcatcttccgcccaaagccacacaagcactactagtactagctatggtataggttgcacagtccagcagcgcgcgtagttggtatcgatcagtagtgatgcacgagctagctgacgcggttcagtgttggggagaggtgtctgctgtatatggttacggttttgttttataattctttccatctatgttataggacgaaataaacagacgaggatcaccttcaggtccactcttcagaagaagaacaaaaaaaaaaggaaaagagaacatgtcgatgcgcatgtggctcgatcgatttgattattgttgttgagtagttggcactcaaacatgacctatctaactggcacggtcttttgttaaaaaaaatactatgatttgattgtcgtttagcaggacgagtcacatgtgtacagtataagcctatatatattcttcagccagctagatttgtg

SEQ ID NO: 43311 - DNA, 1664 bp, Zea Mays
gaatgggacgtctgtgcccgcccctgccctccttctccctcgcatctggtggtttccctccgcaaagcaggcagcaggcgacgacatcgacagtcgcaagcatcaacgaccatcgatgactaacaacacctttccttcggcccaagatcggcatctacaaactccttcaaacatctgtgcctggatccaagctcaaaccatgggtaagaaaacgcattgcattttcggcgtcctcctcctcggatcggtcgactgccccggatcgacagcttgttcggtgatagagtgctctgcctcccccttctgagttccgaaagtgtgttcccccatttttggatgaaccctaacaacatcttatctatatatgacctcgatgtggcatgacattttggcctcctcctaagacaaatacattgttgttagcttctggattaccaatatctagtagagtagcttcgatttggatttaggatcgcatgacttggtcgctgtgtacttcaatctgttattaatagatcatgaagtcaagatttgttgcaataactaaaaaattgctttatgtcacctagccattcctagaaaagaaagggcaaactctcctggatggtattgtatatatttgcagtagggtgaacttttagggtcatgcatatacacataggaaggacctatgttaacttggaattgttcaagaaatatgtcatccaaagcaatgtcttagcatgtatgatgtactttttatcacaaaatgtctgtggtatggaccaatgaaatgcatttatgccttcggctaattttttacgctcacaatttcatttactccatttgtttgtatacttctgcgaggcaatgtaaacggcatgggcacaattttgctgaccacgccggagagcaaagagggagaaagggagaagaagagacggcgcgcgcaactcatcatatggctccactgacgtcgtcgactccgacaacaacgagtaggagatcaccatcgtggggttgctgtggaatggtgaccacctcgacatacagctcaaagtattgttgcaggttggcaaagagaagctggttttggaaattggttaggcggttctacaacgcccttgctctaaaccttgtttcttgggtcaagcaatgaataaactactacccattgaaattgtggatctactttattgggacactttggctacaacccataaaaataagagatcattagtcccagagctagcggattgtagttgacttcaactgcttctacatggtgatgctcgcgcaccttgcatttggatttacaacccgccaaattgagctgacaggaatacacaacatcctggtcggtttgttggtgtttgtgactcgaccgcgcaccatggggttacccacatgatgcttttgggtaggacggcgtcgttgattgcgactcgatggtacgtgcggaagcacgtcagtattgctcctaggtttatataggtttgggccgctttgaattgtgtaacaccctacttcctgttgtggctatgtattggtttctggagtatgaggattacaaataggctttgggatggctcggttgctgttgatgaggatggggtgagatgagataattttgtaggggccctcctcggcttacatacatgaccagagagttatccctttacaag

SEQ ID NO: 43312 - DNA, 1649 bp, Zea Mays
gaatgggacgtctgtgcccgcccctgccctccttctccctcgcatctggtggtttccctccgcaaagcaggcagcaggcgacgacatcgacagtcgcaagcatcaacgaccatcgatgactaacaacacctttccttcggcccaagatcggcatctacaaactccttcaaacatctgtgcctggatccaagctcaaaccatgggtaagaaaacgcattgcattttcggcgtcctcctcctcggatcggtcgactgccccggatcgacagcttgttcggtgatagagtgctctgcctcccccttctgagttccgaaagtgtgttcccccatttttggatgaaccctaacaacatcttatctatatatgacctcgatgtggcatgacattttggcctcctcctaagacaaatacattgttgttagcttctggattaccaatatctagtagagtagcttcgatttggatttaggatcgcatgacttggtcgctgtgtacttcaatctgttattaatagatcatgaagtcaagatttgttgcaataactaaaaaattgctttatgtcacctagccattcctagaaaagaaagggcaaactctcctggatggtattgtatatatttgcagtagggtgaacttttagggtcatgcatatacacataggaaggacctatgttaacttggaattgttcaagaaatatgtcatccaaagcaatgtcttagcatgtatgatgtactttttatcacaaaatgtctgtggtatggaccaatgaaatgcatttatgccttcggctaattttttacgctcacaatttcatttactccatttgtttgtatacttctgcgaggcaatgtaaacggcatgggcacaattttgctgaccacgccggagagcaaagagggagaaagggagaagaagagacggcgcgcgcaactcatcatatggctccactgacgtcgtcgactccgacaacaacgagtaggagatcaccatcgtggggttgctgtggaatggtgaccacctcgacatacagctcaaaggttggcaaagagaagctggttttggaaattggttaggcggttctacaacgcccttgctctaaaccttgtttcttgggtcaagcaatgaataaactactacccattgaaattgtggatctactttattgggacactttggctacaacccataaaaataagagatcattagtcccagagctagcggattgtagttgacttcaactgcttctacatggtgatgctcgcgcaccttgcatttggatttacaacccgccaaattgagctggaatacacaacatcctggtcggtttgttggtgtttgtgactcgaccgcgcaccatggggttacccacatgatgcttttgggtaggacggcgtcgttgattgcgactcgatggtacgtgcggaagcacgtcagtattgctcctaggtttatataggtttgggccgctttgaattgtgtaacaccctacttcctgttgtggctatgtattggtttctggagtatgaggattacaaataggctttgggatggctcggttgctgttgatgaggatggggtgagatgagataattttgtaggggccctcctcggcttacatacatgaccagagagttatccctttacaag

SEQ ID NO: 43313 - DNA, 1671 bp, Zea Mays
cccccaccccaacacgatgaatgggacgtctgtgcccgcccctgccctccttctccctcgcatctggtggtttccctccgcaaagcaggcagcaggcgacgacatcgacagtcgcaagcatcaacgaccatcgatgactaacaacacctttccttcggcccaagatcggcatctacaaactccttcaaacatctgtgcctggatccaagctcaaaccatgggtaagaaaacgcattgcattttcggcgtcctcctcctcggatcggtcgactgccccggatcgacagcttgttcggtgatagagtgctctgcctcccccttctgagttccgaaagtgtgttcccccatttttggatgaaccctaacaacatcttatctatatatgacctcgatgtggcatgacattttggcctcctcctaagacaaatacattgttgttagcttctggattaccaatatctagtagagtagcttcgatttggatttaggatcgcatgacttggtcgctgtgtacttcaatctgttattaatagatcatgaagtcaagatttgttgcaataactaaaaaattgctttatgtcacctagccattcctagaaaagaaagggcaaactctcctggatggtattgtatatatttgcagtagggtgaacttttagggtcatgcatatacacataggaaggacctatgttaacttggaattgttcaagaaatatgtcatccaaagcaatgtcttagcatgtatgatgtactttttatcacaaaatgtctgtggtatggaccaatgaaatgcatttatgccttcggctaattttttacgctcacaatttcatttactccatttgtttgtatacttctgcgaggcaatgtaaacggcatgggcacaattttgctgaccacgccggagagcaaagagggagaaagggagaagaagagacggcgcgcgcaactcatcatatggctccactgacgtcgtcgactccgacaacaacgagtaggagatcaccatcgtggggttgctgtggaatggtgaccacctcgacatacagctcaaaggttggcaaagagaagctggttttggaaattggttaggcggttctacaacgcccttgctctaaaccttgtttcttgggtcaagcaatgaataaactactacccattgaaattgtggatctactttattgggacactttggctacaacccataaaaataagagatcattagtcccagagctagcggattgtagttgacttcaactgcttctacatggtgatgctcgcgcaccttgcatttggatttacaacccgccaaattgagctgacaggaatacacaacatcctggtcggtttgttggtgtttgtgactcgaccgcgcaccatggggttacccacatgatgcttttgggtaggacggcgtcgttgattgcgactcgatggtacgtgcggaagcacgtcagtattgctcctaggtttatataggtttgggccgctttgaattgtgtaacaccctacttcctgttgtggctatgtattggtttctggagtatgaggattacaaataggctttgggatggctcggttgctgttgatgaggatggggtgagatgagataattttgtaggggccctcctcggcttacatacatgaccagagagttatccctttacaag

SEQ ID NO: 43314 - DNA, 2033 bp, Zea Mays
cccgctcccctcccccaccccaacacgatgaatgggacgtctgtgcccgcccctgccctccttctccctcgcatctggtggtttccctccgcaaagcaggcagcaggcgacgacatcgacagtcgcaagcatcaacgaccatcgatgactaacaacacctttccttcggcccaagatcggcatctacaaactccttcaaacatctgtgcctggatccaagctcaaaccatgggtaagaaaacgcattgcattttcggcgtcctcctcctcggatcggtcgactgccccggatcgacagcttgttcggtgatagagtgctctgcctcccccttctgagttccgaaagtgtgttcccccatttttggatgaaccctaacaacatcttatctatatatgacctcgatgtggcatgacattttggcctcctcctaagacaaatacattgttgttagcttctggattaccaatatctagtagagtagcttcgatttggatttaggatcgcatgacttggtcgctgtgtacttcaatctgttattaatagatcatgaagtcaagatttgttgcaataactaaaaaattgctttatgtcacctagccattcctagaaaagaaagggcaaactctcctggatggtattgtatatatttgcagtagggtgaacttttagggtcatgcatatacacataggaaggacctatgttaacttggaattgttcaagaaatatgtcatccaaagcaatgtcttagcatgtatgatgtactttttatcacaaaatgtctgtggtatggaccaatgaaatgcatttatgccttcggctaattttttacgctcacaatttcatttactccatttgtttgtatacttctgcgaggcaatgtaaacggcatgggcacaattttgctgaccacgccggagagcaaagagggagaaagggagaagaagagacggcgcgcgcaactcatcatatggctccactgacgtcgtcgactccgacaacaacgagtaggagatcaccatcgtggggttgctgtggaatggtgaccacctcgacatacagctcaaagtttcaagactggtattgtttgagaaggctcacctttcccacacaacctcccattgcgtactccaatcaataaagctaccacaccagtgaacaaaatgtgcctaaataatgtcatacctatcgatgtgtatccaaccaaaaaaggagtttccagcagaaaaaaaaatatacacacattctgataacaccacatttgagtaaggtgcattagtcatccaaaattagagatggtccaatttaattattcagcaatggggcaagagtatttctctccaacctattatcatcctgatggttcagtcccaacttcacatttcttggtggtggtacccggctggatctaggattgatggttggcaaagagaagctggttttggaaattggttaggcggttctacaacgcccttgctctaaaccttgtttcttgggtcaagcaatgaataaactactacccattgaaattgtggatctactttattgggacactttggctacaacccataaaaataagagatcattagtcccagagctagcggattgtagttgacttcaactgcttctacatggtgatgctcgcgcaccttgcatttggatttacaacccgccaaattgagctgacaggaatacacaacatcctggtcggtttgttggtgtttgtgactcgaccgcgcaccatggggttacccacatgatgcttttgggtaggacggcgtcgttgattgcgactcgatggtacgtgcggaagcacgtcagtattgctcctaggtttatataggtttgggccgctttgaattgtgtaacaccctacttcctgttgtggctatgtattggtttctggagtatgaggattacaaataggctttgggatggctcggttgctgttgatgaggatggggtgagatgagataattttgtaggggccctcctcggcttacatacatgaccagagagttatccctttacaag

SEQ ID NO: 43315 - DNA, 761 bp, Zea Mays
atgtcgttcggcttgagcgacggcggcggtaccgtcgagggaggattgagcggcggtggaggaggcggccgatgcggcggcgagtactggcagttggagacgcagcctgctggatctgctcctccgaatgagccggcgaactccctcggcggcagattcccccaaatgcaggtgaatgacagcggagaactcgacctcgacggcggaggtaccttgcgtggaggtggagtagctttctgtccgtgtgtgcctggaagtgcgagagtcgtcaccgatccgttagcgtcatccttgttcggcggcagggaggagttctgtgcatccttcgacctaggggctaaagttccaggggatggatacttttctaatatgatactggatgaaaacgtcgaaggagatttcgatattaatagcaacacatgtcctgataatcagtcacaatcaaggcaagttggtccaacagcccccacatcgaggccaaaccataagagatcaaaaaatttcagtgatcaagaagatgaagttttggtttcagcgtggttgaatattagtatggatcatgtggtaggtaaagatcaaaaagttgggaggtattggtctcgtatctacgagtacttcaatgaacataaaccatgccaatcgcaacgtaccgttaattctctaatgcaccgatgggagacaattcagaaatgtgttaacaagttttgtggttgtttatcaaggatttagttaagacgtcaaagtggtacttcaatgcaaga

SEQ ID NO: 43316 - DNA, 1121 bp, Zea Mays
ttccgattgatccgccccttcccggacggacggcaccggcggccgcgcgctgctccactccgtccctgcaggcagcattactgcaggaatcaatgaggcagaagaagagcgggcgacggcggaggcggcttggttgacttcttttaacggctgggttcctgattcccaaagggtggaaggtgatgcccctgttcagtaacctgcactacagcccggactacttcgaggacccacacaagttcgacccttcccgattcaaggtggcgccgcggcccggcacgttcctgccgttcgggagcggcgtgcacgcgtgccccggcaacgacctggccaagctcgagatgctcgtcctcatccaccgcctcgtcaccacctacaggtgggaggtggtggggtcgagcgacgacgtgacctacagcccgttcccggtgccgaaacgcggcctcctggcgaggctcagcagggccaccaccggcagcgcggtcgtcggccgtgcgccgccgctggacattggaggacctgcaggcgctagctatagctagctcctcggaccaaaaggcaatgcatgcacccaagcacccaggagatagataggcccggcaggcggcaggggacgacgacacacacatccagacatcgtccagtcacgtggcagtagcaagctagtactactactactgtgtgtgctgccattctgcatgcatgcgtttcctctcattctcgtgttccttcatggcatgtgtttccttccttcgtttcccctcgatcgcttatacagatataaatatctggtcaatcattgggatagcaagcagacggtgtaccgtaccgccgcctgccggtctagctagctatatatatgcatgcatgcatgctccgtcctaaaagaatataataataggatccgtgtgtcctttgttagaatatatttaaagtttggccaaatacgcaggcaaaataaagtacttaaaaatcagtctatggcaccagatagacgtattaaaaaagacatatctctcgtggcaatttaacgaatattcttcttggtcgaactactgcgcatgcccatgataccagcgatcaggatgcatgcagagatgagctagatgactgacgaagag

SEQ ID NO: 43317 - DNA, 2094 bp, Zea Mays
accaccgtttggaaagaagatcatctcagatcgctcctctcccctcgtgcccctctcccctcgtgctcctcttcaaatagcactcgggtacaaaagggaagtacaacgaaggcacttggctgccttctgaggctgagagaggatcactcttcttacaagttgcagcgtaggggcggccaccacaccacatggctttcttcctcgctgtagcttgcatctacatcgtctccctcactctgctggtgctgctgctcgacgcgagcagacgacggagaacaaccggaggcggcgcggatggtgctggtgtctcaggcgcacctgttcaaaccgacgtacccaccgagcaaggagcgcatgattggcgcgcaggccctcttcttccaccagggcgactaccacctccgcctgcgccgcctcgtgaagggctggcttggcccggacgcgctccgcggcctcgtgcccgacgtcgaggccgccgtggcgtccacgctcgacgggtgggaaggccgcgtcaccagcaccttccataccatgaagaggctcaccttcgacgtcggcgtcatcgccatcttcggccaccggctggccggccacgtgaaggaggagctgaggaggaactacttcaccatggagaaaggctacaacagcttccccatcccggtcgcctgcaccagctacagccaggccatcaaggcgaggcagcggctgggcgcggtgctgagcggcatcctggcggagcggagggcgcggcggagcgacgacgacgacgaccatggcctcctgaacgccctcatgcgctcccgtgacgacagcggggcggcgccgccgctctcggacgaccagatcgccgacaacgttatcggcgtgctgttcgcggcgcaggacacgacggccagcgtgctcacctggatcctcaagttcctccatgacaacccgaagcttctggaagccgtcaaggtggagcagatggcagcctacgaggagaacgatggcgggaggctcccgctgacgtgggcgcagacgaggaagatgtccataacacacctggttatcttggagagcctgaggctggcgagcatcatcgccttcacgttcagagaggccgtcgaggacgtgcactaccaagggttcctgattcccaaagggtggaaggtgatgcccctgttcagtaacctgcactacagcccggactacttcgaggacccacacaagttcgacccttcccgattcaaggtggcgccgcggcccggcacgttcctgccgttcgggagcggcgtgcacgcgtgccccggcaacgacctggccaagctcgagatgctcgtcctcatccaccgcctcgtcaccacctacaggtgggaggtggtggggtcgagcgacgacgtgacctacagcccgttcccggtgccgaaacgcggcctcctggcgaggctcagcagggccaccaccggcagcgcggtcgtcggccgtgcgccgccgctggacattggaggacctgcaggcgctagctatagctagctcctcggaccaaaaggcaatgcatgcacccaagcacccaggagatagataggcccggcaggcggcaggggacgacgacacacacatccagacatcgtccagtcacgtggcagtagcaagctagtactactactactgtgtgtgctgccattctgcatgcatgcgtttcctctcattctcgtgttccttcatggcatgtgtttccttccttcgtttcccctcgatcgcttatacagatataaatatctggtcaatcattgggatagcaagcagacggtgtaccgtaccgccgcctgccggtctagctagctatatatatgcatgcatgcatgctccgtcctaaaagaatataataataggatccgtgtgtcctttgttagaatatatttaaagtttggccaaatacgcaggcaaaataaagtacttaaaaatcagtctatggcaccagatagacgtattaaaaaagacatatctctcgtggcaatttaacgaatattcttcttggtcgaactactgcgcatgcccatgataccagcgatcaggatgcatgcagagatgagctagatgactgacgaagag

SEQ ID NO: 43318 - DNA, 1555 bp, Zea Mays
cacaggtaccaccggcacagcagcaacaataagcaaagagcagtctccaatagtatagcaacaccaagaaaataagcgccatgcagacgccggccatgtcgacgtccacggccacgacaacaagggccatggcgccagcgaagccccccgcgcggcggcattgctgcagctacctcctcctcctcctaccctccaccggccaccgccgcagcgtcgcggcgtggtccgcgaagaaaaagaacccgtggctggacccgttcgacgacgggcccgacgaggagttcgactaccagggcatgttctccggcgggaagcaggaggaggacccgcggccgcccgaggaccctgcgaacccgtacgggttcctgcggttcccgcagggctacaacccggagctggacagcctcgcgtccaagatgctcaaggaccggtaccccggcgtgctggtcgacgtggtggcgtcacccaggggcaagcaggtgtacgagatgtgcaagaacgtcaggtacgccaacgtctacgacccggacgacgactggccggagccagcagagtacacgcacatgctcggcgtcctaaagaataggtactatgatctgatcgtgtcgacgaggctggccggcatcgggcacgcgctcttcctcttcatgtcatcggcgcgcgacaaggttggctacgtttaccccaacgtcaacagcgtcggcgccggcctgttcctgaacgagatgttcaaggcgccgaccaacaacctcgccgacggcggctaccacatgtacaaggacatgctggagtggattgggcggccggcgaagaacgtgccccggcagccgacgcagccgctgcgggtgtccatctccaagaagctacgggcgtacgtggaggacaagtacagccgcgccggcgtggagaagggcaagtacgtcgtcgtccacggcatcgcatccgattccgtcgccagcatgacgtccagaggcgacgacgactgccttcttcccctcgagcactgggctcagatagccaaggagatcagctctggcgacaaggggctcaagcctctgttcgtgatcccccatgacaagcacagagaggaggtcgaggaggaagtgggggacgacacgaacatcctgttcatcaccaccccaggacagctcacctgcctcatcaacgactctgccggcgtcgtcgcgacaaacaccgctgccgtgcagctcgccaacgcccgcgacaagccatgtgtggccttgttctcgtcggcagagaaggcacggctgttcctgccgtacgtggaggacaagagcagctgcaccgtcatctcgtcgatgacggggaagctgatcgacatcgacatcaacgccgtgaagaatgcggtgaaggacctggagcccgctcccagcttcgcattggcacagaagtagcagctcccagcatcattccatcgctttgtttgtacacagtaccagagaatgtaatggtgcaggctatcacaaactgcaaacggcacgcacgatgtgttataccgataaataaatgacaatctcgtatcagctattgcaat

SEQ ID NO: 43319 - DNA, 4796 bp, Zea Mays
aggcaacaaacacaatctcgcccaatctagctcactccgaaagatcaaacgccccacctaaaacaccattaaagaaacgcgcacagacacaaaaaaaaaactctctccgttcctcttcacaccaaagcacgggaggcgaagaagaggacaaggggcggaaggctgcaaaccctagcgctgggtcgaagcaacgtcgtgcgccagccacaggcgccagacccgcgcgcacctgcattcgcgattcctttaccttcacgccgcggcaactccgcattgtgttgtgccgtgctttgtgccaggacggggatccatggcgttgtcggcgcgacgaggctcgtggtggtagggccgcgcgggtgccggatccgggagacgcggcatggcgctcttccgcaagttcttctaccgcaagccgcccgatgggctccttgagatcaccgaacgcgtctatgtgttcgattcttgcttcacaactgatgtcttcgatgatgataaataccgggattatattggtgacattgttgcacaacttcagagccacttcgctgatgcttcatttatggtcttcaactttcgggatggagacagtcaaagtttactggcgaatatattatcaagttatgatatggtagttatggactaccccagacaatacgagggatgccctctccttacaatagaaatgattcatcattacttgaggtcaggggagagttggctctctctgggccagcaaaatgtcctaataatgcattgtgagcgtggtggctgggctgtacttgcattcatgttagcaggactgctgttgtatagaaagcagttcattggtgagcagaggacactggaaatgatttacaggcaagctcctcatgaactggttcagttgtggtcaccattgaatcctatgccttctcagataagatacttacattacatatctcggaggaacgtgagttcagagtggccacctcaggaccgggcccttactttagactgtgttatactaagaaacattccaggcttcaatgaagagggaggatgtagaccaatattccgtatttatggacaggatcctttacctgctacaaataacacacctaaggtgctgtttgcaacaccaaaaaggagcaaatatgttaggctttacaagaaggcagactgtgaactgattaagattgacatccattgccatattcaaggtgatgttgtccttgaatgcattagcattgatgttgatcaagaacgagaagagatgatgttccgagtcatgttcaatacagcctttatcagatctaacattctgatgttaaaccgtgatgaaatcgatatattgtgggatgccaaagatcgattcccgaaggaattcagagctgaggttcttctttcagaaatggacactgccaatcagttaggtcccatggaggtggcaggtataggagagaaggggggtttaccagttgaagcatttgcaaaggttcaagagatgttcagcaatgtggactggctagatccaactggggatgctgcagtccagcttttccagcgacttacttcatcagaaaatattcagctgaggcaaggattcttgtccccaagtaagaaagaagcagaatcgttagagcttggttcaatctctccaatagacaagcattttgacaatgttcaacaagaaccaagcaaagttgaacaccccacagtctatgtgaacaaactggaaaatgttggccaagagagattggtcttgttggagcaaaccactaattctgaagttaaaactggaatttctgttgtccaagaaaatcctggctctctagttcacaaggttgacagtaacgcaaaacagtcaatttcactggaaaaggctgttccctctaccatgaaatctattgatccagttcttaaggatcaaaatgctaaacttgatgagcaacatggttcaggccaacactcttttcccactataattatgtcacagcgatttccaatttctagttcatgccctgctctttctggctactccagtcctagattactttcagcttgtccaagatttaatagtgcaccttcagcccttggaattacagctctgttggaagaccatgctggaagtgctgagaatcgttgtggttcaactactttgacctttgacacaacaggtactcctgttgtaacaaagggtatgccactgctacgccctccaccatcgccactagatttgctggtatcagattctactatgatgtcagaagcaaaaggctcatcccaacctaccctcaacaattcaggccttccatctcatccagagagacaattgacatttcagtcacttggaactactactccggccacaaatcatcagaaatcctcaactactgtcacaattgaattgttgccaacttctgctccacccccacccccactgcccccaccatcatcagttttcagttctaggatttatcatctgcctccatctccaacttctttcagatctccagcgccagctgcaccacaacctccacctgtgccacccccacctccacctatgcctaggccttttcctgtaaggtctcatgcaccacaaccgctgaccccccaaccacctgctttgagttcatctcttatactgtcagggacacctcaatccccaccttccccaccgccttctaggtgctctctcagtaaacctcctgcaccaccaccaccaccaccaccacctccactacttgcttctacttcatctaccattagacctgctgcatcacatctgcctctatttgcatctacttcatctcctgttaggcctgctgcaccccctccaccgcctgccccaacatcatcacctattagagcttcagcattgcctccacctccaccacctggaacgagctccagtccacgtccaccccctccaccatgctattcatcaaaacaatcatccagccccatgggcaaatcgatgccatcacctcctgttccgccaccaccctcccatggaggacgcaatggagcttctggtaacattgtacccccgccagcaccccctggcagtaatgctaaactgtttggtcctcaggggcgtggacctgcacctccttcaggtccaatgtcaaagagctttcaatctggccaggctgtgttgagaaggtctaatttgaagccacttcattgggtgaaagtaacaagagcaatgcatggtagtctgtgggcggagtcacagaagcctgacgaaactttaaaagctcctgtgtttgatatgtcagaattagaaaatcttttctcagctgcactgccaagttcagattcaaggcgttcagataagtcaggcagtcgtgcatctgggtcgaaaccagagaaaattcatcttattgatcttcgccgggctaacaattgtggaatcatgcttaccaaagtcaaaatgccactgcctgacctaatgagtgcaattctggctctggatgatactgttctggatgctgaccaggtggagaaccttattaagttcactccaactaaagatgaaattgaacttctaaagggttacaaaggagacaagcaagttcttggagaatgtgagcagttctttatggagcttatgaaattaccacgtgtagaatctaagctgagagttttctcatttaagattcaattccgttcccaggtttctgaccttaagcggaacctgaacattgttaattcttcagcagaagagatacgaggttcagtcaagttgaaaaggattatgcagacaattctttctctcggaaatgcattgaaccaaggcactgctagaggttctgctgttggtttcaggttggatagcttgcttaaacttagtgacacccgtgctcgtaacaataagatgactttaatgcactatttatctaaggtgctttctgagaaacttccagaacttctagatttcccgaaagacttgtctagcttagagctggcagcaaagatacaattgaagtctttagcagaggaaatgcaggctgtcaacaaaggactcgagaaagttgagcaagagcttactacatctgaaaatgatggtcctgtgtcagagatcttccgcaagacactgaaggatttcctcattggtgcagaagctgaagttaggtctttgacttcactttattctaatgtgggccgaaatgcagatgcgttagcgctttattttggagaagatccagcacgatgtccatttgagcaagtagttacaacactccaaaattttgtgagattgttcacgcgttcccatgaagagaactgtaagcaactggatcttgaaaagaagaaagctctgaaggaagcagaagacaatagtaaacaactggaccttgaaaagaagaaaacccagaaggaagcagaaacagagaaaataaagaagaaatctgacagtgagaaagcttgtaagaaagaactggaaaatgataaatcttctaagaaggattcagcaaatgagaaaggcaagcttaacaatcccatcaaagagctagatatatcacttcaatcacctgcacaaactgccagtgccaaatgacgaccgtaccagatgaactaacagtagcttttccgaaagaggaaaactagttttggctgctcccaacagtgcttccttttgacgaatcatgcaggataaggaagccgaaaactgcacttttaatacgttctcaggggattgtcgaagaaattaacctggcgacaagctgtacagatctgacataataatagccttttcttttggaaggcgaacattcccctaggccagttttatatctgcaactggaagtaaagat

SEQ ID NO: 43320 - DNA, 818 bp, Zea Mays
tcgaagaaccatcaccattcaccatgtgtcggcagctgcatgaggggtttaagcggcggaagggtttggtgaggatggcctgtaagctgatagcaggatgttacgtcgaggtctcgacggtagcggtggaagttccggtggtggccctgacttctcagggccgaaatgcagatgcgttagcgctttattttggagaagatccagcacgatgtccatttgagcaagtagttacaacactccaaaattttgtgagattgttcacgcgttcccatgaagagaactgtaagcaactggatcttgaaaagaagaaagctctgaaggaagcagaagacaatagtaaacaactggaccttgaaaagaagaaaacccagaaggaagcagaaacagagaaaataaagaagaaatctgacagtgagaaagcttgtaagaaagaactggaaaatgataaatcttctaagaaggattcagcaaatgagaaaggcaagcttaacaatcccatcaaagagctagatatatcacttcaatcacctgcacaaactgccagtgccaaatgacgaccgtaccagatgaactaacagtagcttttccgaaagaggaaaactagttttggctgctcccaacagtgcttccttttgacgaatcatgcaggataaggaagccgaaaactgcacttttaatacgttctcaggggattgtcgaagaaattaacctggcgacaagctgtacagatctgacataataatagccttttcttttgggtaataatagattattcttacaatttttctgtcttcttgattatatgtagctaatgtctg

SEQ ID NO: 43321 - DNA, 1488 bp, Zea Mays
atggcaaagttagtgggaacagctaatgtgttgtgtgaatcacttaatacctttgttagtaacactctttttctccttttctttgtttttcttgatcttttacctttttttggagcacagagtgcaattctggctctggatgatactgttctggatgctgaccaggtggagaaccttattaagttcactccaactaaagatgaaattgaacttctaaagggttacaaaggagacaagcaagttcttggagaatgtgagcagttctttatggagcttatgaaattaccacgtgtagaatctaagctgagagttttctcatttaagattcaattccgttcccaggtttctgaccttaagcggaacctgaacattgttaattcttcagcagaagagatacgaggttcagtcaagttgaaaaggattatgcagacaattctttctctcggaaatgcattgaaccaaggcactgctagaggttctgctgttggtttcaggttggatagcttgcttaaacttagtgacacccgtgctcgtaacaataagatgactttaatgcactatttatctaaggtgctttctgagaaacttccagaacttctagatttcccgaaagacttgtctagcttagagctggcagcaaagatacaattgaagtctttagcagaggaaatgcaggctgtcaacaaaggactcgagaaagttgagcaagagcttactacatctgaaaatgatggtcctgtgtcagagatcttccgcaagacactgaaggatttcctcattggtgcagaagctgaagttaggtctttgacttcactttattctaatgtgggccgaaatgcagatgcgttagcgctttattttggagaagatccagcacgatgtccatttgagcaagtagttacaacactccaaaattttgtgagattgttcacgcgttcccatgaagagaactgtaagcaactggatcttgaaaagaagaaagctctgaaggaagcagaagacaatagtaaacaactggaccttgaaaagaagaaaacccagaaggaagcagaaacagagaaaataaagaagaaatctgacagtgagaaagcttgtaagaaagaactggaaaatgataaatcttctaagaaggattcagcaaatgagaaaggcaagcttaacaatcccatcaaagagctagatatatcacttcaatcacctgcacaaactgccagtgccaaatgacgaccgtaccagatgaactaacagtagcttttccgaaagaggaaaactagttttggctgctcccaacagtgcttccttttgacgaatcatgcaggataaggaagccgaaaactgcacttttaatacgttctcaggggattgtcgaagaaattaacctggcgacaagctgtacagatctgacataataatagccttttcttttgggtaataatagattattcttacaatttttctgtcttcttgattatatgtagctaatgtctg

SEQ ID NO: 43322 - DNA, 1299 bp, Zea Mays
atggcaaagttagtgggaacagctaatgtgttgtgtgaatcacttaatacctttgttagtaacactctttttctccttttctttgtttttcttgatcttttacctttttttggagcacagagtgcaattctggctctggatgatactgttctggatgctgaccaggtggagaaccttattaagttcactccaactaaagatgaaattgaacttctaaagggttacaaaggagacaagcaagttcttggagaatgtgagcagttctttatggagcttatgaaattaccacgtgtagaatctaagctgagagttttctcatttaagattcaattccgttcccaggtttctgaccttaagcggaacctgaacattgttaattcttcagcagaagagatacgaggttcagtcaagttgaaaaggattatgcagacaattctttctctcggaaatgcattgaaccaaggcactgctagaggttctgctgttggtttcaggttggatagcttgcttaaacttagtgacacccgtgctcgtaacaataagatgactttaatgcactatttatctaagacactgaaggatttcctcattggtgcagaagctgaagttaggtctttgacttcactttattctaatgtgggccgaaatgcagatgcgttagcgctttattttggagaagatccagcacgatgtccatttgagcaagtagttacaacactccaaaattttgtgagattgttcacgcgttcccatgaagagaactgtaagcaactggatcttgaaaagaagaaagctctgaaggaagcagaagacaatagtaaacaactggaccttgaaaagaagaaaacccagaaggaagcagaaacagagaaaataaagaagaaatctgacagtgagaaagcttgtaagaaagaactggaaaatgataaatcttctaagaaggattcagcaaatgagaaaggcaagcttaacaatcccatcaaagagctagatatatcacttcaatcacctgcacaaactgccagtgccaaatgacgaccgtaccagatgaactaacagtagcttttccgaaagaggaaaactagttttggctgctcccaacagtgcttccttttgacgaatcatgcaggataaggaagccgaaaactgcacttttaatacgttctcaggggattgtcgaagaaattaacctggcgacaagctgtacagatctgacataataatagccttttcttttgggtaataatagattattcttacaatttttctgtcttcttgattatatgtagctaatgtctg

SEQ ID NO: 43323 - DNA, 4533 bp, Zea Mays
ccgaaagatcaaacgccccacctaaaacaccattaaagaaacgcgcacagacacaaaaaaaaaactctctccgttcctcttcacaccaaagcacgggaggcgaagaagaggacaaggggcggaaggctgcaaaccctagcgctgggtcgaagcaacgtcgtgcgccagccacaggcgccagacccgcgcgcacctgcattcgcgattcctttaccttcacgccgcggcaactccgcattgtgttgtgccgtgctttgtgccaggacggggatccatggcgttgtcggcgcgacgaggctcgtggtggtagggccgcgcgggtgccggatccgggagacgcggcatggcgctcttccgcaagttcttctaccgcaagccgcccgatgggctccttgagatcaccgaacgcgtctatgtgttcgattcttgcttcacaactgatgtcttcgatgatgataaataccgggattatattggtgacattgttgcacaacttcagagccacttcgctgatgcttcatttatggtcttcaactttcgggatggagacagtcaaagtttactggcgaatatattatcaagttatgatatggtagttatggactaccccagacaatacgagggatgccctctccttacaatagaaatgattcatcattacttgaggtcaggggagagttggctctctctgggccagcaaaatgtcctaataatgcattgtgagcgtggtggctgggctgtacttgcattcatgttagcaggactgctgttgtatagaaagcagttcattggtgagcagaggacactggaaatgatttacaggcaagctcctcatgaactggttcagttgtggtcaccattgaatcctatgccttctcagataagatacttacattacatatctcggaggaacgtgagttcagagtggccacctcaggaccgggcccttactttagactgtgttatactaagaaacattccaggcttcaatgaagagggaggatgtagaccaatattccgtatttatggacaggatcctttacctgctacaaataacacacctaaggtgctgtttgcaacaccaaaaaggagcaaatatgttaggctttacaagaaggtgatgttgtccttgaatgcattagcattgatgttgatcaagaacgagaagagatgatgttccgagtcatgttcaatacagcctttatcagatctaacattctgatgttaaaccgtgatgaaatcgatatattgtgggatgccaaagatcgattcccgaaggaattcagagctgaggttcttctttcagaaatggacactgccaatcagttaggtcccatggaggtggcaggtataggagagaaggggggtttaccagttgaagcatttgcaaaggttcaagagatgttcagcaatgtggactggctagatccaactggggatgctgcagtccagcttttccagcgacttacttcatcagaaaatattcagctgaggcaaggattcttgtccccaagtaagaaagaagcagaatcgttagagcttggttcaatctctccaatagacaagcattttgacaatgttcaacaagaaccaagcaaagttgaacaccccacagtctatgtgaacaaactggaaaatgttggccaagagagattggtcttgttggagcaaaccactaattctgaagttaaaactggaatttctgttgtccaagaaaatcctggctctctagttcacaaggttgacagtaacgcaaaacagtcaatttcactggaaaaggctgttccctctaccatgaaatctattgatccagttcttaaggatcaaaatgctaaacttgatgagcaacatggttcaggccaacactcttttcccactataattatgtcacagcgatttccaatttctagttcatgccctgctctttctggctactccagtcctagattactttcagcttgtccaagatttaatagtgcaccttcagcccttggaattacagctctgttggaagaccatgctggaagtgctgagaatcgttgtggttcaactactttgacctttgacacaacaggtactcctgttgtaacaaagggtatgccactgctacgccctccaccatcgccactagatttgctggtatcagattctactatgatgtcagaagcaaaaggctcatcccaacctaccctcaacaattcaggccttccatctcatccagagagacaattgacatttcagtcacttggaactactactccggccacaaatcatcagaaatcctcaactactgtcacaattgaattgttgccaacttctgctccacccccacccccactgcccccaccatcatcagttttcagttctaggatttatcatctgcctccatctccaacttctttcagatctccagcgccagctgcaccacaacctccacctgtgccacccccacctccacctatgcctaggccttttcctgtaaggtctcatgcaccacaaccgctgaccccccaaccacctgctttgagttcatctcttatactgtcagggacacctcaatccccaccttccccaccgccttctaggtgctctctcagtaaacctcctgcaccaccaccaccaccaccaccacctccactacttgcttctacttcatctaccattagacctgctgcatcacatctgcctctatttgcatctacttcatctcctgttaggcctgctgcaccccctccaccgcctgccccaacatcatcacctattagagcttcagcattgcctccacctccaccacctggaacgagctccagtccacgtccaccccctccaccatgctattcatcaaaacaatcatccagccccatgggcaaatcgatgccatcacctcctgttccgccaccaccctcccatggaggacgcaatggagcttctggtaacattgtacccccgccagcaccccctggcagtaatgctaaactgtttggtcctcaggggcgtggacctgcacctccttcaggtccaatgtcaaagagctttcaatctggccaggctgtgttgagaaggtctaatttgaagccacttcattgggtgaaagtaacaagagcaatgcatggtagtctgtgggcggagtcacagaagcctgacgaaactttaaaagctcctgtgtttgatatgtcagaattagaaaatcttttctcagctgcactgccaagttcagattcaaggcgttcagataagtcaggcagtcgtgcatctgggtcgaaaccagagaaaattcatcttattgatcttcgccgggctaacaattgtggaatcatgcttaccaaagtcaaaatgccactgcctgacctaatgagtgcaattctggctctggatgatactgttctggatgctgaccaggtggagaaccttattaagttcactccaactaaagatgaaattgaacttctaaagggttacaaaggagacaagcaagttcttggagaatgtgagcagttctttatggagcttatgaaattaccacgtgtagaatctaagctgagagttttctcatttaagattcaattccgttcccaggtttctgaccttaagcggaacctgaacattgttaattcttcagcagaagagatacgaggttcagtcaagttgaaaaggattatgcagacaattctttctctcggaaatgcattgaaccaaggcactgctagaggttctgctgttggtttcaggttggatagcttgcttaaacttagtgacacccgtgctcgtaacaataagatgactttaatgcactatttatctaagacactgaaggatttcctcattggtgcagaagctgaagttaggtctttgacttcactttattctaatgtgggccgaaatgcagatgcgttagcgctttattttggagaagatccagcacgatgtccatttgagcaagtagttacaacactccaaaattttgtgagattgttcacgcgttcccatgaagagaactgtaagcaactggatcttgaaaagaagaaagctctgaaggaagcagaagacaatagtaaacaactggaccttgaaaagaagaaaacccagaaggaagcagaaacagagaaaataaagaagaaatctgacagtgagaaagcttgtaagaaagaactggaaaatgataaatcttctaagaaggattcagcaaatgagaaaggcaagcttaacaatcccatcaaagagctagatatatcacttcaatcacctgcacaaactgccagtgccaaatgacgaccgtaccagatgaactaacagtagcttttccgaaagaggaaaactagttttggctgctcccaacagtgcttccttttgacgaatcatgcaggataaggaagccgaaaactgcacttttaatacgttctcaggggattgtcgaagaaattaacctggcgacaagctgtacagatctgacataataatagccttttcttttgggtaataatagattattcttacaatttttctgtcttcttgattatatgtagctaatgtctg

SEQ ID NO: 43324 - DNA, 4793 bp, Zea Mays
ccgaaagatcaaacgccccacctaaaacaccattaaagaaacgcgcacagacacaaaaaaaaaactctctccgttcctcttcacaccaaagcacgggaggcgaagaagaggacaaggggcggaaggctgcaaaccctagcgctgggtcgaagcaacgtcgtgcgccagccacaggcgccagacccgcgcgcacctgcattcgcgattcctttaccttcacgccgcggcaactccgcattgtgttgtgccgtgctttgtgccaggacggggatccatggcgttgtcggcgcgacgaggctcgtggtggtagggccgcgcgggtgccggatccgggagacgcggcatggcgctcttccgcaagttcttctaccgcaagccgcccgatgggctccttgagatcaccgaacgcgtctatgtgttcgattcttgcttcacaactgatgtcttcgatgatgataaataccgggattatattggtgacattgttgcacaacttcagagccacttcgctgatgcttcatttatggtcttcaactttcgggatggagacagtcaaagtttactggcgaatatattatcaagttatgatatggtagttatggactaccccagacaatacgagggatgccctctccttacaatagaaatgattcatcattacttgaggtcaggggagagttggctctctctgggccagcaaaatgtcctaataatgcattgtgagcgtggtggctgggctgtacttgcattcatgttagcaggactgctgttgtatagaaagcagttcattggtgagcagaggacactggaaatgatttacaggcaagctcctcatgaactggttcagttgtggtcaccattgaatcctatgccttctcagataagatacttacattacatatctcggaggaacgtgagttcagagtggccacctcaggaccgggcccttactttagactgtgttatactaagaaacattccaggcttcaatgaagagggaggatgtagaccaatattccgtatttatggacaggatcctttacctgctacaaataacacacctaaggtgctgtttgcaacaccaaaaaggagcaaatatgttaggctttacaagaaggcagactgtgaactgattaagattgacatccattgccatattcaaggtgatgttgtccttgaatgcattagcattgatgttgatcaagaacgagaagagatgatgttccgagtcatgttcaatacagcctttatcagatctaacattctgatgttaaaccgtgatgaaatcgatatattgtgggatgccaaagatcgattcccgaaggaattcagagctgaggttcttctttcagaaatggacactgccaatcagttaggtcccatggaggtggcaggtataggagagaaggggggtttaccagttgaagcatttgcaaaggttcaagagatgttcagcaatgtggactggctagatccaactggggatgctgcagtccagcttttccagcgacttacttcatcagaaaatattcagctgaggcaaggattcttgtccccaagtaagaaagaagcagaatcgttagagcttggttcaatctctccaatagacaagcattttgacaatgttcaacaagaaccaagcaaagttgaacaccccacagtctatgtgaacaaactggaaaatgttggccaagagagattggtcttgttggagcaaaccactaattctgaagttaaaactggaatttctgttgtccaagaaaatcctggctctctagttcacaaggttgacagtaacgcaaaacagtcaatttcactggaaaaggctgttccctctaccatgaaatctattgatccagttcttaaggatcaaaatgctaaacttgatgagcaacatggttcaggccaacactcttttcccactataattatgtcacagcgatttccaatttctagttcatgccctgctctttctggctactccagtcctagattactttcagcttgtccaagatttaatagtgcaccttcagcccttggaattacagctctgttggaagaccatgctggaagtgctgagaatcgttgtggttcaactactttgacctttgacacaacaggtactcctgttgtaacaaagggtatgccactgctacgccctccaccatcgccactagatttgctggtatcagattctactatgatgtcagaagcaaaaggctcatcccaacctaccctcaacaattcaggccttccatctcatccagagagacaattgacatttcagtcacttggaactactactccggccacaaatcatcagaaatcctcaactactgtcacaattgaattgttgccaacttctgctccacccccacccccactgcccccaccatcatcagttttcagttctaggatttatcatctgcctccatctccaacttctttcagatctccagcgccagctgcaccacaacctccacctgtgccacccccacctccacctatgcctaggccttttcctgtaaggtctcatgcaccacaaccgctgaccccccaaccacctgctttgagttcatctcttatactgtcagggacacctcaatccccaccttccccaccgccttctaggtgctctctcagtaaacctcctgcaccaccaccaccaccaccaccacctccactacttgcttctacttcatctaccattagacctgctgcatcacatctgcctctatttgcatctacttcatctcctgttaggcctgctgcaccccctccaccgcctgccccaacatcatcacctattagagcttcagcattgcctccacctccaccacctggaacgagctccagtccacgtccaccccctccaccatgctattcatcaaaacaatcatccagccccatgggcaaatcgatgccatcacctcctgttccgccaccaccctcccatggaggacgcaatggagcttctggtaacattgtacccccgccagcaccccctggcagtaatgctaaactgtttggtcctcaggggcgtggacctgcacctccttcaggtccaatgtcaaagagctttcaatctggccaggctgtgttgagaaggtctaatttgaagccacttcattgggtgaaagtaacaagagcaatgcatggtagtctgtgggcggagtcacagaagcctgacgaaactttaaaagctcctgtgtttgatatgtcagaattagaaaatcttttctcagctgcactgccaagttcagattcaaggcgttcagataagtcaggcagtcgtgcatctgggtcgaaaccagagaaaattcatcttattgatcttcgccgggctaacaattgtggaatcatgcttaccaaagtcaaaatgccactgcctgacctaatgagtgcaattctggctctggatgatactgttctggatgctgaccaggtggagaaccttattaagttcactccaactaaagatgaaattgaacttctaaagggttacaaaggagacaagcaagttcttggagaatgtgagcagttctttatggagcttatgaaattaccacgtgtagaatctaagctgagagttttctcatttaagattcaattccgttcccaggtttctgaccttaagcggaacctgaacattgttaattcttcagcagaagagatacgaggttcagtcaagttgaaaaggattatgcagacaattctttctctcggaaatgcattgaaccaaggcactgctagaggttctgctgttggtttcaggttggatagcttgcttaaacttagtgacacccgtgctcgtaacaataagatgactttaatgcactatttatctaaggtgctttctgagaaacttccagaacttctagatttcccgaaagacttgtctagcttagagctggcagcaaagttcttggagaactgatataatgcagatacaattgaagtctttagcagaggaaatgcaggctgtcaacaaaggactcgagaaagttgagcaagagcttactacatctgaaaatgatggtcctgtgtcagagatcttccgcaagacactgaaggatttcctcattggtgcagaagctgaagttaggtctttgacttcactttattctaatgtgggccgaaatgcagatgcgttagcgctttattttggagaagatccagcacgatgtccatttgagcaagtagttacaacactccaaaattttgtgagattgttcacgcgttcccatgaagagaactgtaagcaactggatcttgaaaagaagaaagctctgaaggaagcagaagacaatagtaaacaactggaccttgaaaagaagaaaacccagaaggaagcagaaacagagaaaataaagaagaaatctgacagtgagaaagcttgtaagaaagaactggaaaatgataaatcttctaagaaggattcagcaaatgagaaaggcaagcttaacaatcccatcaaagagctagatatatcacttcaatcacctgcacaaactgccagtgccaaatgacgaccgtaccagatgaactaacagtagcttttccgaaagaggaaaactagttttggctgctcccaacagtgcttccttttgacgaatcatgcaggataaggaagccgaaaactgcacttttaatacgttctcaggggattgtcgaagaaattaacctggcgacaagctgtacagatctgacataataatagccttttcttttgggtaataatagattattcttacaatttttctgtcttcttgattatatgtagctaatgtctg

SEQ ID NO: 43325 - DNA, 4806 bp, Zea Mays
aggcaacaaacacaatctcgcccaatctagctcactccgaaagatcaaacgccccacctaaaacaccattaaagaaacgcgcacagacacaaaaaaaaaactctctccgttcctcttcacaccaaagcacgggaggcgaagaagaggacaaggggcggaaggctgcaaaccctagcgctgggtcgaagcaacgtcgtgcgccagccacaggcgccagacccgcgcgcacctgcattcgcgattcctttaccttcacgccgcggcaactccgcattgtgttgtgccgtgctttgtgccaggacggggatccatggcgttgtcggcgcgacgaggctcgtggtggtagggccgcgcgggtgccggatccgggagacgcggcatggcgctcttccgcaagttcttctaccgcaagccgcccgatgggctccttgagatcaccgaacgcgtctatgtgttcgattcttgcttcacaactgatgtcttcgatgatgataaataccgggattatattggtgacattgttgcacaacttcagagccacttcgctgatgcttcatttatggtcttcaactttcgggatggagacagtcaaagtttactggcgaatatattatcaagttatgatatggtagttatggactaccccagacaatacgagggatgccctctccttacaatagaaatgattcatcattacttgaggtcaggggagagttggctctctctgggccagcaaaatgtcctaataatgcattgtgagcgtggtggctgggctgtacttgcattcatgttagcaggactgctgttgtatagaaagcagttcattggtgagcagaggacactggaaatgatttacaggcaagctcctcatgaactggttcagttgtggtcaccattgaatcctatgccttctcagataagatacttacattacatatctcggaggaacgtgagttcagagtggccacctcaggaccgggcccttactttagactgtgttatactaagaaacattccaggcttcaatgaagagggaggatgtagaccaatattccgtatttatggacaggatcctttacctgctacaaataacacacctaaggtgctgtttgcaacaccaaaaaggagcaaatatgttaggctttacaagaaggcagactgtgaactgattaagattgacatccattgccatattcaaggtgatgttgtccttgaatgcattagcattgatgttgatcaagaacgagaagagatgatgttccgagtcatgttcaatacagcctttatcagatctaacattctgatgttaaaccgtgatgaaatcgatatattgtgggatgccaaagatcgattcccgaaggaattcagagctgaggttcttctttcagaaatggacactgccaatcagttaggtcccatggaggtggcaggtataggagagaaggggggtttaccagttgaagcatttgcaaaggttcaagagatgttcagcaatgtggactggctagatccaactggggatgctgcagtccagcttttccagcgacttacttcatcagaaaatattcagctgaggcaaggattcttgtccccaagtaagaaagaagcagaatcgttagagcttggttcaatctctccaatagacaagcattttgacaatgttcaacaagaaccaagcaaagttgaacaccccacagtctatgtgaacaaactggaaaatgttggccaagagagattggtcttgttggagcaaaccactaattctgaagttaaaactggaatttctgttgtccaagaaaatcctggctctctagttcacaaggttgacagtaacgcaaaacagtcaatttcactggaaaaggctgttccctctaccatgaaatctattgatccagttcttaaggatcaaaatgctaaacttgatgagcaacatggttcaggccaacactcttttcccactataattatgtcacagcgatttccaatttctagttcatgccctgctctttctggctactccagtcctagattactttcagcttgtccaagatttaatagtgcaccttcagcccttggaattacagctctgttggaagaccatgctggaagtgctgagaatcgttgtggttcaactactttgacctttgacacaacaggtactcctgttgtaacaaagggtatgccactgctacgccctccaccatcgccactagatttgctggtatcagattctactatgatgtcagaagcaaaaggctcatcccaacctaccctcaacaattcaggccttccatctcatccagagagacaattgacatttcagtcacttggaactactactccggccacaaatcatcagaaatcctcaactactgtcacaattgaattgttgccaacttctgctccacccccacccccactgcccccaccatcatcagttttcagttctaggatttatcatctgcctccatctccaacttctttcagatctccagcgccagctgcaccacaacctccacctgtgccacccccacctccacctatgcctaggccttttcctgtaaggtctcatgcaccacaaccgctgaccccccaaccacctgctttgagttcatctcttatactgtcagggacacctcaatccccaccttccccaccgccttctaggtgctctctcagtaaacctcctgcaccaccaccaccaccaccaccacctccactacttgcttctacttcatctaccattagacctgctgcatcacatctgcctctatttgcatctacttcatctcctgttaggcctgctgcaccccctccaccgcctgccccaacatcatcacctattagagcttcagcattgcctccacctccaccacctggaacgagctccagtccacgtccaccccctccaccatgctattcatcaaaacaatcatccagccccatgggcaaatcgatgccatcacctcctgttccgccaccaccctcccatggaggacgcaatggagcttctggtaacattgtacccccgccagcaccccctggcagtaatgctaaactgtttggtcctcaggggcgtggacctgcacctccttcaggtccaatgtcaaagagctttcaatctggccaggctgtgttgagaaggtctaatttgaagccacttcattgggtgaaagtaacaagagcaatgcatggtagtctgtgggcggagtcacagaagcctgacgaaactttaaaagctcctgtgtttgatatgtcagaattagaaaatcttttctcagctgcactgccaagttcagattcaaggcgttcagataagtcaggcagtcgtgcatctgggtcgaaaccagagaaaattcatcttattgatcttcgccgggctaacaattgtggaatcatgcttaccaaagtcaaaatgccactgcctgacctaatgagtgcaattctggctctggatgatactgttctggatgctgaccaggtggagaaccttattaagttcactccaactaaagatgaaattgaacttctaaagggttacaaaggagacaagcaagttcttggagaatgtgagcagttctttatggagcttatgaaattaccacgtgtagaatctaagctgagagttttctcatttaagattcaattccgttcccaggtttctgaccttaagcggaacctgaacattgttaattcttcagcagaagagatacgaggttcagtcaagttgaaaaggattatgcagacaattctttctctcggaaatgcattgaaccaaggcactgctagaggttctgctgttggtttcaggttggatagcttgcttaaacttagtgacacccgtgctcgtaacaataagatgactttaatgcactatttatctaaggtgtgctttctgagaaacttccagaacttctagatttcccgaaagacttgtctagcttagagctggcagcaaagatacaattgaagtctttagcagaggaaatgcaggctgtcaacaaaggactcgagaaagttgagcaagagcttactacatctgaaaatgatggtcctgtgtcagagatcttccgcaagacactgaaggatttcctcattggtgcagaagctgaagttaggtctttgacttcactttattctaatgtgggccgaaatgcagatgcgttagcgctttattttggagaagatccagcacgatgtccatttgagcaagtagttacaacactccaaaattttgtgagattgttcacgcgttcccatgaagagaactgtaagcaactggatcttgaaaagaagaaagctctgaaggaagcagaagacaatagtaaacaactggaccttgaaaagaagaaaacccagaaggaagcagaaacagagaaaataaagaagaaatctgacagtgagaaagcttgtaagaaagaactggaaaatgataaatcttctaagaaggattcagcaaatgagaaaggcaagcttaacaatcccatcaaagagctagatatatcacttcaatcacctgcacaaactgccagtgccaaatgacgaccgtaccagatgaactaacagtagcttttccgaaagaggaaaactagttttggctgctcccaacagtgcttccttttgacgaatcatgcaggataaggaagccgaaaactgcacttttaatacgttctcaggggattgtcgaagaaattaacctggcgacaagctgtacagatctgacataataatagccttttcttttgggtaataatagattattcttacaatttttctgtcttcttgattatatgtagctaatgtctg

SEQ ID NO: 43326 - DNA, 3802 bp, Zea Mays
aggcaacaaacacaatctcgcccaatctagctcactccgaaagatcaaacgccccacctaaaacaccattaaagaaacgcgcacagacacaaaaaaaaaactctctccgttcctcttcacaccaaagcacgggaggcgaagaagaggacaaggggcggaaggctgcaaaccctagcgctgggtcgaagcaacgtcgtgcgccagccacaggcgccagacccgcgcgcacctgcattcgcgattcctttaccttcacgccgcggcaactccgcattgtgttgtgccgtgctttgtgccaggacggggatccatggcgttgtcggcgcgacgaggctcgtggtggtagggccgcgcgggtgccggatccgggagacgcggcatggcgctcttccgcaagttcttctaccgcaagccgcccgatgggctccttgagatcaccgaacgcgtctatgtgttcgattcttgcttcacaactgatgtcttcgatgatgataaataccgggattatattggtgacattgttgcacaacttcagagccacttcgctgatgcttcatttatggtcttcaactttcgggatggagacagtcaaagtttactggcgaatatattatcaagttatgatatggtagttatggactaccccagacaatacgagggatgccctctccttacaatagaaatgattcatcattacttgaggtcaggggagagttggctctctctgggccagcaaaatgtcctaataatgcattgtgagcgtggtggctgggctgtacttgcattcatgttagcaggactgctgttgtatagaaagcagttcattggtgagcagaggacactggaaatgatttacaggcaagctcctcatgaactggttcagttgtggtcaccattgaatcctatgccttctcagataagatacttacattacatatctcggaggaacgtgagttcagagtggccacctcaggaccgggcccttactttagactgtgttatactaagaaacattccaggcttcaatgaagagggaggatgtagaccaatattccgtatttatggacaggatcctttacctgctacaaataacacacctaaggtgctgtttgcaacaccaaaaaggagcaaatatgttaggctttacaagaaggcagactgtgaactgattaagattgacatccattgccatattcaaggtgatgttgtccttgaatgcattagcattgatgttgatcaagaacgagaagagatgatgttccgagtcatgttcaatacagcctttatcagatctaacattctgatgttaaaccgtgatgaaatcgatatattgtgggatgccaaagatcgattcccgaaggaattcagagctgaggttcttctttcagaaatggacactgccaatcagttaggtcccatggaggtggcaggtataggagagaaggggggtttaccagttgaagcatttgcaaaggttcaagagatgttcagcaatgtggactggctagatccaactggggatgctgcagtccagcttttccagcgacttacttcatcagaaaatattcagctgaggcaaggattcttgtccccaagtaagaaagaagcagaatcgttagagcttggttcaatctctccaatagacaagcattttgacaatgttcaacaagaaccaagcaaagttgaacaccccacagtctatgtgaacaaactggaaaatgttggccaagagagattggtcttgttggagcaaaccactaattctgaagttaaaactggaatttctgttgtccaagaaaatcctggctctctagttcacaaggttgacagtaacgcaaaacagtcaatttcactggaaaaggctgttccctctaccatgaaatctattgatccagttcttaaggatcaaaatgctaaacttgatgagcaacatggttcaggccaacactcttttcccactataattatgtcacagcgatttccaatttctagttcatgccctgctctttctggctactccagtcctagattactttcagcttgtccaagatttaatagtgcaccttcagcccttggaattacagctctgttggaagaccatgctggaagtgctgagaatcgttgtggttcaactactttgacctttgacacaacaggtactcctgttgtaacaaagggtatgccactgctacgccctccaccatcgccactagatttgctggtatcagattctactatgatgtcagaagcaaaaggctcatcccaacctaccctcaacaattcaggccttccatctcatccagagagacaattgacatttcagtcacttggaactactactccggccacaaatcatcagaaatcctcaactactgtcacaattgaattgttgccaacttctgctccacccccacccccactgcccccaccatcatcagttttcagttctaggatttatcatctgcctccatctccaacttctttcagatctccagcgccagctgcaccacaacctccacctgtgccacccccacctccacctatgcctaggccttttcctgtaaggtctcatgcaccacaaccgctgaccccccaaccacctgctttgagttcatctcttatactgtcagggacacctcaatccccaccttccccaccgccttctaggtgctctctcagtaaacctcctgcaccaccaccaccaccaccaccacctccactacttgcttctacttcatctaccattagacctgctgcatcacatctgcctctatttgcatctacttcatctcctgttaggcctgctgcaccccctccaccgcctgccccaacatcatcacctattagagcttcagcattgcctccacctccaccacctggaacgagctccagtccacgtccaccccctccaccatgctattcatcaaaacaatcatccagccccatgggcaaatcgatgccatcacctcctgttccgccaccaccctcccatggaggacgcaatggagcttctggtaacattgtacccccgccagcaccccctggcagtaatgctaaactgtttggtcctcaggggcgtggacctgcacctccttcaggtccaatgtcaaagagctttcaatctggccaggctgtgttgagaaggtctaatttgaagccacttcattgggtgaaagtaacaagagcaatgcatggtagtctgtgggcggagtcacagaagcctgacgaaactttaaaagctcctgtgtttgatatgtcagaattagaaaatcttttctcagctgcactgccaagttcagattcaaggcgttcagataagtcaggcagtcgtgcatctgggtcgaaaccagagaaaattcatcttattgatcttcgccgggctaacaattgtggaatcatgcttaccaaagtcaaaatgccactgcctgacctaatgagtgcaattctggctctggatgatactgttctggatgctgaccaggtggagaaccttattaagttcactccaactaaagatgaaattgaacttctaaagggttacaaaggagacaagcaagttcttggagaatgtgagcagttctttatggagcttatgaaattaccacgtgtagaatctaagctgagagttttctcatttaagattcaattccgttcccaggtttctgaccttaagcggaacctgaacattgttaattcttcagcagaagagatacgaggttcagtcaagttgaaaaggattatgcagacaattctttctctcggaaatgcattgaaccaaggcactgctagaggagttccataa

SEQ ID NO: 43327 - DNA, 2058 bp, Zea Mays
accatttcaccaaattggcaagaaagccgctagcaatccacagttgcgatttgcgggaacaactactactatcaaaaactttcgacattcgattatgctggcgatggaaatggagctcctggtccgatttcaatgagagccataggcctccaaaaatagggttcaaaaagggccagagagcaaggagtcatcccatttttagccgttgccgtagctggtcgtcgtcgtcgtcgctgctcccaatctgcggccgtcggtgttgccttcgactttaatccacaagggcgagcagcaccgaccgagccgatccgctcctcttcttggttcttcttcaataaatcagcagagcaggaaagatctgtgagcgttcttgcagccggcaggggtccaggattacgaaggaaaccaagaacgcaagaaacgtctaagaagaggggaggaaagatttgggtgtagattggtagatatattacacaggttttgttttggtgtaggttattagcaaataaatagctggagaagaagcctggcaaaaaaaaggtgaaatttgtggagaacatgtttgggatccaaaccagggatgtggcagaagatttcaactcctggaggaggacattaaggaacacacccaccgtctcaatgcccatgaacaaccacaacattatgtacaacacaggcaagagtttgttcaatgtacacctcatgtctgtcaagtttgaagacctgtatggattcatggtggagggcaatgtggacgatgtcaatgtgctgaatgaggtgcgggagaggatcagggagcaaggcagggtgtggtgggcgctggaggcaagcaagggtgcaaattggtatctccaaccaaagatttcttcaaacgagggggtgatcagtgtcacatcactcaagttgtcagtgctcactaatacaattacattgaggaggttgatcaggaaaggtgtccccccggtgttgaggccaaagatctggttatctgtgtcaggagcagccaagaagcggtcaacggtgccagaaacatactatgatgagctaattcgtgctacggaggggaaaaccacaccagccacaaggcaaatcgatcatgatcttcctcgcactttcccttgtcatccttggttgaacagtgacaaaggtcaggcatctctgcggcgagtacttgtggggtactcattccgtgattcagaagttgggtactgccagacagaggaggatgcattttggatgcttgctgtactccttgagaatgtacttgtcagtgattgctatactgacactctttctggatgtcatgtcgagcagagggtgttcaaagatctcctggctaagaagtgtccaaggattgctgctcaccttgaagcaatggggtttgatgtttcacttgttgctacagaatggtttttgtgcctcttctcaaagagcctgccttcagagacaacacttcgggtatgggatatattattcaatgaaggagccaatgttttgttccgtgttgctctcgcaattttcaagatgcgagaagatgatctactgcgcatccaacatatcggtgatgtgattgatattttgcaaacaaccacacatcatctatatgaccctgatgaactcctgacattcgcgtttgacaagattggttcaatgccaacaaatacaatcacaaaggaaaggaaaaagcaggagactgttgtcctggctgagcttgatcaaagaacaagacggctgagttcactcaagatggatggatagtttgtaaaatacaagttcttgaaagctgtagtcttggcctattcggcacctggtcccacagcgtatgcttcactgagcgaaaaatcatgggtctaccgaatactgggagatggaaagctgcagtatgtgtttgttgaacacgagtttttggacttcatattgtgtgcttttgtgtgttcttcctttgtgtttgcaattcatatttacaagatacgggccatggtgctgatttctcttattatgtatatgtctatttcatatctatttttatatatcttataattttaaaacctactaaaa

SEQ ID NO: 43328 - DNA, 2119 bp, Zea Mays
aacccgtatgctgagccggtgagccccaccatttcaccaaattggcaagaaagccgctagcaatccacagttgcgatttgcgggaacaactactactatcaaaaactttcgacattcgattatgctggcgatggaaatggagctcctggtccgatttcaatgagagccataggcctccaaaaatagggttcaaaaagggccagagagcaaggagtcatcccatttttagccgttgccgtagctggtcgtcgtcgtcgtcgctgctcccaatctgcggccgtcggtgttgccttcgactttaatccacaagggcgagcagcaccgaccgagccgatccgctcctcttcttggttcttcttcaataaatcagcagagcaggaaagatctgtgagcgttcttgcagccggcaggattacgaaggaaaccaagaacgcaagaaacgtctaagaagaggggaggaaagatttgggtgtagattggtagatatattacacaggttttgttttggtgtaggttattagcaaataaatagctggagaagaagcctggcaaaaaaaaggtgaaatttgtggagaacatgtttgggatccaaaccagggatgtggcagaagatttcaactcctggaggaggacattaaggaacacacccaccgtctcaatgcccatgaacaaccacaacattatgtacaacacaggcaagagtttgttcaatgtacacctcatgtctgtcaagtttgaagacctgtatggattcatggtggagggcaatgtggacgatgtcaatgtgctgaatgaggtgcgggagaggatcagggagcaaggcagggtgtggtgggcgctggaggcaagcaagggtgcaaattggtatctccaaccaaagatttcttcaaacgagggggtgatcagtgtcacatcactcaagttgtcagtgctcactaatacaattacattgaggaggttgatcaggaaaggtgtccccccggtgttgaggccaaagatctggttatctgtgtcaggagcagccaagaagcggtcaacggtgccagaaacatactatgatgagctaattcgtgctacggaggggaaaaccacaccagccacaaggcaaatcgatcatgatcttcctcgcactttcccttgtcatccttggttgaacagtgacaaaggtcaggcatctctgcggcgagtacttgtggggtactcattccgtgattcagaagttgggtactgccagggtctaaactatgtagctgcactcttgttgcttgtgatgaagacagaggaggatgcattttggatgcttgctgtactccttgagaatgtacttgtcagtgattgctatactgacactctttctggatgtcatgtcgagcagagggtgttcaaagatctcctggctaagaagtgtccaaggattgctgctcaccttgaagcaatggggtttgatgtttcacttgttgctacagaatggtttttgtgcctcttctcaaagagcctgccttcagagacaacacttcgggtatgggatatattattcaatgaaggagccaatgttttgttccgtgttgctctcgcaattttcaagatgcgagaagatgatctactgcgcatccaacatatcggtgatgtgattgatattttgcaaacaaccacacatcatctatatgaccctgatgaactcctgacattcgcgtttgacaagattggttcaatgccaacaaatacaatcacaaaggaaaggaaaaagcaggagactgttgtcctggctgagcttgatcaaagaacaagacggctgagttcactcaagatggatggatagtttgtaaaatacaagttcttgaaagctgtagtcttggcctattcggcacctggtcccacagcgtatgcttcactgagcgaaaaatcatgggtctaccgaatactgggagatggaaagctgcagtatgtgtttgttgaacacgagtttttggacttcatattgtgtgcttttgtgtgttcttcctttgtgtttgcaattcatatttacaagatacgggccatggtgctgatttctcttattatgtatatgtctatttcatatctatttttatatatcttataattttaaaacctactaaaa

SEQ ID NO: 43329 - DNA, 1712 bp, Zea Mays
cacgtgtacgggtagctattgtttataaattgcagaagacacctcaacatgatggataattgtatacgcaaaactactttcctcgaattccccattctataaattccagttaaacttaattcgtaagatcaatcataattctcgagttgcaaaccatggacatggctttggcgtctaaagcctcccctccgccatggaatgccaccgccgccgagcagccaattccaaagcgtgacaaagccgctgcaaatgattcaacatacctcaatcctcaagctcatgatagtgttcttggaatcattctgggaggtggtgctgggactagattgtaccccttgacaaagaagcgtgccaagcctgcagtgccattgggtgccaactatagactgattgatattcctgtcagcaattgtctcaacagcaacatatccaagatctatgtgctaacgcaatttaactctgcttccctcaaccgtcacctctcaagagcctacgggagcaacattggagggtacaagaatgaagggtttgttgaagtcttagctgcacagcagagcccagataatccaaactggtttcagggtactgcagatgctgtaaggcagtacttgtggttgtttgaggagcataatgtgatggaatttctaattcttgctggcgatcacctgtaccggatggactatgaaaagttcattcaggcacacagagaaacaaatgctgatattaccgttgctgccctaccgatggatgagaaacgtgcaactgcatttggcctcatgaaaattgatgaagaagggaggatcattgagtttgctgagaaaccgaaaggagagcagttgaaagcaatgatggttgacaccaccatacttggccttgatgacgtgagggcaaaggaaatgccttatattgctagcatgggtatctatgttttcagcaaagatgtaatgcttcagctcctccgtgaacaatttcctgaagccaatgactttggaagtgaggttattccaggtgcaaccagcattggaaagagggttcaggcttatctgtatgatggttactgggaagatatcggtaccattgcggcattttataatgcaaacttgggaataaccaagaagccaataccagatttcagcttctatgaccgttttgctccaatttatacacaacctcgacacctgccaccttcaaaggttcttgatgctgatgtgacagacagtgttattggtgaaggatgtgttattaaaaactgcaagataaaccattctgtagttggactccgatcttgcatatctgaaggtgctatcatagaggacagtttactaatgggtgcggactactatgagacagaagctgataaaaaactccttgccgaaaaaggtggcattcctattggtattgggaaaaattcatgcatcaggagagcaatcattgacaagaatgctcgaattggagacaatgttaagatactcaatgctgacaatgttcaagaagctgcaatggagacagacgggtacttcatcaaaggtggaattgtcacagtgatcaaggatgctttactccctagtggaacagttatatgaagtgaacgtgcgacatgcagctgtgtgtctcgacattcgacaatgatcagcacctggttacatgcgtgatctgcagatcagtctgttggagatcatcggagcaataaaagtgtcatccaagggtgtgag

SEQ ID NO: 43330 - DNA, 1837 bp, Zea Mays
agttaaacttaattcgtaagatcaatcataattctcgagttgcaaaccatggacatggctttggcgtctaaagcctcccctccgccatggaatgccaccgccgccgagcagccaattccaaagcgtgacaaagccgctgcaaatgattcaacatacctcaatcctcaagctcatgatagtgttcttggaatcattctgggaggtggtgctgggactagattgtaccccttgacaaagaagcgtgccaagcctgcagtgccattgggtgccaactatagactgattgatattcctgtcagcaattgtctcaacagcaacatatccaagatctatgtgctaacgcaatttaactctgcttccctcaaccgtcacctctcaagagcctacgggagcaacattggagggtacaagaatgaagggtttgttgaagtcttagctgcacagcagagcccagataatccaaactggtttcagggtactgcagatgctgtaaggcagtacttgtggttgtttgaggagcataatgtgatggaatttctaattcttgctggcgatcacctgtaccggatggactatgaaaagttcattcaggcacacagagaaacaaatgctgatattaccgttgctgccctaccgatggatgagaaacgtgcaactgcatttggcctcatgaaaattgatgaagaagggaggatcattgagtttgctgagaaaccgaaaggagagcagttgaaagcaatgatggttgacaccaccatacttggccttgatgacgtgagggcaaaggaaatgccttatattgctagcatgggtatctatgttttcagcaaagatgtaatgcttcagctcctccgtgaacaatttcctgaagccaatgactttggaagtgaggttattccaggtgcaaccagcattggaaagagggttcaggcttatctgtatgatggttactgggaagatatcggtaccattgcggcattttataatgcaaacttgggaataaccaagaagccaataccagatttcagcttctatgaccgttttgctccaatttatacacaacctcgacacctgccaccttcaaaggttcttgatgctgatgtgacagacagtgttattggtgaaggatgtgttattaaaaactgcaagataaaccattctgtagttggactccgatcttgcatatctgaaggtgctatcatagaggacagtttactaatgggtgcggactactatgagaagctgataaaaaactccttgccgaaaaaggtggcattcctattggtattgggaaaaattcatgcatcaggagagcaatcattgacaagaatgctcgaattggagacaatgttaagatactcaatgctgacaatgttcaagaagctgcaatggagacagacgggtacttcatcaaaggtggaattgtcacagtgatcaaggatgctttactccctagtggaacagttatatgaagtgaacgtgcgacatgcagctgtgtgtctcgacattcgacaatgatcagcacctggttacatgcgtgatctgcagatcagtctgttggagatcatcggagcaataaaagtgtcatccaaggcattttttctttctttttgctcttttgtgtccttcaatgttgtagggtagaatgttgtagcagcaaatgttagttacatgttgaatcgacattgggggcctggatttggggatacatcatgctgtaaattgatcagtttaattaccatactgtgctgctttgagcgaagccatggagaccatgctccacttttgtgcctgacgaatataagcgttgctggtttggagtgcggattttaaagat

SEQ ID NO: 43331 - DNA, 1711 bp, Zea Mays
acagtgtgttgctttttccattgaaagaagttccaaaagcaagattcctgtgtggccattcctggttctttcatgcatcggaggagcatatgctttgattccttactttgtcttatggaagcctcctccacctcccattgacgaagatgaaattggacaatggccattaaaatttctcgagtcaaagttaactgcaggactagtgtttgccctgggcattggactgatcatatatgctggcaaagctggtggcgacgattggaaggaattcattcgatacttcagggagagcaagtttatccatgccacctgccttgattttactttgctatcagccttctcaccattttgggtctataacgacatgacagcaaggcgatggaaaaatggttcatggcttctgccgcttgcactgataccttttgtggggccctcactgtatcttctactgcgcccatcactttcttccttgctggaagcatctgcttcagcatctgatgagttcaaaaaataattggtatctaactcagaactgatggagaatttggttgtgagcacatgacatgggtagagaaatggttatctggcaactgcatttgttagcccaaatgctatgtcaattgctgatttggaggaaatccacaattttgcatgccacctccctgttcaaaatgaaaggacccaatgagatcctgacaatgaagatattgtcagtattatcatcacctgggtgcctcacaaattttgtcagtgttatatttatgtgtaatccacaattttttaatcactgatgaagcagtgtaagtatgcaacaaactactaggatattatacttgtatacataggtggttcagagtatagaatattttgctcctgttacagtggaacgtaataagccaaagtagtatcactacacctttgaagcacgaatttcttcgtgtgtcgccctccctcccgtgctaataatgcagtgtatgtatgcaacaaactactaggatattatatttgtataaatggagatgaaatccaatagaaaatcgttggagcataacccctttagcgacgcgtcatattggaactcgggtatgatgttcaatgggtaatggccaggccgtcaccccttggtggcgcgttgtgtggtgatgttgtagattcttttgttggaaggcattatgctaggcgccagatttagtttgttaagaagtactaaaagttaggcaataattaaggaggcttatcctcccgggagagttatcttatcccctagaaaatctgtagtatggttaggcacctaagctataaaggtggccttagattgtactaggagatttatcaaagaagttgtgcctgtgggtgcggctgcttgatcaccctggtagaacctacgccatctggtgatcttagctcccagccgccacacagcataccctattccctgcgttcttctactcaatccaccttaatatcccacccttcgtggtgcactcctccccgccctgcgcatcgcagccgggttcacaacaatttggtatcagattccaaagctgcagcgacatccatgtccggcagcgacgaagatcctgggaagatgactgactccgagaagctggaccgtattctgggacagctggccacaatgaacaaccgcctggacgcccacgctcaacggctcgctctcctagaacaggaacctgttcagccgacaggatca

SEQ ID NO: 43332 - DNA, 2798 bp, Zea Mays
aaattttcattccaaccttatctcctcctgtccgtactactagcggtcattgtccagccatcctcaggcagcttcgagttccacgacgagagcaccggcagccgcacacgcgtttgtctcctcgccggaccttcccggcaccgccgccggctctccctcacggtccactacactccacagcaccgccgtcgcacaacgacatggcctcctccgctacctatctcatgctcgccagcgcccacgctcccctcgctcctctcataaggccaccgccgatggcccttgtcgcgagaaccgccgcaacctccatcactaggcgcgaaagagccagtgtccctctgttagtcaaccccgctgcgtgccggccgggactgcggcgccgtggctgggcccatatctgcagagactcgtccctccagggcccttcgggcgccgattctcctgctcaggagcaagaggatctgaagaagagcgaggcggtgtcagaggctgcggctcggattgccggaggcactggcgggacgttaagcgactggagcacgtcggtgctcatcttcgggatctgggcgggactcatgtactacgtcttcctgctcgcgcctaaccagacaccataccgagacacatacttcttgcagaaacttttaaatctgaagggcgacgatggctttcgaatgaatgatgttcttgtttctctatggtacattatgggcctctggccactagtctacagtatgttgctccttcctactggtagaagttccaaaagcaagattcctgtgtggccattcctggttctttcatgcatcggaggagcatatgctttgattccttactttgtcttatggaagcctcctccacctcccattgacgaagatgaaattggacaatggccattaaaatttctcgagtcaaagttaactgcaggactagtgtttgccctgggcattggactgatcatatatgctggcaaagctggtggcgacgattggaaggaattcattcgatacttcagggagagcaagtttgtaagttatgcaacatgattcagtgttatatctagagtaaatggctgcacatgatatcatgtatttaatatttacacttcttacatgttcttgcatttgagttagttgttgctttaacaacccctaaacaatcttgctattcagtgtgatcacaaatacaaacatgttaaaagtttaaaattttaaaatagttactgatcaagtttcctctatcttataaagttcaaagatcataagtgaatatgttgatcataccataatttgattacatgccattgccacacatttcattactatgaatctaattagtgtgtgggtgtcaagttaattttctatttcttttatgtcacgtgccagatccatgccacctgccttgattttactttgctatcagccttctcaccattttgggtctataacgacatgacagcaaggcgatggaaaaatggttcatggcttctgccgcttgcactgataccttttgtggggccctcactgtatcttctactgcgcccatcactttcttccttgctggaagcatctgcttcagcatctgatgagttcaaaaaataattggtatctaactcagaactgatggagaatttggttgtgagcacatgacatgggtagagaaatggttatctggcaactgcatttgttagcccaaatgctatgtcaattgctgatttggaggaaatccacaattttgcatgccacctccctgttcaaaatgaaaggacccaatgagatcctgacaatgaagatattgtcagtattatcatcacctgggtgcctcacaaattttgtcagtgttatatttatgtgtaatccacaattttttaatcactgatgaagcagtgtaagtatgcaacaaactactaggatattatacttgtatacataggtggttcagagtatagaatattttgctcctgttacagtggaacgtaataagccaaagtagtatcactacacctttgaagcacgaatttcttcgtgtgtcgccctccctcccgtgctaataatgcagtgtatgtatgcaacaaactactaggatattatatttgtataaatggagatgaaatccaatagaaaatcgttggagcataacccctttagcgacgcgtcatattggaactcgggtatgatgttcaatgggtaatggccaggccgtcaccccttggtggcgcgttgtgtggtgatgttgtagattcttttgttggaaggcattatgctaggcgccagatttagtttgttaagaagtactaaaagttaggcaataattaaggaggcttatcctcccgggagagttatcttatcccctagaaaatctgtagtatggttaggcacctaagctataaaggtggccttagattgtactaggagatttatcaaagaagttgtgcctgtgggtgcggctgcttgatcaccctggtagaacctacgccatctggtgatcttagctcccagccgccacacagcataccctattccctgcgttcttctactcaatccaccttaatatcccacccttcgtggtgcactcctccccgccctgcgcatcgcagccgggttcacaacaatttggtatcagattccaaagctgcagcgacatccatgtccggcagcgacgaagatcctgggaagatgactgactccgagaagctggaccgtattctgggacagctggccacaatgaacaaccgcctggacgcccacgctcaacggctcgctctcctagaacaggaacctgttcagccgacaggatca

SEQ ID NO: 43333 - DNA, 1784 bp, Zea Mays
cgaaaggttatcccacctcttttctattcttttttccgcccgaagacaacgtaacaaaccaacgataatcctccctcttgctacaaaaaaggaaaaaaaaacatcaataataatccactgcggtcgctcgtcctcctcccaacctcctcccaagttgcctcgtgctctgcttcttcggttttcaggagcgtcggccattgctgctggaaaagcagaccattgggactccctcgtgcgttttccaaatcagtcaggttgatggcgatggagggaccagttttatgccgccctgcaatgcaagccaaatcgcctgctgctgcgctggtcaacaactccctgaccagattcgggcagcttgggaccatttcaaaatacaggaacgtttcaagattcatttctcccatctctcagccatctacgaagaacataggtccatgctgtagcttcagctcgtcttctgatggcaatggatacatggctggaaactttagcgacagtgatgaagattatgttaattctactgtgctagaagcagttgaggtgagaagtggatcggaaggatatgtgataaagatgcgagatgggaaaaacttgcgttgtgtccataacaattctcaagggagaaatattccagagagtgcaccccaacctgctattgttttgaggattgaagatggaagcgaaactttacttccaatcattgttttggagatgccaagtgtacttctgatggcggctattcgtaatgtccacattgcacgaccaaccatatatcaagttgtcaaggaaatgattgataaaatgggctatgaggtaaaacttgttcgggtaaacaaaagaattcaagaagcgtactgtgctgaactttgtctaacaaagattgatgattctacagacagcatcaccttcgatcttcggccttcagatgccataaacattgctgttcgttgcaaggttcctgtacaagtccatagaagtcttgcatacagtgacggcatcagaccagtcgagccagcaagaatggcagtagcagctggcctatcagatgggttgttatttacagagcttgacaggtattctagaaggcgaataagaattttacagtagctgtaggatttgtttttaatattttcgtgatctgcccccaactttgcttgtggtctaagaagctttgttgttgttgattatctgccctgcaacttattgcttctaccgtgttatttctgagggcatggagggactgatgaatcgatatgtttcttagacctttcactgatatatccaacaaactggtttcgtacattcgagtatattctgtgcatttaagatccagaactccaatatatgaatctgtatgttaatttttgttacacttgcatttttgttagacccgatggacaggcatctgttgaggctcaagagtttggattggtgaagaacatgctcattgcagccgtagaagagagatacaaggatgctgcatcatggaaggacaaactgatgcggctgaggtctaagcggaagaactgggcctgacagcgttgcatgtctggatggtgtaaataaagatgatgcccagctgaattccagtacgcattccagataattgatgctgggttatggctatgtaactagctgtacatattgtatggacccgaggatggtcttctgtaaattcagactaagctttgaagtgaaacactaatccttcggagaaacttggtaccttgtccgtgttcacttgtggtatataatgttggaaattaacagggttaagattaatt

SEQ ID NO: 43334 - DNA, 2275 bp, Zea Mays
cgaaaggttatcccacctcttttctattcttttttccgcccgaagacaacgtaacaaaccaacgataatcctccctcttgctacaaaaaaggaaaaaaaaacatcaataataatccactgcggtcgctcgtcctcctcccaacctcctcccaagttgcctcgtgctctgcttcttcggttttcaggagcgtcggccattgctgctggaaaagcagaccattgggactccctcgtgcgttttccaaatcaggttcgttcttgacgcggtctgcgatccgattgtttcggctcccttgcacaccattgggactcgttacccatctcgtggactcttctgtttcttctccttttctccccccgtttattggaccagcggcggcttgctcctcttcgtgtaacgggatttggttttctgcggatgagtgtttattgttcgatgcggagcttcgatctggattcgtgcttgtcctcttggtctctgctcgctttgtaatgcttgggtacggtgcgctgaaggtgtttggggggtatgattgttgttgcacctgaataactgaggtgggtgtggcgcgaacttgggggtgtcttctctttggcgatcagtgcaatcgaatggtcagttgagttagatagtttttacatcggcgttgatggacttgcataattatgtgcgaatcatgggatcattaacttggtataaggggacgatcagtgatatgtgaagctgtcatgtttaggtgcttgattcagcaaagtggttaggcatccgacgctacgttttggggattgagatgcaaaataaagttcagcacttaactatggatcaagggttgtagagcgcaacccagctcttctgaatccaaactgtaggttgatacgtcggtgccatgaaactgaaaaccgatagttgtggcataggctcagggcaagaatcattttttttttcattttctgacttttccgtaactataggtcacacgatgattattttctccgcgacattatccgggtattaccgtgacagatatttttattggctccatttctgccatgtagtcaggttgatggcgatggagggaccagttttatgccgccctgcaatgcaagccaaatcgcctgctgctgcgctggtcaacaactccctgaccagattcgggcagcttgggaccatttcaaaatacaggaacgtttcaagattcatttctcccatctctcagccatctacgaagaacataggtccatgctgtagcttcagctcgtcttctgatggcaatggatacatggctggaaactttagcgacagtgatgaagattatgttaattctactgtgctagaagcagttgaggtgagaagtggatcggaaggatatgtgataaagatgcgagatgggaaaaacttgcgttgtgtccataacaattctcaagggagaaatattccagagagtgcaccccaacctgctattgttttgaggattgaagatggaagcgaaactttacttccaatcattgttttggagatgccaagtgtacttctgatggcggctattcgtaatgtccacattgcacgaccaaccatatatcaagttgtcaaggaaatgattgataaaatgggctatgaggtaaaacttgttcgggtaaacaaaagaattcaagaagcgtactgtgctgaactttgtctaacaaagattgatgattctacagacagcatcaccttcgatcttcggccttcagatgccataaacattgctgttcgttgcaaggttcctgtacaagtccatagaagtcttgcatacagtgacggcatcagaccagtcgagccagcaagaatggcagtagcagctggcctatcagatgggttgttatttacagagcttgacagacccgatggacaggcatctgttgaggctcaagagtttggattggtgaagaacatgctcattgcagccgtagaagagagatacaaggatgctgcatcatggaaggacaaactgatgcggctgaggtctaagcggaagaactgggcctgacagcgttgcatgtctggatggtgtaaataaagatgatgcccagctgaattccagtacgcattccagataattgatgctgggttatggctatgtaactagctgtacatattgtatggacccgaggatggtcttctgtaaattcagactaagctttgaagtgaaacactaatccttcggagaaacttggtaccttgtccgtgttcacttgtggtatataatgttggaaattaacagggttaagattaatt

SEQ ID NO: 43335 - DNA, 1780 bp, Zea Mays
cgaaaggttatcccacctcttttctattcttttttccgcccgaagacaacgtaacaaaccaacgataatcctccctcttgctacaaaaaaggaaaaaaaaacatcaataataatccactgcggtcgctcgtcctcctcccaacctcctcccaagttgcctcgtgctctgcttcttcggttttcaggagcgtcggccattgctgctggaaaagcagaccattgggactccctcgtgcgttttccaaatcaggttgatggcgatggagggaccagttttatgccgccctgcaatgcaagccaaatcgcctgctgctgcgctggtcaacaactccctgaccagattcgggcagcttgggaccatttcaaaatacaggaacgtttcaagattcatttctcccatctctcagccatctacgaagaacataggtccatgctgtagcttcagctcgtcttctgatggcaatggatacatggctggaaactttagcgacagtgatgaagattatgttaattctactgtgctagaagcagttgaggtgagaagtggatcggaaggatatgtgataaagatgcgagatgggaaaaacttgcgttgtgtccataacaattctcaagggagaaatattccagagagtgcaccccaacctgctattgttttgaggattgaagatggaagcgaaactttacttccaatcattgttttggagatgccaagtgtacttctgatggcggctattcgtaatgtccacattgcacgaccaaccatatatcaagttgtcaaggaaatgattgataaaatgggctatgaggtaaaacttgttcgggtaaacaaaagaattcaagaagcgtactgtgctgaactttgtctaacaaagattgatgattctacagacagcatcaccttcgatcttcggccttcagatgccataaacattgctgttcgttgcaaggttcctgtacaagtccatagaagtcttgcatacagtgacggcatcagaccagtcgagccagcaagaatggcagtagcagctggcctatcagatgggttgttatttacagagcttgacaggtattctagaaggcgaataagaattttacagtagctgtaggatttgtttttaatattttcgtgatctgcccccaactttgcttgtggtctaagaagctttgttgttgttgattatctgccctgcaacttattgcttctaccgtgttatttctgagggcatggagggactgatgaatcgatatgtttcttagacctttcactgatatatccaacaaactggtttcgtacattcgagtatattctgtgcatttaagatccagaactccaatatatgaatctgtatgttaatttttgttacacttgcatttttgttagacccgatggacaggcatctgttgaggctcaagagtttggattggtgaagaacatgctcattgcagccgtagaagagagatacaaggatgctgcatcatggaaggacaaactgatgcggctgaggtctaagcggaagaactgggcctgacagcgttgcatgtctggatggtgtaaataaagatgatgcccagctgaattccagtacgcattccagataattgatgctgggttatggctatgtaactagctgtacatattgtatggacccgaggatggtcttctgtaaattcagactaagctttgaagtgaaacactaatccttcggagaaacttggtaccttgtccgtgttcacttgtggtatataatgttggaaattaacagggttaagattaatt

SEQ ID NO: 43336 - DNA, 1469 bp, Zea Mays
cgaaaggttatcccacctcttttctattcttttttccgcccgaagacaacgtaacaaaccaacgataatcctccctcttgctacaaaaaaggaaaaaaaaacatcaataataatccactgcggtcgctcgtcctcctcccaacctcctcccaagttgcctcgtgctctgcttcttcggttttcaggagcgtcggccattgctgctggaaaagcagaccattgggactccctcgtgcgttttccaaatcagtcaggttgatggcgatggagggaccagttttatgccgccctgcaatgcaagccaaatcgcctgctgctgcgctggtcaacaactccctgaccagattcgggcagcttgggaccatttcaaaatacaggaacgtttcaagattcatttctcccatctctcagccatctacgaagaacataggtccatgctgtagcttcagctcgtcttctgatggcaatggatacatggctggaaactttagcgacagtgatgaagattatgttaattctactgtgctagaagcagttgaggtgagaagtggatcggaaggatatgtgataaagatgcgagatgggaaaaacttgcgttgtgtccataacaattctcaagggagaaatattccagagagtgcaccccaacctgctattgttttgaggattgaagatggaagcgaaactttacttccaatcattgttttggagatgccaagtgtacttctgatggcggctattcgtaatgtccacattgcacgaccaaccatatatcaagttgtcaaggaaatgattgataaaatgggctatgaggtaaaacttgttcgggtaaacaaaagaattcaagaagcgtactgtgctgaactttgtctaacaaagattgatgattctacagacagcatcaccttcgatcttcggccttcagatgccataaacattgctgttcgttgcaaggttcctgtacaagtccatagaagtcttgcatacagtgacggcatcagaccagtcgagccagcaagaatggcagtagcagctggcctatcagatgggttgttatttacagagcttgacagacccgatggacaggcatctgttgaggctcaagagtttggattggtgaagaacatgctcattgcagccgtagaagagagatacaaggatgctgcatcatggaaggacaaactgatgcggctgaggtctaagcggaagaactgggcctgacagcgttgcatgtctggatggtgtaaataaagatgatgcccagctgaattccagtacgcattccagataattgatgctgggttatggctatgtaactagctgtacatattgtatggacccgaggatggtcttctgtaaattcagactaagctttgaagtgaaacactaatccttcggagaaacttggtaccttgtccgtgttcacttgtggtatataatgttggaaattaacagggttaagattaatt

SEQ ID NO: 43337 - DNA, 2236 bp, Zea Mays
cgaaaggttatcccacctcttttctattcttttttccgcccgaagacaacgtaacaaaccaacgataatcctccctcttgctacaaaaaaggaaaaaaaaacatcaataataatccactgcggtcgctcgtcctcctcccaacctcctcccaagttgcctcgtgctctgcttcttcggttttcaggagcgtcggccattgctgctggaaaagcagaccattgggactccctcgtgcgttttccaaatcaggttgatggcgatggagggaccagttttatgccgccctgcaatgcaagccaaatcgcctgctgctgcgctggtcaacaactccctgaccagattcgggcagcttgggaccatttcaaaatacaggaacgtttcaagattcatttctcccatctctcagccatctacgaagaacataggtccatgctgtagcttcagctcgtcttctgatggcaatggatacatggctggaaactttagcgacagtgatgaagattatgttaattctactgtgctagaagcagttgaggtgagaagtggatcggaaggatatgtgataaagatgcgagatgggaaaaacttgcgttgtgtccataacaattctcaagggagaaatattccagagagtgcaccccaacctgctattgttttgaggattgaagatggaagcgaaactttacttccaatcattgtttgtacgtaaatcttttagtttgatttgataatttggaagtaggaacctttaattgacattaatgcatgtccaccttctcaattttctcagtggagatgccaagtgtacttctgatggcggctattcgtaatgtccacattgtaatatcttctattgtcattaatactactgtttggtactgtccattctgtttcatgtagtctatataacgcctttatgttataggcacgaccaaccatatatcaagttgtcaaggaaatgattgataaaatgggctatgaggtaaaacttgttcgggtaaacaaaagaattcaagaagcgtactgtgctgaactttgtctaacaaagattgatgattctacagacagcatcaccttcgatcttcggccttcagatgccataaacattgctgttcgttgcaaggttcctgtacaagtccatagaagtcttgcatacagtgacggcatcagaccagtcgagccagcaagaatggcagtagcagctggcctatcagatgggttgttatttacagagcttgacaggtattctagaaggcgaataagaattttacagtagctgtaggatttgtttttaatattttcgtgatctgcccccaactttgcttgtggtctaagaagctttgttgttgttgattatctgccctgcaacttattgcttctaccgtgttatttctgagggcatggagggactgatgaatcgatatgtttcttagacctttcactgatatatccaacaaactggtttcgtacattcgagtatattctgtgcatttaagatccagaactccaatatatgaatctgtatgttaatttttgttacacttgcatttttgttagacccgatggacaggcatctgttgaggctcaagagtttggattggtgaagaacatgctcattgcagccgtagaagagagatacaaggatgctggtaatgatccattcttcttgtggattcattcaattcatctaggactccagattgagcatctggcaatgactccacccagtgttgtattaccaaaaccgtccgaatgctgaacaaaaatcacctctcttttactttgcaaccatgttctgcaaagaacaaaacaagattaatgtgcatcaccttgcgtgatacgcattgatcttcaatataattatgattagatgaaacctagatgtggtagttctattgaaggttgattgatttatctgttggcttcgacagcatcatggaaggacaaactgatgcggctgaggtctaagcggaagaactgggcctgacagcgttgcatgtctggatggtgtaaataaagatgatgcccagctgaattccagtacgcattccagataattgatgctgggttatggctatgtaactagctgtacatattgtatggacccgaggatggtcttctgtaaattcagactaagctttgaagtgaaacactaatccttcggagaaacttggtaccttgtccgtgttcacttgtggtatataatgttggaaattaacagggttaagattaatt

SEQ ID NO: 43338 - DNA, 982 bp, Zea Mays
atcctcttagcctcttaggcagatagctgcctatcgtacaaaatcattggcttgggacgctgcctagatgctccgttgaggagaaaggaaggattccaccaagaactgcagaggcagaacctctactcctcgcacctctcacgctccaaggtggcggcgcgatggacggcggaggcgctgcctccgtctgcgaggagaaagaaaggattcccctaagaagcaccgcacggatacagaccctctgctcctcgcacccctcacgctccaaggcagtggtgctgcctcgtccgttgcctccaccttcatgccccacgccaggatcagtaaggcgagatgtggaggctatccttggccgcaggggagggcgccgcgggggagggggcaggggcggggatgggtgtgggcgtggaggagggcgtcgaccagacggacgaggagtcatcgctctcctcgccatcggagggggtggggccgatcgaggtggtgaggggcgtcggtgccatctccaggaccggctctagcacctcttcctcctgctgctgttgtagcagcagcgacggcgggacaccggagacgaggttagggtttggtggggccagcgcggtggcgggtgttgccatgggaagggccaaggtggagaacgcgctcctccctccccgacaccgaccgacccctcgtccgctcgcctccctccctgatccccaccgccaccgccgcgtcctcctcttcctcctccgaggttccgatcgccgcctgcacctgcgtctccgtcggcgaggtagcggtgggcgcggtggctacaagcagcggcgatcgggtggtggcggattgcggggtgtgcgccatctgcctcgacaggatagcgctccaggagacagccctcgtcaagggttgcgcgagtgaccatgtcatgtggctgctgggggttggcggtagggaccgcgaagtggggagggcgggaggcgggggcagtctacactaa

SEQ ID NO: 43339 - DNA, 2506 bp, Zea Mays
cttggccccgctcgcgacgtggtgtggtgggggactgggttttgctccttctctagtccgtccgagatggttaacgctagcttctatcttggctgattatcccggtggttggatccgtgtctctgtcttttccggtagtccccgcgtggcgtggccttgccgtggcactggcagtggcggacgggcgcgcgtaccttgatgagagccacaccgatgtgggtggtgcgtgctactactgctgcctctctggcgcgcggctattccattctccttcgtcgtcatcgtcatggaatccatcatgaaggctgagcggagcaaggctgctgctgccgcacagaggcggccgctggcgccgtccgagaagaacaatgcagcagcccccgccggtcggagaacagagagcccttcgaggttcaagcccgtgtcggtgtcgccggcggctcctgcagcgaggcggtgcggttctccgagccccggccccgcctctgcggacggcggctcggcgacgtgcaacggagcgcggtcggctgccgcgccttctcctgcgccgtcctctcggctgaagccctcggccgcggcgaggtccgcgtctgccgtgtctccacgtgacgcggccgccgatggacacggcactccaccccgtgcaaggaagggcaaagactccgaccgcccgtgggcgtcggcgcggagctcgtgctcgtctcccctgcttcgaccagaggcagagcacgggcagtcccctgccactgccagtaaggtagacaggctagtccgtggcctaccttcagagccggtggtcagactgaggccaggagctgtggctgagaggaagacgagcacgagccctcgacctcgtggaaggagcacgagcaagaacaacaccggcgaccaaagccaacacgagaatgctcgccctccggagtcccctgccaacagtgtcgccctcgccgataaacactggtggccggggatgatggctggcctctcttcgacaaccgccgcttctgcggaaaaggctagcaggtctgacgcctcttcgtcatcagatgcttcagcaggacgttctcctccaaggaggacgcgtccatgtgaaggcgcagcaaccggcaagagcgtgaagcggggaccatcgaacgagacggcgcagatcgttcaccggagaaggaaagacaaggcggcggactccagcagcgacgcctcctcgcagatgtcggagagctctaaacccacctgccgcccgatcaagcaggccgtttctctgcccgttccagctctgcgccggtcctcgtctactacctcccggtcctgccagaccccgtcgcggatgaggccgtcagcagcagcttgccaatcgaaatgcgcgtcttcggctgctcgaacggttgtcgaacagcctgcttttagctacatcatcgctgatgcgcggaaagggaagaagaacgcatgccagattgagaacgtacaccagctccgtctgctgagcagtaggtatctgcagtggcgcttcgtgaatgcacattcagaagagacactgtcccatagaaatagtgttgagagtgttctttacaatgtttgggaaagtatctcgacactgcgggatgctatggcaataacaagagacagtgtgcgacacctgcagcaacaagtgaagctgtatcacattctaacagagcagatttgttaccttgagcaatggcctgcactagaagaagaatgcaatggcacactagttgaggcgacggaggctctcaaagcaagcacgcttcgccttccagtcacatcaggagcacaggctgacggaattgcagtcaggaacgctataagctcagccgttgatgtcatgcaagctctgagttcctctatctactacgtgcaatcgaaggtcgaagacaggacatgtttggtttcgggactttcggctacggcaagagaggaaaacgtcgcccttgatcaatgcagagagctcttagctacggcagcaaaactgcaggtgcaggagaccagccttcgcacgcttctgatgcaactgcggcagagatctgcaggatgaactgacaaagatgatgaaggaaaataaccatgtttttgacgtcaacactgccaacatcagcctacgtcgtacgtactggaacatactcccaccaaagtaaacagtgatctgtagagatgagtagcagactgcgcataccgcacgtatacagccatacacagtatctgtccttgggggtatggccgtatgggggcgttgtgcatttctgcaagcctgcagctaacgactcacgacgcttacaattgtttgaggaaaagaaaaaggacaaaaggtgtaaatgattttcaccgtactgtagttcttttatttgtttgtttgttttcatttcataggggacgttagttgtttcttcagggagctagcaatctttcttacccagctcccactgtacatcttgattttttcgagaagtgaaaagaaaagaaaaaggatagaagaagaaccgccaacaaattt

SEQ ID NO: 43340 - DNA, 1044 bp, Zea Mays
ggacggacgatacacaaaaacggaggcatgacaacaaacggacggtctggattgagaaaaggcagaacgagggagaggcaggctacccttgtagctagtagagatttagaaaaaagaatctttcaattcaaccaatggcaaccaacgttcagccggatttgcaattttataaacaattgtttgccaaaaaaaaatataaatataataaatacaaagaataaaaataaataaataaaacggacgggcaaggccaattccaggagccaagaattgcgtgctgcgtttatctctgtggcccttcgtgcctgcgttgtgtaattgttctcctgctaccccgcgtccgctgtgtgctctctcgctctctcggtggaagttggcgacgactgggcgaccgccgccgccgtacgccaggtgctcaggtctccgtcagacccttcgccaggtcttcttcggcggcgagcaccgccagtcacgcatctaaatccggagttgccagcattcgcttgaggtgccggaccacagcacaccatcatgcaggctagcgataggttcaacataaactctcagcttgagcatcttcaagccaaatatgttggtacagggcatgctgatttgtctagatttgaatgggctgtaaacatccagagagacagttatgcctcttatattgggcactatccaatgctagcatattttgccattgctgagaacgaatcgatcggaagagaacgttacaatttcatgcagaaaatgctgcttccttgtggccttcctcccgagagagatgaagattgaagagctagctggtgctgcatagtttctgtgtttccagtggttcctgtagtgtttgcttttagctaccatcgtactatgtgcgagcatgcctttcacgtttcttcctttagtctcttttgtgatacatagaacccgtatgtattgttaaccaaatgctggcctgccccattgttgtgtttttgtggtgtgttcagccaatgtgaaagaaaaaaaaaaaaagcccaagagattgatgactgcctacaacaa

SEQ ID NO: 43341 - DNA, 2629 bp, Zea Mays
gagatttctctggtgcgtggatgagcagttcaagataagagaggatgttgctaggagtgtatcagggtgtgactggaatgtttctactagccaagccgtgagattcacgctgtaaaaatctaaagcgtcatagttatccacagagacctcccctgcctgcttgtctcctgctgctgccgcctgcctgtgcgacgccgaccaatgtttttcaatgagccatagcctaggttgtgcgtggtgccttggcgtggaggccgcgtgtccagcccatgcagctgtcgaccgaaacgtgaataaccatcatgtgtgaacatgctcgacgtgctcctgtttctttgtttccttgatactgccttatttccctgctcggtggagtgctctggcgccttgctgctgcttgtagagttggacgagagttcttcgtgtccatgctctcgcgtctgtgtggaactgcgttaccccgttcaactcgcctgaggccggggttgctgtcgttctctctgagcatgtgaccgcaccggccgcagctccgtctcaccgtggccagcgcatcgggagcgtcgcgacgccgccgttgaacaccgtctgtggccgcgtcgccgttgctgtcctgattctagctcggtagcgagtgcgtgaatgcctcggtctgcttcgtggtgagccaccgttccattccctgctatttttttagaaccctactactacgcctttgtgccataacgtcgtcaggcttggagagcgccgccgtaacgtggttgagctttgggtcgtctggcaccagttttctctggtgctgggccgactgggccaatttcagccctagctccgtacatgatttgtttttattatttaccatagagcttgtgaattttgcctagaacttcagaaaagagtaacagttgtggggtaaattttgttggactcgcaaaaatgggttctctaggttaaaaaaataattttaggggtttttaggcaggtccttaattttttaaatctcttagtgaagaatgaagttgcttagcaagttttggatagttagatgagttctaagagtgcttagctccctagtacatatagcttgtaggtttggtctaggagtaatctgtgttgtctcctttgcaagttgcatattcccagcataagccagcattcaaattcatatcattcatgtagagtaccaagaagaagtgatttatgaagaaggagcctattccagttctactgatctagtggtggattccatctaactgcttatcgtaatagaagatctcagatttcctcctgtaataaggcaagccccggtgcatttgccctttccttgcgttttaaatgctttatcacctgatatgatgcattaggtgataggagttgtgtgataaacaattgatgcattaccattccttgaaaattcctaaatccctgtttcataaaaagaattattactgcttagtcctgcttagaaactcaaaattcatttgtttttcaaaagaatgatgtgtaacattggttatgggattttgattcaaaagtgaaagcaaacttatgatgatgagtccatcagggctccggatgggttcatcatccgaaaagagtacccctgccgggtaccaaaaatggggaaatggttaataaatctagaccaggcgctgagcagacagagtcgcccgtctgtgttgattaaggaccgtaccgttgactggcctgttgtggttgagactttgcaactagccacataccctggtatgggacagggtaagcttgaacctggctattccatacgtgaagagacaatcgcgcactgggagtggagagatggcgggagtagcatgtaccctcctggcatagtagcacgcctggtagggtaatgtgctctcgggtggcgcggacctgttcatgtagtggaggactccatgggaacggttgacatatgcaagggttaagtgctacatatgtcgtgtggttagagatccccagctgggtataatcggttcgaatcgtcgttgctcctcggttatggagactcatcccggtgaccatcatcgtagttagcaagtgaaatatgagtatgaataaaatgcagctagtataggccaagtgcttgaactagattaggaaaaatctagattcaggtaaatacctaacttgtgaaataaaacttggcttagggatcaattggtagtaagcttttctgccaaaaagggtcttcgataattgataagctttaccttgagtcccaaaatccagcatacccttgagagtcttttctttagtcgggtaagtcttgctgagtaattccatactcagggttttatcccctgttgtttttgcaggagaagttttattcccttatcttttggttagttacatcaggtggaggcctggaagcttagaatgtttatgtatatctcttatggaaaggcttcacccttccaattattttaatcagttatgcactttgggtactatcaagacttgtaataattacaattcttcttatgttgtaaaacttgagctttggaaatgtaaaatatattttgtaaagccttccgctctatctctgaagtgtgtgtgtatcaaatgtgattactgtaatgtacatgttatgtgggagatccttgggatgatg

SEQ ID NO: 43342 - DNA, 843 bp, Zea Mays
gagatttctctggtgcgtggatgagcagttcaagataagagaggatgttgctaggagtgtatcagggtgtgactggaatgtttctactagccaagccgtgagattcacgctgtaaaaatctaaagcgtcatagttatccacagagacctcccctgcctgcttgtctcctgctgctgccgcctgcctgtgcgacgccgaccaatgtttttcaatgagccatagcctaggttgtgcgtggtgccttggcgtggaggccgcgtgtccagcccatgcagctgtcgaccgaaacgtgaataaccatcatgtgtgaacatgctcgacgtgctcctgtttctttgtttccttgatactgccttatttccctgctcggtggagtgctctggcgccttgctgctgcttgtagagttggacgagagttcttcgtgtccatgctctcgcgtctgtgtggaactgcgttaccccgttcaactcgcctgaggccggggttgctgtcgttctctctgagcatgtgaccgcaccggccgcagctccgtctcaccgtggccaggagaagttttattcccttatcttttggttagttacatcaggtggaggcctggaagcttagaatgtttatgtatatctcttatggaaaggcttcacccttccaattattttaatcagttatgcactttgggtactatcaagacttgtaataattacaattcttcttatgttgtaaaacttgagctttggaaatgtaaaatatattttgtaaagccttccgctctatctctgaagtgtgtgtgtatcaaatgtgattactgtaatgtacatgttatgtgggagatccttgggatgatg

SEQ ID NO: 43343 - DNA, 718 bp, Zea Mays
aaagggaatcctgagttcatgcaactagggtttcattcaactcctacacttaagtgcacggtacaagcctacaaacattaagtgcagtaaaatagcatatataacggttatgcataaaaccggggcttgcctttaatttaacacttagagagtgtttgctggggaggtactcgcttggcgagcatccactggataagtccaccattcttcaggtcgtccaccaactgcatcttgtggttggcaccacatcactggctcgatcatcatctctcggtcctatatgagatgcaagatgcatatgtatgaatatactgaaagtaacacaagatatacaaagacacagcggcgaactaaccattaaatgagaagacaccgcaacgactatacacaagcgctagctattcgcacgttatcggcgttcatcattaacaccattaacaagacgaccatattttatttatttacgcaacacaaatacgatatcacaggtacacgcatttatttaattgctacgactttgcattagctctattgatcacacaaaagcatcacacacaagtttaacagaggaccgatgcatcaaagtcgatggactcatctatcacaatcaactacattaagcaagcaccttaatcatggaacacatgttagcctatgtttagccattaggagtctatgtccgctaagtgctaactaagcatttttagccaaaagagtg

SEQ ID NO: 43344 - DNA, 684 bp, Zea Mays
aaggatgtcaaagaaacatttcttttatcccaaagttgggaacgtgtcgtgggtatggtctccagaagtgcttgtcatcatctcattgtcaactgaagcctgttttatgaatcttcgaagattggtgttcagaaaaagacaaaaaaatgcaaattgcacatgaatcgagcggggaaatgtcgtttggatggggacgtcagccagctttcttgggaacatttagcaagaggcttaacaggtgtttcaatgatgctacaaatggggttccagatgttttttgactgttgaaggtggtctcctgcgtgttaaggtataaattggatgaacttgcggaactgatccaagctgagcggacagagatcccggccgccactgatgatgcctgagttgaagaagagcagagggattcgtcgtcctggaattggaacagaaccgctctgtgctctgtcagtgtcatgaattaattaagagctccgcgtctgaaaattattgcagtatatatatcctgggctgggacgcatgcataccaagcgcgccggcctgttgtagcagcttcgctttatactgtgcgtagaagttgatctgtgtaggaatataaaataatccagtggccaccaggcggacaggaacagcttgttgctccataacaccatgattattagctaccttgctttcaagcgtttc

SEQ ID NO: 43345 - DNA, 2928 bp, Zea Mays
ccagaagctgagagattgagggcggagcgtgattttcgcggtgattttcctgctcccatatcgttggcggccggttgatagcgagttgtgctggagggggaggtgcctgtgacaggatctgtggttgctgtccgtgggcaacaagctgtgtcgaaggaggtcgaactcccaacgcgatgtgtggtggcggggatagttcaatgacgttttcagttccaacctgtagcgatggtgctccagctcgtgttgacacggtcgatctggtatcgcacctcttcactttccccatccccttatggaaggcgtgagatagagtgtcgaacggagcttcccacgacgatgctgctgtttgccggcgagctctcccccctacccatttcttctactcctttgtaaggctcagagagctgcctacagagagaaggtgctaattgaagcagagaaacagtttcaggacgatttcaattttttgaaggaaaaggtattagttgattttggccaattagtggatgtccaacgtattgacagtatttgccaagttatgtgcgacaagttcaagggttgttgttcggtttgcaagacaatgtgtattgaagctatagtcgattctgtgaaaattatggttgaagcaatgtctatcaagcatcaggagattttgaattccatgaaccctctagtgaaaactatggctgttaagcagatgagaaatacacccatactgatatcaatgtacaaccagctattgttaagtcggatgagaaagtcgttgttgcagactttgttgagtcatctgatgggaaaaggtcttggtgtgggtactagcaatcctctggtaacagtgcccatacatctgaacacatcaacacaccagtcgtttataggtcggatgcaaatactgcaacttctgtgaagcccccagcggtctcatgttgctggggcagttcctccagtgaatgacacattctttgagccaacattaacatgtaatctttcaacactgaactcaacagaaaggcctaggaagttcgaagggataagtggcaaaaatcaagatgttattgttattgacgatcatgtgagagcggttcaggaggttcacaatgttgctggtgaaatggttggtgctagtttatatggcagtagaagatctaaatcaacagctatagttgaccaaatgtacaatgataggaatatattcaatgatccagaagctaggggaaatttgttgggatatcaactagaagtggcaaatttagtcaaaagtgatattcagtatattggtgaaaatcggttacaagcccaacatcctagtgtccctttaccatgttctgttgtacaattgcgatattattatatcctttgtggcatggggcgtagccaatggaaagattttgttgcagttcggttttcaaaaaccaccactataaattgggaatattttggactgtcaatagaacccaatggacattgcgacaacttttttattgctgggttctgccaaaaacattttgaagatgttcatccaaggatgtcaaagaaacatttcttttatcccaaagttgggaacgtgtcgtgggtatggtctccaggtatggtgcttggtcatgggagcttttttttgtacgtgtctccaggtctccagaacgtgtcgtgggtatggtctccaggtatggtgcttggtcatgggagcttttttgtacgtctatatcattagttgagataacatgcaccgaatccacttcaacatgtaggctaagtgtttgcagactgcagagaccttagtcattaagaagtcctgatccttgtctcgctggctattgtttatataaagtcgaaatatattgttttatgaacctctcattatgttctatgatgcatttgtttttggttactgcaagggggacatgtatgttgactattttttctaaaactccatcccttgactgacctgaaatacagttgtgacctctgctttttttagggctgttacgtgtgcattgtcattggtttctgtgagggagggggtcatgtatgtctatttttttttctgaaaccccaccctcgactgacctgaactccatccctcacttgtttgtcttgaatttttctcacatccaaatagaagtgcttgtcatcatctcattgtcaactgaagcctgttttatgaatcttcgaagattggtgttcagaaaaagacaaaaaaatgcaaattgcacatgaatcgagcggggaaatgtcgtttggatggggacgtcagccagctttcttgggaacatttagcaagaggcttaacaggtgtttcaatgatgctacaaatggggttccaggtgatggttggtctctaatgagcaatgatggtgctgaggatgttcctattgttgtcgactctttctccaaacaaacttattggtgctcatgtcaactcctcccagatgttttttgactgttgaaggtggtctcctgcgtgttaaggtcaattcaaggaaatatactgagttttggcaaaatttcagaagttgttgttacgttagttctaaaaaaattgtgtttttttgtataaattggatgaacttgcggaactgatccaagctgagcggacagagatcccggccgccactgatgatgcctgagttgaagaagagcagagggattcgtcgtcctggaattggaacagaaccgctctgtgctctgtcagtgtcatgaattaattaagagctccgcgtctgaaaattattgcagtatatatatcctgggctgggacgcatgcataccaagcgcgccggcctgttgtagcagcttcgctttatactgtgcgtagaagttgatctgtgtaggaatataaaataatccagtggccaccaggcggacaggaacagcttgttgctccataacaccatgattattagctaccttgctttcaagcgtttc

SEQ ID NO: 43346 - DNA, 2867 bp, Zea Mays
agcgtcgctcctgttcactttcctcagcccttccagaagctgagagattgagggcggagcgtgattttcgcggtgattttcctgctcccatatcgttggcggccggttgatagcgagttgtgctggagggggaggtgcctgtgacaggatctgtggttgctgtccgtgggcaacaagctgtgtcgaaggaggtcgaactcccaacgcgatgtgtggtggcggggatagttcaatgacgttttcagttccaacctgtagcgatggtgctccagctcgtgttgacacggtcgatctggtatcgcacctcttcactttccccatccccttatggaaggcgtgagatagagtgtcgaacggagcttcccacgacgatgctgctgtttgccggcgagctctcccccctacccatttcttctactcctttagagctgcctacagagagaaggtgctaattgaagcagagaaacagtttcaggacgatttcaattttttgaaggaaaaggtattagttgattttggccaattagtggatgtccaacgtattgacagtatttgccaagttatgtgcgacaagttcaagggttgttgttcggtttgcaagacaatgtgtattgaagctatagtcgattctgtgaaaattatggttgaagcaatgtctatcaagcatcaggagattttgaattccatgaaccctctagtgaaaactatggctgttaagcagatgagaaatacacccatactgatatcaatgtacaaccagctattgttaagtcggatgagaaagtcgttgttgcagactttgttgagtcatctgatgggaaaaggtcttggtgtgggtactagcaatcctctggtaacagtgcccatacatctgaacacatcaacacaccagtcgtttataggtcggatgcaaatactgcaacttctgtgaagcccccagcggtctcatgttgctggggcagttcctccagtgaatgacacattctttgagccaacattaacatgtaatctttcaacactgaactcaacagaaaggcctaggaagttcgaagggataagtggcaaaaatcaagatgttattgttattgacgatcatgtgagagcggttcaggaggttcacaatgttgctggtgaaatggttggtgctagtttatatggcagtagaagatctaaatcaacagctatagttgaccaaatgtacaatgataggaatatattcaatgatccagaagctaggggaaatttgttgggatatcaactagaagtggcaaatttagtcaaaagtgatattcagtatattggtgaaaatcggttacaagcccaacatcctagtgtccctttaccatgttctgttgtacaattgcgatattattatatcctttgtggcatggggcgtagccaatggaaagattttgttgcagttcggttttcaaaaaccaccactataaattgggaatattttggactgtcaatagaacccaatggacattgcgacaacttttttattgctgggttctgccaaaaacattttgaagatgttcatccaaggatgtcaaagaaacatttcttttatcccaaagttgggaacgtgtcgtgggtatggtctccaggtatggtgcttggtcatgggagcttttttttgtacgtgtctccaggtctccagaacgtgtcgtgggtatggtctccaggtatggtgcttggtcatgggagcttttttgtacgtctatatcattagttgagataacatgcaccgaatccacttcaacatgtaggctaagtgtttgcagactgcagagaccttagtcattaagaagtcctgatccttgtctcgctggctattgtttatataaagtcgaaatatattgttttatgaacctctcattatgttctatgatgcatttgtttttggttactgcaagggggacatgtatgttgactattttttctaaaactccatcccttgactgacctgaaatacagttgtgacctctgctttttttagggctgttacgtgtgcattgtcattggtttctgtgagggagggggtcatgtatgtctatttttttttctgaaaccccaccctcgactgacctgaactccatccctcacttgtttgtcttgaatttttctcacatccaaatagaagtgcttgtcatcatctcattgtcaactgaagcctgttttatgaatcttcgaagattggtgttcagaaaaagacaaaaaaatgcaaattgcacatgaatcgagcggggaaatgtcgtttggatggggacgtcagccagctttcttgggaacatttagcaagaggcttaacaggtgtttcaatgatgctacaaatggggttccaggtgatggttggtctctaatgagcaatgatggtgctgaggatgttcctattgttgtcgactctttctccaaacaaacttattggtgctcatgtcaactcctcccagatgttttttgactgttgaaggtggtctcctgcgtgttaaggtataaattggatgaacttgcggaactgatccaagctgagcggacagagatcccggccgccactgatgatgcctgagttgaagaagagcagagggattcgtcgtcctggaattggaacagaaccgctctgtgctctgtcagtgtcatgaattaattaagagctccgcgtctgaaaattattgcagtatatatatcctgggctgggacgcatgcataccaagcgcgccggcctgttgtagcagcttcgctttatactgtgcgtagaagttgatctgtgtaggaatataaaataatccagtggccaccaggcggacaggaacagcttgttgctccataacaccatgattattagctaccttgctttcaagcgtttc

SEQ ID NO: 43347 - DNA, 2718 bp, Zea Mays
gatttttttggtactcaagcgtcgctcctgttcactttcctcagcccttccagaagctgagagattgagggcggagcgtgattttcgcggtgattttcctgctcccatatcgttggcggccggttgatagcgagttgtgctggagggggaggtgcctgtgacaggatctgtggttgctgtccgtgggcaacaagctgtgtcgaaggaggtcgaactcccaacgcgatgtgtggtggcggggatagttcaatgacgttttcagttccaacctgtagcgatggtgctccagctcgtgttgacacggtcgatctggtatcgcacctcttcactttccccatccccttatggaaggcgtgagatagagtgtcgaacggagcttcccacgacgatgctgctgtttgccggcgagctctcccccctacccatttcttctactcctttagagctgcctacagagagaaggtgctaattgaagcagagaaacagtttcaggacgatttcaattttttgaaggaaaaggtattagttgattttggccaattagtggatgtccaacgtattgacagtatttgccaagttatgtgcgacaagttcaagggttgttgttcggtttgcaagacaatgtgtattgaagctatagtcgattctgtgaaaattatggttgaagcaatgtctatcaagcatcaggagattttgaattccatgaaccctctagtgaaaactatggctgttaagcagatgagaaatacacccatactgatatcaatgtacaaccagctattgttaagtcggatgagaaagtcgttgttgcagactttgttgagtcatctgatgggaaaaggtcttggtgtgggtactagcaatcctctggtaacagtgcccatacatctgaacacatcaacacaccagtcgtttataggtcggatgcaaatactgcaacttctgtgaagcccccagcggaaaggcctaggaagttcgaagggataagtggcaaaaatcaagatgttattgttattgacgatcatgtgagagcggttcaggaggttcacaatgttgctggtgaaatggttggtgctagtttatatggcagtagaagatctaaatcaacagctatagttgaccaaatgtacaatgataggaatatattcaatgatccagaagctaggggaaatttgttgggatatcaactagaagtggcaaatttagtcaaaagtgatattcagtatattggtgaaaatcggttacaagcccaacatcctagtgtccctttaccatgttctgttgtacaattgcgatattattatatcctttgtggcatggggcgtagccaatggaaagattttgttgcagttcggttttcaaaaaccaccactataaattgggaatattttggactgtcaatagaacccaatggacattgcgacaacttttttattgctgggttctgccaaaaacattttgaagatgttcatccaaggatgtcaaagaaacatttcttttatcccaaagttgggaacgtgtcgtgggtatggtctccaggtatggtgcttggtcatgggagcttttttgtacgtctatatcattagttgagataacatgcaccgaatccacttcaacatgtaggctaagtgtttgcagactgcagagaccttagtcattaagaagtcctgatccttgtctcgctggctattgtttatataaagtcgaaatatattgttttatgaacctctcattatgttctatgatgcatttgtttttggttactgcaagggggacatgtatgttgactattttttctaaaactccatcccttgactgacctgaaatacagttgtgacctctgctttttttagggctgttacgtgtgcattgtcattggtttctgtgagggagggggtcatgtatgtctatttttttttctgaaaccccaccctcgactgacctgaactccatccctcacttgtttgtcttgaatttttctcacatccaaatagaagtgcttgtcatcatctcattgtcaactgaagcctgttttatgaatcttcgaagattggtgttcagaaaaagacaaaaaaatgcaaattgcacatgaatcgagcggggaaatgtcgtttggatggggacgtcagccagctttcttgggaacatttagcaagaggcttaacaggtgtttcaatgatgctacaaatggggttccaggtgatggttggtctctaatgagcaatgatggtgctgaggatgttcctattgttgtcgactctttctccaaacaaacttattggtgctcatgtcaactcctcccagatgttttttgactgttgaaggtggtctcctgcgtgttaaggtataaattggatgaacttgcggaactgatccaagctgagcggacagagatcccggccgccactgatgatgcctgagttgaagaagagcagagggattcgtcgtcctggaattggaacagaaccgctctgtgctctgtcagtgtcatgaattaattaagagctccgcgtctgaaaattattgcagtatatatatcctgggctgggacgcatgcataccaagcgcgccggcctgttgtagcagcttcgctttatactgtgcgtagaagttgatctgtgtaggaatataaaataatccagtggccaccaggcggacaggaacagcttgttgctccataacaccatgattattagctaccttgctttcaagcgtttc

SEQ ID NO: 43348 - DNA, 3197 bp, Zea Mays
gtttgatttttttggtactcaagcgtcgctcctgttcactttcctcagcccttccagaagctgagagattgagggcggagcgtgattttcgcggtgattttcctgctcccatatcgttggcggccggttgatagcgagttgtgctggagggggaggtgcctgtgacaggatctgtggttgctgtccgtgggcaacaagctgtgtcgaaggaggtcgaactcccaacgcgatgtgtggtggcggggatagttcaatgacgttttcagttccaacctgtagcgatggtgctccagctcgtgttgacacggtcgatctggtatcgcacctcttcactttccccatccccttatggaaggcgtgagatagagtgtcgaacggagcttcccacgacgatgctgctgtttgccggcgagctctcccccctacccatttcttctactcctttgtaaggctcagagagctgcctacagagagaaggtgctaattgaagcagagaaacagtttcaggacgatttcaattttttgaaggaaaaggtattagttgattttggccaattagtggatgtccaacgtattgacagtatttgccaagttatgtgcgacaagttcaagggttgttgttcggtttgcaagacaatgtgtattgaagctatagtcgattctgtgaaaattatggttgaagcaatgtctatcaagcatcaggagattttgaattccatgaaccctctagtgaaaactatggctgttaagcagatgagaaatacacccatactgatatcaatgtacaaccagctattgttaagtcggatgagaaagtcgttgttgcagactttgttgagtcatctgatgggaaaaggtcttggtgtgggtactagcaatcctctggtaacagtgcccatacatctgaacacatcaacacaccagtcgtttataggtcggatgcaaatactgcaacttctgtgaagcccccagcggagcgtgttcatccactcaacaagcgattccatttctccaaaactgacaagttgggtcgctttccacgtacaagcctcttctcacctgtgggtctttttgacctccacatttcagatgatgaaagtgaccacaaaaaaatactgcacctgctagtgctatatgtccacatgggtcagatgtcattccaatcgggttaggtcattctattttgcctacatgcacccatggtgttcatcctactcctcccaatgttgtattacaacctttaattaagtcacatgcaaattcctctagaagccttattgagttgtgtcctgaaagtgcaacagcagcagtagccaacactgatgtaccagataaggttgtttctgtgctagtttctcatgctcaaaagtctcatgttgctggggcagttcctccagtgaatgacacattctttgagccaacattaacatgtaatctttcaacactgaactcaacagaaaggcctaggaagttcgaagggataagtggcaaaaatcaagatgttattgttattgacgatcatgtgagagcggttcaggaggttcacaatgttgctggtgaaatggttggtgctagtttatatggcagtagaagatctaaatcaacagctatagttgaccaaatgtacaatgataggaatatattcaatgatccagaagctaggggaaatttgttgggatatcaactagaagtggcaaatttagtcaaaagtgatattcagtatattggtgaaaatcggttacaagcccaacatcctagtgtccctttaccatgttctgttgtacaattgcgatattattatatcctttgtggcatggggcgtagccaatggaaagattttgttgcagttcggttttcaaaaaccaccactataaattgggaatattttggactgtcaatagaacccaatggacattgcgacaacttttttattgctgggttctgccaaaaacattttgaagatgttcatccaaggatgtcaaagaaacatttcttttatcccaaagttgggaacgtgtcgtgggtatggtctccaggtatggtgcttggtcatgggagcttttttttgtacgtgtctccaggtctccagaacgtgtcgtgggtatggtctccaggtatggtgcttggtcatgggagcttttttgtacgtctatatcattagttgagataacatgcaccgaatccacttcaacatgtaggctaagtgtttgcagactgcagagaccttagtcattaagaagtcctgatccttgtctcgctggctattgtttatataaagtcgaaatatattgttttatgaacctctcattatgttctatgatgcatttgtttttggttactgcaagggggacatgtatgttgactattttttctaaaactccatcccttgactgacctgaaatacagttgtgacctctgctttttttagggctgttacgtgtgcattgtcattggtttctgtgagggagggggtcattgcttgtcatcatctcattgtcaactgaagcctgttttatgaatcttcgaagattggtgttcagaaaaagacaaaaaaatgcaaattgcacatgaatcgagcggggaaatgtcgtttggatggggacgtcagccagctttcttgggaacatttagcaagaggcttaacaggtgtttcaatgatgctacaaatggggttccaggtgatggttggtctctaatgagcaatgatggtgctgaggatgttcctattgttgtcgactctttctccaaacaaacttattggtgctcatgtcaactcctcccagatgttttttgactgttgaaggtggtctcctgcgtgttaaggtataaattggatgaacttgcggaactgatccaagctgagcggacagagatcccggccgccactgatgatgcctgagttgaagaagagcagagggattcgtcgtcctggaattggaacagaaccgctctgtgctctgtcagtgtcatgaattaattaagagctccgcgtctgaaaattattgcagtatatatatcctgggctgggacgcatgcataccaagcgcgccggcctgttgtagcagcttcgctttatactgtgcgtagaagttgatctgtgtaggaatataaaataatccagtggccaccaggcggacaggaacagcttgttgctccataacaccatgattattagctaccttgctttcaagcgtttc

SEQ ID NO: 43349 - DNA, 2511 bp, Zea Mays
agcgtcgctcctgttcactttcctcagcccttccagaagctgagagattgagggcggagcgtgattttcgcggtgattttcctgctcccatatcgttggcggccggttgatagcgagttgtgctggagggggaggtgcctgtgacaggatctgtggttgctgtccgtgggcaacaagctgtgtcgaaggaggtcgaactcccaacgcgatgtgtggtggcggggatagttcaatgacgttttcagttccaacctgtagcgatggtgctccagctcgtgttgacacggtcgatctggtatcgcacctcttcactttccccatccccttatggaaggcgtgagatagagtgtcgaacggagcttcccacgacgatgctgctgtttgccggcgagctctcccccctacccatttcttctactcctttagagctgcctacagagagaaggtgctaattgaagcagagaaacagtttcaggacgatttcaattttttgaaggaaaaggtattagttgattttggccaattagtggatgtccaacgtattgacagtatttgccaagttatgtgcgacaagttcaagggttgttgttcggtttgcaagacaatgtgtattgaagctatagtcgattctgtgaaaattatggttgaagcaatgtctatcaagcatcaggagattttgaattccatgaaccctctagtgaaaactatggctgttaagcagatgagaaatacacccatactgatatcaatgtacaaccagctattgttaagtcggatgagaaagtcgttgttgcagactttgttgagtcatctgatgggaaaaggtcttggtgtgggtactagcaatcctctggtaacagtgcccatacatctgaacacatcaacacaccagtcgtttataggtcggatgcaaatactgcaacttctgtgaagcccccagcggagcgtgttcatccactcaacaagcgattccatttctccaaaactgacaagttgggtcgctttccacgtacaagcctcttctcacctgtgggtctttttgacctccacatttcagatgatgaaagtgaccacaaaaaaatactgcacctgctagtgctatatgtccacatgggtcagatgtcattccaatcgggttaggtcattctattttgcctacatgcacccatggtgttcatcctactcctcccaatgttgtattacaacctttaattaagtcacatgcaaattcctctagaagccttattgagttgtgtcctgaaagtgcaacagcagcagtagccaacactgatgtaccagataaggttgtttctgtgctagtttctcatgctcaaaagaaaggcctaggaagttcgaagggataagtggcaaaaatcaagatgttattgttattgacgatcatgtgagagcggttcaggaggttcacaatgttgctggtgaaatggttggtgctagtttatatggcagtagaagatctaaatcaacagctatagttgaccaaatgtacaatgataggaatatattcaatgatccagaagctaggggaaatttgttgggatatcaactagaagtggcaaatttagtcaaaagtgatattcagtatattggtgaaaatcggttacaagcccaacatcctagtgtccctttaccatgttctgttgtacaattgcgatattattatatcctttgtggcatggggcgtagccaatggaaagattttgttgcagttcggttttcaaaaaccaccactataaattgggaatattttggactgtcaatagaacccaatggacattgcgacaacttttttattgctgggttctgccaaaaacattttgaagatgttcatccaaggatgtcaaagaaacatttcttttatcccaaagttgggaacgtgtcgtgggtatggtctccaggtatggtgcttggtcatgggagcttttttttgtacgtgtctccagggctgttacgtgtgcattgtcattggtttctgtgagggagggggtcatgtatgtctatttttttttctgaaaccccaccctcgactgacctgaactccatccctcacttgtttgtcttgaatttttctcacatccaaatagaagtgcttgtcatcatctcattgtcaactgaagcctgttttatgaatcttcgaagattggtgttcagaaaaagacaaaaaaatgcaaattgcacatgaatcgagcggggaaatgtcgtttggatggggacgtcagccagctttcttgggaacatttagcaagaggcttaacaggtgtttcaatgatgctacaaatggggttccaggtgatggttggtctctaatgagcaatgatggtgctgaggatgttcctattgttgtcgactctttctccaaacaaacttattggtgctcatgtcaactcctcccagatgttttttgactgttgaaggtggtctcctgcgtgttaaggtcaattcaaggaaatatactgagttttggcaaaatttcagaagttgttgttacgttag

SEQ ID NO: 43350 - DNA, 1162 bp, Zea Mays
cggctcccagcgctcgaccgctcgtcgtgtccttgctacagcaccggccggtcgtctctagggcccccgccctcctgcttcattgtgtcgagcggccatcctggcgtgaatgcgtgatccactgtgcccagccactctccatcgctaaccctggccgcagctcatccaggtcaggcgtctccctgttcccgcctggtccttgtgctcgtggtcgacctgcaccgtcacccagttcaccgatgtcatcggcgcacgcctctctcaccaacgatagccactttgctgtgtcttctccaaccttcgcccgttccagcagctagacgtcgcaccgttcctcctccttgtcgcggtttcccctggcatgctcggactcgtctgggtgccaacctcctccacggtgcgctcgggactttgtcggcgctgtctggctatgctcgtcgcgctgcacgtcttcatgttcctctgcgttgatatcgcttcgccgaagcaacagcaacactagcgtcgtctcccagcttgggttcgtgaattttctcgtcgaaccggcatcgtgtcatcatccgagctccctgaagaagtggatatcgaagaaaaatttgctctgccgagtggtggagtttcatctaactgcttactagagtagaagggttttggaatcttctcctgcaataaggagaagttttattcccttatcctttgggtagttactccatgtggaggacttgaagcttagattgtttttatatatctcttttggaaaggcttcacccttccaattattgtaataagttatgcactttgagtactatcaagacttgtaataaatacatctctttctaccatgtaaaacttgagttttggaatgtaaagtgtactttgtaaaagtcttccgctctatctccaatgtgtgtgtatcaaatgtgattactgtaatatacctgttatgtgggagatccttgggatgatgagttccagttagcgaactcgatagccttgttaagttatccggtacatgtgcacaaccatctgaggtcattaaggcaaggattggtgcatgtgggcctgataacttgggagggttgtcacacttctcactataatttgatctatatttttgtgttattatctaatttagatcaagtttgtttttaagttgtgaatt

SEQ ID NO: 43351 - DNA, 2052 bp, Zea Mays
ccacgctccctctccaaaaattgacacgtacgtcgccgcatgggtaacgcagattagccaccgtgccttccactaggtgctgcgctcgtcctatctcggctcccagcgctcgaccgctcgtcgtgtccttgctacagcaccggccggtcgtctctagggcccccgccctcctgcttcattgtgtcgagcggccatcctggcgtgaatgcgtgatccactgtgcccagccactctccatcgctaaccctggccgcagctcatccaggtcaggcgtctccctgttcccgcctggtccttgtgctcgtggtcgacctgcaccgtcacccagttcaccgatgtcatcggcgcacgcctctctcaccaacgatagccactttgctgtgtcttctccaaccttcgcccgttccagcagctagacgtcgcaccgttcctcctccttgtcgcggtttcccctggcatgctcggactcgtctgggtgccaacctcctccacggtgcgctcgggactttgtcggcgctgtctggctatgctcgtcgcgctgcacgtcttcatgttcctctgcgttgatatcgcttcgccgaagcaacagcaacactagcgtcgtctcccagcttgggttcgtgaattttctcgtcgaaccggcatcgtgtcatcatccgagctccctgaagaagtggatatcgaagaaaaatttgctctgccgagtggtggagtttcatctaactgcttactagagtagaagggttttggaatcttctcctgcaataaggcaagctccggtgcatttgccacctcccttgtgtttacaaaattttatcacttatatgctgcattaggtgatagcaattgattgattaaacacttgctgcattaccatccttgaaagattgattaccatatcttgtcacctgttttataaaagctagagatgcttaatcatgctgatagactaaaaaaaatgcttttgatctatgactcatgtttttacaaacaagaaatgggcttggaataatgaaggcatcaagacgttgataaattcattatccaagcatggcccctctgtcaggcgccaaatttttgaaatagtttaaaatgggaccagacgctgagcaggaaaagtcgcccgtctgtgtcgattaaggatcgtatcgattgttggcctgctgatctaggaccttttatctggccacatacctcgtcatgggtaagcttgaacccggctatttcatacatgaaaagacaatcgcgcactgggagtggagagatgacgagagtgacacgtaccctcctggcaaaggaccgcctaaaaggggtggtgtgctctcgggtggcgcggacctgttcatgtgatggaggatccgtgggaatggtagacatgtgtaaaagagttaagggaagcatatgtcgtgtggttggagatccccagctgggtattaatcgattcggatcgccgaacttctcggatatgaagactagatctttgaccttcagcgtagataacaagtgaaattaaagttgataaaataaagatagtgtaggtcaagtgaatgatctagattaggcaaatgctagattcaggctagaagattcaggtaataacctaacttgtgaagtaaaacttggcttaaggatccattattagtaagcctgcttttctgcaaaaaggagtccttgataattgatgagattttccttgagtcccaaatccagcatacccttgagagtcttttctttagtcgggtaagtcttgctgagtaattgcgtactcagggttttatcccttgttgtttttgtaggagaagttttattcccttatcctttgggtagttactccatgtggaggacttgaagcttagattgtttttatatatctcttttggaaaggcttcacccttccaattattgtaataagttatgcactttgagtactatcaagacttgtaataaatacatctctttctaccatgtaaaacttgagttttggaatgtaaagtgtactttgtaaaagtcttccgctctatctccaatgtgtgtgtatcaaatgtgattact

SEQ ID NO: 43352 - DNA, 546 bp, Zea Mays
atgggcaggtcgaatgcggaccgcagccccacgcgcgactgccagtccgggaacccgggccccgacggcaggcccgcggcgaggacggcacggaggtcgggcgggaacgcaaaccacatctcagccttggtgcgcaccaactctagctctgtcaggcccgggagcaccgccaccccggaggcccagaggtggccaagcaccgcggccgtgagcggggcgaaggagtgcagcccgtgccgcgatgaggccgacgccgacgaggggccaagaacaggggcggggtggcggcctcttcgaagatctgggagggggcgagggcatggtatggcctcgtgggggcggtagcgaggatcgcggtgtgttaatggcgcccttccatcgacggagagcagagggggcggtgtgtgggcagagggatctcgcgggcgagatttccgcgggcgggggtgaggtcgaggtggtggatgtcgcgggcgtgggcaccgcggcggcgtagattgcgggcgaggcggtgtcgggggaatcggacgcggaggcagaacatgg

SEQ ID NO: 43353 - DNA, 485 bp, Zea Mays
caaatcactgcacatgaatatgaagggaaacaaagcccaaatgctcagagcaatggaaacaaataggaaaatgtagtgctaattcctactttatttagctagtaaatgagcaattgatcttttagaaaatgtagcgctaattctaattggttagggtgttgataaaaatagaaattgattgcattgggctcttaggttggactgattgacagaaaggagaatttggtgctaggtgagagaatttgtatgcaacccagtgctatgtggtcaaaagaatatagtggtattttttctataaatacgtacccagtccttaagagattctccatgtatcttcagaatttcaatagattccaagtgggtgctaccctaccaccattcagatagaaattagtcaacactataacatcatcgaataataacatgattgagtagctatgaagtatgaagcatactttttgaagagtaaaattttatagatgaag

SEQ ID NO: 43354 - DNA, 1927 bp, Zea Mays
caattaaacgtcaataggaacctaaggagtacctgatgctctctatttgcactatcgtactgaacttatattcggatttgtaaagcattcttcctgaaacacactaaagagaataagttagatgtggataaaatcactatcatgtagtgtatagttaaatcaaaattcatcaaattaataaacaaattacttatgttaaaatagcactgaagtgaatcaacagagtcagagcaattttaaggcaaatatagaagcaatgtgagattccgagagtctgaagtttaggataaattcgatggttaaacactgaggtaattcaaatttcgttggcagggtaattcatcaaattaacaaacaaattacttcagttaaaaagacactgaagtgaatgaacagagtcaaagcaattttgacgtaggtggtacagaagcaatgcgagattcagagtagggtctaaagatcatgatgaacttagggggcaacacagtgagatacttcaaatttcattgacagtgagaatctggcgtggattcagaatcgcataagaacactgggaatgaatcaaatcgaagaagaggcacgcattgttgtccctcctctacgcagatctaggagagcccctcccgatccaagtcgtcggccccgtcacgaccctcgctacaacaacaactagggacaacacataccataagcaccatcccatggcatgaggcaggagcaggagcaacaacagtcgtcactatatacgaaaacaagctatatacgaaaacaaacgaataactatccaaatcggaggcgaggtgaggcacccgaagaggagaggtggaaggcggccgtgcccgcgaagtcatccgtgacggtgtcgtagttggccagttctgggccggggcaagggcatggcaggggctgggagcctgcgggcgtgggcgagatccgcgtccatccgtgcaagagcgagatccgcgggcacgacgagggtagggcacgacggggtctgggagcctgcgggcgtgagcgagatccacgtgcctacatggtgctggcgacgcgggcgtgtgtgagggacaaaggcgagggcaccgcagaggtgtggaggtggggttgatgcagaaccgcggtggggcagcggtgggtgcggcggcgggatgagcggccatcgcatggggagtgggcgtggtttgggggctggggtgttgcagggtggaggcaggcgggtgcttggtgcagcatggtggacgccctcattaggtctttatagagtagtatagattcaaactacattgcgaacaatgtagtctacaatgtaaaatagtgcaaaacagtattttggatgactacataggtaaactgatggacatagtctaagccatttctctcaaagtccctagaaattatgaagttgtttggtttacttccctagttaaccgtacataggaattaggttacgtggagtcaagccagccaagtaggtgtacatgcccttgtctggttcaattttctagccagtctggtttattagagattttgtttgattgctttgcatgagtacttgatggttgaactaaaaactattaaataaaatataaatcaataaatagtcactaattactttttaaaattatttagtatacatccattacatgttaataagatactaattatatgttaatttaagtacatattttttttaaaaaaatatatagtatgagtggtctagttttattgatacaaatatcaggaacatagatataaaatcggtttgatgattaaatcttttatttaaaagatacagcaaaacagaaaaactaaaaagcattctcgaaatacgtgcctgagcttaagctgttgcaccaggtcgacgaggagctacagggtaccaaacacactgatatatccttcatcttctctcaaatataggggagagttg

SEQ ID NO: 43355 - DNA, 553 bp, Zea Mays
gttagaagtaaaatatgattgcacgagtctgtccagcaaatccaacttgcagtctgattctctccaacaaaatatttagaatggctggcgcacattttattggagcatacactctatgcatcatcaaataaaaagacaggtcattaagctagatcaggtctaagacataccacaaaaataagggattatccaaaatgatgttcagattgacaagtcaattaaaaaactgcacatcaagcactatatggtataaggctgagaaaatattagctttcttagactgtccaaataacatgcatgatggctgcttgcatttcacaccttattaagaagacaacaagaaacatagtacttgaatcatacacaacatacctacacaacaatatgactacaatttttggatactaaagtaacagcagaaaaagcacgaactgattctctggtgaatgggttgtctgtacctgaaggaagcaagatccgagattggctttccacatgttctttccaaaccgatagcatgaacagctgcaaaaagttgcaagcaaacaggaac

SEQ ID NO: 43356 - DNA, 1185 bp, Zea Mays
agcccgcctcttccatactcctccccgcatcccttccatcctcgtctgtactcctccccgcgtccacagtggataccgtgagctcgcccccgcctccatggctccatcctccgctcgcgattcccccgtgcccgttgcgcctgcctcctcccgccccgtcctccgcacctgccccctaccctagacctcgcgctcgccgctgtcaccatcaaggcgctatgatgctacccccggtcgagatagcctctcgagcatcgaggtggtggtcgaatcgatggaggttgtgcccccaccgctcgtctcctgctcgcctcctcgcctagctgcatccgtccctcgcccaaccacttctcctctcttgtcttgctcgtcacggatgtcgtcctcgtcgtggcgcacgcgattgctgtagcagctgtcgaacagtctcggttcctcatccctggccgggtttcatttggattgcgcagcagcaacatggcaactacgtcatcgcgaggcgacatctccaccgcgaaaaacactgcaagccatccacgatctcgagctgacgaacaaagcgatttactggagctgacgacggaagcagcacaaggaataggaacgatgcgggttcaccagagcggacgacagagacaacaggaggcagaagaaccaggtgtgaagaaccaagacagaggggaggtgggaaagaggaatggagtgacaagaacgaggatggagagcgtcggctgcaaacccgtagaggcgaagagaacgagagtcgtccccacaaaggcaaacatcagctagaacaatcctgagatagatggtcgtggagcaatgtaagatgtccatgaatgatcgtacgtgtgttaataattcggcagacatggatagcttcttaggcggcatttccgttccgctttaataataaggaaaaggaaatgtatggtactataatgtagaaggtgtggtgtttgctttctctatgtctgtcgtatatgcatgtatccattattatgttctctagcatttggaaatatattaggccatgtatcataattgacttgtatctgttgctactgttgcatgcatgttgttgtagcgtagtggttgtgtgtgtttggatagagagatgatgagagatgggttatgatgaatctatttttcgtgttgttttgttcatgaatgatacaagatgac

SEQ ID NO: 43357 - DNA, 2849 bp, Zea Mays
agcccgcctcttccatactcctccccgcatcccttccatcctcgtctgtactcctccccgcgtccacagtggataccgtgagctcgcccccgcctccatggctccatcctccgctcgcgattcccccgtgcccgttgcgcctgcctcctcccgccccgtcctccgcacctgccccctaccctagacctcgcgctcgccgctgtcaccatcaaggcgctatgatgctacccccggtcgagatagcctctcgagcatcgaggtggtggtcgaatcgatggaggttgtgcccccaccgctcgtctcctgctcgcctcctcgcctagctgcatccgtccctcgcccaaccacttctcctctcttgtcttgctcgtcacggatgtcgtcctcgtcgtggcgcacgcgattgctgtagcagctgtcgaacagtctcggttcctcatccctggccgggtttcatttggattgcgcagcagcaacatggcaactacgtcatcgcgaggcgacatctccaccgcgaaaaacactgtgcttacccgaccgccgccgtctatgttcgactgacatcgatgccagcagatgcaaaacatttgcaaatatcttttttaaaaaaggatcaaaatccatgctacagcgtttaccaaaagatgggtattgttaccttttaaataagtttagaattcatcctcctgtgtttactaaaagagtgcaatgttggcatatcattttctggctattgtattgttgttttacttcttaccttactgagtggataatgctgctttagatgtgataaacactgaatgcatttttttgtttcggttgagaacatagcttcaaatgatgatggccaccgtattacaatcatcaatacttttcccctttttacaaaatagagaactaatcactgaaactatgttcaaacatattaaattttgtgttccagaactgcgttcattatgggtactcatatacatttttattttttttataacgatgatttccacggagttgtgcctattcatctgacaatttctaaatgtgactattttgctcctctataaggtgagttagaaacagtattttattttgttgaccacatttaacagaaaccattgttatttcacacccttctgctaaatgcttattttctagatgtttctttcatagagtttgagaacatatttttggaacaatgaccaacaccatttcacgttcatgcgtactttttcctttccgtatgattaacaaaaactatgttgatctattatgattcaaccatctaattaactatagaagatatcaagtgtcaattaaatgaatgcaagtggttggtttgtttagggtttagggtttagagtttagagtttaatatagaaacaaattcatttttaatgacaatatatatgtatagtaaattctcacatcacccatagaacattatgtaaggatgcatatatggatattagagtacatttggaaggcatgatgtaggtacaaacttcgtgttatatagtcatgtgtgtacatatgacactaaccatataatggtatgtctttttatgtcttctactaacattgttagaatacatggccaacgaaaactcctgtgcaggaatatggctactaaggaagcaagtcacacgagagttaattcatgatgggaattctctgtgtattgacccttgcattttcaattggttattgttgagaattcctcatttaataatttactagtacgataaatttacatccctctatgcgataatatttgcatatgaaaaaaaataatacatcaacatatcaatttgggcttttaacctaaaagagaataaaatatgcatatattagcaccttatttatagccatcttgtgttttatttgtacaacttggcccaacattcttcgcaaaaaggaaaagtttgtccaacatttaaaaggggcaaaatgcaacataaagaataaccaaactttagttttgcatcattcatagggtgtccatataattgtgtgtagagaatggaatatgttattcacaatagaatatagatttacgcaagtgccttgaagttggaacaagctcaacaacatgtgcacctagtttgccttcgatttaccatgttcttctccccttttttcaccacacttgttaagcatcaccaaatgattttattcacatgcaagggagaaccttttcgttttttcctgtaaggctatggcaatcagtgttttttatttattaggaattctcttgcaaaatattgaaatttggtgttgtgttgtgttttttcataaattacaaatgcatagtattgttgtatggaagcttatccattggtgaagaaattcaataaactaggatcatatccatgggttgcaatgggaataatataatcgcacattataaataattgtactttgagctaatcatcactattatattattttccatgaatcattaaaaattataatatatttcaagtgttgatgtgcatgggaacacattattttaagtagaatataacacatgttcaaacttaaaatggtgagctataactttgtctctatggcaacaaaaggcataattctagtatagtgtaaactactagtgtattgtgtgcgccatgcgcgcttgttgacccgtattttagaatgtgtgtgagtatatttagggcttgttcggttattcatattccatgtgtatttgtgtggattgagtgaaattgagatggatttttacttgctatggatttaatccaacttaatcccatccaatacacatgtattaacatataaacgaacaagcctttaagtggatagaaattgtagcgtggaaatgttatatgaaggat

SEQ ID NO: 43358 - DNA, 1188 bp, Zea Mays
cttctccctcccattcgcgcgagtttgccccgaaaggagatgaagcagacgcgccccattcgcttcccatcgtagtgaactcggttcgcctcgcctcgcccaccgccgaggcagcgaccagcgaggcgtgctcctcctccggcgctaagacggggccggccgctcgtggggcctcgcctcaggggccccgtgggaggcggcgggccccgaaacgccgtcgtggtgtatcaggcatcatagggctcgcggcggcgattgttggccgcgagttggtcgtgtggatgaggctccaggcgggccccagttttggcaaatggcaccagttcctgcaacaacgaggtcatctacgctggcatctactaccctccccgaagtctcaagttcaggagaaagggcattctagcgaagagagggctacatagctcataagaattattattagccttgtggctatgtgccattcacttggggttatgcaccgtgatctgaagccagaaaacttcctccacttggataaagaagatgatttgtcaatagaagcaatcgattttggtctatccgtgttcttcaaaccaggtcaggttttcactaagctggttggaagtccatagaccctgtagtacagaacagtcatcggaacatgatcacgcgttagaattattggagtggagcagctcactcgacaaaaatgtgtcaccaaccgatgatttattgcattgtcaactgcacttaatgttcttagttgttggggtcttcttctccactgaaggtccttaagtcataaacaccttcgataaaatgccacaagaggtccgcctcacttccgccgaaggttctcaagacgaagatctcggaaagaagcagaaatgcagaacgacgaagctagcttcagctcaaatcaagcaaagaaggaaaagactagatagaccttgctggtttaaattgcttatagacaaatgttcaagggcatgtatgtaattttacctgggctgcgtcccgtacctagaaatagatgaacagtatcaccgtactgtttaagctggattataattactctctcgcattcacgcctttgagcaagtcgaatgtatcaatgtaatattaatattgttaaatattcatttatgttttatagaatgcaaatataaatgaattaataagatgcagttataatctttattctttcgc

SEQ ID NO: 43359 - DNA, 1011 bp, Zea Mays
ccggtttcgtcgcttctccttctccctcccattcgcgcgagtttgccccgaaaggagatgaagcagacgcgccccattcgcttcccatcgtagtgaactcggttcgcctcgcctcgcccaccgccgaggcagcgaccagcgaggcgtgctcctcctccggcgctaagacggggccggccgctcgtggggcctcgcctcaggggccccgtgggaggcggcgggccccgaaacgccgtcgtggtgtatcaggcatcatagggctcgcggcggcgattgttggccgcgagttggtcgtgtggatgaggctccaggcgggccccagttttggcaaatggcaccagttcctgcaacaacgaggtcatctacgctggcatctactaccctccccgaagtctcaaggtcaggttttcactaagctggttggaagtccatagaccctgtagtacagaacagtcatcggaacatgatcacgcgttagaattattggagtggagcagctcactcgacaaaaatgtgtcaccaaccgatgatttattgcattgtcaactgcacttaatgttcttagttgttggggtcttcttctccactgaaggtccttaagtcataaacaccttcgataaaatgccacaagaggtccgcctcacttccgccgaaggttctcaagacgaagatctcggaaagaagcagaaatgcagaacgacgaagctagcttcagctcaaatcaagcaaagaaggaaaagactagatagaccttgctggtttaaattgcttatagacaaatgttcaagggcatgtatgtaattttacctgggctgcgtcccgtacctagaaatagatgaacagtatcaccgtactgtttaagctggattataattactctctcgcattcacgcctttgagcaagtcgaatgtatcaatgtaatattaatattgttaaatattcatttatgttttatagaatgcaaatataaatgaattaataagatgcagttataatctttattctttcgc

SEQ ID NO: 43360 - DNA, 1214 bp, Zea Mays
ggacgctaggcggccggtttcgtcgcttctccttctccctcccattcgcgcgagtttgccccgaaaggagatgaagcagacgcgccccattcgcttcccatcgtagtgaactcggttcgcctcgcctcgcccaccgccgaggcagcgaccagcgaggcgtgctcctcctccggcgctaagacggggccggccgctcgtggggcctcgcctcaggggccccgtgggaggcggcgggccccgaaacgccgtcgtggtgtatcaggcatcatagggctcgcggcggcgattgttggccgcgagttggtcgtgtggatgaggctccaggcgggccccagttttggcaaatggcaccagttcctgcaacaacgaggtcatctacgctggcatctactaccctccccgaagtctcaaggagaaagggcattctagcgaagagagggctacatagctcataagaattattattagccttgtggctatgtgccattcacttggggttatgcaccgtgatctgaagccagaaaacttcctccacttggataaagaagatgatttgtcaatagaagcaatcgattttggtctatccgtgttcttcaaaccaggtcaggttttcactaagctggttggaagtccatagaccctgtagtacagaacagtcatcggaacatgatcacgcgttagaattattggagtggagcagctcactcgacaaaaatgtgtcaccaaccgatgatttattgcattgtcaactgcacttaatgttcttagttgttggggtcttcttctccactgaaggtccttaagtcataaacaccttcgataaaatgccacaagaggtccgcctcacttccgccgaaggttctcaagacgaagatctcggaaagaagcagaaatgcagaacgacgaagctagcttcagctcaaatcaagcaaagaaggaaaagactagatagaccttgctggtttaaattgcttatagacaaatgttcaagggcatgtatgtaattttacctgggctgcgtcccgtacctagaaatagatgaacagtatcaccgtactgtttaagctggattataattactctctcgcattcacgcctttgagcaagtcgaatgtatcaatgtaatattaatattgttaaatattcatttatgttttatagaatgcaaatataaatgaattaataagatgcagttataatctttattctttcgc

SEQ ID NO: 43361 - DNA, 4625 bp, Zea Mays
ctttcctctcgtcccccatggatgcttccttctggtgctagtggaaactagagcagtgcctcccaggatcctctcgcccgcgggctccgagttgccgcctccgcctctctggaacaagatgaagctggttttctggcattggatttttctattcttcgtgttgctttcaacatcacagggtatgagttcagatggcctagctcttcttgctctgtccaaaaccctaatactaccaagtttcataaggaccaactggagtgcttctgatgcaactccttgtacatggaacggtgttggctgcaatggaaggaacagagtgatttctctcgacctatcgtcatcagaggtctcaggttttataggacctgaaatagggcgtctgaaatacctgcaggttctcattttatctgctaacaacatatctggtttgatccctctagaattgggcaactgcagtatgcttgaacaattggatctgtcccaaaacttgctttctggcaatataccggcatcaatgggcagcctcaagaaattgtcatcactgtcgctgtactacaactctttccatggaacaataccagaggagttgttcaagaaccagtttctggagcaagtgtacctacatggaaatcagctcagtggttggatacccttctcggttggtgaaatgacaagccttaagtcattgtggttgcacgaaaatatgttgtccggagttttgcccagttcaattggcaactgcaccaagttggaggagctgtatctactccataatcaactgagtggcagtattccagaaaccttgagtaagatcgaaggcctcaaggtttttgatgccactgccaatagtttcacgggcgagatctctttcagttttgagaactgcaagctggaaatattcatcttgtcattcaataatataaagggtgaaattccgtcatggctagggaattgcaggagcttgcaacaacttggatttgtcaataatagtctgtctggcaaaattccaaattttataggcttattcagcaacctcacgtatcttttactttcacagaactccctgactgggctgatcccacctgagattggtaactgtcggttgctgcagtggctagagctagatgcaaatcagctggagggcactgttcctgaagaatttgcaaatttaaggtatttgtcaaagctctttcttttcgagaatcacctcatgggagacttccctgagagtatttggagtatccaaaccctcgagagtgtccttctttatagcaacaaattcacagggaggctaccttcagtgttagctgagctgaagtccctaaagaacatcacactgtttgataatttcttcactggagtcataccacaggagctgggtgttaatagccccttggtccagatagatttcacaaataacagttttgttggtggtatcccaccaaacatttgttcaggaaaagcattgagaattttggacttggggtttaatcatctcaacggtagcatcccatccagtgttctggactgcccaagtctggagcgagtcattgtcgaaaacaataaccttgttgggtctattccgcaatttataaactgtgcaaatctaagttatatggatctgagccacaattccttgagtggtaacataccatcaagtttcagcaggtgtgtaaaaattgctgagataaactggtcagagaacaatatttttggggcaataccaccagaaattggaaagttggtgaatctgaaaaggcttgacctctcacacaatctattgcatggttcgatccctgtgcaaatttctagttgctccaagttgtattcacttgatttgggttttaactctttgaatggttcggccctcagcacagtaagcagcctgaagtttctgacacagctacgattgcaagagaatagattcagcggaggtttgcctgatcctttctcacaattggaaatgcttattgagctgcaacttggtggaaatattcttgggggcagtatcccttcatcattaggacagctggtgaaactgggtacaaccttgaaccttagtagcaatggtctagtgggtgacattccatcacaattcggtaatttggtggagttgcaaaacttagatttgtcatttaataatctcacaggaggccttgctacattgcgaagtctacgctttttgcaggccttgaatgtttcttacaaccaatttagtggaccagttccagataatcttgtgaagtttctgagttccacaacaaattcttttgatggaaacccaggcctctgtatctcttgcagcaccagtgattcttcttgcatgggagctaatgttctgaaaccttgtggcgggtcaaagaaaagagcagtgcatggccgattcaaaattgttctcatagttcttggctcattatttgtgggagcagttctggtactcatactctggtgcatccttctgaaatctcgagatcagaagaagaatagtgaggaagcagtcagtcatatgtttgaaggttcctcatctaaattaaatgaggttatagaggcaactgaatgttttgatgacaagtatatcattggtaaaggtggtcacggaaccgtttacaaggcaacactgaggtcaggggatgtttatgctataaagaaacttgtgatttctgcacacaaaggttcatacaaaagcatggttggagaactgaagacactaggtaaaatcaagcacaggaacttgattaagctgaaagaatcttggttgagaaatgacaatggattcatactgtatgattttatggaaaaaggtagccttcatgatgttctacatgtagttcagccagcaccagccttagactggtgtgtgcggtatgacatagccctcggcactgcccatgggttagcatatctacatgatgactgccgccctgcgatcattcatcgcgacatcaagccaagtaatatactgctggacaaggacatggtgccacatatttcagattttggcattgcaaagctcttggagcagccttctactgctcctcagaccactggtgttgttggcaccattggatatatggccccagagttagcgttctccaccaagagcagcatggagtccgacgtgtacagctacggcgtggtgctgctggagctgctcacgaggagggcggcggtggatccctcgtttcccgacggcacggacatagtcagctgggcgtcgtccgccctgaacggcactgacaaaatcgaggccgtctgcgacccggccctcatggaggaagtcttcggcacggtggagatggaggaggtgagtaaggtcctgtcagtggcgctgcggtgcgcggccagggaggcgagccaaaggccctccatgaccgcggtcgtgaaggagctgacggatgcacggcctgccactggcggcggccggtcgttgtccaagtcgaagcaggggaaaccaggatcgcaatccaacagcagcgcctaccggcagtaggatctctgactctgccgagctgtttggggacaccaactttactcaactttagtctctactctataggtaccctcgcttggtgtacatcctgattggttagttggcaaagattagttgtagttcaaatgaaacggagagatgctggactcgtgtcagtgcgagtgaagcaagctgcttgttctgaaatctgtggactgtggcttgtccgtggcttccagggacgggaccaggatagaatgggtattccaaattgtactaaaggaaaaaaaattagatggtctaattgattcacgtatagatagttatagcatataatagaatatacacattacaaaagtagtaagctaaatcataactcacgtaaaaataataggtcaggagaacattaaatagtataaggatgcttactagacaactttatgatccttcaagctttgaaattgactgataatgtcctcatttttgacttgcaagaagaattgtctttcaataaaaataaccaagcatccatttaaatttttttgtctcatcttgcttcttagcttattttttataaagttcattgaagaaaagattctttcaacaccggcagttgtaacatgaagaactagcaccaatttgagaagcttgtaaacaatgtcataccaaagaatcttatctgttttgacaagcatcatagataactctgctaggcttctcaaatttttgaagttttcatctcttctctaggcttctcaaatttatttttgagccttatacaataaaatatttgaggtaactgactcacggattgatgttttaggtgtcaaaaataaattatatttctcctcagcttcacaatgagcactatcaacaacaccaacccttaagcaatctagctttaacattccaatttctaaacccctcattaacgaaagcatctccaccagggaatttgttgttatctttgaacagatagcaaacgaaacaatatgcaacatctttatccacactatactcaagcctacaaaactcggaaaaccactttggtaggaagcgacacatacctccacattcatgttggggaaaatcatccttcttcatctttggtcgacatggccccaatgcaatataggcccttgtaactgcatcttgg

SEQ ID NO: 43362 - DNA, 4397 bp, Zea Mays
gaaacggcttctcgttcgtgcctccttcgccaactgtccaccgcgctgccggtgctctttcctctcgtcccccatggatgcttccttctggtgctagtggaaactagagcagtgcctcccaggatcctctcgcccgcgggctccgagttgccgcctccgcctctctggaacaagatgaagctggttttctggcattggatttttctattcttcgtgttgctttcaacatcacagggtatgagttcagatggcctagctcttcttgctctgtccaaaaccctaatactaccaagtttcataaggaccaactggagtgcttctgatgcaactccttgtacatggaacggtgttggctgcaatggaaggaacagagtgatttctctcgacctatcgtcatcagaggtctcaggttttataggacctgaaatagggcgtctgaaatacctgcaggttctcattttatctgctaacaacatatctggtttgatccctctagaattgggcaactgcagtatgcttgaacaattggatctgtcccaaaacttgctttctggcaatataccggcatcaatgggcagcctcaagaaattgtcatcactgtcgctgtactacaactctttccatggaacaataccagaggagttgttcaagaaccagtttctggagcaagtgtacctacatggaaatcagctcagtggttggatacccttctcggttggtgaaatgacaagccttaagtcattgtggttgcacgaaaatatgttgtccggagttttgcccagttcaattggcaactgcaccaagttggaggagctgtatctactccataatcaactgagtggcagtattccagaaaccttgagtaagatcgaaggcctcaaggtttttgatgccactgccaatagtttcacgggcgagatctctttcagttttgagaactgcaagctggaaatattcatcttgtcattcaataatataaagggtgaaattccgtcatggctagggaattgcaggagcttgcaacaacttggatttgtcaataatagtctgtctggcaaaattccaaattttataggcttattcagcaacctcacgtatcttttactttcacagaactccctgactgggctgatcccacctgagattggtaactgtcggttgctgcagtggctagagctagatgcaaatcagctggagggcactgttcctgaagaatttgcaaatttaaggaaaagcattgagaattttggacttggggtttaatcatctcaacggtagcatcccatccagtgttctggactgcccaagtctggagcgagtcattgtcgaaaacaataaccttgttgggtctattccgcaatttataaactgtgcaaatctaagttatatggatctgagccacaattccttgagtggtaacataccatcaagtttcagcaggtgtgtaaaaattgctgagataaactggtcagagaacaatatttttggggcaataccaccagaaattggaaagttggtgaatctgaaaaggcttgacctctcacacaatctattgcatggttcgatccctgtgcaaatttctagttgctccaagttgtattcacttgatttgggttttaactctttgaatggttcggccctcagcacagtaagcagcctgaagtttctgacacagctacgattgcaagagaatagattcagcggaggtttgcctgatcctttctcacaattggaaatgcttattgagctgcaacttggtggaaatattcttgggggcagtatcccttcatcattaggacagctggtgaaactgggtacaaccttgaaccttagtagcaatggtctagtgggtgacattccatcacaattcggtaatttggtggagttgcaaaacttagatttgtcatttaataatctcacaggaggccttgctacattgcgaagtctacgctttttgcaggccttgaatgtttcttacaaccaatttagtggaccagttccagataatcttgtgaagtttctgagttccacaacaaattcttttgatggaaacccaggcctctgtatctcttgcagcaccagtgattcttcttgcatgggagctaatgttctgaaaccttgtggcgggtcaaagaaaagagcagtgcatggccgattcaaaattgttctcatagttcttggctcattatttgtgggagcagttctggtactcatactctggtgcatccttctgaaatctcgagatcagaagaagaatagtgaggaagcagtcagtcatatgtttgaaggttcctcatctaaattaaatgaggttatagaggcaactgaatgttttgatgacaagtatatcattggtaaaggtggtcacggaaccgtttacaaggcaacactgaggtcaggggatgtttatgctataaagaaacttgtgatttctgcacacaaaggttcatacaaaagcatggttggagaactgaagacactaggtaaaatcaagcacaggaacttgattaagctgaaagaatcttggttgagaaatgacaatggattcatactgtatgattttatggaaaaaggtagccttcatgatgttctacatgtagttcagccagcaccagccttagactggtgtgtgcggtatgacatagccctcggcactgcccatgggttagcatatctacatgatgactgccgccctgcgatcattcatcgcgacatcaagccaagtaatatactgctggacaaggacatggtgccacatatttcagattttggcattgcaaagctcttggagcagccttctactgctcctcagaccactggtgttgttggcaccattggatatatggccccagagttagcgttctccaccaagagcagcatggagtccgacgtgtacagctacggcgtggtgctgctggagctgctcacgaggagggcggcggtggatccctcgtttcccgacggcacggacatagtcagctgggcgtcgtccgccctgaacggcactgacaaaatcgaggccgtctgcgacccggccctcatggaggaagtcttcggcacggtggagatggaggaggtgagtaaggtcctgtcagtggcgctgcggtgcgcggccagggaggcgagccaaaggccctccatgaccgcggtcgtgaaggagctgacggatgcacggcctgccactggcggcggccggtcgttgtccaagtcgaagcaggggaaaccaggatcgcaatccaacagcagcgcctaccggcagtaggatctctgactctgccgagctgtttggggacaccaactttactcaactttagtctctactctataggtaccctcgcttggtgtacatcctgattggttagttggcaaagattagttgtagttcaaatgaaacggagagatgctggactcgtgtcagtgcgagtgaagcaagctgcttgttctgaaatctgtggactgtggcttgtccgtggcttccagggacgggaccaggatagaatgggtattccaaattgtactaaaggaaaaaaaattagatggtctaattgattcacgtatagatagttatagcatataatagaatatacacattacaaaagtagtaagctaaatcataactcacgtaaaaataataggtcaggagaacattaaatagtataaggatgcttactagacaactttatgatccttcaagctttgaaattgactgataatgtcctcatttttgacttgcaagaagaattgtctttcaataaaaataaccaagcatccatttaaatttttttgtctcatcttgcttcttagcttattttttataaagttcattgaagaaaagattctttcaacaccggcagttgtaacatgaagaactagcaccaatttgagaagcttgtaaacaatgtcataccaaagaatcttatctgttttgacaagcatcatagataactctgctaggcttctcaaatttttgaagttttcatctcttctctaggcttctcaaatttatttttgagccttatacaataaaatatttgaggtaactgactcacggattgatgttttaggtgtcaaaaataaattatatttctcctcagcttcacaatgagcactatcaacaacaccaacccttaagcaatctagctttaacattccaatttctaaacccctcattaacgaaagcatctccaccagggaatttgttgttatctttgaacagatagcaaacgaaacaatatgcaacatctttatccacactatactcaagcctacaaaactcggaaaaccactttggtaggaagcgacacatacctccacattcatgttggggaaaatcatccttcttcatctttggtcgacatggccccaatgcaatataggcccttgtaactgcatcttgg

SEQ ID NO: 43363 - DNA, 1712 bp, Zea Mays
gaaacggcttctcgttcgtgcctccttcgccaactgtccaccgcgctgccggtgctctttcctctcgtcccccatggatgcttccttctggtgctagtggaaactagagcagtgcctcccaggatcctctcgcccgcgggctccgagttgccgcctccgcctctctgagttagcgttctccaccaagagcagcatggagtccgacgtgtacagctacggcgtggtgctgctggagctgctcacgaggagggcggcggtggatccctcgtttcccgacggcacggacatagtcagctgggcgtcgtccgccctgaacggcactgacaaaatcgaggccgtctgcgacccggccctcatggaggaagtcttcggcacggtggagatggaggaggtgagtaaggtcctgtcagtggcgctgcggtgcgcggccagggaggcgagccaaaggccctccatgaccgcggtcgtgaaggagctgacggatgcacggcctgccactggcggcggccggtcgttgtccaagtcgaagcaggggaaaccaggatcgcaatccaacagcagcgcctaccggcagtaggatctctgactctgccgagctgtttggggacaccaactttactcaactttagtctctactctataggtaccctcgcttggtgtacatcctgattggttagttggcaaagattagttgtagttcaaatgaaacggagagatgctggactcgtgtcagtgcgagtgaagcaagctgcttgttctgaaatctgtggactgtggcttgtccgtggcttccagggacgggaccaggatagaatgggtattccaaattgtactaaaggaaaaaaaattagatggtctaattgattcacgtatagatagttatagcatataatagaatatacacattacaaaagtagtaagctaaatcataactcacgtaaaaataataggtcaggagaacattaaatagtataaggatgcttactagacaactttatgatccttcaagctttgaaattgactgataatgtcctcatttttgacttgcaagaagaattgtctttcaataaaaataaccaagcatccatttaaatttttttgtctcatcttgcttcttagcttattttttataaagttcattgaagaaaagattctttcaacaccggcagttgtaacatgaagaactagcaccaatttgagaagcttgtaaacaatgtcataccaaagaatcttatctgttttgacaagcatcatagataactctgctaggcttctcaaatttttgaagttttcatctcttctctaggcttctcaaatttatttttgagccttatacaataaaatatttgaggtaactgactcacggattgatgttttaggtgtcaaaaataaattatatttctcctcagcttcacaatgagcactatcaacaacaccaacccttaagcaatctagctttaacattccaatttctaaacccctcattaacgaaagcatctccaccagggaatttgttgttatctttgaacagatagcaaacgaaacaatatgcaacatctttatccacactatactcaagcctacaaaactcggaaaaccactttggtaggaagcgacacatacctccacattcatgttggggaaaatcatccttcttcatctttggtcgacatggccccaatgcaatataggcccttgtaactgcatcttgg

SEQ ID NO: 43364 - DNA, 4058 bp, Zea Mays
ctcactcctcccccaaaatctcaccttcccccgcgtgctccggctgcttttggccaccgatacgctgcgccggcgctccaaagttccagggtttaggtcgctccttctccaccacctggccgcccaccctccacctctcgtgcttcccggacgtcgcggccgccgagacgacggccaggagcaggagccaccgatcagtcgtcgccaccgccatgacccaagctacctaaggcagctagaatctctgctttgagttcttccactgtccccgcacgggctgcgatctctgtttttttggttccccaatcccattccgcgtcctcatgctgccattttggggttcaaggttcgtcatcaggttcctgtgctttaatgtcaatattggtatggccgtatgggcgatactgaagttaatgccagcggttattgtccaatgagctcggcgagatgataaggaaataagtgcagttcttttttaagcgtcattcctatttttataatagttgacagtgacaaataatgcttgctggaaaacaagttcactgtggtataacttcagaggttattgccagaagttacggatcgcaggtttggttagatccatggattgtggaaattttgtcgttgtactgtgctttttcatgataggctgttgaactagaactggtttgttgtgtctttgtaacttagttagcagagtattattgttcagtcaggtcaagtgatgggataaagtggtgtagtctactgtacagtacttttaaatgacagctgctgggacaaatgatgttgtgcgggaaatcaaaatgtcatagtttcacgggatagacggatcagcttggcttgggaatgttgtcaggttcctgtgctttttttcccaatatctttgcttccgccagatcccagatccagtgtctttcgtcggctggctttgtttgcgccgctgaagaacagcaatagtcagccaatatctagtccaaagtccaagcgccacctaagtttagttgtttcaccatgcggcgtggatggacggtcaatttcttcgcccgtcgcccaaccggcagcagcacgtacgcgatgatttgattggttccttgtgtcctaaatgaaggccaggagaagctggaattccaaatcgtagtccgtgtgaaccagttgaaccgcatcaatcttatcaagtcatctaataaaaaaagattctccccagatctgcttttttgggccgaaccacgtggagtaatacccctgaagttcagtgactacatcaaccaggtacttcgtacacactttggtctgtcaccatcaatgttatttaatctaccagttcatgcacatatgtacaattgggattctattttttcgtttaaattatgaaacattgcatgtgttcctcgttttgctagtgcaacagtgtatatttatataccgaaagctaacttcctataacttttataaaataccgtaggaagttatgtttatttcctagagctaccagttgctcggaagttatttatttcctacggtttgttataaaagttgtagaaagttaaaaaaccgtaggaattgtatgattttggtgtagtgttttatatcctcgtctacacacaatcatcaacatgatgaaaaacaggtaaaaatgcatttgtgataatataagagttcaagcatgacaactaaaaaagggaaaaagattctcaccagtctggtctatcccgtacactttgatgctgacgtcattaaattgtcttgctaaatgatgatacctcccactgtcgcagctatccaaggaaagtcagggtcagccatcctgtaccaacaaaccggtatagctagaaaaatcatttctaaataaactgataggaacatgaagtgctcttgcttcttacctgtgcttgtttagctcatgtatggcaataacaaaatccactaaatattatgcataaggcaaatattaggcacaaagtccatgttctgaaagcaaaaaacgtgagtcctatgcaaatagcatgtttggaaaaacttgactaaaaccccatatatgaggtatggtacatgatatatttcaggaaaccatctatgtttcttactttcttgtttattcagtttcattatttcttggagaaaagataaacatgctcctttggtgctagaagcaatgtggctttattctccaacataaacacagttgatgacatgagtggccttacatttggattctcttcgacacagaaaagtcctacattagtacacctatagacatctgatttcattcaggtgaaactgtttgcatcgaagcacagactttgttttccttttttgtcgatacattgaagtttgaaaaggccactattttacttagctaattgattaagcgtctatgttcttcaaactttttttcaatgtttagggtttccatggttttagctttttgacctattccttagtttctgtgctccattctaagacctgtatatcacacgtatttcatttggccaccaaacattgaggttctaagatgccactattttactttgcgaatagactgaacgtctatgttctttaaatttttccccaaaatttactgtttatggttttccctaaatttagcttttggatttaatccctggtttctctgtttcattctaagatgtgtgtgtagcctacgtttcatttggccaacaaaacagtttttgtgctcgtaggttgctgcaggacaattttgggtccataatggtcataggaactctactgtctacttcttgtagaacagaaaaaataattcagttcgccttcgttgaatctaatttcgattttatatcttcatggctttttttcctcttttaaaaagtcagaccttactcctgtccctctcccctctttattctattctctcactatctgatgtcattccatttgtgcaacagaaaaaaattgcactttctttcatcttggaatatgcttgctttcagtttctgattttattgtagttgcttgctaagtgattcacagcatctggtgcaagaagatagtagagaaaataaacaaattacatagctcgtagctattggctaattagtgtagttcatacttcatagcccttttttgctgcaagaataacctgagcaaactcattcctaaaatatatgttcaaaaaatgttctgtgctgaaaatacacagtgcacattgaacactgctattatgttcattatgttctgtgctgaaaatacacagtgcgcactgaaaatacacactaccaaaaaatgttcctgcaacacagttcttagtaaacttgcttctatgctgctcttttttttccttatatatcatcataacagtgtgttagactgttagcctcttgatatatcttattcgagaaacactttaacttttcaattaagtttttgtaacttgagatcttagacataacatagcttgttgtgctaatagacttagtacctgcttgcggtgatcagagggaaagataaaataaacatattgtatgttattgtttctctcttttcaaaaaaatgttatttgttttatgatcctaatattacattgtgctctttggtgctgtttatgctaacatactactctcatttgtatacatgtattgtttctttttttgcaagcatagaagaggctccatcacttttggtcatgagacttttatgtatatattaacctgatgttgaagccttcctagaactgtgtgtctatgcaagaaagactggtcacttttgatcaatagacttttatttgcacgcatagaagaggctccatcacttttggtcataagacttttatatatatattaatctgatgttgaagccttcctagaactgtgtgtatgcaagaaaagctaggtcacttttggtcaatagacttttatgtacatatggctctagttgaagtcttcctagaactatgtttgtctatgtaaactctacagatacactattgctggacactcaagtataccagtttaatgcaacttgctacttactgtaatctaaatttgtattactactgctattggtactaaaaaatattgttg

SEQ ID NO: 43365 - DNA, 793 bp, Zea Mays
ctcactcctcccccaaaatctcaccttcccccgcgtgctccggctgcttttggccaccgatacgctgcgccggcgctccaaagttccagggtttaggtcgctccttctccaccacctggccgcccaccctccacctctcgtgcttcccggacgtcgcggccgccgagacgacggccaggagcaggagccaccgatcagtcgtcgccaccgccatgacccaagctacctaaggcagctagaatctctgctttgagttcttccactgtccccgcacgggctgcgatctctgtttttttggttccccaatcccattccgcgtcctcatgctgccattttggggttcaaggccaggagaagctggaattccaaatcgtagtccgtgtgaaccagttgaaccgcatcaatcttatcaagtcatctaataaaaaaagattctccccagatctgcttttttgggccgaaccacgtggagtaatacccctgaagttcagtgactacatcaaccagaagaggctccatcacttttggtcataagacttttatatatatattaatctgatgttgaagccttcctagaactgtgtgtatgcaagaaaagctaggtcacttttggtcaatagacttttatgtacatatggctctagttgaagtcttcctagaactatgtttgtctatgtaaactctacagatacactattgctggacactcaagtataccagtttaatgcaacttgctacttactgtaatctaaatttgtattactactgctattggtactaaaaaatattgttg

SEQ ID NO: 43366 - DNA, 1401 bp, Zea Mays
ctcactcctcccccaaaatctcaccttcccccgcgtgctccggctgcttttggccaccgatacgctgcgccggcgctccaaagttccagggtttaggtcgctccttctccaccacctggccgcccaccctccacctctcgtgcttcccggacgtcgcggccgccgagacgacggccaggagcaggagccaccgatcagtcgtcgccaccgccatgacccaagctacctaaggcagctagaatctctgctttgagttcttccactgtccccgcacgggctgcgatctctgtttttttggttccccaatcccattccgcgtcctcatgctgccattttggggttcaagttgacagtgacaaataatgcttgctggaaaacaagttcactgtggtataacttcagaggttattgccagaagttacggatcgcaggtttggttagatccatggattgtggaaattttgtcgttgtactgtgctttttcatgataggctgttgaactagaactggtttgttgtgtctttgtaacttagttagcagagtattattgttcagtcaggtcaagtgatgggataaagtggtgtagtctactgtacagtacttttaaatgacagctgctgggacaaatgatgttgtgcgggaaatcaaaatgtcatagtttcacgggatagacggatcagcttggcttgggaatgttgtcaggttcctgtgctttttttcccaatatctttgcttccgccagatcccagatccagtgtctttcgtcggctggctttgtttgcgccgctgaagaacagcaatagtcagccaatatctagtccaaagtccaagcgccacctaagtttagttgtttcaccatgcggcgtggatggacggtcaatttcttcgcccgtcgcccaaccggcagcagcacgtacgcgatgatttgattggttccttgtgtcctaaatgaaggccaggagaagctggaattccaaatcgtagtccgtgtgaaccagttgaaccgcatcaatcttatcaagtcatctaataaaaaaagattctccccagatctgcttttttgggccgaaccacgtggagtaatacccctgaagttcagtgactacatcaaccagaagaggctccatcacttttggtcataagacttttatatatatattaatctgatgttgaagccttcctagaactgtgtgtatgcaagaaaagctaggtcacttttggtcaatagacttttatgtacatatggctctagttgaagtcttcctagaactatgtttgtctatgtaaactctacagatacactattgctggacactcaagtataccagtttaatgcaacttgctacttactgtaatctaaatttgtattactactgctattggtactaaaaaatattgttg

SEQ ID NO: 43367 - DNA, 3905 bp, Zea Mays
ctcactcctcccccaaaatctcaccttcccccgcgtgctccggctgcttttggccaccgatacgctgcgccggcgctccaaagttccagggtttaggtcgctccttctccaccacctggccgcccaccctccacctctcgtgcttcccggacgtcgcggccgccgagacgacggccaggagcaggagccaccgatcagtcgtcgccaccgccatgacccaagctacctaaggcagctagaatctctgctttgagttcttccactgtccccgcacgggctgcgatctctgtttttttggttccccaatcccattccgcgtcctcatgctgccattttggggttcaagttgacagtgacaaataatgcttgctggaaaacaagttcactgtggtataacttcagaggttattgccagaagttacggatcgcaggtttggttagatccatggattgtggaaattttgtcgttgtactgtgctttttcatgataggctgttgaactagaactggtttgttgtgtctttgtaacttagttagcagagtattattgttcagtcaggtcaagtgatgggataaagtggtgtagtctactgtacagtacttttaaatgacagctgctgggacaaatgatgttgtgcgggaaatcaaaatgtcatagtttcacgggatagacggatcagcttggcttgggaatgttgtcaggttcctgtgctttttttcccaatatctttgcttccgccagatcccagatccagtgtctttcgtcggctggctttgtttgcgccgctgaagaacagcaatagtcagccaatatctagtccaaagtccaagcgccacctaagtttagttgtttcaccatgcggcgtggatggacggtcaatttcttcgcccgtcgcccaaccggcagcagcacgtacgcgatgatttgattggttccttgtgtcctaaatgaaggcaggccaggagaagctggaattccaaatcgtagtccgtgtgaaccagttgaaccgcatcaatcttatcaagtcatctaataaaaaaagattctccccagatctgcttttttgggccgaaccacgtggagtaatacccctgaagttcagtgactacatcaaccaggtacttcgtacacactttggtctgtcaccatcaatgttatttaatctaccagttcatgcacatatgtacaattgggattctattttttcgtttaaattatgaaacattgcatgtgttcctcgttttgctagtgcaacagtgtatatttatataccgaaagctaacttcctataacttttataaaataccgtaggaagttatgtttatttcctagagctaccagttgctcggaagttatttatttcctacggtttgttataaaagttgtagaaagttaaaaaaccgtaggaattgtatgattttggtgtagtgttttatatcctcgtctacacacaatcatcaacatgatgaaaaacaggtaaaaatgcatttgtgataatataagagttcaagcatgacaactaaaaaagggaaaaagattctcaccagtctggtctatcccgtacactttgatgctgacgtcattaaattgtcttgctaaatgatgatacctcccactgtcgcagctatccaaggaaagtcagggtcagccatcctgtaccaacaaaccggtatagctagaaaaatcatttctaaataaactgataggaacatgaagtgctcttgcttcttacctgtgcttgtttagctcatgtatggcaataacaaaatccactaaatattatgcataaggcaaatattaggcacaaagtccatgttctgaaagcaaaaaacgtgagtcctatgcaaatagcatgtttggaaaaacttgactaaaaccccatatatgaggtatggtacatgatatatttcaggaaaccatctatgtttcttactttcttgtttattcagtttcattatttcttggagaaaagataaacatgctcctttggtgctagaagcaatgtggctttattctccaacataaacacagttgatgacatgagtggccttacatttggattctcttcgacacagaaaagtcctacattagtacacctatagacatctgatttcattcaggtgaaactgtttgcatcgaagcacagactttgttttccttttttgtcgatacattgaagtttgaaaaggccactattttacttagctaattgattaagcgtctatgttcttcaaactttttttcaatgtttagggtttccatggttttagctttttgacctattccttagtttctgtgctccattctaagacctgtatatcacacgtatttcatttggccaccaaacattgaggttctaagatgccactattttactttgcgaatagactgaacgtctatgttctttaaatttttccccaaaatttactgtttatggttttccctaaatttagcttttggatttaatccctggtttctctgtttcattctaagatgtgtgtgtagcctacgtttcatttggccaacaaaacagtttttgtgctcgtaggttgctgcaggacaattttgggtccataatggtcataggaactctactgtctacttcttgtagaacagaaaaaataattcagttcgccttcgttgaatctaatttcgattttatatcttcatggctttttttcctcttttaaaaagtcagaccttactcctgtccctctcccctctttattctattctctcactatctgatgtcattccatttgtgcaacagaaaaaaattgcactttctttcatcttggaatatgcttgctttcagtttctgattttattgtagttgcttgctaagtgattcacagcatctggtgcaagaagatagtagagaaaataaacaaattacatagctcgtagctattggctaattagtgtagttcatacttcatagcccttttttgctgcaagaataacctgagcaaactcattcctaaaatatatgttcaaaaaatgttctgtgctgaaaatacacagtgcacattgaacactgctattatgttcattatgttctgtgctgaaaatacacagtgcgcactgaaaatacacactaccaaaaaatgttcctgcaacacagttcttagtaaacttgcttctatgctgctcttttttttccttatatatcatcataacagtgtgttagactgttagcctcttgatatatcttattcgagaaacactttaacttttcaattaagtttttgtaacttgagatcttagacataacatagcttgttgtgctaatagacttagtacctgcttgcggtgatcagagggaaagataaaataaacatattgtatgttattgtttctctcttttcaaaaaaatgttatttgttttatgatcctaatattacattgtgctctttggtgctgtttatgctaacatactactctcatttgtatacatgtattgtttctttttttgcaagcatagaagaggctccatcacttttggtcatgagacttttatgtatatattaacctgatgttgaagccttcctagaactgtgtgtctatgcaagaaagactggtcacttttgatcaatagacttttatttgcacgcatagaagaggctccatcacttttggtcataagacttttatatatatattaatctgatgttgaagccttcctagaactgtgtgtatgcaagaaaagctaggtcacttttggtcaatagacttttatgtacatatggctctagttgaagtcttcctagaactatgtttgtctatgtaaactctacagatacactattgctggacactcaagtataccagtttaatgcaacttgctacttactgtaatctaaatttgtattactactgctattggtactaaaaaatattgttg

SEQ ID NO: 43368 - DNA, 1939 bp, Zea Mays
ctcgcctcactcctcccccaaaatctcaccttcccccgcgtgctccggctgcttttggccaccgatacgctgcgccggcgctccaaagttccagggtttaggtcgctccttctccaccacctggccgcccaccctccacctctcgtgcttcccggacgtcgcggccgccgagacgacggccaggagcaggagccaccgatcagtcgtcgccaccgccatgacccaagctacctaaggcagctagaatctctgctttgagttcttccactgtccccgcacgggctgcgatctctgtttttttggttccccaatcccattccgcgtcctcatgctgccattttggggttcaaggttcgtcatcaggttcctgtgctttaatgtcaatattggtatggccgtatgggcgatactgaagttaatgccagcggttattgtccaatgagctcggcgagatgataaggaaataagtgcagttcttttttaagcgtcattcctatttttataatagttgacagtgacaaataatgcttgctggaaaacaagttcactgtggtataacttcagaggttattgccagaagttacggatcgcaggtttggttagatccatggattgtggaaattttgtcgttgtactgtgctttttcatgataggctgttgaactagaactggtttgttgtgtctttgtaacttagttagcagagtattattgttcagtcaggtcaagtgatgggataaagtggtgtagtctactgtacagtacttttaaatgacagctgctgggacaaatgatgttgtgcgggaaatcaaaatgtcatagtttcacgggatagacggatcagcttggcttgggaatgttgtcaggttcctgtgctttttttcccaatatctttgcttccgccagatcccagatccagtgtctttcgtcggctggctttgtttgcgccgctgaagaacagcaatagtcagccaatatctagtccaaagtccaagcgccacctaagtttagttgtttcaccatgcggcgtggatggacggtcaatttcttcgcccgtcgcccaaccggcagcagcacgtacgcgatgatttgattggttccttgtgtcctaaatgaaggcaggttgtctaaagatctgaaatctccggtttcatccaagttattatgtttttcattttattcaattatctcccctgcttctttatcactcctattttctagatgacatatacataaaaaacaggatggtctttgttggcttcctgctactgcatataacatactaatttggctaaagaatatatgtatgtaccttaactgtgacagctactgatttggatttttctttaaaacaggccaggagaagctggaattccaaatcgtagtccgtgtgaaccagttgaaccgcatcaatcttatcaagtcatctaataaaaaaagattctccccagatctgcttttttgggccgaaccacgtggagtaatacccctgaagttcagtgactacatcaaccagcatagaagaggctccatcacttttggtcatgagacttttatgtatatattaacctgatgttgaagccttcctagaactgtgtgtctatgcaagaaagactggtcacttttgatcaatagacttttatttgcacgcatagaagaggctccatcacttttggtcataagacttttatatatatattaatctgatgttgaagccttcctagaactgtgtgtatgcaagaaaagctaggtcacttttggtcaatagacttttatgtacatatggctctagttgaagtcttcctagaactatgtttgtctatgtaaactctacagatacactattgctggacactcaagtataccagtttaatgcaacttgctacttactgtaatctaaatttgtattactactgctattggtactaaaaaatattgttg

SEQ ID NO: 43369 - DNA, 1934 bp, Zea Mays
ctcgcctcactcctcccccaaaatctcaccttcccccgcgtgctccggctgcttttggccaccgatacgctgcgccggcgctccaaagttccagggtttaggtcgctccttctccaccacctggccgcccaccctccacctctcgtgcttcccggacgtcgcggccgccgagacgacggccaggagcaggagccaccgatcagtcgtcgccaccgccatgacccaagctacctaaggcagctagaatctctgctttgagttcttccactgtccccgcacgggctgcgatctctgtttttttggttccccaatcccattccgcgtcctcatgctgccattttggggttcaaggttcgtcatcaggttcctgtgctttaatgtcaatattggtatggccgtatgggcgatactgaagttaatgccagcggttattgtccaatgagctcggcgagatgataaggaaataagtgcagttcttttttaagcgtcattcctatttttataatagttgacagtgacaaataatgcttgctggaaaacaagttcactgtggtataacttcagaggttattgccagaagttacggatcgcaggtttggttagatccatggattgtggaaattttgtcgttgtactgtgctttttcatgataggctgttgaactagaactggtttgttgtgtctttgtaacttagttagcagagtattattgttcagtcaggtcaagtgatgggataaagtggtgtagtctactgtacagtacttttaaatgacagctgctgggacaaatgatgttgtgcgggaaatcaaaatgtcatagtttcacgggatagacggatcagcttggcttgggaatgttgtcaggttcctgtgctttttttcccaatatctttgcttccgccagatcccagatccagtgtctttcgtcggctggctttgtttgcgccgctgaagaacagcaatagtcagccaatatctagtccaaagtccaagcgccacctaagtttagttgtttcaccatgcggcgtggatggacggtcaatttcttcgcccgtcgcccaaccggcagcagcacgtacgcgatgatttgattggttccttgtgtcctaaatgaaggcaggttgtctaaagatctgaaatctccggtttcatccaagttattatgtttttcattttattcaattatctcccctgcttctttatcactcctattttctagatgacatatacataaaaaacaggatggtctttgttggcttcctgctactgcatataacatactaatttggctaaagaatatatgtatgtaccttaactgtgacagctactgatttggatttttctttaaaacaggccaggagaagctggaattccaaatcgtagtccgtgtgaaccagttgaaccgcatcaatcttatcaagtcatctaataaaaaaagattctccccagatctgcttttttgggccgaaccacgtggagtaatacccctgaagttcagtgactacatcaaccagaagaggctccatcacttttggtcatgagacttttatgtatatattaacctgatgttgaagccttcctagaactgtgtgtctatgcaagaaagactggtcacttttgatcaatagacttttatttgcacgcatagaagaggctccatcacttttggtcataagacttttatatatatattaatctgatgttgaagccttcctagaactgtgtgtatgcaagaaaagctaggtcacttttggtcaatagacttttatgtacatatggctctagttgaagtcttcctagaactatgtttgtctatgtaaactctacagatacactattgctggacactcaagtataccagtttaatgcaacttgctacttactgtaatctaaatttgtattactactgctattggtactaaaaaatattgttg

SEQ ID NO: 43370 - DNA, 2463 bp, Zea Mays
ctccaatctcgcctcactcctcccccaaaatctcaccttcccccgcgtgctccggctgcttttggccaccgatacgctgcgccggcgctccaaagttccagggtttaggtcgctccttctccaccacctggccgcccaccctccacctctcgtgcttcccggacgtcgcggccgccgagacgacggccaggagcaggagccaccgatcagtcgtcgccaccgccatgacccaagctacctaaggcagctagaatctctgctttgagttcttccactgtccccgcacgggctgcgatctctgtttttttggttccccaatcccattccgcgtcctcatgctgccattttggggttcaaggccaggagaagctggaattccaaatcgtagtccgtgtgaaccagttgaaccgcatcaatcttatcaagtcatctaataaaaaaagatctgcttttttgggccgaaccacgtggagtaatacccctgaagttcagtgactacatcaaccagtttcattatttcttggagaaaagataaacatgctcctttggtgctagaagcaatgtggctttattctccaacataaacacagttgatgacatgagtggccttacatttggattctcttcgacacagaaaagtcctacattagtacacctatagacatctgatttcattcaggtgaaactgtttgcatcgaagcacagactttgttttccttttttgtcgatacattgaagtttgaaaaggccactattttacttagctaattgattaagcgtctatgttcttcaaactttttttcaatgtttagggtttccatggttttagctttttgacctattccttagtttctgtgctccattctaagacctgtatatcacacgtatttcatttggccaccaaacattgaggttctaagatgccactattttactttgcgaatagactgaacgtctatgttctttaaatttttccccaaaatttactgtttatggttttccctaaatttagcttttggatttaatccctggtttctctgtttcattctaagatgtgtgtgtagcctacgtttcatttggccaacaaaacagtttttgtgctcgtaggttgctgcaggacaattttgggtccataatggtcataggaactctactgtctacttcttgtagaacagaaaaaataattcagttcgccttcgttgaatctaatttcgattttatatcttcatggctttttttcctcttttaaaaagtcagaccttactcctgtccctctcccctctttattctattctctcactatctgatgtcattccatttgtgcaacagaaaaaaattgcactttctttcatcttggaatatgcttgctttcagtttctgattttattgtagttgcttgctaagtgattcacagcatctggtgcaagaagatagtagagaaaataaacaaattacatagctcgtagctattggctaattagtgtagttcatacttcatagcccttttttgctgcaagaataacctgagcaaactcattcctaaaatatatgttcaaaaaatgttctgtgctgaaaatacacagtgcacattgaacactgctattatgttcattatgttctgtgctgaaaatacacagtgcgcactgaaaatacacactaccaaaaaatgttcctgcaacacagttcttagtaaacttgcttctatgctgctcttttttttccttatatatcatcataacagtgtgttagactgttagcctcttgatatatcttattcgagaaacactttaacttttcaattaagtttttgtaacttgagatcttagacataacatagcttgttgtgctaatagacttagtacctgcttgcggtgatcagagggaaagataaaataaacatattgtatgttattgtttctctcttttcaaaaaaatgttatttgttttatgatcctaatattacattgtgctctttggtgctgtttatgctaacatactactctcatttgtatacatgtattgtttctttttttgcaagcatagaagaggctccatcacttttggtcatgagacttttatgtatatattaacctgatgttgaagccttcctagaactgtgtgtctatgcaagaaagactggtcacttttgatcaatagacttttatttgcacgcatagaagaggctccatcacttttggtcataagacttttatatatatattaatctgatgttgaagccttcctagaactgtgtgtatgcaagaaaagctaggtcacttttggtcaatagacttttatgtacatatggctctagttgaagtcttcctagaactatgtttgtctatgtaaactctacagatacactattgctggacactcaagtataccagtttaatgcaacttgctacttactgtaatctaaatttgtattactactgctattggtactaaaaaatattgttg

SEQ ID NO: 43371 - DNA, 4150 bp, Zea Mays
ctccaatctcgcctcactcctcccccaaaatctcaccttcccccgcgtgctccggctgcttttggccaccgatacgctgcgccggcgctccaaagttccagggtttaggtcgctccttctccaccacctggccgcccaccctccacctctcgtgcttcccggacgtcgcggccgccgagacgacggccaggagcaggagccaccgatcagtcgtcgccaccgccatgacccaagctacctaaggcagctagaatctctgctttgagttcttccactgtccccgcacgggctgcgatctctgtttttttggttccccaatcccattccgcgtcctcatgctgccattttggggttcaagttgacagtgacaaataatgcttgctggaaaacaagttcactgtggtataacttcagaggttattgccagaagttacggatcgcaggtttggttagatccatggattgtggaaattttgtcgttgtactgtgctttttcatgataggctgttgaactagaactggtttgttgtgtctttgtaacttagttagcagagtattattgttcagtcaggtcaagtgatgggataaagtggtgtagtctactgtacagtacttttaaatgacagctgctgggacaaatgatgttgtgcgggaaatcaaaatgtcatagtttcacgggatagacggatcagcttggcttgggaatgttgtcaggttcctgtgctttttttcccaatatctttgcttccgccagatcccagatccagtgtctttcgtcggctggctttgtttgcgccgctgaagaacagcaatagtcagccaatatctagtccaaagtccaagcgccacctaagtttagttgtttcaccatgcggcgtggatggacggtcaatttcttcgcccgtcgcccaaccggcagcagcacgtacgcgatgatttgattggttccttgtgtcctaaatgaaggcaggttgtctaaagatctgaaatctccggtttcatccaagttattatgtttttcattttattcaattatctcccctgcttctttatcactcctattttctagatgacatatacataaaaaacaggatggtctttgttggcttcctgctactgcatataacatactaatttggctaaagaatatatgtatgtaccttaactgtgacagctactgatttggatttttctttaaaacaggccaggagaagctggaattccaaatcgtagtccgtgtgaaccagttgaaccgcatcaatcttatcaagtcatctaataaaaaaagattctccccagatctgcttttttgggccgaaccacgtggagtaatacccctgaagttcagtgactacatcaaccaggtacttcgtacacactttggtctgtcaccatcaatgttatttaatctaccagttcatgcacatatgtacaattgggattctattttttcgtttaaattatgaaacattgcatgtgttcctcgttttgctagtgcaacagtgtatatttatataccgaaagctaacttcctataacttttataaaataccgtaggaagttatgtttatttcctagagctaccagttgctcggaagttatttatttcctacggtttgttataaaagttgtagaaagttaaaaaaccgtaggaattgtatgattttggtgtagtgttttatatcctcgtctacacacaatcatcaacatgatgaaaaacaggtaaaaatgcatttgtgataatataagagttcaagcatgacaactaaaaaagggaaaaagattctcaccagtctggtctatcccgtacactttgatgctgacgtcattaaattgtcttgctaaatgatgatacctcccactgtcgcagctatccaaggaaagtcagggtcagccatcctgtaccaacaaaccggtatagctagaaaaatcatttctaaataaactgataggaacatgaagtgctcttgcttcttacctgtgcttgtttagctcatgtatggcaataacaaaatccactaaatattatgcataaggcaaatattaggcacaaagtccatgttctgaaagcaaaaaacgtgagtcctatgcaaatagcatgtttggaaaaacttgactaaaaccccatatatgaggtatggtacatgatatatttcaggaaaccatctatgtttcttactttcttgtttattcagtttcattatttcttggagaaaagataaacatgctcctttggtgctagaagcaatgtggctttattctccaacataaacacagttgatgacatgagtggccttacatttggattctcttcgacacagaaaagtcctacattagtacacctatagacatctgatttcattcaggtgaaactgtttgcatcgaagcacagactttgttttccttttttgtcgatacattgaagtttgaaaaggccactattttacttagctaattgattaagcgtctatgttcttcaaactttttttcaatgtttagggtttccatggttttagctttttgacctattccttagtttctgtgctccattctaagacctgtatatcacacgtatttcatttggccaccaaacattgaggttctaagatgccactattttactttgcgaatagactgaacgtctatgttctttaaatttttccccaaaatttactgtttatggttttccctaaatttagcttttggatttaatccctggtttctctgtttcattctaagatgtgtgtgtagcctacgtttcatttggccaacaaaacagtttttgtgctcgtaggttgctgcaggacaattttgggtccataatggtcataggaactctactgtctacttcttgtagaacagaaaaaataattcagttcgccttcgttgaatctaatttcgattttatatcttcatggctttttttcctcttttaaaaagtcagaccttactcctgtccctctcccctctttattctattctctcactatctgatgtcattccatttgtgcaacagaaaaaaattgcactttctttcatcttggaatatgcttgctttcagtttctgattttattgtagttgcttgctaagtgattcacagcatctggtgcaagaagatagtagagaaaataaacaaattacatagctcgtagctattggctaattagtgtagttcatacttcatagcccttttttgctgcaagaataacctgagcaaactcattcctaaaatatatgttcaaaaaatgttctgtgctgaaaatacacagtgcacattgaacactgctattatgttcattatgttctgtgctgaaaatacacagtgcgcactgaaaatacacactaccaaaaaatgttcctgcaacacagttcttagtaaacttgcttctatgctgctcttttttttccttatatatcatcataacagtgtgttagactgttagcctcttgatatatcttattcgagaaacactttaacttttcaattaagtttttgtaacttgagatcttagacataacatagcttgttgtgctaatagacttagtacctgcttgcggtgatcagagggaaagataaaataaacatattgtatgttattgtttctctcttttcaaaaaaatgttatttgttttatgatcctaatattacattgtgctctttggtgctgtttatgctaacatactactctcatttgtatacatgtattgtttctttttttgcaagcatagaagaggctccatcacttttggtcatgagacttttatgtatatattaacctgatgttgaagccttcctagaactgtgtgtctatgcaagaaagactggtcacttttgatcaatagacttttatttgcacgcatagaagaggctccatcacttttggtcataagacttttatatatatattaatctgatgttgaagccttcctagaactgtgtgtatgcaagaaaagctaggtcacttttggtcaatagacttttatgtacatatggctctagttgaagtcttcctagaactatgtttgtctatgtaaactctacagatacactattgctggacactcaagtataccagtttaatgcaacttgctacttactgtaatctaaatttgtattactactgctattggtactaaaaaatattgttg

SEQ ID NO: 43372 - DNA, 939 bp, Zea Mays
ctccaatctcgcctcactcctcccccaaaatctcaccttcccccgcgtgctccggctgcttttggccaccgatacgctgcgccggcgctccaaagttccagggtttaggtcgctccttctccaccacctggccgcccaccctccacctctcgtgcttcccggacgtcgcggccgccgagacgacggccaggagcaggagccaccgatcagtcgtcgccaccgccatgacccaagctacctaaggcagctagaatctctgctttgagttcttccactgtccccgcacgggctgcgatctctgtttttttggttccccaatcccattccgcgtcctcatgctgccattttggggttcaaggccaggagaagctggaattccaaatcgtagtccgtgtgaaccagttgaaccgcatcaatcttatcaagtcatctaataaaaaaagattctccccagatctgcttttttgggccgaaccacgtggagtaatacccctgaagttcagtgactacatcaaccagaagaggctccatcacttttggtcatgagacttttatgtatatattaacctgatgttgaagccttcctagaactgtgtgtctatgcaagaaagactggtcacttttgatcaatagacttttatttgcacgcatagaagaggctccatcacttttggtcataagacttttatatatatattaatctgatgttgaagccttcctagaactgtgtgtatgcaagaaaagctaggtcacttttggtcaatagacttttatgtacatatggctctagttgaagtcttcctagaactatgtttgtctatgtaaactctacagatacactattgctggacactcaagtataccagtttaatgcaacttgctacttactgtaatctaaatttgtattactactgctattggtactaaaaaatattgttg

SEQ ID NO: 43373 - DNA, 555 bp, Zea Mays
catgcgtctccaatctcgcctcactcctcccccaaaatctcaccttcccccgcgtgctccggctgcttttggccaccgatacgctgcgccggcgctccaaagttccaggccaggagaagctggaattccaaatcgtagtccgtgtgaaccagttgaaccgcatcaatcttatcaagtcatctaataaaaaaagattctccccagatctgcttttttgggccgaaccacgtggagtaatacccctgaagttcagtgactacatcaaccagaagaggctccatcacttttggtcataagacttttatatatatattaatctgatgttgaagccttcctagaactgtgtgtatgcaagaaaagctaggtcacttttggtcaatagacttttatgtacatatggctctagttgaagtcttcctagaactatgtttgtctatgtaaactctacagatacactattgctggacactcaagtataccagtttaatgcaacttgctacttactgtaatctaaatttgtattactactgctattggtactaaaaaatattgttg

SEQ ID NO: 43374 - DNA, 694 bp, Zea Mays
catgcgtctccaatctcgcctcactcctcccccaaaatctcaccttcccccgcgtgctccggctgcttttggccaccgatacgctgcgccggcgctccaaagttccaggccaggagaagctggaattccaaatcgtagtccgtgtgaaccagttgaaccgcatcaatcttatcaagtcatctaataaaaaaagattctccccagatctgcttttttgggccgaaccacgtggagtaatacccctgaagttcagtgactacatcaaccagcatagaagaggctccatcacttttggtcatgagacttttatgtatatattaacctgatgttgaagccttcctagaactgtgtgtctatgcaagaaagactggtcacttttgatcaatagacttttatttgcacgcatagaagaggctccatcacttttggtcataagacttttatatatatattaatctgatgttgaagccttcctagaactgtgtgtatgcaagaaaagctaggtcacttttggtcaatagacttttatgtacatatggctctagttgaagtcttcctagaactatgtttgtctatgtaaactctacagatacactattgctggacactcaagtataccagtttaatgcaacttgctacttactgtaatctaaatttgtattactactgctattggtactaaaaaatattgttg

SEQ ID NO: 43375 - DNA, 689 bp, Zea Mays
catgcgtctccaatctcgcctcactcctcccccaaaatctcaccttcccccgcgtgctccggctgcttttggccaccgatacgctgcgccggcgctccaaagttccaggccaggagaagctggaattccaaatcgtagtccgtgtgaaccagttgaaccgcatcaatcttatcaagtcatctaataaaaaaagattctccccagatctgcttttttgggccgaaccacgtggagtaatacccctgaagttcagtgactacatcaaccagaagaggctccatcacttttggtcatgagacttttatgtatatattaacctgatgttgaagccttcctagaactgtgtgtctatgcaagaaagactggtcacttttgatcaatagacttttatttgcacgcatagaagaggctccatcacttttggtcataagacttttatatatatattaatctgatgttgaagccttcctagaactgtgtgtatgcaagaaaagctaggtcacttttggtcaatagacttttatgtacatatggctctagttgaagtcttcctagaactatgtttgtctatgtaaactctacagatacactattgctggacactcaagtataccagtttaatgcaacttgctacttactgtaatctaaatttgtattactactgctattggtactaaaaaatattgttg

SEQ ID NO: 43376 - DNA, 3322 bp, Zea Mays
ctcaccagctcatgcgtctccaatctcgcctcactcctcccccaaaatctcaccttcccccgcgtgctccggctgcttttggccaccgatacgctgcgccggcgctccaaagttccagggtttaggtcgctccttctccaccacctggccgcccaccctccacctctcgtgcttcccggacgtcgcggccgccgagacgacggccaggagcaggagccaccgatcagtcgtcgccaccgccatgacccaagctacctaaggcagctagaatctctgctttgagttcttccactgtccccgcacgggctgcgatctctgtttttttggttccccaatcccattccgcgtcctcatgctgccattttggggttcaaggccaggagaagctggaattccaaatcgtagtccgtgtgaaccagttgaaccgcatcaatcttatcaagtcatctaataaaaaaagattctccccagatctgcttttttgggccgaaccacgtggagtaatacccctgaagttcagtgactacatcaaccaggtacttcgtacacactttggtctgtcaccatcaatgttatttaatctaccagttcatgcacatatgtacaattgggattctattttttcgtttaaattatgaaacattgcatgtgttcctcgttttgctagtgcaacagtgtatatttatataccgaaagctaacttcctataacttttataaaataccgtaggaagttatgtttatttcctagagctaccagttgctcggaagttatttatttcctacggtttgttataaaagttgtagaaagttaaaaaaccgtaggaattgtatgattttggtgtagtgttttatatcctcgtctacacacaatcatcaacatgatgaaaaacaggtaaaaatgcatttgtgataatataagagttcaagcatgacaactaaaaaagggaaaaagattctcaccagtctggtctatcccgtacactttgatgctgacgtcattaaattgtcttgctaaatgatgatacctcccactgtcgcagctatccaaggaaagtcagggtcagccatcctgtaccaacaaaccggtatagctagaaaaatcatttctaaataaactgataggaacatgaagtgctcttgcttcttacctgtgcttgtttagctcatgtatggcaataacaaaatccactaaatattatgcataaggcaaatattaggcacaaagtccatgttctgaaagcaaaaaacgtgagtcctatgcaaatagcatgtttggaaaaacttgactaaaaccccatatatgaggtatggtacatgatatatttcaggaaaccatctatgtttcttactttcttgtttattcagtttcattatttcttggagaaaagataaacatgctcctttggtgctagaagcaatgtggctttattctccaacataaacacagttgatgacatgagtggccttacatttggattctcttcgacacagaaaagtcctacattagtacacctatagacatctgatttcattcaggtgaaactgtttgcatcgaagcacagactttgttttccttttttgtcgatacattgaagtttgaaaaggccactattttacttagctaattgattaagcgtctatgttcttcaaactttttttcaatgtttagggtttccatggttttagctttttgacctattccttagtttctgtgctccattctaagacctgtatatcacacgtatttcatttggccaccaaacattgaggttctaagatgccactattttactttgcgaatagactgaacgtctatgttctttaaatttttccccaaaatttactgtttatggttttccctaaatttagcttttggatttaatccctggtttctctgtttcattctaagatgtgtgtgtagcctacgtttcatttggccaacaaaacagtttttgtgctcgtaggttgctgcaggacaattttgggtccataatggtcataggaactctactgtctacttcttgtagaacagaaaaaataattcagttcgccttcgttgaatctaatttcgattttatatcttcatggctttttttcctcttttaaaaagtcagaccttactcctgtccctctcccctctttattctattctctcactatctgatgtcattccatttgtgcaacagaaaaaaattgcactttctttcatcttggaatatgcttgctttcagtttctgattttattgtagttgcttgctaagtgattcacagcatctggtgcaagaagatagtagagaaaataaacaaattacatagctcgtagctattggctaattagtgtagttcatacttcatagcccttttttgctgcaagaataacctgagcaaactcattcctaaaatatatgttcaaaaaatgttctgtgctgaaaatacacagtgcacattgaacactgctattatgttcattatgttctgtgctgaaaatacacagtgcgcactgaaaatacacactaccaaaaaatgttcctgcaacacagttcttagtaaacttgcttctatgctgctcttttttttccttatatatcatcataacagtgtgttagactgttagcctcttgatatatcttattcgagaaacactttaacttttcaattaagtttttgtaacttgagatcttagacataacatagcttgttgtgctaatagacttagtacctgcttgcggtgatcagagggaaagataaaataaacatattgtatgttattgtttctctcttttcaaaaaaatgttatttgttttatgatcctaatattacattgtgctctttggtgctgtttatgctaacatactactctcatttgtatacatgtattgtttctttttttgcaagcatagaagaggctccatcacttttggtcatgagacttttatgtatatattaacctgatgttgaagccttcctagaactgtgtgtctatgcaagaaagactggtcacttttgatcaatagacttttatttgcacgcatagaagaggctccatcacttttggtcataagacttttatatatatattaatctgatgttgaagccttcctagaactgtgtgtatgcaagaaaagctaggtcacttttggtcaatagacttttatgtacatatggctctagttgaagtcttcctagaactatgtttgtctatgtaaactctacagatacactattgctggacactcaagtataccagtttaatgcaacttgctacttactgtaatctaaatttgtattactactgctattggtactaaaaaatattgttg

SEQ ID NO: 43377 - DNA, 3067 bp, Zea Mays
ctctcaccagctcatgcgtctccaatctcgcctcactcctcccccaaaatctcaccttcccccgcgtgctccggctgcttttggccaccgatacgctgcgccggcgctccaaagttccaggccaggagaagctggaattccaaatcgtagtccgtgtgaaccagttgaaccgcatcaatcttatcaagtcatctaataaaaaaagattctccccagatctgcttttttgggccgaaccacgtggagtaatacccctgaagttcagtgactacatcaaccaggtacttcgtacacactttggtctgtcaccatcaatgttatttaatctaccagttcatgcacatatgtacaattgggattctattttttcgtttaaattatgaaacattgcatgtgttcctcgttttgctagtgcaacagtgtatatttatataccgaaagctaacttcctataacttttataaaataccgtaggaagttatgtttatttcctagagctaccagttgctcggaagttatttatttcctacggtttgttataaaagttgtagaaagttaaaaaaccgtaggaattgtatgattttggtgtagtgttttatatcctcgtctacacacaatcatcaacatgatgaaaaacaggtaaaaatgcatttgtgataatataagagttcaagcatgacaactaaaaaagggaaaaagattctcaccagtctggtctatcccgtacactttgatgctgacgtcattaaattgtcttgctaaatgatgatacctcccactgtcgcagctatccaaggaaagtcagggtcagccatcctgtaccaacaaaccggtatagctagaaaaatcatttctaaataaactgataggaacatgaagtgctcttgcttcttacctgtgcttgtttagctcatgtatggcaataacaaaatccactaaatattatgcataaggcaaatattaggcacaaagtccatgttctgaaagcaaaaaacgtgagtcctatgcaaatagcatgtttggaaaaacttgactaaaaccccatatatgaggtatggtacatgatatatttcaggaaaccatctatgtttcttactttcttgtttattcagtttcattatttcttggagaaaagataaacatgctcctttggtgctagaagcaatgtggctttattctccaacataaacacagttgatgacatgagtggccttacatttggattctcttcgacacagaaaagtcctacattagtacacctatagacatctgatttcattcaggtgaaactgtttgcatcgaagcacagactttgttttccttttttgtcgatacattgaagtttgaaaaggccactattttacttagctaattgattaagcgtctatgttcttcaaactttttttcaatgtttagggtttccatggttttagctttttgacctattccttagtttctgtgctccattctaagacctgtatatcacacgtatttcatttggccaccaaacattgaggttctaagatgccactattttactttgcgaatagactgaacgtctatgttctttaaatttttccccaaaatttactgtttatggttttccctaaatttagcttttggatttaatccctggtttctctgtttcattctaagatgtgtgtgtagcctacgtttcatttggccaacaaaacagtttttgtgctcgtaggttgctgcaggacaattttgggtccataatggtcataggaactctactgtctacttcttgtagaacagaaaaaataattcagttcgccttcgttgaatctaatttcgattttatatcttcatggctttttttcctcttttaaaaagtcagaccttactcctgtccctctcccctctttattctattctctcactatctgatgtcattccatttgtgcaacagaaaaaaattgcactttctttcatcttggaatatgcttgctttcagtttctgattttattgtagttgcttgctaagtgattcacagcatctggtgcaagaagatagtagagaaaataaacaaattacatagctcgtagctattggctaattagtgtagttcatacttcatagcccttttttgctgcaagaataacctgagcaaactcattcctaaaatatatgttcaaaaaatgttctgtgctgaaaatacacagtgcacattgaacactgctattatgttcattatgttctgtgctgaaaatacacagtgcgcactgaaaatacacactaccaaaaaatgttcctgcaacacagttcttagtaaacttgcttctatgctgctcttttttttccttatatatcatcataacagtgtgttagactgttagcctcttgatatatcttattcgagaaacactttaacttttcaattaagtttttgtaacttgagatcttagacataacatagcttgttgtgctaatagacttagtacctgcttgcggtgatcagagggaaagataaaataaacatattgtatgttattgtttctctcttttcaaaaaaatgttatttgttttatgatcctaatattacattgtgctctttggtgctgtttatgctaacatactactctcatttgtatacatgtattgtttctttttttgcaagcatagaagaggctccatcacttttggtcatgagacttttatgtatatattaacctgatgttgaagccttcctagaactgtgtgtctatgcaagaaagactggtcacttttgatcaatagacttttatttgcacgcatagaagaggctccatcacttttggtcataagacttttatatatatattaatctgatgttgaagccttcctagaactgtgtgtatgcaagaaaagctaggtcacttttggtcaatagacttttatgtacatatggctctagttgaagtcttcctagaactatgtttgtctatgtaaactctacagatacactattgctggacactcaagtataccagtttaatgcaacttgctacttactgtaatctaaatttgtattactactgctattggtactaaaaaatattgttg

SEQ ID NO: 43378 - DNA, 683 bp, Zea Mays
ctctcgttgacttcgcagttcttgcgattatcgagccaaattcagtatgacgagttatttcgctattccggttaattagctgaattaatgtaccgagtagaatattagtaggcctgtgtgataaagaaatgtttgattaattgtggacatgtaaaatatgtgaggagtaaaataaaattaaaatagtactttgtgaacgatgtagtatcatttataaaacaagggataattttagaatttaattaattagctaatgagttgtgtttagtgtgattgtattaaaggtgtataatttgttgtttcatgatgtttgcgttaggttcggttaatctagagaagtgtaattattgcgcttagtcgtacgtcggtaactagtgtttccgtataaaattatacaacgcctcgccactaggtgtttaatacgctatcatatagcactatttagatttgtgccattcctgtttatatgcattcatgtgcataatgcatttcattcaggtacgttaattaatcgcgtgatgcggaagacgatccaagtcgaccccaagtgcggactaatccgcaagatgatgctggtggattaacctgaagatggataatcggaacaagtatcagaacaaaggatactcaccaagtcgtcatctaacaaacactaacctagtgtttcttccaggcaagccccg

SEQ ID NO: 43379 - DNA, 1273 bp, Zea Mays
ggccgatggccttatctatcgccgcgctgctctgcgttcgtctccatcagtttcacgcgcgcaggcttcttcctccagctcctgctcacgtcgtcgccttgcctgctcgcccctgcgtgctcccctgtcggcgctcaccttcatggccgcgcccctctgctcgtcgcccctccccagcagagatctctccccagcaaggttcctcccatggccatcgtgtgcagccacgagctccagtcttcttcttcctccctgcgtgcggatctcccctgctggcgcgcctaactccagcccgccgcggtctgtgacctcgtcgttgaattctatgatatgcgactcgacctcacctcgcttggccacgcgccaatgttcctgttcgtctccatctgtgaccaagccgagcccctgactccatcgtcgagtctagccccatgttactgcgctctgcgtcctcgccgcggtcgtgaaactgccgtggaattgcggtcgtttctctttgtgtcatgtgcgcagcacaccatcgtcttcatgtttttggcaagtcccggcgtgcgctcgcgctcgccatcccctgctcgacctcgtcgtcgaacttcgccttgccagtcgtcgttcttcgctcagcaaggtttcgttctaagctgcgccacccttcaagttcgcgtccttggcggactcgcacctctgtgtcgtgtctgctcgtccatgctgtcggcccgtacggactcgggtcttgctagtgtcgcgctgccgtcgatgcaacgcggggttgtccctctgctctgcccagctcgtcaagtcccaaaaatctgcacacacgtcatagttggtgctcaacatcttcgtgtcgcctttcgtgtgctgtaacacccccttgttactcgtcgtcaatccacgtcacgtccgcgacgtgctcgtcgaccccgatgatctatcttccaattacgcgctacttgtgttgagctctgaagccccctgtcgagctcttcctctggaagtcgccttcgagcacaacccctgccaagtgttcgctgggaggtctgaaccaatactcatcatcgatttgcgattatcaaatcattctggtcacggtacgttaattaatcgcgtgatgcggaagacgatccaagtcgaccccaagtgcggactaatccgcaagatgatgctggtggattaacctgaagatggataatcggaacaagtatcagaacaaaggatactcaccaagtcgtcatctaacaaacactaacctagtgtttcttccaggcaagcc

SEQ ID NO: 43380 - DNA, 1418 bp, Zea Mays
atgggctcatggcacgatgcaaatgagcaaacctgtcaggcggtgaagagaaccgagggcgaagcgccaacgaacccaactgaccaacacagtcagggacctggatctgaattcccatcacactccccgtcgatggacatccccaccgctgtcatacaccgcctacagtcctcgctccgcgaggccatcttcgccccttctgtagaagatgcacccgcccctcccttcccctctgtctccgacgccgtcgcagccttcgactcgggcgccgcctctgtctcggcggagttccgatgtgtgggctgcgggtccgcgggagggctcctgcgcggtgcgcagtctgcactctgcgcctactgcgggtgtcccaggcgcggggaggaagctgaaggcggtggaagcggtggcatcgccttccgtaacagcgcggcctaccggtgcttgctcggctcgcttggactggacggatcccacaaacggaatgcagcagatggatgatgttgattcgctatcttcattatggccaactaataaaccagaccctgcaaatacaaatgtggaacagttgcttgctcagatgcatgacttgtcctttatgctcaaagatgaactttcggcccctgataaactcatcgatcgttccaaatcctgaagtgacaacagcaaaaaaatgtgttctattactttcagacaaagaagatcgtggatggaaatccaacctcttgggtgctagacgaattgcacccaatattcctgagcggaaaatgcaaatcaagacacagaaagcctttttgttccaacagtgtgccttttatcagagcattggtcaacagatgattgtatttgttttatctgttgcttcgttgctttgatcatcagtcaggttggttccttgactgtccctgagtgaggctgagaatcatgtttttgcctccacatgtatgtaaggcctgcgtgatgttcggtgtcgaaccaagctcaccattcaatgaattccgtttaatgttataaaattaaatataaaataatgataaaaaagttcataatatatttgctaacataagttatgatgtcctcaatcaactcagaaaaataacttaaaattcaatttctacatagataagcaaaaaagacaaatctcccatgataaaatttgtctttttcatttctctatgtacaatttaaattttaagtttatatttttttgagataattgagaacatcataacctatgttgaaaaatatattatgaatttttatcattattttatatttagttttgtacctttaaaataattattgttggggcgaaggcaaagacgccacccttcgctcgaggccttcgctgataaccgctggtcagacagagacagaacaggcagggacacccttcgctccattcggcaccagacgaagac

SEQ ID NO: 43381 - DNA, 3160 bp, Zea Mays
atgggctcatggcacgatgcaaatgagcaaacctgtcaggcggtgaagagaaccgagggcgaagcgccaacgaacccaactgaccaacacagtcagggacctggatctgaattcccatcacactccccgtcgatggacatccccaccgctgtcatacaccgcctacagtcctcgctccgcgaggccatcttcgccccttctgtagaagatgcacccgcccctcccttcccctctgtctccgacgccgtcgcagccttcgactcgggcgccgcctctgtctcggcggagttccgatgtgtgggctgcgggtccgcgggagggctcctgcgcggtgcgcagtctgcactctgcgcctactgcgggtgtcccaggcgcggggaggaagctgaaggcggtggaagcggtggcatcgccttccgtaacagcgcggcctaccggtgcttgctcggctcgcttggactggacggatccgagtttgtagaattcgatactgacacaacagctttgaataaaagcaaggatgcaccaccgccaaacagtgagatgacttcttctcttccgcaaactcataatgcggagcaggaaaagaaaagaactgatagcaaaaaccatgaatctagactggaggtgcttgctgcatctaaaagcttaattagttctcaaagaacaaatcagattgaagctactccagcatttgcaagttgggatgctgattttcagtctgctagttcagaaagtgctgcaaaaaaactccaaacaaactgatctgtttaagagctcttgtgtccccgagtcttttagtttcccagcttcagatactgccatcaaacctgtagtaggtactgaaaataaaacaaatacgagaagtgtcatcctagaacatcattcagaagatttggcttcagcaaatggcacattatttggtgatgaccattctaatcaaaaggttgcccagcatatctttgagagcaacattgctcctgagtccactgaatcccctctcaacatgaatttgctaagagcgatcagttacatggaagggaatatactgcagtcaatgatgatgaagcttttgatgaatggcaagaatttacagcaagtggtaatcaggacagcctatcaaatgcaggagagaatatggaggaacctttaaggggagattcgtctgaaaaggatgtaatagatccttggccagtaggcaacaaggaatcacccaataatgttatcgaagactctaatcaatggcaagcttttgcttctatgtctggtcaagcaagagattttgtgatatctgtagagagatcaagtggtcacagactaaatttggtgagaccagatgtagttgaagagacaatgagcagcatctcgcatcaacattcttcagaaattaatcctgttgatctgtggcctgtgggcaatgttgaagcactaaacgctgcagaaatgtttaaggaaacaaacgattattttggcgattggcaagattttactaccactggtcaggtccaggacacttcgctgaatcaaactggggacatgatagaggtccgaaaagccactcacaaagaaacagacatggattcatggttcattggaaatattagggagccagcaaatactggtaccatgaatgaaaataacatgttggacaatcggcaaggtttcacttgttcagatcaagcacatcaaacttcatctagccccggtgccgaaatgataagtgttccattggagctgcatgatgtaagtgtttctgtccaatcatgggcaaatggcagcagcaaagatgccgcaacaccatcctcaacaaatatagaaagcaacacatttaatgttaggcaagattttgctaaatcaggtcatctgcaagaaaacatttctagtcttgggagagaattgagtagtgtgtcacctgaaccagttgaagaaaatgattccttagatttgtggcttaccagcaacttcaaggaatctaagtgcagcgatgttgttgggagaactaatgcctcgtcggatgggtggcaggattttgccagttttgatcatgctcagagcagtactaaaattcctgtggaagggcatcttataaaaatccttcagggtctgaaactatggacttatgggcctcaattagctgcatccgaaaatctaaaggataaaaaggaggcttctaatgaagcaaaaacatctccatctgatgaccacttgaaaagcacaaacggaatgcagcagatggatgatgttgattcgctatcttcattatggccaactaataaaccagaccctgcaaatacaaatgtggaacagttgcttgctcagatgcatgacttgtcctttatgctcaaagatgaactttcggcccctgataaactcatcgatcgttccaaatcctgaagtgacaacagcaaaaaaatgtgttctattactttcagacaaagaagatcgtggatggaaatccaacctcttgggtgctagacgaattgcacccaatattcctgagcggaaaatgcaaatcaagacacagaaagcctttttgttccaacagtgtgccttttatcagagcattggtcaacagatgattgtatttgttttatctgttgcttcgttgctttgatcatcagtcaggttggttccttgactgtccctgagtgaggctgagaatcatgtttttgcctccacatgtatgtaaggcctgcgtgatgttcggtgtcgaaccaagctcaccattcaatgaattccgtttaatgttataaaattaaatataaaataatgataaaaaagttcataatatatttgctaacataagttatgatgtcctcaatcaactcagaaaaataacttaaaattcaatttctacatagataagcaaaaaagacaaatctcccatgataaaatttgtctttttcatttctctatgtacaatttaaattttaagtttatatttttttgagataattgagaacatcataacctatgttgaaaaatatattatgaatttttatcattattttatatttagttttgtacctttaaaataattattgttggggcgaaggcaaagacgccacccttcgctcgaggccttcgctgataaccgctggtcagacagagacagaacaggcagggacacccttcgctccattcggcaccagacgaagac

SEQ ID NO: 43382 - DNA, 3375 bp, Zea Mays
atgggctcatggcacgatgcaaatgagcaaacctgtcaggcggtgaagagaaccgagggcgaagcgccaacgaacccaactgaccaacacagtcagggacctggatctgaattcccatcacactccccgtcgatggacatccccaccgctgtcatacaccgcctacagtcctcgctccgcgaggccatcttcgccccttctgtagaagatgcacccgcccctcccttcccctctgtctccgacgccgtcgcagccttcgactcgggcgccgcctctgtctcggcggagttccgatgtgtgggctgcgggtccgcgggagggctcctgcgcggtgcgcagtctgcactctgcgcctactgcgggtgtcccaggcgcggggaggaagctgaaggcggtggaagcggtggcatcgccttccgtaacagcgcggcctaccggtgcttgctcggctcgcttggactggacggatccgagtttgtagaattcgatactgacacaacagctttgaataaaagcaaggatgcaccaccgccaaacagtgattcattttttgttgaaagaaaagagatgacttcttctcttccgcaaactcataatgcggagcaggaaaagaaaagaactgatagcaaaaaccatgaatctagactggaggtgcttgctgcatctaaaagcttaattagttctcaaagaacaaatcagattgaagctactccagcatttgcaagttgggatgctgattttcagtctgctagttcagaaagtgctgcaaaaaaactccaaacaaactgatctgtttaagagctcttgtgtccccgagtcttttagtttcccagcttcagatactgccatcaaacctgtagtaggtactgaaaataaaacaaatacgagaagtgtcatcctagaacatcattcagaagatttggcttcagcaaatggcacattatttggtgatgaccattctaatcaaaaggttgcccagcatatctttgagagcaacattgctcctgagtccactgaatcccctctcaacatgaatttgctaagagcgatcagttacatggaagggaatatactgcagtcaatgatgatgaagcttttgatgaatggcaagaatttacagcaagtggtaatcaggacagcctatcaaatgcaggagagaatatggaggaacctttaaggggagattcgtctgaaaaggatgtaatagatccttggccagtaggcaacaaggaatcacccaataatgttatcgaagactctaatcaatggcaagcttttgcttctatgtctggtcaagcaagagattttgtgatatctgtagagagatcaagtggtcacagactaaatttggtgagaccagatgtagttgaagagacaatgagcagcatctcgcatcaacattcttcagaaattaatcctgttgatctgtggcctgtgggcaatgttgaagcactaaacgctgcagaaatgtttaaggaaacaaacgattattttggcgattggcaagattttactaccactggtcaggtccaggacacttcgctgaatcaaactggggacatgatagaggtccgaaaagccactcacaaagaaacagacatggattcatggttcattggaaatattagggagccagcaaatactggtaccatgaatgaaaataacatgttggacaatcggcaaggtttcacttgttcagatcaagcacatcaaacttcatctagccccggtgccgaaatgataagtgttccattggagctgcatgatgtaagtgtttctgtccaatcatgggcaaatggcagcagcaaagatgccgcaacaccatcctcaacaaatatagaaagcaacacatttaatgttaggcaagattttgctaaatcaggtcatctgcaagaaaacatttctagtcttgggagagaattgagtagtgtgtcacctgaaccagttgaagaaaatgattccttagatttgtggcttaccagcaacttcaaggaatctaagtgcagcgatgttgttgggagaactaatgcctcgtcggatgggtggcaggattttgccagttttgatcatgctcagagcagtactaaaattcctgtggaagggcatcttataaaaatccttcagggtctgaaactatggacttatgggcctcaagtcatgctaatgaaaagaaccttgaacagataagagaaaataatgatctattcgatgactggcaagatttccaaaactctagtccacagcaaacaaccttacaaatttcttcagatgctgcactatttgatataacctcagcagcatggcctgatgcttttggagggctggaatttgggggtgctttgcagttagctgcatccgaaaatctaaaggataaaaaggaggcttctaatgaagcaaaaacatctccatctgatgaccacttgaaaagcacaaacggaatgcagcagatggatgatgttgattcgctatcttcattatggccaactaataaaccagaccctgcaaatacaaatgtggaacagttgcttgctcagatgcatgacttgtcctttatgctcaaagatgaactttcggcccctgataaactcatcgatcgttccaaatcctgaagtgacaacagcaaaaaaatgtgttctattactttcagacaaagaagatcgtggatggaaatccaacctcttgggtgctagacgaattgcacccaatattcctgagcggaaaatgcaaatcaagacacagaaagcctttttgttccaacagtgtgccttttatcagagcattggtcaacagatgattgtatttgttttatctgttgcttcgttgctttgatcatcagtcaggttggttccttgactgtccctgagtgaggctgagaatcatgtttttgcctccacatgtatgtaaggcctgcgtgatgttcggtgtcgaaccaagctcaccattcaatgaattccgtttaatgttataaaattaaatataaaataatgataaaaaagttcataatatatttgctaacataagttatgatgtcctcaatcaactcagaaaaataacttaaaattcaatttctacatagataagcaaaaaagacaaatctcccatgataaaatttgtctttttcatttctctatgtacaatttaaattttaagtttatatttttttgagataattgagaacatcataacctatgttgaaaaatatattatgaatttttatcattattttatatttagttttgtacctttaaaataattattgttggggcgaaggcaaagacgccacccttcgctcgaggccttcgctgataaccgctggtcagacagagacagaacaggcagggacacccttcgctccattcggcaccagacgaagac

SEQ ID NO: 43383 - DNA, 1912 bp, Zea Mays
attaaccgcctctccctcgctcctctcgctcgctcggctcactccctctccaaagcggcagcctcacgcagtcacgcgctccaccacgccacctccctctactcactcatgttgttttccgtccatccgcccaccggttcgtagcccgcgccgcaaaaccctagccccgggaggatcgcggggcgcctccgcggtgccagcgacgtggctcgtttgatccgattgctggtcgagccccgccctcgctgccgcgcttcgctccggctgtgcagcggcgtgagcaccgagcacactcgcgaatggggaactgctagggtgcttggatcaaggatgggagccctcaccctggggcctcaggaaaattgatttctggagctgattcttcgacatcaacaatccagcagtgctagatttttttttgccaaagatggcttcatggcaagcagatatctcagaagacagcacttcatttctcttaagttctaaggtgtggcgttcgttggggaagagcgaagacttgttgaaggctgaggctgccagtccttcatcgtcggagtcgaatgaagagcagtctgagtcccattctttgccaagatgagcctcgccttttgccttcctatagattttcttcttcttcttcccatgtctttcttccccctggtcattttcattatcgggacattgagcaataaaatgacatgtattaccgcatttgaagcaggagcgctttccccttgtcttattcttgttggggtattccttgcgtccttttagtgcgatcttgaagcgcttgatgataagcgccatctcatcttcgttgaggccagcggcctccacttgtgccaccttgcttggtagcgtctccctgctactggttgccttgagggcaacagtttgaggctcgtggacggggagtggaccgtttagagcgtcgtccacatatcgggcttccttcaccatcatgcgcccgcttacaaactttccaagaatctcctcgggcgtcatcttggtgtacctgggattctcacgaataaggttaacaagatgggggtcaattaccatgaatgaccttagcataagtcggacgacgtcgtggtccatccatcttgtgcttccatagctcctaatcttgttgactagggtcttgagcctgttgtatatttgtgttggctcctctcccctgatcatcgcgaaccttcccaactcgccttccatcaactccattttggtgatcatggtggcgtcgtttcgctcatgtgatatcttaagggtatcccaaatttgcttggcgttgtccaagccgctcaccttgttgtattcatccctgcacaagctagcaaaacagtagtagcttgtgcattcttatgaatttgctcattgataaacacagggttatccatactatcgaaatgcattccattttccactatctcccaaatactaggatggagagaaaataagtgactacgcattttgtgactccaaaaagagtagtcctctccatcaaagtgtggaggtttttcaagtggaattgaaagcaaatgagcattggaattgaacggaatacgagaataatcaaatgaataattttgattaactgttttcttctttgaagaggagtcgtcgtcgtcgtgtggtgaagaagacgaggcatcattgtcgtaatagatgatcttcttgatgcgcctcttcttctttccatctcttttcttatgactcgagcctgagtcggttggcttgtcatctctaggctcgttgaggaaagactccttctccttgtcgttgaccaccatcccctttcccttaggatccatctcttcgggcgattagtcccttacgtgaagagaacggctccgataccaattgagagcacctagagggggggtgaacaggtgatcctgtaaaattcaca

SEQ ID NO: 43384 - DNA, 1782 bp, Zea Mays
attaaccgcctctccctcgctcctctcgctcgctcggctcactccctctccaaagcggcagcctcacgcagtcacgcgctccaccacgccacctccctctactcactcatgttgttttccgtccatccgcccaccggttcgtagcccgcgccgcaaaaccctagccccgggaggatcgcggggcgcctccgcggtgccagcgacgtggctcgtttgatccgattgctggtcgagccccgccctcgctgccgcgcttcgctccggctgtgcagcggcgtgagcaccgagcacactcgcgaatggggaactgctagggtgcttggatcaaggatgggagccctcaccctggggcctcaggtgtggcgttcgttggggaagagcgaagacttgttgaaggctgaggctgccagtccttcatcgtcggagtcgaatgaagagcagtctgagtcccattctttgccaagatgagcctcgccttttgccttcctatagattttcttcttcttcttcccatgtctttcttccccctggtcattttcattatcgggacattgagcaataaaatgacatgtattaccgcatttgaagcaggagcgctttccccttgtcttattcttgttggggtattccttgcgtccttttagtgcgatcttgaagcgcttgatgataagcgccatctcatcttcgttgaggccagcggcctccacttgtgccaccttgcttggtagcgtctccctgctactggttgccttgagggcaacagtttgaggctcgtggacggggagtggaccgtttagagcgtcgtccacatatcgggcttccttcaccatcatgcgcccgcttacaaactttccaagaatctcctcgggcgtcatcttggtgtacctgggattctcacgaataaggttaacaagatgggggtcaattaccatgaatgaccttagcataagtcggacgacgtcgtggtccatccatcttgtgcttccatagctcctaatcttgttgactagggtcttgagcctgttgtatatttgtgttggctcctctcccctgatcatcgcgaaccttcccaactcgccttccatcaactccattttggtgatcatggtggcgtcgtttcgctcatgtgatatcttaagggtatcccaaatttgcttggcgttgtccaagccgctcaccttgttgtattcatccctgcacaagctagcaaaacagtagtagcttgtgcattcttatgaatttgctcattgataaacacagggttatccatactatcgaaatgcattccattttccactatctcccaaatactaggatggagagaaaataagtgactacgcattttgtgactccaaaaagagtagtcctctccatcaaagtgtggaggtttttcaagtggaattgaaagcaaatgagcattggaattgaacggaatacgagaataatcaaatgaataattttgattaactgttttcttctttgaagaggagtcgtcgtcgtcgtgtggtgaagaagacgaggcatcattgtcgtaatagatgatcttcttgatgcgcctcttcttctttccatctcttttcttatgactcgagcctgagtcggttggcttgtcatctctaggctcgttgaggaaagactccttctccttgtcgttgaccaccatcccctttcccttaggatccatctcttcgggcgattagtcccttacgtgaagagaacggctccgataccaattgagagcacctagagggggggtgaacaggtgatcctgtaaaattcaca

SEQ ID NO: 43385 - DNA, 1868 bp, Zea Mays
attaaccgcctctccctcgctcctctcgctcgctcggctcactccctctccaaagcggcagcctcacgcagtcacgcgctccaccacgccacctccctctactcactcatgttgttttccgtccatccgcccaccggttcgtagcccgcgccgcaaaaccctagccccgggaggatcgcggggcgcctccgcggtgccagcgacgtggctcgtttgatccgattgctggtcgagccccgccctcgctgccgcgcttcgctccggctgtgcagcggcgtgagcaccgagcacactcgcgaatggggaactgctagggtgcttggatcaaggatgggagccctcaccctggggcctcagcagtgctagatttttttttgccaaagatggcttcatggcaagcagatatctcagaagacagcacttcatttctcttaagttctaaggtgtggcgttcgttggggaagagcgaagacttgttgaaggctgaggctgccagtccttcatcgtcggagtcgaatgaagagcagtctgagtcccattctttgccaagatgagcctcgccttttgccttcctatagattttcttcttcttcttcccatgtctttcttccccctggtcattttcattatcgggacattgagcaataaaatgacatgtattaccgcatttgaagcaggagcgctttccccttgtcttattcttgttggggtattccttgcgtccttttagtgcgatcttgaagcgcttgatgataagcgccatctcatcttcgttgaggccagcggcctccacttgtgccaccttgcttggtagcgtctccctgctactggttgccttgagggcaacagtttgaggctcgtggacggggagtggaccgtttagagcgtcgtccacatatcgggcttccttcaccatcatgcgcccgcttacaaactttccaagaatctcctcgggcgtcatcttggtgtacctgggattctcacgaataaggttaacaagatgggggtcaattaccatgaatgaccttagcataagtcggacgacgtcgtggtccatccatcttgtgcttccatagctcctaatcttgttgactagggtcttgagcctgttgtatatttgtgttggctcctctcccctgatcatcgcgaaccttcccaactcgccttccatcaactccattttggtgatcatggtggcgtcgtttcgctcatgtgatatcttaagggtatcccaaatttgcttggcgttgtccaagccgctcaccttgttgtattcatccctgcacaagctagcaaaacagtagtagcttgtgcattcttatgaatttgctcattgataaacacagggttatccatactatcgaaatgcattccattttccactatctcccaaatactaggatggagagaaaataagtgactacgcattttgtgactccaaaaagagtagtcctctccatcaaagtgtggaggtttttcaagtggaattgaaagcaaatgagcattggaattgaacggaatacgagaataatcaaatgaataattttgattaactgttttcttctttgaagaggagtcgtcgtcgtcgtgtggtgaagaagacgaggcatcattgtcgtaatagatgatcttcttgatgcgcctcttcttctttccatctcttttcttatgactcgagcctgagtcggttggcttgtcatctctaggctcgttgaggaaagactccttctccttgtcgttgaccaccatcccctttcccttaggatccatctcttcgggcgattagtcccttacgtgaagagaacggctccgataccaattgagagcacctagagggggggtgaacaggtgatcctgtaaaattcaca

SEQ ID NO: 43386 - DNA, 1884 bp, Zea Mays
gccgccacccttgcccgccattaaccgcctctccctcgctcctctcgctcgctcggctcactccctctccaaagcggcagcctcacgcagtcacgcgctccaccacgccacctccctctactcactcatgttgttttccgtccatccgcccaccggttcgtagcccgcgccgcaaaaccctagccccgggaggatcgcggggcgcctccgcggtgccagcgacgtggctcgtttgatccgattgctggtcgagccccgccctcgctgccgcgcttcgctccggctgtgcagcggcgtgagcaccgagcacactcgcgaatggggaactgctagggtgcttggatcaaggatgggagccctcaccctggggcctcagtgctagatttttttttgccaaagatggcttcatggcaagcagatatctcagaagacagcacttcatttctcttaagttctaaggtgtggcgttcgttggggaagagcgaagacttgttgaaggctgaggctgccagtccttcatcgtcggagtcgaatgaagagcagtctgagtcccattctttgccaagatgagcctcgccttttgccttcctatagattttcttcttcttcttcccatgtctttcttccccctggtcattttcattatcgggacattgagcaataaaatgacatgtattaccgcatttgaagcaggagcgctttccccttgtcttattcttgttggggtattccttgcgtccttttagtgcgatcttgaagcgcttgatgataagcgccatctcatcttcgttgaggccagcggcctccacttgtgccaccttgcttggtagcgtctccctgctactggttgccttgagggcaacagtttgaggctcgtggacggggagtggaccgtttagagcgtcgtccacatatcgggcttccttcaccatcatgcgcccgcttacaaactttccaagaatctcctcgggcgtcatcttggtgtacctgggattctcacgaataaggttaacaagatgggggtcaattaccatgaatgaccttagcataagtcggacgacgtcgtggtccatccatcttgtgcttccatagctcctaatcttgttgactagggtcttgagcctgttgtatatttgtgttggctcctctcccctgatcatcgcgaaccttcccaactcgccttccatcaactccattttggtgatcatggtggcgtcgtttcgctcatgtgatatcttaagggtatcccaaatttgcttggcgttgtccaagccgctcaccttgttgtattcatccctgcacaagctagcaaaacagtagtagcttgtgcattcttatgaatttgctcattgataaacacagggttatccatactatcgaaatgcattccattttccactatctcccaaatactaggatggagagaaaataagtgactacgcattttgtgactccaaaaagagtagtcctctccatcaaagtgtggaggtttttcaagtggaattgaaagcaaatgagcattggaattgaacggaatacgagaataatcaaatgaataattttgattaactgttttcttctttgaagaggagtcgtcgtcgtcgtgtggtgaagaagacgaggcatcattgtcgtaatagatgatcttcttgatgcgcctcttcttctttccatctcttttcttatgactcgagcctgagtcggttggcttgtcatctctaggctcgttgaggaaagactccttctccttgtcgttgaccaccatcccctttcccttaggatccatctcttcgggcgattagtcccttacgtgaagagaacggctccgataccaattgagagcacctagagggggggtgaacaggtgatcctgtaaaattcaca

SEQ ID NO: 43387 - DNA, 2240 bp, Zea Mays
cttttaagtatttgttatgtatttgcatttggaataattttttatggcgcatgattgatttttggttattgaataacatttcttcttaaatgaaaatcctagtaaataaaaatatataataattattagcccaaaaattaatattttatttataaataattttggtttaattactatgaattttagggttatttaaaaatgtatttcaaatttagaaaaggaaataaaaaaaagaaaaaaaacaaaacctaaccaaatcggcccattaaggcccagccgcactcccctaaccctaaccggccgccacccttgcccgccattaaccgcctctccctcgctcctctcgctcgctcggctcactccctctccaaagcggcagcctcacgcagtcacgcgctccaccacgccacctccctctactcactcatgttgttttccgtccatccgcccaccggttcgtagcccgcgccgcaaaaccctagccccgggaggatcgcggggcgcctccgcggtgccagcgacgtggctcgtttgatccgattgctggtcgagccccgccctcgctgccgcgcttcgctccggctgtgcagcggcgtgagcaccgagcacactcgcgaatggggaactgctagggtgcttggatcaaggatgggagccctcaccctggggcctcaggatcctctaggaaaattgatttctggagctgattcttcgacatcaacaatccagcagtgctagatttttttttgccaaagatggcttcatggcaagcagatatctcagaagacagcacttcatttctcttaagttctaaggtgtggcgttcgttggggaagagcgaagacttgttgaaggctgaggctgccagtccttcatcgtcggagtcgaatgaagagcagtctgagtcccattctttgccaagatgagcctcgccttttgccttcctatagattttcttcttcttcttcccatgtctttcttccccctggtcattttcattatcgggacattgagcaataaaatgacatgtattaccgcatttgaagcaggagcgctttccccttgtcttattcttgttggggtattccttgcgtccttttagtgcgatcttgaagcgcttgatgataagcgccatctcatcttcgttgaggccagcggcctccacttgtgccaccttgcttggtagcgtctccctgctactggttgccttgagggcaacagtttgaggctcgtggacggggagtggaccgtttagagcgtcgtccacatatcgggcttccttcaccatcatgcgcccgcttacaaactttccaagaatctcctcgggcgtcatcttggtgtacctgggattctcacgaataaggttaacaagatgggggtcaattaccatgaatgaccttagcataagtcggacgacgtcgtggtccatccatcttgtgcttccatagctcctaatcttgttgactagggtcttgagcctgttgtatatttgtgttggctcctctcccctgatcatcgcgaaccttcccaactcgccttccatcaactccattttggtgatcatggtggcgtcgtttcgctcatgtgatatcttaagggtatcccaaatttgcttggcgttgtccaagccgctcaccttgttgtattcatccctgcacaagctagcaaaacagtagtagcttgtgcattcttatgaatttgctcattgataaacacagggttatccatactatcgaaatgcattccattttccactatctcccaaatactaggatggagagaaaataagtgactacgcattttgtgactccaaaaagagtagtcctctccatcaaagtgtggaggtttttcaagtggaattgaaagcaaatgagcattggaattgaacggaatacgagaataatcaaatgaataattttgattaactgttttcttctttgaagaggagtcgtcgtcgtcgtgtggtgaagaagacgaggcatcattgtcgtaatagatgatcttcttgatgcgcctcttcttctttccatctcttttcttatgactcgagcctgagtcggttggcttgtcatctctaggctcgttgaggaaagactccttctccttgtcgttgaccaccatcccctttcccttaggatccatctcttcgggcgattagtcccttacgtgaagagaacggctccgataccaattgagagcacctagagggggggtgaacaggtgatcctgtaaaattcaca

SEQ ID NO: 43388 - DNA, 852 bp, Zea Mays
tgccctttccccttggcgatggcggcggctggggaacgggttcacccccgcgcgcccgcgaggctgcgtggcggtacagcgagtggtggtcggcacgtctgtgcccccgtggctgcggcagcgtgacggcggcgcccgcgtgcctgcagcggccagcgtaccggcgctcgcgcgcccacgcctgcgtccgtgtggctggcagtggcggcggcgcctgcttgccccgtccatgtgctcggccgttgcggcggcgcacgcacgagtgcccagtcgcagctgcgcacgcctgctgctcgaccgcgacgacgtggaccggctacgccggcttgtctgcgaggagacgacgttggcctgcagcctgcagtggtggcgtgctcctcgcctgtgcctgagcactcatctgtggagcgcggtggttgtgcttgtgcatgcctgtgcacttgccttcaaggcagcggtccagtggaggttgcgacggtggcggtgctgttgtggcgcggcgtttcaggttcacaacggaggttggcaaggcgccaaggcctcacgctggaggtacgacgagcggtggtcaaggctagcacgaagctaattctaacctttatcatggcagctaaatctattcctgggtaacaactaatcgtagcaagcagttagattcttacctttcttctttgttacctttgtgaactcctaggccaacggagcattcgtgctgataacgtgttaagaatcctttgctactagtgtagtccaaaggcttcttaactagaaatagaatcataaacacaggagacacaaagatataggaggaactgttattctcattcatgtattcagctcaatggttacaac

SEQ ID NO: 43389 - DNA, 1169 bp, Zea Mays
agaatttcaaattggcaacggcgcgccggcggaaaagcatttcatttccctccgtcttctcccgccccctctctccaccatgtcagcgatccgcgtgagaagcgcatctcgaccgtccgtgcgaagaagcaccaacgttccacaccgtttgaagccagcgatccgcggcacctgcctctccaccaatcacgctcacctctcccgtcctataataagcgcatcgccccaagccaccatccccaactacggtaactcgtctgctcgcatttcctcccaatccatcccgcctccaaacccgaactccaagtcgccccgcatcgatggcgcccaaggccgagaagaagcccgcggcgaagaagccggcggaggaggagcccgctgccgagaaggcgccggccgggaagaagcccaaggcggagaagcgtgtcccagcaggcaagtccgccggcaaggagggcggcgagggaaagaggggccggaagaagggcaagaagagcgtggagacctacaagatctacatcttcaaggtgctgaagcaggtgcacccggacatcggcatctcctctaaggccatgtccatcatgaactccttcatcaacgacatcttcgagaagctcgccgccgagctcgccaagcacgccgtctccgagggcaccaaggccgtcaccaagttcacctcgtcctaggctgcgtggcctccgcttgcaggcttccctcgtatgttcgcgtgtcttgctgtagttaggtgctgctgtgtctggtctcctccggtagcaactgttatctgatggaacagtaacaatgcttattgaatccagctagttgcttatttgtggatcctctctctttgttgttggccacctttatctcgtgatgtttgtgtgcatgtgaatactctgaatgtgcatttcgaagtttgagaagttacgacgcgttactgccattcctgtgaatgtttcggttgtgcacttgtagaatttggggtaatttctaattcgcgatcgaacatgttttgagaagttatatagtaatttgcaggctgtaaattgctctaatgtaggccgggttgtttgtcgtggcttcaaatttccttcctgttaacccggtcatgctatatgtttccaaatgaaatttccacttcatgctagtcgcttagcactgggtggcgc

SEQ ID NO: 43390 - DNA, 2683 bp, Zea Mays
aaccccaccagaccttcaaccgctacatttccgtcactaccggagccgccactcccacgaacgcgcggcggagcggaagcgaaccaggttcgtgcctctctatctcccactcttcattccttcgtaccgcctcgccgttctcggagatcggggttcggccactgcgaattcccggttgttgtcgggttggggtttgggcgccgtgtttggcgggtgagattagattcctgctcctggccgcttcacttcttccttagaagatcgctcggggttgggttcttctggatgtgaggtgatgaggtgaggcttcaatccgttcctcctctagctccggtggttggtcgtgctggctctcagaagatgggagcttcccaaaggaaagcagccatggtggctagggtttgcgtcgccggcgcattctgagatgcgctgctgcttgcgcgcgcgcgcacgctccatcgccctgcatccgccgtcctcacgcgcccaagctgctcgtcgcccctctccatcgctgggacctgtcggcagcggatcagtgacgcgagcacaggtaaaaagaaaaggatgaggcttgggagtataaacggcttgcggttcacgcagcttaaacttgtcatccttgcgttcttcatgttgtttgttctctggaaatgggagaagggctcgtcatactacgattccgaaatcctccagccagatccgttggttctgactcatccagctaacttgaagtttgtagaccagcatacatccccagaagaagacttttcaagtgcagatcgatcacaccggtcagtaggtaaagtagaaaagccggttactagtgcgctgccaccattgtctacgataggctattctgttgatgttgcagatgggaatgaagtgccacctcctgagaagaaagaatgcgagtacaggaatggaaagtgggtttctgacaatcgtagaccactatactcagggtttggttgtaagcagtggctttcagagagttggtcctgcagactaacccagcgaaaagatttcgcgtatgaaaaattcagatggcagcctgaagcttgtgagatgccagagtttgaggcctcccagttcttgagaaggataaaaccatcgcttacgtgggcgattctctagggaggcagatgtttcagtcgatgatgtgtatggtcactggtggaaaggagaggctggatgtagaagatgttggcgcagagtatggctttgtgttagcgccgggtgcaaaaaggccagacggctgggcctaccggttcccgagcaccaacacaacaattctataccactggtcatcaacgctctgtgatttggagcccctgaacccatcagaccgagcgaccagttacgccatgcacctggaccgcccgcctgcttttctgaagagcaacctccacaggctccacgttctggtcctcaacaccggccaccactggaaccgagggaagctgagggcgaacaggtgggagatgtatctcggcggagcgccgaacagcgacaggaacaccgccgtcatctggaaggccaagaacttcaccgtccacagcgtcgtcagatgggtggacacgcagcttccccgccaccccaagctgaaggcgttctacaggtcgatatcgccccggcacttcttcaacggtgactgggacaccggaggcagctgcgacaacaccagccctctggccaagggagggagcggcgtccacctcgaccgttcggaggacgccgacgccgagggcgccgtgaggggcaccggggtcaggctcctggacgtcactgccctatcgcggctgagggacgaagggcatatttcacggtacagcatcaaggccacttctggcgttcaggattgcctgcactggtgccttcccggcgtgcctgacacctggaacgagatccttgcggcccagctatagcctgtagctgaatttgaagatgccaagggttatgtcgaattgtttatgggtgaagctcgtatatacagtaactaccacggagtactacgtcgttgccggagacccaatgctgctggtagtgaaacactgagctgcagtacattctttcgggaccgtgcttaactgtagaaaatacagggccttttttttgtgtaagtacatgttgtgtttgcctactgttacctgtgtacgccagttgttaattggagaactggattgatagatagtttggaagtgttgcctgagaggtagggcaacgcatcttgcagcatccagtcctttgagaactcatctgttatgtaccaaacacgaacagagagcatcatgcattgctgatccatgtgatgtggttgttggtacgttgattgttgctaggttcgtcctctcaccccttgtatcaccattgtttatggtacatgtggaatcatctggtaagttctgaatgtcataattaattactgaactgttcttctgatgctgagacctcgaacgtctgatgcaatttgtattcaagatcagagtcccagcggtacttgcacgtgcaaaatacagtggacctgtcagtggcctggcagtggcaccgagcaagcacatgatctgctccagtccaggcacgttgcgttatccgccacgctctcaggcgacggaccagcggccggccggccggccggcttacaattttacatgtgattggtggagcggatccatgatttttg

SEQ ID NO: 43391 - DNA, 2435 bp, Zea Mays
aaccccaccagaccttcaaccgctacatttccgtcactaccggagccgccactcccacgaacgcgcggcggagcggaagcgaaccagagcacaggtaaaaagaaaaggatgaggcttgggagtataaacggcttgcggttcacgcagcttaaacttgtcatccttgcgttcttcatgttgtttgttctctggaaatgggagaagggctcgtcatactacgattccgaaatcctccagccagatccgttggttctgactcatccagctaacttgaagtttgtagaccagcatacatccccagaagaagacttttcaagtgcagatcgatcacaccggtcagtaggtaaagtagaaaagccggttactagtgcgctgccaccattgtctacgataggctattctgttgatgttgcagatgggaatgaagtgccacctcctgagaagaaaggtatactcatctttgtggctgctagagaaaccataaatttatttcttatgcgagcatacaaatgtgcttgttttctccattgacatatttctcatattgcctttgcacaaaatccagaagattatttcctgttcagtttgcttgtgcattagctggcgcacaggttatgttgctttaatctgtatgtgatgttcacttatctgtcctacagaatgcgagtacaggaatggaaagtgggtttctgacaatcgtagaccactatactcagggtttggttgtaagcagtggctttcagagagttggtcctgcagactaacccagcgaaaagatttcgcgtatgaaaaattcagatggcagcctgaagcttgtgagatgccagagtttgaggcctcccagttcttgagaaggataaaaccatcgcttacgtgggcgattctctagggaggcagatgtttcagtcgatgatgtgtatggtcactggtggaaaggagaggctggatgtagaagatgttggcgcagagtatggctttgtgttagcgccgggtgcaaaaaggccagacggctgggcctaccggttcccgagcaccaacacaacaattctataccactggtcatcaacgctctgtgatttggagcccctgaacccatcagaccgagcgaccagttacgccatgcacctggaccgcccgcctgcttttctgaagagcaacctccacaggctccacgttctggtcctcaacaccggccaccactggaaccgagggaagctgagggcgaacaggtgggagatgtatctcggcggagcgccgaacagcgacaggaacaccgccgtcatctggaaggccaagaacttcaccgtccacagcgtcgtcagatgggtggacacgcagcttccccgccaccccaagctgaaggcgttctacaggtcgatatcgccccggcacttcttcaacggtgactgggacaccggaggcagctgcgacaacaccagccctctggccaagggagggagcggcgtccacctcgaccgttcggaggacgccgacgccgagggcgccgtgaggggcaccggggtcaggctcctggacgtcactgccctatcgcggctgagggacgaagggcatatttcacggtacagcatcaaggccacttctggcgttcaggattgcctgcactggtgccttcccggcgtgcctgacacctggaacgagatccttgcggcccagctatagcctgtagctgaatttgaagatgccaagggttatgtcgaattgtttatgggtgaagctcgtatatacagtaactaccacggagtactacgtcgttgccggagacccaatgctgctggtagtgaaacactgagctgcagtacattctttcgggaccgtgcttaactgtagaaaatacagggccttttttttgtgtaagtacatgttgtgtttgcctactgttacctgtgtacgccagttgttaattggagaactggattgatagatagtttggaagtgttgcctgagaggtagggcaacgcatcttgcagcatccagtcctttgagaactcatctgttatgtaccaaacacgaacagagagcatcatgcattgctgatccatgtgatgtggttgttggtacgttgattgttgctaggttcgtcctctcaccccttgtatcaccattgtttatggtacatgtggaatcatctggtaagttctgaatgtcataattaattactgaactgttcttctgatgctgagacctcgaacgtctgatgcaatttgtattcaagatcagagtcccagcggtacttgcacgtgcaaaatacagtggacctgtcagtggcctggcagtggcaccgagcaagcacatgatctgctccagtccaggcacgttgcgttatccgccacgctctcaggcgacggaccagcggccggccggccggccggcttacaattttacatgtgattggtggagcggatccatgatttttg

SEQ ID NO: 43392 - DNA, 2240 bp, Zea Mays
cccactttccactcccaaccccaccagaccttcaaccgctacatttccgtcactaccggagccgccactcccacgaacgcgcggcggagcggaagcgaaccagagcacaggtaaaaagaaaaggatgaggcttgggagtataaacggcttgcggttcacgcagcttaaacttgtcatccttgcgttcttcatgttgtttgttctctggaaatgggagaagggctcgtcatactacgattccgaaatcctccagccagatccgttggttctgactcatccagctaacttgaagtttgtagaccagcatacatccccagaagaagacttttcaagtgcagatcgatcacaccggtcagtaggtaaagtagaaaagccggttactagtgcgctgccaccattgtctacgataggctattctgttgatgttgcagatgggaatgaagtgccacctcctgagaagaaagaatgcgagtacaggaatggaaagtgggtttctgacaatcgtagaccactatactcagggtttggttgtaagcagtggctttcagagagttggtcctgcagactaacccagcgaaaagatttcgcgtatgaaaaattcagatggcagcctgaagcttgtgagatgccagagtttgaggcctcccagttcttgagaaggataaaaccatcgcttacgtgggcgattctctagggaggcagatgtttcagtcgatgatgtgtatggtcactggtggaaaggagaggctggatgtagaagatgttggcgcagagtatggctttgtgttagcgccgggtgcaaaaaggccagacggctgggcctaccggttcccgagcaccaacacaacaattctataccactggtcatcaacgctctgtgatttggagcccctgaacccatcagaccgagcgaccagttacgccatgcacctggaccgcccgcctgcttttctgaagagcaacctccacaggctccacgttctggtcctcaacaccggccaccactggaaccgagggaagctgagggcgaacaggtgggagatgtatctcggcggagcgccgaacagcgacaggaacaccgccgtcatctggaaggccaagaacttcaccgtccacagcgtcgtcagatgggtggacacgcagcttccccgccaccccaagctgaaggcgttctacaggtcgatatcgccccggcacttcttcaacggtgactgggacaccggaggcagctgcgacaacaccagccctctggccaagggagggagcggcgtccacctcgaccgttcggaggacgccgacgccgagggcgccgtgaggggcaccggggtcaggctcctggacgtcactgccctatcgcggctgagggacgaagggcatatttcacggtacagcatcaaggccacttctggcgttcaggattgcctgcactggtgccttcccggcgtgcctgacacctggaacgagatccttgcggcccagctatagcctgtagctgaatttgaagatgccaagggttatgtcgaattgtttatgggtgaagctcgtatatacagtaactaccacggagtactacgtcgttgccggagacccaatgctgctggtagtgaaacactgagctgcagtacattctttcgggaccgtgcttaactgtagaaaatacagggccttttttttgtgtaagtacatgttgtgtttgcctactgttacctgtgtacgccagttgttaattggagaactggattgatagatagtttggaagtgttgcctgagaggtagggcaacgcatcttgcagcatccagtcctttgagaactcatctgttatgtaccaaacacgaacagagagcatcatgcattgctgatccatgtgatgtggttgttggtacgttgattgttgctaggttcgtcctctcaccccttgtatcaccattgtttatggtacatgtggaatcatctggtaagttctgaatgtcataattaattactgaactgttcttctgatgctgagacctcgaacgtctgatgcaatttgtattcaagatcagagtcccagcggtacttgcacgtgcaaaatacagtggacctgtcagtggcctggcagtggcaccgagcaagcacatgatctgctccagtccaggcacgttgcgttatccgccacgctctcaggcgacggaccagcggccggccggccggccggcttacaattttacatgtgattggtggagcggatccatgatttttg

SEQ ID NO: 43393 - DNA, 3069 bp, Zea Mays
atgccccgccccagttcacgcgccaaggcggcatcaccgccggaggcggtggccggtgcctcgcagcgcacccctgcgccgtccccgtccacctccctccgcctcggcattggccccgtagcctccgatgacaaccgcggcgccggatccctcgacctcaagcaacccgccgctgggcctcgccgacacagcctgcgcctcatgggcgccgccctcggcctcggcctaggcccggtctcccaccacgatgactgcggcgccggatgccccaacctcagtcctcccgccgccgtgcctccccgacgcagcctgcgcctcgcgggccccgccttgggtactccaaacactctctccgctcgtgacggcagttcctccgggttcgggtcgggcgggagcgagaagaggtcggggagggcccgtgctcgagtccctgcctcttcgcttgctacatccatctcgccgaggactgggaactccaatagcgatggcggagggtcgggggcggacagggtttccgcgagcggcgacagctctggcggttcggatcccttcacgaccctgcggtcagggtttcggatcgcgaagcgtcggatggaggcgggtggggaggcggagactgggtcgtctcgtcgaggacaggtgcataacgaaatgctgcaccaacacgtggacacgccgacgaagcggtgtaagaccatattggtcggtggagtggagacagagcatgtctctgacacaaagggtgattctgatgaggattgtatgatgctgggtccaagtgggaccgaactgaattatgttgctacgaagactgaaaagggggatgtggatgatcctgccaatgcaagcaatggagaatctctgcagacgcataatctgttaccggcagcaaatggtggggtggttgagcaattagtatatgcttcaggaagtcctgcaagttttgaagcacaagtctctgcagatatgtgtctcaaggaaggttcgagccaatgcagttctaggaaggaaggcaaagtgaaagagaagcttgttttggggaataacaaatcttgcgcttatgctaatgtgggctctgcagtcgatacctgttcccacaaattcaaccctgatagcaaaggaaaggaaaagatggttgcagaagatagtttatcatctctgacctcgagcgaggatgagccagatttcgatccagtggattccaaagagactcagctcaactcaggatcagtttctgcttctatggagtcatatcgcagacaaaccgtaaaagaaagggctatcaagctggcccctaaatttgcattcttcaaagcagataaagatgagcatagtgaagatgacgatgaagagttagagcctggtcctgacactgaagactggccaggcccatttgcaactgcggcaaggatatatgaagaaagagaagctaagttgagagctcgagagttgaattctttaaagctggacgaatctgcaaacagggtcatccgttggtcgccttcaaaggataggaaaaatctagtacaagctcaagttgctccatcacttacaagtgtatgcttaaatacccttgcggaacattctgaatggattcaatcgcttgaaggtgtcccagaggagctaaagcacaagctgttaaagattctgtgtgattccaggaagatgaatactcatcttctcaataaactattgtgtgacagtcctacagaactgcatctcagcgagtgttcatggctgagtgaggatgactttgagaaaacttttgggaaatgcagcactgaaagtttgcagcttgatatatctgggagatgcatacctgactacatattgccaactaccttagctaaggttcctaactgcatgccattgttgagaaaaatatctctgaagggaaattatcgactttctgataatggtttagtcacaatcatctctgccgcgccttctttatgctccctaaatctgtgcgagtgttctcttctcacttcatctggaatcgatattcttgcaaacaagttatgttcagttcttagagaactctatatagatgactgcacaaatgtggacgctatgacgattcttccttctctacagaagattaagcatctagaggttttgtcaatgtctagaatacaatctgtttgtgacaaatttgtgaaggggctcattcctgtacatggtttaaatctgaaggagttagcatttgctggttgcttgaaacttacctcatcttccatcaagactattggggaatactgtcaaaaaataacttcattggacctttgcaacttgaatcggctgcgtgactcagcaatgatgcatcttcgtggttgtaggctaataaggaaactaaagcttcaaagaaatgcattcagtgatgaagctgtgtctcaatatttggaagcatctggaggatgcctgactgagctaatgctaaacaatgttgaggttggagaccttactgcgcttgcaatttctcgcaagtgttatgtttcattggaggctctggatctttccttctgccgtgaactgacagacgaagctttggggctgattgtcgacagctgtccatcattgaggattcttaagctatttggttgtacccaggtcacggatttgttcctcaagggtcactcgaacacatcggtcaaaatcgtcggaataggagggagcatactagtgcaaatggatagccgttagtttgattggagaacgacactacattctcctgttcattcagttatctagcttaggattcgaggcactaaaggtcctcaatgtggctgcagcactaagatgccatattcccgggacaacggaatcgaagggaaaagaaaatggaacatggctgcagcactaagcagaacatcaaacgcggaatattttgtgaacctaccttgcttataccagttagcagtgtagagatctttcttgaaatgcttttgtttttcttggttaacgttttttcttgaaaggtttctcggttaacttgaagcagcgtaaagtctgatgctgcataatgcaaactattgataaaaaaatatttttatttgttattacattaca

SEQ ID NO: 43394 - DNA, 2845 bp, Zea Mays
cacgttttccgcgatgccccgccccagttcacgcgccaaggcggcatcaccgccggaggcggtggccggtgcctcgcagcgcacccctgcgccgtccccgtccacctccctccgcctcggcattggccccgtagcctccgatgacaaccgcggcgccggatccctcgacctcaagcaacccgccgctgggcctcgccgacacagcctgcgcctcatgggcgccgccctcggcctcggcctaggcccggtctcccaccacgatgactgcggcgccggatgccccaacctcagtcctcccgccgccgtgcctccccgacgcagcctgcgcctcgcgggccccgccttgggtactccaaacactctctccgctcgtgacggcagttcctccgggttcgggtcgggcgggagcgagaagaggtcggggagggcccgtgctcgagtccctgcctcttcgcttgctacatccatctcgccgaggactgggaactccaatagcgatggcggagggtcgggggcggacagggtttccgcgagcggcgacagctctggcggttcggatcccttcacgaccctgcggtcagggtttcggatcgcgaagcgtcggatggaggcgggtggggaggcggagactgggtcgtctcgtcgaggacaggtgcataacgaaatgctgcaccaacacgtggacacgccgacgaagcggtgtaagaccatattggtcggtggagtggagacagagcatgtctctgacacaaagggtgattctgatgaggattgtatgatgctgggtccaagtgggaccgaactgaattatgttgctacgaagactgaaaagggggatgtggatgatcctgccaatgcaagcaatggagaatctctgcagacgcataatctgttaccggcagcaaatggtggggtggttgagcaattagtatatgcttcaggaagtcctgcaagttttgaagcacaagtctctgcagatatgtgtctcaaggaaggttcgagccaatgcagttctaggaaggaaggcaaagtgaaagagaagcttgttttggggaataacaaatcttgcgcttatgctaatgtgggctctgcagtcgatacctgttcccacaaattcaaccctgatagcaaaggaaaggaaaagatggttgcagaagatagtttatcatctctgacctcgagcgaggatgagccagatttcgatccagtggattccaaagagactcagctcaactcaggatcagtttctgcttctatggagtcatatcgcagacaaaccgtaaaagaaagggctatcaagctggcccctaaatttgcattcttcaaagcagataaagatgagcatagtgaagatgacgatgaagagttagagcctggtcctgacactgaagactggccaggcccatttgcaactgcggcaaggatatatgaagaaagagaagctaagttgagagctcgagagttgaattctttaaagctggacgaatctgcaaacagggtcatccgttggtcgccttcaaaggataggaaaaatctagtacaagctcaagttgctccatcacttacaagtgtatgcttaaatacccttgcggaacattctgaatggattcaatcgcttgaaggtgtcccagaggagctaaagcacaagctgttaaagattctgtgtgattccaggaagatgaatactcatcttctcaataaactattgtgtgacagtcctacagaactgcatctcagcgagtgttcatggctgagtgaggatgactttgagaaaacttttgggaaatgcagcactgaaagtttgcaggatctacagcttgatatatctgggagatgcatacctgactacatattgccaactaccttagctaagaagattaagcatctagaggttttgtcaatgtctagaatacaatctgtttgtgacaaatttgtgaaggggctcattcctgtacatggtttaaatctgaaggagttagcatttgctggttgcttgaaacttacctcatcttccatcaagactattggggaatactgtcaaaaaataacttcattggacctttgcaacttgaatcggctgcgtgactcagcaatgatgcatcttcgtggttgtaggctaataaggaaactaaagcttcaaagaaatgcattcagtgatgaagctgtgtctcaatatttggaagcatctggaggatgcctgactgagctaatgctaaacaatgttgaggttggagaccttactgcgcttgcaatttctcgcaagtgttatgtttcattggaggctctggatctttccttctgccgtgaactgacagacgaagctttggggctgattgtcgacagctgtccatcattgaggattcttaagctatttggttgtacccaggtcacggatttgttcctcaagggtcactcgaacacatcggtcaaaatcgtcggaataggagggagcatactagtgcaaatggatagccgttagtttgattggagaacgacactacattctcctgttcattcagttatctagcttaggattcgaggcactaaaggtcctcaatgtggctgcagcactaagatgccatattcccgggacaacggaatcgaagggaaaagaaaatggaacatggctgcagcactaagcagaacatcaaacgcggaatattttgtgaacctaccttgcttataccagttagcagtgtagagatctttcttgaaatgcttttgtttttcttggttaacgttttttcttgaaaggtttctcggttaacttgaagcagcgtaaagtctgatgctgcataatgcaaactattgataaaaaaatatttttatttgttattacattaca

SEQ ID NO: 43395 - DNA, 1030 bp, Zea Mays
aaaaaaaacccataaagcgagctcgcagagcggatcgaacgggagaacggagaagagaacaagagatagtacttgacactcctgtcctgctcctcccactcccacgctcccaaccgagctcgagcgcacgcacacgcgcacaagcaggagctcctgtcccgctagatcccaaacagtctcctgcccgcgcgcgtttggggtggcgcgaaggaatcaccggatggcgatgttcgcgcggccgctgctggccaccctgctgctgctgccggcgttcctgctctctgccgcctcggccgccgacagcaagagcaaccctgctgatgagctcgtggcactgatcaacagcaaccgcactgctggcaaggcatcttctgtttcggacaaccaaggtttgggatgcatcgctctgcagtacatcaaagcatacgaaggccacaaccctctccaagatcaccggaaggctggtggcttgccagtcccagtacttggctccagctgaggcctttggcgtcttgttggtgaacgacgcgaagggcctccagatactgcgcagcaagaaccacacggaggtcggggcggctgtgagcggcaccgatggcggtggaccgtacttctggtgcgtcctgttcagtgacggcaagccgactaccagcttcaaggtggatggcgaagtgccgaaggcagccatccacccgggatgcttcagtggcaacaatgacgactgctcgggccccacaaatggcgccgttttgaccagtgctggtgcgctgaggctggtgacggccattctttttgctgtagctgctttgtgagcgtgtaagtaggtgtaatgttttctgccattattttgctttgtcaccatctcctgtctgtctgcagtggcacgctatatattctttgagcatatgaactatgtatgcaaggatttgtaggtcgttgttcagcattttgagactatctgttacctgttcggaatgttcatcatagtagttttgtgcgctcttttcggaagtatttgagcaaattaaag

SEQ ID NO: 43396 - DNA, 1647 bp, Zea Mays
ctcaaaataaaacgactccattctaaaaaatctagaaagctattccattctatttgactgtacaaccaaatctcacccttaactgcaccagccatggcagaccgctggtggctggcactcgctgctcacactcactgtccagtgtccttgttgtccaccactccctcgagtccgtgacgcgtcagcgtcaccgtccgtcgtcgcagacgagcccagtggcgactggcgattcgctttcgaaccgcagtcgtccctgctgtgttcccggttccctcccttcctcctcctatagttggcttctcgccaccctctgccttcgaccaactttctcccttctcccctccccgttcccctctccaactccaatccatggcctccacggatcgctccgcgccggcggaggaccagcaacagccgcagcgcccgtccctcttctcgccgtaccagatgccccacttccgcctcgcgcaccggttccctcgtgtccctgggatatacaatcaagagcagactgatgcatggaaaaaggtggttgatgctgttcatgccaagggagccatctttttctgccaactatggcatgtaggtcgagcttctcaccaagtatatcagccgggtggttctgctccaatatcctctactgataaaccaatatcatcaagatggaggatactgatgcccgatggatcctatggcaagtatccaactccgaggcgcctagccacatccgagataccagaaattgtcgagcaataccgacaggctgccataaacgccatcaaagcaggtttcgatggcatcgagatccacggtgcccatggctacctaatcgaccagttcctcaaggacggtatcaacgacagggctgacgagtacggtggctcactctccaaccgctgccggttcctcctggaggtgacgcgcgccgtggtctccgcgataggggcagaccgggtggcggtccgggtgtccccggccatcgaccacctcgacgcgtacgactccaacccgctgcagctcggcctggccgtagtggaccgcctcaacgctctccaggaggagaccgggcggctggcctacctgcacgtgacgcagccacggtacacggcgtacgggcagacggagtccggccagcacgggagcgccgaggaggagagccggctgatgcgcgccctgcggggcgcctaccgcggcacgttcatgtgcagcggtgggtacacgcgcgagctcggcgtggaggccgtcgagtcgtgggacgccgacctggtgtcctacgggcggctgttcatcgctaacccggacctggtggagcggttccggcgcgacgccccgctgaacagatacgtgcgcaagacgttctacaccccggatcccgtcgttggttacacggactacccgttcctcggccagcctaaggcgcgcatgtgattattagttaggttggtaactataagaggcggactattgttcgtgtattgtggcttgagaaaataagcaaacacatggtggtagtgctgtgcaataagccttaggtgcaaacatgagcctcctgggcctttagataatgatctaattatagatgtaattatagttttgtcaagaagttaatgtttatttgcacagcaatcagcagtcatctctcatatg

SEQ ID NO: 43397 - DNA, 719 bp, Zea Mays
aagactcagtatttcattaaagtttctttaatggaagagcaaaggcaagaatctaccaaatctgatgatgagaacaaggctaatgatggagatccatcttcgaatgaaactgagccatcaaatggaaagactgatatcaatgatacacctatggatgaatctcagatgaggatggtcgagattctggtaaaaacggcggtggaacagacctaaatttgaatttaggtttgaaagacccggatggtgataatgaagttgagacatcagagaaacatgtagcggcaaacaatccgcagacagagaatagatccaagaggaaatccgtaacccctgaccttgagatgacaatgtaacccagaaatttcatttgtcttaattttactatttgccatgagcccatgaggtgtgtaactggggtacgttctcatcgtagaaacatttaagtaaaatcgattacaggacatacaatagtgtgaactgaagaaacctttttttactcgaacatggagaattgtctaaagtcattgtcaaatataatttaattttccagagatgttgggaattggataacatgtcttcagaacttatttgcaaaatgttcttttattgcaagtgtatcttgattgagaaaccggaaaccgagggaacttcccgcttaggccttgttcggttaatcatgttactatgtattggatgaaatggaaaaaaaataataagaa

SEQ ID NO: 43398 - DNA, 1930 bp, Zea Mays
gatatgatttcattagtgttgaagagaacctagaagaactgtccaagcttgaggaaggtaaattagtttgtagtttttatttcataattgtttctactatgttcttattgatttcagattttactaatttgtttactccttactattactgcaaagttttgtgacctcactgtttctaaggaggcaacaaccacccctaccaattcttgagcatgaaaatttgatgaatgatgaatggtgaatggagaatatgaggctatcaaagtttaagctcaaatatgtgatctgtaatctcaaactatcattaatgggaagttatgtaatgtatgacttgaagagttgaagtctggactctggaccatttaaatttgttgtaatgtttgttattgaatttgtgacttgctactagttattgtggacttatattcattgttgagtgttgtgctgctggttatcagtgcatgtgtgctgctggttagtggctatttgctgctgtttattcaattttgaatacagtcatagcacaggagcagccaaacaaagctaactaagatggatttcggatgtttagtttaaaccgaacaccgaaccgaatagctcggttttcttttgtgagacacggagatcagtctgctctatctgtaaaccgaacttctacgataccgaaaaaaccgaaccgaaaaaccgattgcataggctagtaatggtcccgcgccagacggcccagcagtggctgcacctcggtcccagctgtcagcgaacggcaacgaggcaaacacatgacgcctctcttctcttccgtgtagatctcgcttagaattcgtgtaccagaaaccccggccctaaccgcgcccgcaccctcgcccttggctcgccggagattaacgctacagccgtaatcacgtaaattccttttcatggagggtgtgggcgcgcggctagggcgcacttcggcgcgctacgggccggcgacgacgttcacgggccatgtcaggaagtggcgcaaggagtgggtaccagtggtcgccgccgccgccgccgccgccgccaacgccaacaccagcgccaacggtggcacgacgtcctccacggggatgggatctggcggaggatcccgcgggaataatcttctcctgtttaagtggaccccggtgaacggggctaacgggggaggaggggatggggagcagcagcagcaggctgagacggccacgagacgccggcggtttctttaatggaagagcaaaggcaagaatctaccaaatctgatgatgagaacaaggctaatgatggagatccatcttcgaatgaaactgagccatcaaatggaaagactgatatcaatgatacacctatggatgaatctcaggcaacagatgaggatggtcgagattctggtaaaaacggcggtggaacagacctaaatttgaatttaggtttgaaagacccggatggtgataatgaagttgagacatcagagaaacatgtagcggcaaacaatccgcagacagagaatagatccaagaggaaatccgtaacccctgaccttgagatgacaatgtaacccagaaatttcatttgtcttaattttactatttgccatgagcccatgaggtgtgtaactggggtacgttctcatcgtagaaacatttaagtaaaatcgattacaggacatacaatagtgtgaactgaagaaacctttttttactcgaacatggagaattgtctaaagtcattgtcaaatataatttaattttccagagatgttgggaattggataacatgtcttcagaacttatttgcaaaatgttcttttattgcaagtgtatcttgattgagaaaccggaaaccgagggaacttcccgcttaggccttgttcggttaatcatgttactatgtattggatgaaatggaaaaaaaataataagaa

SEQ ID NO: 43399 - DNA, 1447 bp, Zea Mays
gttcaatacgcagcagcggcggctaaccctaacttcaaaggcataggagtaacagtcttcgcacaaatattccctcccccaaggcccgaagccccgaaactttccggatctttcttccgccgcttcatcttctttgcgcaaaactagttttgtttctcgttcttctcttcgatttcggccgaataaagatggcgtcggctgcgcgcctcctcgcgccgatctccaggcgcggcgtcgtctctgtggctctggcgggggtggagaggcggcggccggaggcggcgtcgctcctgggggcgcctgtgctggctacggtggaagcctgcgcttcgatcaaggtcattcctttgtcgaatcagctggctcgatactcgacaactgcatttcagaggtttgggttttcaacttcagccccccaacaagatgataaggagacaaacaagcacacagatgatggggttaatagaagtgttggagcaagtactggagcttcaagtgaagccaataatgtgcctggaaccgagaaggcacaggaagcaggttcacttgattctatatccaagtctaacaggaagaggacagctaaacgaactgcattttctgattcagattcagaagacctagacctatcaaaggaggaccttgtgaagctgcttcttgagaaagacgaatcattgaagtctaaagatgaagagtttaaagatatgaaggataaggtcctacgcagctatgctgagatggagaatgtccttgccagaacaaagcgtgagtcagagaacaccaagaagtatgccatacagagcttctccaagagcttgttagatgttgcagacaatttgtctcgggcatcatctgttgtcaaggtcttcaagaagtttggagttgaaaagtttgatcctttgaatgagaagtttgatccaaataggcactatgccattttccaaattcctgatccttcaaaaccatcaggaactgttgctgctgttgtgaaggttggctacatgttacatgatcgtgttcttcgccccgctgaagttggtgtcactgaaggtggtccaactgaagaagagccagaggagtaatctagatcaaacggaggttgctggctgcacgtatatctatgactactgccctttattggttggataagcatacatatcataggttatgtttttaactagatctgtgaggcaaatcactatttttgtagcatgttcaacgaggcaatttgttcaagctagtccagaactctcctttttcttgctcggtaataaaaacgagattgtagaacatgtacatcaccgaaattgcttgccaaagacggattattgcagcctgcattaataggaatactgacaatgagcgtgccacaatcaaaggtggtctgttttgaatgataatgtttgaatgaagatgggactgccgagatgtgtgttaaattacaaac

SEQ ID NO: 43400 - DNA, 2035 bp, Zea Mays
acgacaaagctaaaaaagatttagcattttggaatggagtgagttttattttatcaaaatttaatatcagtatcaggtcgtgtgtgttggtgactaccttttgttttatcttatgtgttatctggagaactttggtgtttgctagtataaattcatttttatctcaagaaatctaatgattgactcttgactttcacaactcatgtttatttgagtttcaattattttcagggagtttttatcaattgtgcattggttgaaccatttggactcaccttgattgaggctgctgcatatggtctacccatggttgccacccgaaatggtgggcctgtggacatacatcgggttcttgataatggaattcttgttgacccccacaatcaaaatgaaatagctgaggcactttataagcttgtgtcagataagcacttgtggtcacaatgtcgccagaatggtctgaaaaacatccataaattttcatggcctgaacattgccagaactatttggcacgtgtagtcactctcaagcctagacatccccgctggcaaaagaatgatgttgcagctgaaatatctgaagcagattcacccgaggactctctgagggatattcatgacatatcacttaacttaaagctttccttggacagtgaaaaatcaggcagcaaagaagggaattcaaatgctttgagaaggcattttgaggatgcagcgcaaaagttgtcaggtgttaatgacatcaaaaaggatgtgccaggtgagaatggtaagtggtcgtcattgcgtaggaggaagcacatcattgtaattgctgtagactctgtgcaagatgcagactttgttcaggttattaaaaatatttttgaagcttcaagaaatgagagatcaagtggtgctgttggttttgtgttgtcaacggctagagcaatatcagagttacatactttgcttatatctggagggatagaagctagtgactttgatgccttcatatgcaacagtggcagtgatctttgttatccatcttcaagctctgaggacatgcttaaccctgctgagctcccattcatgattgatcttgattatcactcccaaattgaatatcgctggggaggagaaggtttaaggaagacattaattcgttgggcagctgagaaaaacaaagaaagtggacaaaaaatatttattgaggatgaagaatgctcatccacctactgcatttcatttaaagtgtccaatactgcagctgcacctcctgtgaaggagattaggaggacaatgagaatacaagcactgcgttgccatgttttgtacagccatgatggtagcaagttgaatgtaattcctgttttggcttctcgctcacaggctttaaggtatttgtatatccgatggggggtagagctgtcaaacatcaccgtgattgtcggtgagtgtggtgacacagattatgaaggactacttggaggcgtgcacaaaactatcatactcaaaggctcgttcaatactgctccaaaccaagttcatgctaacagaagctattcatcccaagatgttgtatcctttgacaaacaaggaattgcttcaattgagggatatggtccagacaatctaaagtcagctctacggcaatttggtatattgaaagactaaatctttgatctttgctggtcagcagaggaatcaaagcagtaggaatgtaggatcgaggagagtgacaggacttcccctctgtgcacttcgccgaaaagtaataatgggattgctatgcatggcccttgttgtacactagaaaattgggcacgcaaacttgtgtcagtttttccgctgttgcgaaattcagtgatggtgtttttgtaactataccaacctgtgtcagttttgccgttgttgcaaaactcagtgatggtgttttttgtaattattatacatccgaataataagactggtgtttccagacagactatgcaagctaaggggaaatcacgattttcctagatcaaatatgtaatatgttcttttccgatgcatt

SEQ ID NO: 43401 - DNA, 2032 bp, Zea Mays
acgacaaagctaaaaaagatttagcattttggaatggagtgagttttattttatcaaaatttaatatcagtatcaggtcgtgtgtgttggtgactaccttttgttttatcttatgtgttatctggagaactttggtgtttgctagtataaattcatttttatctcaagaaatctaatgattgactcttgactttcacaactcatgtttatttgagtttcaattattttcagggagtttttatcaattgtgcattggttgaaccatttggactcaccttgattgaggctgctgcatatggtctacccatggttgccacccgaaatggtgggcctgtggacatacatcgggttcttgataatggaattcttgttgacccccacaatcaaaatgaaatagctgaggcactttataagcttgtgtcagataagcacttgtggtcacaatgtcgccagaatggtctgaaaaacatccataaattttcatggcctgaacattgccagaactatttggcacgtgtagtcactctcaagcctagacatccccgctggcaaaagaatgatgttgcagctgaaatatctgaagcagattcacccgaggactctctgagggatattcatgacatatcacttaacttaaagctttccttggacagtgaaaaatcaggcagcaaagaagggaattcaaatgctttgagaaggcattttgaggatgcagcgcaaaagttgtcaggtgttaatgacatcaaaaaggatgtgccaggtgagaatggtaagtggtcgtcattgcgtaggaggaagcacatcattgtaattgctgtagactctgtgcaagatgcagactttgttcaggttattaaaaatatttttgaagcttcaagaaatgagagatcaagtggtgctgttggttttgtgttgtcaacggctagagcaatatcagagttacatactttgcttatatctggagggatagaagctagtgactttgatgccttcatatgcaacagtggcagtgatctttgttatccatcttcaagctctgaggacatgcttaaccctgctgagctcccattcatgattgatcttgattatcactcccaaattgaatatcgctggggaggagaaggtttaaggaagacattaattcgttgggcagctgagaaaaacaaagaaagtggacaaaaaatatttattgaggatgaagaatgctcatccacctactgcatttcatttaaagtgtccaatactgcagctgcacctcctgtgaaggagattaggaggacaatgagaatacaagcactgcgttgccatgttttgtacagccatgatggtagcaagttgaatgtaattcctgttttggcttctcgctcacaggctttaaggtatttgtatatccgatggggggtagagctgtcaaacatcaccgtgattgtcggtgagtgtggtgacacagattatgaaggactacttggaggcgtgcacaaaactatcatactcaaaggctcgttcaatactgctccaaaccaagttcatgctaacagaagctattcatcccaagatgttgtatcctttgacaaacaaggaattgcttcaattgagggatatggtccagacaatctaaagtcagctctacggcaatttggtatattgaaagactaaatctttgatctttgctggtcagcagaggaatcaaagcaggaatgtaggatcgaggagagtgacaggacttcccctctgtgcacttcgccgaaaagtaataatgggattgctatgcatggcccttgttgtacactagaaaattgggcacgcaaacttgtgtcagtttttccgctgttgcgaaattcagtgatggtgtttttgtaactataccaacctgtgtcagttttgccgttgttgcaaaactcagtgatggtgttttttgtaattattatacatccgaataataagactggtgtttccagacagactatgcaagctaaggggaaatcacgattttcctagatcaaatatgtaatatgttcttttccgatgcatt

SEQ ID NO: 43402 - DNA, 4064 bp, Zea Mays
ataaacactgtacgagatcactgaccataatcattagcaatttagcattagcctcagctggcgtaccgtcgagtccattcccacctttctaccccttccagaaacctccaggatccgactccaatcgaatcgccaaagcagacaggggcgctcgcgggggcgccgagctcgacggggcgagatggccgggaacgactggatcaacagctacctggaggctattctggacgctggcggggccgcgggagatctctcggcagccgcaggcagcggggacggccgcgacgggacggccgtggagaagcgggataagtcgtcgctgatgctccgagagcgcggccggttcagccccgcgcgatacttcgtcgaggaggtcatctccggcttcgacgagaccgacctctacaagacctgggtccgcacctcggctatgaggagtccccaggagcggaacacgcggctggagaacatgtcgtggaggatctggaacctcgccaggaagaagaagcagatagaaggagaggaagcctcacgattgtctaaacaacgcatggaatttgagaaagctcgtcaatatgctgctgatttgtctgaagacctatctgaaggagaaaagggagaaacaaataatgaaccatctattcatgatgagagcatgaggacgcggatgccaaggattggttcaactgatgctattgatacatgggcaaaccagcacaaagataaaaagttgtacatagtattgataagcattcatggtcttatacgcggggagaatatggagctgggacgtgattcagatacaggtggtcaggtgaaatatgttgtagaacttgctagggctttaggttcaacaccaggagtatacagagtggatctactaacaaggcagatttctgcacctgatgttgattggagttatggggaacctactgagatgctcagtccaataagttcagaaaactttgggcttgagctgggcgaaagcagtggtgcctatattgtccggataccattcggaccaagagacaaatatatccctaaagagcatctatggcctcacatccaggaatttgttgatggcgcacttgtccatatcatgcagatgtccaaggtccttggagaacaaattggtagtgggcaaccagtatggcctgttgttatacatggacactatgctgatgctggtgattctgctgctttactgtctggggcactcaatgtacccatggtattcactggtcattctcttggcagagataagttggaccagattttgaagcaagggcgtcaaaccagggatgaaataaatgcaacctataagataatgcgtcgaattgaggccgaggaactttgccttgatacatctgaaatcataattacaagtaccaggcaagaaatagaacagcaatggggattatatgatggttttgatctaactatggcccggaaactcagagcaagaataaggcgtggtgtgagctgctttggtcgttacatgccccgtatgattgcaatccctcctggcatggagtttagtcatatagcaccacatgatgttgacctcgacagtgaggaaggaaatggagatggctcaggttcaccagatccacctatttgggctgatataatgcgcttcttctcaaacccccggaagccaatgattcttgctcttgctcgtccggatccgaagaagaatatcactactctagtcaaagcatttggtgaacatcgtgaactgagaaatttagcaaatcttacactgatcatggggaatcgtgatgtcattgatgaaatgtcaagcacaaatgcagctgttttgacttcagcactcaagttaattgataaatatgatctatatggacaagtggcataccccaagcaccataagcaatctgaagttcctgatatttatcgtttagctgcgagaacaaaaggagtttttatcaattgtgcattggttgaaccatttggactcaccttgattgaggctgctgcatatggtctacccatggttgccacccgaaatggtgggcctgtggacatacatcgggttcttgataatggaattcttgttgacccccacaatcaaaatgaaatagctgaggcactttataagcttgtgtcagataagcacttgtggtcacaatgtcgccagaatggtctgaaaaacatccataaattttcatggcctgaacattgccagaactatttggcacgtgtagtcactctcaagcctagacatccccgctggcaaaagaatgatgttgcagctgaaatatctgaagcagattcacccgaggactctctgagggatattcatgacatatcacttaacttaaagctttccttggacagtgaaaaatcaggcagcaaagaagggaattcaaatgctttgagaaggcattttgaggatgcagcgcaaaagttgtcaggtgttaatgacatcaaaaaggatgtgccaggtgagaatggtaagtggtcgtcattgcgtaggaggaagcacatcattgtaattgctgtagactctgtgcaagatgcagactttgttcaggttattaaaaatatttttgaagcttcaagaaatgagagatcaagtggtgctgttggttttgtgttgtcaacggctagagcaatatcagagttacatactttgcttatatctggagggatagaagctagtgactttgatgccttcatatgcaacagtggcagtgatctttgttatccatcttcaagctctgaggacatgcttaaccctgctgagctcccattcatgattgatcttgattatcactcccaaattgaatatcgctggggaggagaaggtttaaggaagacattaattcgttgggcagctgagaaaaacaaagaaagtggacaaaaaatatttattgaggatgaagaatgctcatccacctactgcatttcatttaaagtgtccaatactgcagctgcacctcctgtgaaggagattaggaggacaatgagaatacaagcactgcgttgccatgttttgtacagccatgatggtagcaagttgaatgtaattcctgttttggcttctcgctcacaggctttaaggtatttgtatatccgatggggggtagagctgtcaaacatcaccgtgattgtcggtgagtgtggtgacacagattatgaaggactacttggaggcgtgcacaaaactatcatactcaaaggctcgttcaatactgctccaaaccaagttcatgctaacagaagctattcatcccaagatgttgtatcctttgacaaacaaggaattgcttcaattgagggatatggtccagacaatctaaagtcagctctacggcaatttggtatattgaaagactaaatctttgatctttgctggtcagcagaggaatcaaagcaggtatcgtgagacagttttgctacaaatttttttctaatgttgagagatatttcacacccaagatcggcattcgaagtgcaaagttgaaattacatgtgtgcttttgaaacttaaagggcaaatacacaaaccgacacttatctacatggttttccacccatcacagtgcatcttgcttatctacttaaacgcactcgtttggtctcaaataatactgccacagcatgcagggaccatctctttgtttctttgatgtctcatggcacaattattgggctgcttagttgctatattctaaaaaagaatcttttttttttggtgtagtaggaatgtaggatcgaggagagtgacaggacttcccctctgtgcacttcgccgaaaagtaataatgggattgctatgcatggcccttgttgtacactagaaaattgggcacgcaaacttgtgtcagtttttccgctgttgcgaaattcagtgatggtgtttttgtaactataccaacctgtgtcagttttgccgttgttgcaaaactcagtgatggtgttttttgtaattattatacatccgaataataagactggtgtttccagacagactatgcaagctaaggggaaatcacgattttcctagatcaaatatgtaatatgttcttttccgatgcatt

SEQ ID NO: 43403 - DNA, 3737 bp, Zea Mays
ataaacactgtacgagatcactgaccataatcattagcaatttagcattagcctcagctggcgtaccgtcgagtccattcccacctttctaccccttccagaaacctccaggatccgactccaatcgaatcgccaaagcagacaggggcgctcgcgggggcgccgagctcgacggggcgagatggccgggaacgactggatcaacagctacctggaggctattctggacgctggcggggccgcgggagatctctcggcagccgcaggcagcggggacggccgcgacgggacggccgtggagaagcgggataagtcgtcgctgatgctccgagagcgcggccggttcagccccgcgcgatacttcgtcgaggaggtcatctccggcttcgacgagaccgacctctacaagacctgggtccgcacctcggctatgaggagtccccaggagcggaacacgcggctggagaacatgtcgtggaggatctggaacctcgccaggaagaagaagcagatagaaggagaggaagcctcacgattgtctaaacaacgcatggaatttgagaaagctcgtcaatatgctgctgatttgtctgaagacctatctgaaggagaaaagggagaaacaaataatgaaccatctattcatgatgagagcatgaggacgcggatgccaaggattggttcaactgatgctattgatacatgggcaaaccagcacaaagataaaaagttgtacatagtattgataagcattcatggtcttatacgcggggagaatatggagctgggacgtgattcagatacaggtggtcaggtgaaatatgttgtagaacttgctagggctttaggttcaacaccaggagtatacagagtggatctactaacaaggcagatttctgcacctgatgttgattggagttatggggaacctactgagatgctcagtccaataagttcagaaaactttgggcttgagctgggcgaaagcagtggtgcctatattgtccggataccattcggaccaagagacaaatatatccctaaagagcatctatggcctcacatccaggaatttgttgatggcgcacttgtccatatcatgcagatgtccaaggtccttggagaacaaattggtagtgggcaaccagtatggcctgttgttatacatggacactatgctgatgctggtgattctgctgctttactgtctggggcactcaatgtacccatggtattcactggtcattctcttggcagagataagttggaccagattttgaagcaagggcgtcaaaccagggatgaaataaatgcaacctataagataatgcgtcgaattgaggccgaggaactttgccttgatacatctgaaatcataattacaagtaccaggcaagaaatagaacagcaatggggattatatgatggttttgatctaactatggcccggaaactcagagcaagaataaggcgtggtgtgagctgctttggtcgttacatgccccgtatgattgcaatccctcctggcatggagtttagtcatatagcaccacatgatgttgacctcgacagtgaggaaggaaatggagatggctcaggttcaccagatccacctatttgggctgatataatgcgcttcttctcaaacccccggaagccaatgattcttgctcttgctcgtccggatccgaagaagaatatcactactctagtcaaagcatttggtgaacatcgtgaactgagaaatttagcaaatcttacactgatcatggggaatcgtgatgtcattgatgaaatgtcaagcacaaatgcagctgttttgacttcagcactcaagttaattgataaatatgatctatatggacaagtggcataccccaagcaccataagcaatctgaagttcctgatatttatcgtttagctgcgagaacaaaaggagtttttatcaattgtgcattggttgaaccatttggactcaccttgattgaggctgctgcatatggtctacccatggttgccacccgaaatggtgggcctgtggacatacatcgggttcttgataatggaattcttgttgacccccacaatcaaaatgaaatagctgaggcactttataagcttgtgtcagataagcacttgtggtcacaatgtcgccagaatggtctgaaaaacatccataaattttcatggcctgaacattgccagaactatttggcacgtgtagtcactctcaagcctagacatccccgctggcaaaagaatgatgttgcagctgaaatatctgaagcagattcacccgaggactctctgagggatattcatgacatatcacttaacttaaagctttccttggacagtgaaaaatcaggcagcaaagaagggaattcaaatgctttgagaaggcattttgaggatgcagcgcaaaagttgtcaggtgttaatgacatcaaaaaggatgtgccaggtgagaatggtaagtggtcgtcattgcgtaggaggaagcacatcattgtaattgctgtagactctgtgcaagatgcagactttgttcaggttattaaaaatatttttgaagcttcaagaaatgagagatcaagtggtgctgttggttttgtgttgtcaacggctagagcaatatcagagttacatactttgcttatatctggagggatagaagctagtgactttgatgccttcatatgcaacagtggcagtgatctttgttatccatcttcaagctctgaggacatgcttaaccctgctgagctcccattcatgattgatcttgattatcactcccaaattgaatatcgctggggaggagaaggtttaaggaagacattaattcgttgggcagctgagaaaaacaaagaaagtggacaaaaaatatttattgaggatgaagaatgctcatccacctactgcatttcatttaaagtgtccaatactgcagctgcacctcctgtgaaggagattaggaggacaatgagaatacaagcactgcgttgccatgttttgtacagccatgatggtagcaagttgaatgtaattcctgttttggcttctcgctcacaggctttaaggtatttgtatatccgatggggggtagagctgtcaaacatcaccgtgattgtcggtgagtgtggtgacacagattatgaaggactacttggaggcgtgcacaaaactatcatactcaaaggctcgttcaatactgctccaaaccaagttcatgctaacagaagctattcatcccaagatgttgtatcctttgacaaacaaggaattgcttcaattgagggatatggtccagacaatctaaagtcagctctacggcaatttggtatattgaaagactaaatctttgatctttgctggtcagcagaggaatcaaagcaggaatgtaggatcgaggagagtgacaggacttcccctctgtgcacttcgccgaaaagtaataatgggattgctatgcatggcccttgttgtacactagaaaattgggcacgcaaacttgtgtcagtttttccgctgttgcgaaattcagtgatggtgtttttgtaactataccaacctgtgtcagttttgccgttgttgcaaaactcagtgatggtgttttttgtaattattatacatccgaataataagactggtgtttccagacagactatgcaagctaaggggaaatcacgattttcctagatcaaatatgtaatatgttcttttccgatgcatt

SEQ ID NO: 43404 - DNA, 3740 bp, Zea Mays
ataaacactgtacgagatcactgaccataatcattagcaatttagcattagcctcagctggcgtaccgtcgagtccattcccacctttctaccccttccagaaacctccaggatccgactccaatcgaatcgccaaagcagacaggggcgctcgcgggggcgccgagctcgacggggcgagatggccgggaacgactggatcaacagctacctggaggctattctggacgctggcggggccgcgggagatctctcggcagccgcaggcagcggggacggccgcgacgggacggccgtggagaagcgggataagtcgtcgctgatgctccgagagcgcggccggttcagccccgcgcgatacttcgtcgaggaggtcatctccggcttcgacgagaccgacctctacaagacctgggtccgcacctcggctatgaggagtccccaggagcggaacacgcggctggagaacatgtcgtggaggatctggaacctcgccaggaagaagaagcagatagaaggagaggaagcctcacgattgtctaaacaacgcatggaatttgagaaagctcgtcaatatgctgctgatttgtctgaagacctatctgaaggagaaaagggagaaacaaataatgaaccatctattcatgatgagagcatgaggacgcggatgccaaggattggttcaactgatgctattgatacatgggcaaaccagcacaaagataaaaagttgtacatagtattgataagcattcatggtcttatacgcggggagaatatggagctgggacgtgattcagatacaggtggtcaggtgaaatatgttgtagaacttgctagggctttaggttcaacaccaggagtatacagagtggatctactaacaaggcagatttctgcacctgatgttgattggagttatggggaacctactgagatgctcagtccaataagttcagaaaactttgggcttgagctgggcgaaagcagtggtgcctatattgtccggataccattcggaccaagagacaaatatatccctaaagagcatctatggcctcacatccaggaatttgttgatggcgcacttgtccatatcatgcagatgtccaaggtccttggagaacaaattggtagtgggcaaccagtatggcctgttgttatacatggacactatgctgatgctggtgattctgctgctttactgtctggggcactcaatgtacccatggtattcactggtcattctcttggcagagataagttggaccagattttgaagcaagggcgtcaaaccagggatgaaataaatgcaacctataagataatgcgtcgaattgaggccgaggaactttgccttgatacatctgaaatcataattacaagtaccaggcaagaaatagaacagcaatggggattatatgatggttttgatctaactatggcccggaaactcagagcaagaataaggcgtggtgtgagctgctttggtcgttacatgccccgtatgattgcaatccctcctggcatggagtttagtcatatagcaccacatgatgttgacctcgacagtgaggaaggaaatggagatggctcaggttcaccagatccacctatttgggctgatataatgcgcttcttctcaaacccccggaagccaatgattcttgctcttgctcgtccggatccgaagaagaatatcactactctagtcaaagcatttggtgaacatcgtgaactgagaaatttagcaaatcttacactgatcatggggaatcgtgatgtcattgatgaaatgtcaagcacaaatgcagctgttttgacttcagcactcaagttaattgataaatatgatctatatggacaagtggcataccccaagcaccataagcaatctgaagttcctgatatttatcgtttagctgcgagaacaaaaggagtttttatcaattgtgcattggttgaaccatttggactcaccttgattgaggctgctgcatatggtctacccatggttgccacccgaaatggtgggcctgtggacatacatcgggttcttgataatggaattcttgttgacccccacaatcaaaatgaaatagctgaggcactttataagcttgtgtcagataagcacttgtggtcacaatgtcgccagaatggtctgaaaaacatccataaattttcatggcctgaacattgccagaactatttggcacgtgtagtcactctcaagcctagacatccccgctggcaaaagaatgatgttgcagctgaaatatctgaagcagattcacccgaggactctctgagggatattcatgacatatcacttaacttaaagctttccttggacagtgaaaaatcaggcagcaaagaagggaattcaaatgctttgagaaggcattttgaggatgcagcgcaaaagttgtcaggtgttaatgacatcaaaaaggatgtgccaggtgagaatggtaagtggtcgtcattgcgtaggaggaagcacatcattgtaattgctgtagactctgtgcaagatgcagactttgttcaggttattaaaaatatttttgaagcttcaagaaatgagagatcaagtggtgctgttggttttgtgttgtcaacggctagagcaatatcagagttacatactttgcttatatctggagggatagaagctagtgactttgatgccttcatatgcaacagtggcagtgatctttgttatccatcttcaagctctgaggacatgcttaaccctgctgagctcccattcatgattgatcttgattatcactcccaaattgaatatcgctggggaggagaaggtttaaggaagacattaattcgttgggcagctgagaaaaacaaagaaagtggacaaaaaatatttattgaggatgaagaatgctcatccacctactgcatttcatttaaagtgtccaatactgcagctgcacctcctgtgaaggagattaggaggacaatgagaatacaagcactgcgttgccatgttttgtacagccatgatggtagcaagttgaatgtaattcctgttttggcttctcgctcacaggctttaaggtatttgtatatccgatggggggtagagctgtcaaacatcaccgtgattgtcggtgagtgtggtgacacagattatgaaggactacttggaggcgtgcacaaaactatcatactcaaaggctcgttcaatactgctccaaaccaagttcatgctaacagaagctattcatcccaagatgttgtatcctttgacaaacaaggaattgcttcaattgagggatatggtccagacaatctaaagtcagctctacggcaatttggtatattgaaagactaaatctttgatctttgctggtcagcagaggaatcaaagcagtaggaatgtaggatcgaggagagtgacaggacttcccctctgtgcacttcgccgaaaagtaataatgggattgctatgcatggcccttgttgtacactagaaaattgggcacgcaaacttgtgtcagtttttccgctgttgcgaaattcagtgatggtgtttttgtaactataccaacctgtgtcagttttgccgttgttgcaaaactcagtgatggtgttttttgtaattattatacatccgaataataagactggtgtttccagacagactatgcaagctaaggggaaatcacgattttcctagatcaaatatgtaatatgttcttttccgatgcatt

SEQ ID NO: 43405 - DNA, 2408 bp, Zea Mays
ataaacactgtacgagatcactgaccataatcattagcaatttagcattagcctcagctggcgtaccgtcgagtccattcccacctttctaccccttccagaaacctccaggatccgactccaatcgaatcgccaaagcagacaggggcgctcgcgggggcgccgagctcgacggggcgagatggccgggaacgactggatcaacagctacctggaggctattctggacgctggcggggccgcgggagatctctcggcagccgcaggcagcggggacggccgcgacgggacggccgtggagaagcgggataagtcgtcgctgatgctccgagagcgcggccggttcagccccgcgcgatacttcgtcgaggaggtcatctccggcttcgacgagaccgacctctacaagacctgggtccgcacctcggctatgaggagtccccaggagcggaacacgcggctggagaacatgtcgtggaggatctggaacctcgccaggaagaagaagcagatagaaggagaggaagcctcacgattgtctaaacaacgcatggaatttgagaaagctcgtcaatatgctgctgatttgtctgaagacctatctgaaggagaaaagggagaaacaaataatgaaccatttggactcaccttgattgaggctgctgcatatggtctacccatggttgccacccgaaatggtgggcctgtggacatacatcgggttcttgataatggaattcttgttgacccccacaatcaaaatgaaatagctgaggcactttataagcttgtgtcagataagcacttgtggtcacaatgtcgccagaatggtctgaaaaacatccataaattttcatggcctgaacattgccagaactatttggcacgtgtagtcactctcaagcctagacatccccgctggcaaaagaatgatgttgcagctgaaatatctgaagcagattcacccgaggactctctgagggatattcatgacatatcacttaacttaaagctttccttggacagtgaaaaatcaggcagcaaagaagggaattcaaatgctttgagaaggcattttgaggatgcagcgcaaaagttgtcaggtgttaatgacatcaaaaaggatgtgccaggtgagaatggtaagtggtcgtcattgcgtaggaggaagcacatcattgtaattgctgtagactctgtgcaagatgcagactttgttcaggttattaaaaatatttttgaagcttcaagaaatgagagatcaagtggtgctgttggttttgtgttgtcaacggctagagcaatatcagagttacatactttgcttatatctggagggatagaagctagtgactttgatgccttcatatgcaacagtggcagtgatctttgttatccatcttcaagctctgaggacatgcttaaccctgctgagctcccattcatgattgatcttgattatcactcccaaattgaatatcgctggggaggagaaggtttaaggaagacattaattcgttgggcagctgagaaaaacaaagaaagtggacaaaaaatatttattgaggatgaagaatgctcatccacctactgcatttcatttaaagtgtccaatactgcagctgcacctcctgtgaaggagattaggaggacaatgagaatacaagcactgcgttgccatgttttgtacagccatgatggtagcaagttgaatgtaattcctgttttggcttctcgctcacaggctttaaggtatttgtatatccgatggggggtagagctgtcaaacatcaccgtgattgtcggtgagtgtggtgacacagattatgaaggactacttggaggcgtgcacaaaactatcatactcaaaggctcgttcaatactgctccaaaccaagttcatgctaacagaagctattcatcccaagatgttgtatcctttgacaaacaaggaattgcttcaattgagggatatggtccagacaatctaaagtcagctctacggcaatttggtatattgaaagactaaatctttgatctttgctggtcagcagaggaatcaaagcagtaggaatgtaggatcgaggagagtgacaggacttcccctctgtgcacttcgccgaaaagtaataatgggattgctatgcatggcccttgttgtacactagaaaattgggcacgcaaacttgtgtcagtttttccgctgttgcgaaattcagtgatggtgtttttgtaactataccaacctgtgtcagttttgccgttgttgcaaaactcagtgatggtgttttttgtaattattatacatccgaataataagactggtgtttccagacagactatgcaagctaaggggaaatcacgattttcctagatcaaatatgtaatatgttcttttccgatgcatt

SEQ ID NO: 43406 - DNA, 315 bp, Zea Mays
atgtggcagcaaaaaggatacctggaggtagtcatctcagagtgtcccttcaacctttttcttgatttcgagggcggcttggacgacgttccctcttgtaatgatcccaaccttacaggaagaagctgtctcagcgcaacagaacagaaggaaaaagaagcacaaaggaatcgcaacagtgccctcaccagtttgcctgagctatcgaccactggaagcctgcggtacttagtcacaaggagtaacctgcagaacagaccacttttagaggataataatattgaagatgtccaggagaaagcaaaggagaagtag

SEQ ID NO: 43407 - DNA, 277 bp, Zea Mays
aaaccaaaactatctagcaaaaacacgatgtactaggagatgttcaatggtctcttcatgttgatcacatatggggtagcgctatacatccaattcacaagcctcgagatttaacacctcttggcaagaaattttgaatagtctttcaagattatcctcgagacaagaaattttgtattatggataatcttttggcgcatctttgagtacgcatcctaccagacgactatccataatacacatgtaagacatgaaattttgaaatttgacatccaat

SEQ ID NO: 43408 - DNA, 142 bp, Zea Mays
ccttgttataaacaaaatcttcgtctctgcatggacagtacggtgagatgaacagtatagccacattacaatccaggtttgaagacagaaaagagcccagcagatgatcttacaggtcagattcgatgcattttatcctatc

SEQ ID NO: 43409 - DNA, 4317 bp, Zea Mays
atgggcgccgctcgtacggcggcgccggtctttatgctgctgctgctgctccacctgtcgccgcgcgcggttgctgccgggacaggcgacgaggcagcggcgctgctcgcgttcaagcgcgcctccgtagccgccgaccaggccggcaggctcgcgagctgggcggagcccaactcgacctccggctccgcctcgccgtgcgagtgggccggcgtctcgtgcgtgggcggccacgtccgtgcgctcgacctcagcggcatgtccctcgtcggccgcctccacctagacgagctgctcgcgctcccggcgctccggagcgtcctcctcggtggcaacgccttccacggcgacctcacccaccgggccccgccgcggtgcgcgctcgtggacgtggacctgtcgtcgaacgctctcaacgggacgctgccccgggcgttcctggcgtcctgcagcagcctgcggctgctgaacctgtccggcaacaccttcaccggcggaggcggcttcccgttcgcgtcgtcgctgcggacgctcgacgtgtccaggaacgagctgtcagacgccggcttgctgaactactccctgagtgcctgccacggcattcggcacctgaacctctcggccaaccagctcaccggagagctcccaccacggttcgcgcagtgcagccaggtttctgttcttgatctctcagggaacctcatgtccggcgccctccccggcaggctcttggccacggcgccggccagtttgacacgcctgagcatcgctgggaacaacttctccggggacatctccaggtatcagtttggtggctgtgcaaatctctccgtgcttgatctttcgtacaacagactgagcgccaccatagggttgccaccgagtcttgccaattgccaccacctcagggaactagacatgtctgggaacaagattctgtcgggccgagtaccggagttcctggggggcttccgagcattgcggcgactcggacttgccgggaacaacttcaccgaggaaatcccggatgagctgagcctcctgtgcggaacgctggttcagctagacttgtcaagcaaccaattggttggcggtttgccagcgagcttctcaggatgcagatcgcttgaggtgctcgatctgggtagcaaccagctgtcaggtgactttgtgatcactgtgatcagcaagatctcttctctgcgtgtgctgaggctgccgttcaacaatatcacaggcacaaatcctctgcccacgctagcagctggctgccctttgcttgaagtcattgatctcgggtctaacatgctggaaggagagatcatgcccgagctgtgttcatctttgccatcactcagaaagctgctcctacccaacaactacatcaatggaaccgtgccgccctcactcggcaactgcagtaatctggagtcactggacctcagcttcaacctcatggttggtccgatcacgcctgaagtactgttgcttcctaagcttgttgatttggtcatgtgggcaaacagtctctccggtgagataccagacacgctatgctccaacagcacagcactgaagacactggtcataagctacaacaacataaccggagtgatccctgtctccatcaccaggtgcgtgaatctcatatggctgtcacttgccggcaacagcatgaccgggagtgtccccgccggcttcgggaacctccagaagctcgccattctacagctgcacaggaactcactctctggtcctgtgccagcagagcttggtcgctgcagcaacctcatctggcttgatctcaacagcaacaacttctccggtgcgataccgccgcagctagcagcacaggcagggctcatcactggaggcatggtttctgggaagcagttcgcgttcctgaggaatgaggctggcaacatctgcccaggtgctggagtgctgttcgagttctttgacatccgtccggagcggctggcccagttccctgctgtgcactcgtgtgcctccacgaggatatacactgggatgacagtgtacaccttcaaccaaagtgggagcatgatattccttgatctctcgtacaacagcctcacaggcacaattccggcgagcctggggaacatgacgtatcttgatgtccttaacctggggcataatgaccttaccggtgcaattccagatgcgttcacagggttgaaggcgattggtgtccttgacctctcgcacaatcacctcaccggtgtcatccctgctggactggggtgtttaaatttcctagctgacttcgacgtctccaacaacaacctcactggtgagatacccacgtcagggcagctcagtacatttccagcatcccgttttgagaacaactccggcatctgtggcatccccttggatccttgcacgcacaatgccagcactggaggtgttcctcaaaacccctctaacgtgcggaggaagtttctcgaagagttcgtgctccttgcagtgtcgctcaccgtgctcatggtggccaccttggttgtcactgcatacaagctcaggaggccccgtgggagcaaaactgaagagattcaaactgctgggtatagcgacagccccgcatcgtccaccagtacaagctggaagctttctggttccaaagagccactgagcatcaatctggcgatatttgagaatccgttgaggaaactaacatatgcccacctgcatgaggctaccaatggcttcagctcggaagctcttgttggcacaggaggattcggtgaggtttacaaggctaggctcatggatggcagcgttgtggctgtcaagaagctgatgcatttcacaggccagggcgaccgggagttcactgcagagatggagaccattggcaagatcaaacatcgcaatcttgtgccgttgctaggctactgcaaagttggcgacgaacgtctgcttgtgtacgagtacatgaataatggaagcctggatgtcttgctccatgaaagggacaagactgatgtgggtcttgattgggcaacaaggaagaagattgcagttggctcggcaagaggactggccttcctccaccatagttgcatcccacacatcatacaccgggacatgaagtcaagcaacgtgcttcttgacgataatctcgatgcctacgtatcggatttcggaatggcgcggctcgtgaatgctgttgactcacatctaaccgtgagcaagctcttaggaacacctggttatgtggctcccgagtacttccagtcggttatttgcacaactaagggcgacgtctacagctatggcgttgttcttctggagcttctctcagggaaaaaaccaatcaatccgactgaattcggcgacaataatctcatcgactgggcaaagcagatggttaaggaggaccggtgcagcgagatatttgatcctatattgaccgacacaaaatcctgcgagtcggagctgtaccagtatctggcgattgcttgccagtgcttggacgatcaacctagtcgcagacctacgatgatccaggtggtgcttggttggtgggatgaagcaggatgggctgtcgattctgaatggaagctgctggcgaagtgagcagcggaagaaccaatattctttgcattctggtaacagttgatccattttccttacctgttgctctgtggtgcgggacctgatttttattccgtttgatgatctgaacaagcatgcaattacatatctgaatttgttccttacagcatcctccaaggcaagaggtgtgtggcagataaaatctcttgcggaagatcttatctatcctcgttcatacctggcagaccggcagcaagtactcccctattttcctcaaaagaggcagggcgatgagacgtcactttcagaccatcacgcatgcttgaggtgaaaggatctggtgttaggcgagctgtgattcgttccttgacgtgccgttcttcgcacgcgcgcgcgtgcagatgtgtcacgcccatcagtgttggatcggatggcatctcgtcctaaacaagtggcgactggcgagctagttgacggcaggtcaagcacggcatccgatccttcgtcccctgatggctgatgctgcgtcaggccggccgtagaagcgtgtgcgcggcgactgcatgcgtggcaccggtaggtacggggctgaagactttcaggacgccggcctttagttttgggatggatactgaggaaattataagtgatcttctattcttcttaaccttagcttttatgcctgaggaaatcggtttgcgttgcactgacgagtatttaaaatcggcaacg

SEQ ID NO: 43410 - DNA, 4673 bp, Zea Mays
ccggccggcacagcagcctgctttgctcgcgatcgaccagtgttttcctggttgctcatcccctccaccccaccttgtggccccgtgtccggctctccaaccgcaacggcgacggcgaggagttccaccccttggccgcctatgaaatgatgtgctcttgatgcggtttacggccacgaagaaattactgaaccgaaccaaggcgcactcgaattccctcaggattaaccccgcttcgatgtgaagcgacgcagagcagagcagagcgccaatttatggtcttctccttctccccatcatctggacagcaggaagaaggcatccatgggcgccgctcgtacggcggcgccggtctttatgctgctgctgctgctccacctgtcgccgcgcgcggttgctgccgggacaggcgacgaggcagcggcgctgctcgcgttcaagcgcgcctccgtagccgccgaccaggccggcaggctcgcgagctgggcggagcccaactcgacctccggctccgcctcgccgtgcgagtgggccggcgtctcgtgcgtgggcggccacgtccgtgcgctcgacctcagcggcatgtccctcgtcggccgcctccacctagacgagctgctcgcgctcccggcgctccggagcgtcctcctcggtggcaacgccttccacggcgacctcacccaccgggccccgccgcggtgcgcgctcgtggacgtggacctgtcgtcgaacgctctcaacgggacgctgccccgggcgttcctggcgtcctgcagcagcctgcggctgctgaacctgtccggcaacaccttcaccggcggaggcggcttcccgttcgcgtcgtcgctgcggacgctcgacgtgtccaggaacgagctgtcagacgccggcttgctgaactactccctgagtgcctgccacggcattcggcacctgaacctctcggccaaccagctcaccggagagctcccaccacggttcgcgcagtgcagccaggtttctgttcttgatctctcagggaacctcatgtccggcgccctccccggcaggctcttggccacggcgccggccagtttgacacgcctgagcatcgctgggaacaacttctccggggacatctccaggtatcagtttggtggctgtgcaaatctctccgtgcttgatctttcgtacaacagactgagcgccaccatagggttgccaccgagtcttgccaattgccaccacctcagggaactagacatgtctgggaacaagattctgtcgggccgagtaccggagttcctggggggcttccgagcattgcggcgactcggacttgccgggaacaacttcaccgaggaaatcccggatgagctgagcctcctgtgcggaacgctggttcagctagacttgtcaagcaaccaattggttggcggtttgccagcgagcttctcaggatgcagatcgcttgaggtgctcgatctgggtagcaaccagctgtcaggtgactttgtgatcactgtgatcagcaagatctcttctctgcgtgtgctgaggctgccgttcaacaatatcacaggcacaaatcctctgcccacgctagcagctggctgccctttgcttgaagtcattgatctcgggtctaacatgctggaaggagagatcatgcccgagctgtgttcatctttgccatcactcagaaagctgctcctacccaacaactacatcaatggaaccgtgccgccctcactcggcaactgcagtaatctggagtcactggacctcagcttcaacctcatggttggtccgatcacgcctgaagtactgttgcttcctaagcttgttgatttggtcatgtgggcaaacagtctctccggtgagataccagacacgctatgctccaacagcacagcactgaagacactggtcataagctacaacaacataaccggagtgatccctgtctccatcaccaggtgcgtgaatctcatatggctgtcacttgccggcaacagcatgaccgggagtgtccccgccggcttcgggaacctccagaagctcgccattctacagctgcacaggaactcactctctggtcctgtgccagcagagcttggtcgctgcagcaacctcatctggcttgatctcaacagcaacaacttctccggtgcgataccgccgcagctagcagcacaggcagggctcatcactggaggcatggtttctgggaagcagttcgcgttcctgaggaatgaggctggcaacatctgcccaggtgctggagtgctgttcgagttctttgacatccgtccggagcggctggcccagttccctgctgtgcactcgtgtgcctccacgaggatatacactgggatgacagtgtacaccttcaaccaaagtgggagcatgatattccttgatctctcgtacaacagcctcacaggcacaattccggcgagcctggggaacatgacgtatcttgatgtccttaacctggggcataatgaccttaccggtgcaattccagatgcgttcacagggttgaaggcgattggtgtccttgacctctcgcacaatcacctcaccggtgtcatccctgctggactggggtgtttaaatttcctagctgacttcgacgtctccaacaacaacctcactggtgagatacccacgtcagggcagctcagtacatttccagcatcccgttttgagaacaactccggcatctgtggcatccccttggatccttgcacgcacaatgccagcactggaggtgttcctcaaaacccctctaacgtgcggaggaagtttctcgaagagttcgtgctccttgcagtgtcgctcaccgtgctcatggtggccaccttggttgtcactgcatacaagctcaggaggccccgtgggagcaaaactgaagagattcaaactgctgggtatagcgacagccccgcatcgtccaccagtacaagctggaagctttctggttccaaagagccactgagcatcaatctggcgatatttgagaatccgttgaggaaactaacatatgcccacctgcatgaggctaccaatggcttcagctcggaagctcttgttggcacaggaggattcggtgaggtttacaaggctaggctcatggatggcagcgttgtggctgtcaagaagctgatgcatttcacaggccagggcgaccgggagttcactgcagagatggagaccattggcaagatcaaacatcgcaatcttgtgccgttgctaggctactgcaaagttggcgacgaacgtctgcttgtgtacgagtacatgaataatggaagcctggatgtcttgctccatgaaagggacaagactgatgtgggtcttgattgggcaacaaggaagaagattgcagttggctcggcaagaggactggccttcctccaccatagttgcatcccacacatcatacaccgggacatgaagtcaagcaacgtgcttcttgacgataatctcgatgcctacgtatcggatttcggaatggcgcggctcgtgaatgctgttgactcacatctaaccgtgagcaagctcttaggaacacctggttatgtggctcccgagtacttccagtcggttatttgcacaactaagggcgacgtctacagctatggcgttgttcttctggagcttctctcagggaaaaaaccaatcaatccgactgaattcggcgacaataatctcatcgactgggcaaagcagatggttaaggaggaccggtgcagcgagatatttgatcctatattgaccgacacaaaatcctgcgagtcggagctgtaccagtatctggcgattgcttgccagtgcttggacgatcaacctagtcgcagacctacgatgatccaggtcatggcaatgttcagtgagtttcagattgactctggcagcttcttcttggacggcttctcgctcgattcagatagaggaatcatctgaaaaaaaatgtgtaaatgttattgatccctgcagattatatgattcactggatttaggtggtgcttggttggtgggatgaagcaggatgggctgtcgattctgaatggaagctgctggcgaagtgagcagcggaagaaccaatattctttgcattctgcatcctccaaggcaagaggtgtgtggcagataaaatctcttgcggaagatcttatctatcctcgttcatacctggcagaccggcagcaagtactcccctattttcctcaaaagaggcagggcgatgagacgtcactttcagaccatcacgcatgcttgaggtgaaaggatctggtgttaggcgagctgtgattcgttccttgacgtgccgttcttcgcacgcgcgcgcgtgcagatgtgtcacgcccatcagtgttggatcggatggcatctcgtcctaaacaagtggcgactggcgagctagttgacggcaggtcaagcacggcatccgatccttcgtcccctgatggctgatgctgcgtcaggccggccgtagaagcgtgtgcgcggcgactgcatgcgtggcaccggtaggtacggggctgaagactttcaggacgccggcctttagttttgggatggatactgaggaaattataagtgatcttctattcttcttaaccttagcttttatgcctgaggaaatcggtttgcgttgcactgacgagtatttaaaatcggcaacg

SEQ ID NO: 43411 - DNA, 941 bp, Zea Mays
ctgctccatttccgggtcatttttattttttggtttcgtccggccggcacagcagcctgctttgctcgcgatcgaccagtgttttcctggttgctcatcccctccaccccaccttgtggccccgtgtccggctctccaaccgcaacggcgacggcgaggagttccaccccttggccgcctatgaaatgatgtgctcttgatgcggtttacggccacgaagaaattactgaaccgaaccaaggtggtgcttggttggtgggatgaagcaggatgggctgtcgattctgaatggaagctgctggcgaagtgagcagcggaagaaccaatattctttgcattctgcatgcaattacatatctgaatttgttccttacagcatcctccaaggcaagaggtgtgtggcagataaaatctcttgcggaagatcttatctatcctcgttcatacctggcagaccggcagcaagtactcccctattttcctcaaaagaggcagggcgatgagacgtcactttcagaccatcacgcatgcttgaggtgaaaggatctggtgttaggcgagctgtgattcgttccttgacgtgccgttcttcgcacgcgcgcgcgtgcagatgtgtcacgcccatcagtgttggatcggatggcatctcgtcctaaacaagtggcgactggcgagctagttgacggcaggtcaagcacggcatccgatccttcgtcccctgatggctgatgctgcgtcaggccggccgtagaagcgtgtgcgcggcgactgcatgcgtggcaccggtaggtacggggctgaagactttcaggacgccggcctttagttttgggatggatactgaggaaattataagtgatcttctattcttcttaaccttagcttttatgcctgaggaaatcggtttgcgttgcactgacgagtatttaaaatcggcaacg

SEQ ID NO: 43412 - DNA, 853 bp, Zea Mays
ggtttggaggtcttagtatgggaaggagtgggcgacatttttgtgatttggacattgtttggtcataattcttgcaagggaatctggtttggggcttgagctttctgatattcctgtacgaagtcttgtgccagaggcacttaagtcatgtacctcagccgatgaatacatgcagaagttaccatcttttgacgaggattgggcaagagagaggaaaaatgctgaagctgcgggagaagtcctgcggtatgttggagtggtggatgtggtcaacaagaaggggcaggtggagctgcgagcctacaagagggaccacccgttcgcgcagctatctggttccgacaacatcatagccttcaccacctcgaggtacaaggatcagccactgatcgtgcgaggtccgggggctggtgcagaagtgactgcaggaggcgtcttctgcgacatactgcgcctgtcttcctaccttggtgccccctcgtagtctgtcaaggttttgcggtgccgtggtgttgtgttgctgctctactactggttttttttgttgttgttgttgttagtgcttggaatagctggagtaagtatggattaagtgagttctggggtgttaagggttgggtgtcttagttagaaggtcgtattggagggaatggaatccgttcaccgttcttgcgtgttgcaataatcttgtgtggagtctccaggtttgttcggttgctgacagtaagccaagccaaaatggcgagtctagtgaagaaccaaataaaaaaaaggctgggctgtaaggaatgtatccacacgttacttcattggtgtcaccataaatatatacctggatcatttggcttggttt

SEQ ID NO: 43413 - DNA, 943 bp, Zea Mays
ttcgtacatttttgttcatttgttaagttatatttttaacaacttcgaaggagcaagaacctttagtgatgttgttgctgaagcaaaaaaagcaggatacacagaaccagatccaagagatgatctgtctggtactgatgttgccaggaaggtcataattcttgcaagggaatctggtttggggcttgagctttctgatattcctgtacgaagtcttgtgccagaggcacttaagtcatgtacctcagccgatgaatacatgcagaagttaccatcttttgacgaggattgggcaagagagaggaaaaatgctgaagctgcgggagaagtcctgcggtatgttggagtggtggatgtggtcaacaagaaggggcaggtggagctgcgagcctacaagagggaccacccgttcgcgcagctatctggttccgacaacatcatagccttcaccacctcgaggtacaaggatcagccactgatcgtgcgaggtccgggggctggtgcagaagtgactgcaggaggcgtcttctgcgacatactgcgcctgtcttcctaccttggtgccccctcgtagtctgtcaaggttttgcggtgccgtggtgttgtgttgctgctctactactggttttttttgttgttgttgttgttagtgcttggaatagctggagtaagtatggattaagtgagttctggggtgttaagggttgggtgtcttagttagaaggtcgtattggagggaatggaatccgttcaccgttcttgcgtgttgcaataatcttgtgtggagtctccaggtttgttcggttgctgacagtaagccaagccaaaatggcgagtctagtgaagaaccaaataaaaaaaaggctgggctgtaaggaatgtatccacacgttacttcattggtgtcaccataaatatatacctggatcatttggcttggttt

SEQ ID NO: 43414 - DNA, 993 bp, Zea Mays
caatagagtaattttatagtacatgttttgtatgagcacaagggatgtaccagatccttagataatggaacgttaagttatatttttaacaacttcgaaggagcaagaacctttagtgatgttgttgctgaagcaaaaaaagcaggatacacagaaccagatccaagagatgatctgtctggtactgatgttgccaggaaggtcataattcttgcaagggaatctggtttggggcttgagctttctgatattcctgtacgaagtcttgtgccagaggcacttaagtcatgtacctcagccgatgaatacatgcagaagttaccatcttttgacgaggattgggcaagagagaggaaaaatgctgaagctgcgggagaagtcctgcggtatgttggagtggtggatgtggtcaacaagaaggggcaggtggagctgcgagcctacaagagggaccacccgttcgcgcagctatctggttccgacaacatcatagccttcaccacctcgaggtacaaggatcagccactgatcgtgcgaggtccgggggctggtgcagaagtgactgcaggaggcgtcttctgcgacatactgcgcctgtcttcctaccttggtgccccctcgtagtctgtcaaggttttgcggtgccgtggtgttgtgttgctgctctactactggttttttttgttgttgttgttgttagtgcttggaatagctggagtaagtatggattaagtgagttctggggtgttaagggttgggtgtcttagttagaaggtcgtattggagggaatggaatccgttcaccgttcttgcgtgttgcaataatcttgtgtggagtctccaggtttgttcggttgctgacagtaagccaagccaaaatggcgagtctagtgaagaaccaaataaaaaaaaggctgggctgtaaggaatgtatccacacgttacttcattggtgtcaccataaatatatacctggatcatttggcttggttt

SEQ ID NO: 43415 - DNA, 2051 bp, Zea Mays
atgagtctgctgggccagaggaggcatcttctgctgggccggcctaggctgatgggctccaggaataggagcgctacgattgccatgcttgccgttgactttgtcctacccctggacgacgtgcccgcagaagtggaaggcttctttggcagtttgatgggacatgaaggggctcctgtaggtggtgtggtggccgtccctctggaggtagtgaaaaggaaaagggtgccaccgtggatgatcggttggaaggagggatcactggcgtttgcaaggatgtgctcctggagggaatacttgccaggaacccgaaggaattcactgtgccagcatgtaattgttgccagcaaggccaagaacagtcgagatcaacgtctgaatgttctgtatgccaacaacctgcgagtggaggttgatggctgcggattcatggagaagcatgacatcttggatgggctggtggaaactgtcatgaatgcatggggacttggcctaggatgttgtgtgcatgggcgttggtggtttatgctcctgtgctgctgtggtggtttcatgcttggtgtcctgggtgcgggtgagcagcttttgccggcagccttggtggcctgtgtgagcttctccttaaacttgcaactggcaacagtgaggcgctcacgttcctcggcgtcgaccttttatttagtggcggctgcagcagcagtggtggagaatgggacaacattgtctttggccgatgcccgatggtgtgtccatgggaagagggctgctgtcctcaaggaaaatatgaacattgatttgcgtgtcatgggaatagctggttctaggacaatgcttttaagtgatataggagtagatttgacccagtggaaagagaagctacaaactgaagcagaacctgccaatcttgagcagatacaagtgttgcatctcactattatgattggctaaagaaaggaatccatgtcatcactccaaacaagaaagcaaattcagggccacttgacaggtatcttaaacttagaactcttcagcgtgcatcatatactcattacttctatgaagcaactgttggtgctggcctccctatcattagcactctgcgtggtctcctagagacaggtgacaagatattgcgcattgaagggattttcagtggaacgttaagttatatttttaacaacttcgaaggagcaagaacctttagtgatgttgttgctgaagcaaaaaaagcaggatacacagaaccagatccaagagatgatctgtctggtactgatgttgccaggaaggtcataattcttgcaagggaatctggtttggggcttgagctttctgatattcctgtacgaagtcttgtgccagaggcacttaagaagttaccatcttttgacgaggattgggcaagagagaggaaaaatgctgaagctgcgggagaagtcctgcggtatgttggagtggtggatgtggtcaacaagaaggggcaggtggagctgcgagcctacaagagggaccacccgttcgcgcagctatctggttccgacaacatcatagccttcaccacctcgaggtacaaggatcagccactgatcgtgcgaggtccgggggctggtgcagaagtgactgcaggaggcgtcttctgcgacatactgcgcctgtcttcctaccttggtgccccctcgtagtctgtcaaggttttgcggtgccgtggtgttgtgttgctgctctactactggttttttttgttgttgttgttgttagtgcttggaatagctggagtaagtatggattaagtgagttctggggtgttaagggttgggtgtcttagttagaaggtcgtattggagggaatggaatccgttcaccgttcttgcgtgttgcaataatcttgtgtggagtctccaggtttgttcggttgctgacagtaagccaagccaaaatggcgagtctagtgaagaaccaaataaaaaaaaggctgggctgtaaggaatgtatccacacgttacttcattggtgtcaccataaatatatacctggatcatttggcttggttt

SEQ ID NO: 43416 - DNA, 1337 bp, Zea Mays
agtaacccatgggataattttattcgagtttgcttccactaaaactaggagttccacggaactgagcagtgcgtgtgctatatgtagacattgatgtccaccatggagatggcgtggaggaggccttcttcactacaaaccgagtcatgactgtttcctttcacaagtatggggattttttccctggtactggacatatcactgacgttggggcagccgaagggaagcattatgctctgaatgttcccctgagtgatggtatcgatgacaccacctttcgtggtctgtttcaatgcatcattaagaaagttatggaggtttatcagccagacgtggttgtcctccaatgcggagctgactctttggctggagacaggttaggttgcttcaacctgtctgtgaagggtcatgctgactgcctccgtttccttaggtcgtacaatgttcctatgatggttttaggtggtggaggttacaccatcagaaatgttgcacgctgctggtgctacgagaccgcagttgctgttggagttgaacctgataacaagctgccttacaatgattactatgagtactttggccctgattatactcttcatatccaaccaaaaagtgttgaaaacctgaataccacaaaggacttggagaacataaagaacatgatattggagaacctgtcaaagatagaacatgttcccagcactcaattccatgacagaccgtcagaccctgaagctccagaggagaaagaggaggacatggacaagaggccacctcagcgcagcagattatggagcggaggagcttacgactctgatacagaggatcctgacagcctgaaaagcgagggtaaagacgtaactgctaacttccagatgaaggatgaaccaaaagatgatctgtagaagtttcagaagtgcccccaaagttactgagttgtgaatgggatcgtcgacatgcatgttgaagagtggggacgcatctgaacctgtccgtgctgatatctgccgctgtgcatctgtaacagactgaacgttttgctggttccagctttcctgcgtgttggtaactagactagatatatggccctttggtgggtcccaaactgttgagctggagaaatgaagtgattattctcgcatgattttgtagcatgcatgtaatcattacccattagttcattaggctatcaacagtagtttactcatccccatattcaaacttcactatgtgcgcaaacagtgatttgattgaccatatgattaaactttgaagatggtctttgggtagtgtttggtttcaaagtgtaatgggatggagccgctccgctcttaatt

SEQ ID NO: 43417 - DNA, 1490 bp, Zea Mays
gttgttttttgtagatggattaactgtttgaagcattgattttgggtgttttttttgtgtggatgtagtagcgcactaatcaccaagagttggagatggctttgattttcacagggacaagagaattttgtttgtcgtgatgccgaattcgttgaccagtgccattataggcgctgttgtgtgaaagtaacccatgggataattttattcgagtttgcttccactaaaactaggagttccacggaactgagcagtgcgtgtgctatatgtagacattgatgtccaccatggagatggcgtggaggaggccttcttcactacaaaccgagtcatgactgtttcctttcacaagtatggggattttttccctggtactggacatatcactgacgttggggcagccgaagggaagcattatgctctgaatgttcccctgagtgatggtatcgatgacaccacctttcgtggtctgtttcaatgcatcattaagaaagttatggaggtttatcagccagacgtggttgtcctccaatgcggagctgactctttggctggagacaggttaggttgcttcaacctgtctgtgaagggtcatgctgactgcctccgtttccttaggtcgtacaatgttcctatgatggttttaggtggtggaggttacaccatcagaaatgttgcacgctgctggtgctacgagaccgcagttgctgttggagttgaacctgataacaagctgccttacaatgattactatgagtactttggccctgattatactcttcatatccaaccaaaaagtgttgaaaacctgaataccacaaaggacttggagaacataaagaacatgatattggagaacctgtcaaagatagaacatgttcccagcactcaattccatgacagaccgtcagaccctgaagctccagaggagaaagaggaggacatggacaagaggccacctcagcgcagcagattatggagcggaggagcttacgactctgatacagaggatcctgacagcctgaaaagcgagggatgaaccaaaagatgatctgtagaagtttcagaagtgcccccaaagttactgagttgtgaatgggatcgtcgacatgcatgttgaagagtggggacgcatctgaacctgtccgtgctgatatctgccgctgtgcatctgtaacagactgaacgttttgctggttccagctttcctgcgtgttggtaactagactagatatatggccctttggtgggtcccaaactgttgagctggagaaatgaagtgattattctcgcatgattttgtagcatgcatgtaatcattacccattagttcattaggctatcaacagtagtttactcatccccatattcaaacttcactatgtgcgcaaacagtgatttgattgaccatatgattaaactttgaagatggtctttgggtagtgtttggtttcaaagtgtaatgggatggagccgctccgctcttaatt

SEQ ID NO: 43418 - DNA, 1860 bp, Zea Mays
gcctaaaccccgaaattataaagaaaaccgcctcggccgcaacttgactatctttgtgaggaccttcaaccatctcaggcggaatggcggcttctggtgagggcgcgtcgctgccgtctccggcgggcggggaggatgcgcaccgccgccgcgtcagctatttctacgagccgtcgatcggagactactactacgggcaaggtcacccgatgaagccccaccgcatccgaatggcgcactcgctggtggtccactacggcctccaccgcctcctcgagctctcccgcccctacccggcctctgaggccgacatccgccgcttccactccgacgactacgtcgctttcctcgcgtccgccaccggaaacccgggtgtcctcgacccgcgcgccattaagcgctttaacgtcggtgaggactgccccgtgttcgacggtctcttccccttctgccaggcctccgctgggggaagcatcggcgccgccgtcaagcttaaccgcggggacgccgacatcaccgtcaactgggcgggcggcctccaccacgccaagaagagcgaggcctccgggttctgctacgtcaacgacatcgtcctcgccatcctcgagctcctcaagttccacaggcgtgtgctatatgtagacattgatgtccaccatggagatggcgtggaggaggccttcttcactacaaaccgagtcatgactgtttcctttcacaagtatggggattttttccctggtactggacatatcactgacgttggggcagccgaagggaagcattatgctctgaatgttcccctgagtgatggtatcgatgacaccacctttcgtggtctgtttcaatgcatcattaagaaagttatggaggtttatcagccagacgtggttgtcctccaatgcggagctgactctttggctggagacaggttaggttgcttcaacctgtctgtgaagggtcatgctgactgcctccgtttccttaggtcgtacaatgttcctatgatggttttaggtggtggaggttacaccatcagaaatgttgcacgctgctggtgctacgagaccgcagttgctgttggagttgaacctgataacaagctgccttacaatgattactatgagtactttggccctgattatactcttcatatccaaccaaaaagtgttgaaaacctgaataccacaaaggacttggagaacataaagaacatgatattggagaacctgtcaaagatagaacatgttcccagcactcaattccatgacagaccgtcagaccctgaagctccagaggagaaagaggaggacatggacaagaggccacctcagcgcagcagattatggagcggaggagcttacgactctgatacagaggatcctgacagcctgaaaagcgagggatgaaccaaaagatgatctgtagaagtttcagaagtgcccccaaagttactgagttgtgaatgggatcgtcgacatgcatgttgaagagtggggacgcatctgaacctgtccgtgctgatatctgccgctgtgcatctgtaacagactgaacgttttgctggttccagctttcctgcgtgttggtaactagactagatatatggccctttggtgggtcccaaactgttgagctggagaaatgaagtgattattctcgcatgattttgtagcatgcatgtaatcattacccattagttcattaggctatcaacagtagtttactcatccccatattcaaacttcactatgtgcgcaaacagtgatttgattgaccatatgattaaactttgaagatggtctttgggtagtgtttggtttcaaagtgtaatgggatggagccgctccgctcttaatt

SEQ ID NO: 43419 - DNA, 1677 bp, Zea Mays
gcctaaaccccgaaattataaagaaaaccgcctcggccgcaacttgactatctttgtgaggaccttcaaccatctcaggcggaatggcggcttctggtgagggcgcgtcgctgccgtctccggcgggcggggaggatgcgcaccgccgccgcgtcagctatttctacgagccgtcgatcggagactactactacgggcaaggtcacccgatgaagccccaccgcatccgaatggcgcactcgctggtggtccactacggcctccaccgcctcctcgagctctcccgcccctacccggcctctgaggccgacatccgccgcttccactccgacgactacgtcgctttcctcgcgtccgccaccggaaacccgggtgtcctcgacccgcgcgccattaagcgctttaacgtcgcgtgtgctatatgtagacattgatgtccaccatggagatggcgtggaggaggccttcttcactacaaaccgagtcatgactgtttcctttcacaagtatggggattttttccctggtactggacatatcactgacgttggggcagccgaagggaagcattatgctctgaatgttcccctgagtgatggtatcgatgacaccacctttcgtggtctgtttcaatgcatcattaagaaagttatggaggtttatcagccagacgtggttgtcctccaatgcggagctgactctttggctggagacaggttaggttgcttcaacctgtctgtgaagggtcatgctgactgcctccgtttccttaggtcgtacaatgttcctatgatggttttaggtggtggaggttacaccatcagaaatgttgcacgctgctggtgctacgagaccgcagttgctgttggagttgaacctgataacaagctgccttacaatgattactatgagtactttggccctgattatactcttcatatccaaccaaaaagtgttgaaaacctgaataccacaaaggacttggagaacataaagaacatgatattggagaacctgtcaaagatagaacatgttcccagcactcaattccatgacagaccgtcagaccctgaagctccagaggagaaagaggaggacatggacaagaggccacctcagcgcagcagattatggagcggaggagcttacgactctgatacagaggatcctgacagcctgaaaagcgagggtaaagacgtaactgctaacttccagatgaaggatgaaccaaaagatgatctgtagaagtttcagaagtgcccccaaagttactgagttgtgaatgggatcgtcgacatgcatgttgaagagtggggacgcatctgaacctgtccgtgctgatatctgccgctgtgcatctgtaacagactgaacgttttgctggttccagctttcctgcgtgttggtaactagactagatatatggccctttggtgggtcccaaactgttgagctggagaaatgaagtgattattctcgcatgattttgtagcatgcatgtaatcattacccattagttcattaggctatcaacagtagtttactcatccccatattcaaacttcactatgtgcgcaaacagtgatttgattgaccatatgattaaactttgaagatggtctttgggtagtgtttggtttcaaagtgtaatgggatggagccgctccgctcttaatt

SEQ ID NO: 43420 - DNA, 1806 bp, Zea Mays
gcctaaaccccgaaattataaagaaaaccgcctcggccgcaacttgactatctttgtgaggaccttcaaccatctcaggcggaatggcggcttctggtgagggcgcgtcgctgccgtctccggcgggcggggaggatgcgcaccgccgccgcgtcagctatttctacgagccgtcgatcggagactactactacgggcaaggtcacccgatgaagccccaccgcatccgaatggcgcactcgctggtggtccactacggcctccaccgcctcctcgagctctcccgcccctacccggcctctgaggccgacatccgccgcttccactccgacgactacgtcgctttcctcgcgtccgccaccggaaacccgggtgtcctcgacccgcgcgccattaagcgctttaacgtcggtgaggactgccccgtgttcgacggtctcttccccttctgccaggcctccgctgggggaagcatcggcgccgccgtcaagcttaaccgcggggacgccgacatcaccgtcaactgggcgggcggcctccaccacgccaagaagagcgaggcctccgggttctgctacgtcaacgacatcgtcctcgccatcctcgagctcctcaagttccacaggcgtgtgctatatgtagacattgatgtccaccatggagatggcgtggaggaggccttcttcactacaaaccgagtcatgactgtttcctttcacaagtatggggattttttccctggtactggacatatcactgacgttggggcagccgaagggaagcattatgctctgaatgttcccctgagtgatggtatcgatgacaccacctttcgtggtctgtttcaatgcatcattaagaaagttatggaggtttatcagccagacgtggttgtcctccaatgcggagctgactctttggctggagacaggtggtggaggttacaccatcagaaatgttgcacgctgctggtgctacgagaccgcagttgctgttggagttgaacctgataacaagctgccttacaatgattactatgagtactttggccctgattatactcttcatatccaaccaaaaagtgttgaaaacctgaataccacaaaggacttggagaacataaagaacatgatattggagaacctgtcaaagatagaacatgttcccagcactcaattccatgacagaccgtcagaccctgaagctccagaggagaaagaggaggacatggacaagaggccacctcagcgcagcagattatggagcggaggagcttacgactctgatacagaggatcctgacagcctgaaaagcgagggtaaagacgtaactgctaacttccagatgaaggatgaaccaaaagatgatctgtagaagtttcagaagtgcccccaaagttactgagttgtgaatgggatcgtcgacatgcatgttgaagagtggggacgcatctgaacctgtccgtgctgatatctgccgctgtgcatctgtaacagactgaacgttttgctggttccagctttcctgcgtgttggtaactagactagatatatggccctttggtgggtcccaaactgttgagctggagaaatgaagtgattattctcgcatgattttgtagcatgcatgtaatcattacccattagttcattaggctatcaacagtagtttactcatccccatattcaaacttcactatgtgcgcaaacagtgatttgattgaccatatgattaaactttgaagatggtctttgggtagtgtttggtttcaaagtgtaatgggatggagccgctccgctcttaatt

SEQ ID NO: 43421 - DNA, 303 bp, Zea Mays
ctggaatatgtgagcttcatgtgattaattcacatagatatcaatattcctgaacttaaccctgaaatggatgtttaccgcataggaaccctcatggaacttgtaagagaactttctctatcctttgcagatgatgggaaacgtgtcaaggtctgtgttcaaggctccatggggcaaggtgcatttgctggcatcccacttcaactggcaggaaccagaaaaattttggaattcatggactggggtgactatggggcgaagggcaccttcattaatattggagcagtaggtgtgtatgtgttg

SEQ ID NO: 43422 - DNA, 806 bp, Zea Mays
gttgatgtccattcagtaacctttggttttgtttgctctttgatgtcatccgaagatcaaagatcctaagaaacagtttctggtttttggagctagcagagccagaagttaaatcacgtcttgatacgtacaagcaaaattctgaagctattcttcctacatactctgatttgcttaataaggttcttgtgtattcctagtcatcaccagagcaacccaaagtatagattgaaagtaattctatgttgctatattgtgcaagaatatagattgatggaaactgcccagccgaagttgtttttcaggcgatagatttcctgttacagaagatctgtgagaacacttcagcgagcaagttgaccaaaacaaatggaaaacgaccagattctgcggatacaggttcaaaaaatgagtggcgtggaattccaacgaggttgaataacattccacattctagggaaattagggaatacttctacaacgacgtgttaaaagctacaaaacttgctattgaagataaaaagactcggttgcagatagatatcaatattcctgaacttaaccctgaaatggatgtttaccgcataggaaccctcatggaacttgtaagagaactttctctatcctttgcagatgatgggaaacgtgtcaaggtctgtgttcaaggctccatggggcaaggtgcatttgctggcatcccacttcaactggcaggaaccagaaaaattttggaattcatggactggggtgactatggggcgaagggcaccttcattaatattggagcagtaggtgtgtatgtgttg

SEQ ID NO: 43423 - DNA, 1382 bp, Zea Mays
ccgtccacacaacgcacgcgaggtccatcgctcctcctctccgtcaccgagaaaatgtcggtctcctccccggccatggcctcgccccctctcgccgcgcccggcactcaccgcggcccctgcttctcgaccctctgccgcttaccgtcgccttcctgctacccgcctctttcggcttcctcctcaccggctatctccaccgtctccgcattcgctgtcctcaaacacaagcccagaggtctgggactaaggtgccaggccgcggaggaggcaccaccgccggcgcggggtaagacttcgctcaaggtgatgatttcgggagctcccgcctcgggaaaaggaacgcaatgccgcatgatcgtcgagaagttcacatatcaactggtgatcttctgcgagctgaagtatcttctggcacagaaattggcaagaaagcaaaagaatacatggacaatggaaagcttgtgccggaccaagttgtgacagatatggtggtatcacgactgtcacaaccggatatacaagaaagagggtggcttcttgatggttacccaaggagcttcagtcaagcacaacaccttgaaaatttgaaaataagaccgaatatattcattgtgctagaagttcctgatgatgttctaatcgacagatgtgttggaagacggctggatcctgtgactggcaagatttaccatttaaaaaactaccccccggagaatgaggagatttctgcccgacttattacacgttctgatgacacatttgagaaggttaaatcacgtcttgatacgtacaagcaaaattctgaagctattcttcctacatactctgatttgcttaataagattgatggaaactgcccagccgaagttgtttttcaggcgatagatttcctgttacagaagatctgtgagaacacttcagcgagcaagttgaccaaaacaaatggaaaacgaccagattctgcggatacaggttcaaaaaatgagtggcgtggaattccaacgaggttgaataacattccacattctagggaaattagggaatacttctacaacgacgtgttaaaagctacaaaacttgctattgaagataaaaagactcggttgcagatagatatcaatattcctgaacttaaccctgaaatggatgtttaccgcataggaaccctcatggaacttgtaagagaactttctctatcctttgcagatgatgggaaacgtgtcaaggtctgtgttcaaggctccatggggcaaggtgcatttgctggcatcccacttcaactggcaggaaccagaaaaattttggaattcatggactggggtgactatggggcgaagggcaccttcattaatattggagcagtaggtgtgtatgtgttg

SEQ ID NO: 43424 - DNA, 1331 bp, Zea Mays
ccgtccacacaacgcacgcgaggtccatcgctcctcctctccgtcaccgagaaaatgtcggtctcctccccggccatggcctcgccccctctcgccgcgcccggcactcaccgcggcccctgcttctcgaccctctgccgcttaccgtcgccttcctgctacccgcctctttcggcttcctcctcaccggctatctccaccgtctccgcattcgctgtcctcaaacacaagcccagaggtctgggactaaggtgccaggccgcggaggaggcaccaccgccggcgcggggtaagacttcgctcaaggtgatgatttcgggagctcccgcctcgggaaaaggaacgcaatgccgcatgatcgtcgagaagaaattggcaagaaagcaaaagaatacatggacaatggaaagcttgtgccggaccaagttgtgacagatatggtggtatcacgactgtcacaaccggatatacaagaaagagggtggcttcttgatggttacccaaggagcttcagtcaagcacaacaccttgaaaatttgaaaataagaccgaatatattcattgtgctagaagttcctgatgatgttctaatcgacagatgtgttggaagacggctggatcctgtgactggcaagatttaccatttaaaaaactaccccccggagaatgaggagatttctgcccgacttattacacgttctgatgacacatttgagaaggttaaatcacgtcttgatacgtacaagcaaaattctgaagctattcttcctacatactctgatttgcttaataagattgatggaaactgcccagccgaagttgtttttcaggcgatagatttcctgttacagaagatctgtgagaacacttcagcgagcaagttgaccaaaacaaatggaaaacgaccagattctgcggatacaggttcaaaaaatgagtggcgtggaattccaacgaggttgaataacattccacattctagggaaattagggaatacttctacaacgacgtgttaaaagctacaaaacttgctattgaagataaaaagactcggttgcagatagatatcaatattcctgaacttaaccctgaaatggatgtttaccgcataggaaccctcatggaacttgtaagagaactttctctatcctttgcagatgatgggaaacgtgtcaaggtctgtgttcaaggctccatggggcaaggtgcatttgctggcatcccacttcaactggcaggaaccagaaaaattttggaattcatggactggggtgactatggggcgaagggcaccttcattaatattggagcagtaggtgtgtatgtgttg

SEQ ID NO: 43425 - DNA, 1305 bp, Zea Mays
ccgtccacacaacgcacgcgaggtccatcgctcctcctctccgtcaccgagaaaatgtcggtctcctccccggccatggcctcgccccctctcgccgcgcccggcactcaccgcggcccctgcttctcgaccctctgccgcttaccgtcgccttcctgctacccgcctctttcggcttcctcctcaccggctatctccaccgtctccgcattcgctgtcctcaaacacaagcccagaggtctgggactaaggtgccaggccgcggaggaggcaccaccgccggcgcggggtaagacttcgctcaaggtgatgatttcgggagctcccgcctcgggaaaaggaacgcaatgccgcatgatcgtcgagaagaaattggcaagaaagcaaaagaatacatggacaatggaaagcttgtgccggaccaagttgtgacagatatggtggtatcacgactgtcacaaccggatatacaagaaagagggtggcttcttgatggttacccaaggagcttcagtcaagcacaacaccttgaaaatttgaaaataagaccgaatatattcattgtgctagaaatgtgttggaagacggctggatcctgtgactggcaagatttaccatttaaaaaactaccccccggagaatgaggagatttctgcccgacttattacacgttctgatgacacatttgagaaggttaaatcacgtcttgatacgtacaagcaaaattctgaagctattcttcctacatactctgatttgcttaataagattgatggaaactgcccagccgaagttgtttttcaggcgatagatttcctgttacagaagatctgtgagaacacttcagcgagcaagttgaccaaaacaaatggaaaacgaccagattctgcggatacaggttcaaaaaatgagtggcgtggaattccaacgaggttgaataacattccacattctagggaaattagggaatacttctacaacgacgtgttaaaagctacaaaacttgctattgaagataaaaagactcggttgcagatagatatcaatattcctgaacttaaccctgaaatggatgtttaccgcataggaaccctcatggaacttgtaagagaactttctctatcctttgcagatgatgggaaacgtgtcaaggtctgtgttcaaggctccatggggcaaggtgcatttgctggcatcccacttcaactggcaggaaccagaaaaattttggaattcatggactggggtgactatggggcgaagggcaccttcattaatattggagcagtaggtgtgtatgtgttg

SEQ ID NO: 43426 - DNA, 1424 bp, Zea Mays
cacacacgtgacgggacgccgatcttcaaatcctcccgtgtggccgtgtgtgtgttttccgtccacacaacgcacgcgaggtccatcgctcctcctctccgtcaccgagaaaatgtcggtctcctccccggccatggcctcgccccctctcgccgcgcccggcactcaccgcggcccctgcttctcgaccctctgccgcttaccgtcgccttcctgctacccgcctctttcggcttcctcctcaccggctatctccaccgtctccgcattcgctgtcctcaaacacaagcccagaggtctgggactaaggtgccaggccgcggaggaggcaccaccgccggcgcggggtaagacttcgctcaaggtgatgatttcgggagctcccgcctcgggaaaaggaacgcaatgccgcatgatcgtcgagaagtatggtttagttcacatatcaactggtgatcttctgcgagctgaagtatcttctggcacagaaattggcaagaaagcaaaagaatacatggacaatggaaagcttgtgccggaccaagttgtgacagatatggtggtatcacgactgtcacaaccggatatacaagaaagagggtggcttcttgatggttacccaaggagcttcagtcaagcacaacaccttgaaaatttgaaaataagaccgaatatattcattgtgctagaaatgtgttggaagacggctggatcctgtgactggcaagatttaccatttaaaaaactaccccccggagaatgaggagatttctgcccgacttattacacgttctgatgacacatttgagaaggttaaatcacgtcttgatacgtacaagcaaaattctgaagctattcttcctacatactctgatttgcttaataagattgatggaaactgcccagccgaagttgtttttcaggcgatagatttcctgttacagaagatctgtgagaacacttcagcgagcaagttgaccaaaacaaatggaaaacgaccagattctgcggatacaggttcaaaaaatgagtggcgtggaattccaacgaggttgaataacattccacattctagggaaattagggaatacttctacaacgacgtgttaaaagctacaaaacttgctattgaagataaaaagactcggttgcagatagatatcaatattcctgaacttaaccctgaaatggatgtttaccgcataggaaccctcatggaacttgtaagagaactttctctatcctttgcagatgatgggaaacgtgtcaaggtctgtgttcaaggctccatggggcaaggtgcatttgctggcatcccacttcaactggcaggaaccagaaaaattttggaattcatggactggggtgactatggggcgaagggcaccttcattaatattggagcagtaggtgtgtatgtgttg

SEQ ID NO: 43427 - DNA, 8453 bp, Zea Mays
cttttcttccctgcatcaagtataagaaaaataatttcaacatcttttacattgttgaaaaggtatccagagccatcaccctagagaaagatgcggatgccattgcccacatgacacatttttttctaaatgcactacacaaattttatgtacaaacaattcttttatttcaggccattcctttgcgagtcttataagactatgcttcaagacctacatgaaagattattcaactacaccagagctatgttgtatgatagcactacatgaaagatcattttgagtatagatacagtcagacttcaacaagataaaactcagtaaaacagaaaaagtccctgatattacacaaaagtatgcagatttgaccgcaatcgaatcacacacaaaaataaaatttgccataaggatttgagaaaatggagttccagattatagaaaccatcccctttatttaaggacttaccttttcaatcattagaaatctactaccctcctctctcctcttctcttagcattgtcgtgcgctcctttcctccaatggttcttgctcgaggtccttcctctagtgttcctccctctcaaacgcacaaaaacccggtgttcagatctagcttgtgctctacccccccccccgctcgtgcgcaactctgacgccacgtcggcactctccaatggacgagcgctagccatcaatgtgtagatccgatggtggccatgagtggatggaagaactttgattgagaaagttttttggttttccccctttctttgaggggtcgaagaaagattttaaggaattgaaaaaaataatagggaaagaagactaaggttgtccacgatagatcatgtaaaattggcagagtgaaaaataatgtagatgacattgtttgcagagtgaagtttgaaatatgggatgagatagggtagctattacagacagcctaagagcagggatatgttggacctatttattttctaccaaatcccgtttatcactggttatagggaaaggagattaaaattttctctagtgaagatgctctaaggttgccttgtataaatactcgtgtattctcatacctagcaatcaatctaattgcacgtgatttaccttgcttatagttaggtcaaagaggtagtttgtcatatgattcaatgtgtcttattagcagagtttgtaaaattgcaatggaatacggatgctgctacccctgcgccaggactcccagtccatgtttgccttcttgtcaaacaggcgatatgccttgcttcccgctcaggacttgttcggttatgtctggatcgaaggaaattggaggggattaaattcctccctagtcaaaattgaatagagggggatttaatccctctcaacccccttcgatcaagatgcaactaaacaaggctttagggcttgttcggttggaaagtggtcgaaggggattgaatccctttctagtaatccctccaattcctatgcaaccgaacaaggccttaaagaggcaatataccttgcttgcatcataggaatatcattagggtgctcctgtcatccatcttggagaggtacaacccattttccttgacgttctagatgcagccaaagctgtggaaggagacattaagattccttccatgccatgcctcaaagggcctcacacccatcaagctcttcatcggcaagcagtttaggatgaaccttgtgttgattgccccgtccaaaaacactggcattttcttcaccttcatcatgcagtgcaccaacagggtcacgagtgccaagaaaacaggcccgctcacctggccgccaacaatagaatgcaagaggactaatggactcgctccggggaagaggctacacgaggtatgaggaaaggcccgccacctccatatcttttgtgtaagcgttaactttatgtcagcactcaggagacaacgccaacagtccaagctcctctggttgtcatcgcggacaggggagctgatgaagtacaagcttcaaggccaaagaggagggttaggcccagtagccgggtgatgggcccagaatgggtgcattagatttgtgtctcgctagcccaagagtattatatatgttttgtcgtatccgaactggagggaaacaagaaagaaaatatatatctactatcatcttcttccccaagctccctctctacctgcttcctccttcccatcagtaggtgttgctaacatattggtatcaaaggtcatggatccccggatctggagccgatccactacacccgtcgtgccaagcatctcggtgccatggatccacaggttaagctcgccttggaagctcaaaaactcgatcgttcctcaccgagctcgacaagaaattcgcagcgcttgacgccaagtgggagtcacgcatcggcgacctggagcgctcgacgggccgattcagttccacgatctcaaggctgacatccacacagatgtgacggcccagctggaattcttcatcaacacggtgaccgaacactcggatcagatcgcgactgcaacagcttcgcgggttgcggtgctggagtcggcatccgcggccttcgactcgtggcgcaccagcattgaatcctcggtggcggatgtcaaggtcggcatcgaatcgatccagacgaccgtcgccaaactgtctcaaactaaggatcctccaccgccggtgccagcacaccttcaacatggcatcctcggcgagttcaggtcggtttccacgcacccatctaccgaattcaggaccgacggcccagaagggcacgacatcgactctcatcgctgggaggctggttttggacgcgtttacgcatccacccacttcctgcacaatgttactgttctccagcgtcggatggtgtatcgtggagtacgcgccgtgcagcaaggcttgatccaatggtcgacgctgccgtcgtcgctagccacccgagaagacctcgaagcactccggcaatgctttccactagcgcctgcttggggacaagccagcgctcaaggcgggggcaatgtcagcactcaggagactacgccaacagtccaagctcctacggctgtcatcgcggacaggggaactgatgaagtacagacttcaaagccaaagaggagggttcggcccagtagccgggtgatgggtccagaatgggtgcattagacttaagtctcgctagcccaagagtattatttatgttttgctgtatccgaactggaggcaaacaagaaagaaaatatctatctactatcatcttcttccccaagctccctctctacctgcttcctccttcccatccgtaggtgttgctaacactttactggagagtggagacagcacaggaatggtcgtcagttagtgatgcttcgggctgaccaccagaaagcacggacttggccgcatcggaaggagcgggggttgatctggtagccgccagtttctcattgccccagggcttgtaattcagtagcgcatacgatcgcagcaattggcctaaattgtaacaacggacatgttttctagcaggaccatttaccagaatgtgttgctgttctagtgtctcgtgagttggctggacaaattgattaaatggatatttgactttaaaaatgtaaggaagttaaaggtgtgcagatgactgtattcctaacatttaagtacatcttgtggcactgaattcagctcataattcccaccaaaatattgaaatgaaaaaaataataataataaacaaatatcatgtgttctcaatcttaccttttttgtcctttgaaagcactggtgatctcatcaggagttggcttgttcgtgaattcagctataagaatatagttctcttttccattgagagtgtcaacccttcgataaatctcatatttatttggataagccatcctggaacaataagttaatccaaattgtaatgactgaaagaaaacagaaacagtaggaagatattatgctatttagaagaataaaagtttgttatgcatgttagacatatgtgtttgccttgtatatttctctttgtataagtctctttgcattattgtatgctggctcctccctgccgtgctgctgcagttcatcgacgtcggcttctcctgcagcagctcttctagcaaagcagatgccctcagtcgtgcctgccgctcacatcacactcacgctccgcactacagtgcaccgcacgcactcctgcgtgaattcacacctgctaacttgctcaggactcgctcgcgcacgcgcctgcgcgaacgccttggctacggctcgcctcgtgcctatgcccccactcccatcaccttgtggcctctacctcgtacttggtctttttttcttttcctttttttgcagtggagaggagcagaacagggagttcacaaagaaagggtcctcttctggagtttgttttgctcctctgtcttctgcttcttagtggtgtacggtgactgctatgtcctttcttttagttgaaaggaggtgacatccagtctgatcccttcgtccggtggtggtcaacttccgcattgtcccgtgcttttcaatgacacggattatcgtgactgagttcctcatatgcggtggaccggtggtatatgtgtggtctcggaccttgtgagtttctcagtggcaagctgccgtatcgagctacaccttctctggtgcagctgttgattcctaccagaacctcagaagatgaccacaagttgtgtaatgctcatgatgatgatatgccatcatatgcctaaatttacaacctatcatgtgtggtttagatgaggatgtccgtgtcagtgttcttcttgctagtatggacaagcgtttgctacagatgaggttcagcttgatcatgttctcaaatgtaggccttcatcagcactaagtcctctggtcaatccacctatcctgctgctctaagtcaagaacagttgttacagtagggtaacaatatagttgaggagttctcccgacatctatctgtggtatggcatgagcttgacactcttggtcctcagttgtcacctgccacttgtgattcctaccggaagcaacagtcaccttgagctccatcgtacctacgacttcctgactcgccttcgtgttgagtttaagcctcttcgtgcttagttacttgctcatgagctctgcatgtccctaatggaggctctggctattgttcataaagaggagacttgtctccgttctgcaggccttctcagtcctccaccgagagaccacggtccactttagtctcttgcacttgcacagattcttgactttggtgcttcttttcatatgaagtctgatcgtacccatctttcttccatttaccctcctatttctcactattcaaactgttgatagctcacctctttcggttgttggacatggcattctttcatcctcctttattcatgttcctaatgttacttatgtccctaatttgaccatgcaacttatttcagctggccagctcaccaatcatggtcgtcatgttattctaggatctcagcacgtgtctcccatatgaacgcatctgttgcaagccactagattactccagtcttcgtctttttggatgtttgtgctatgtctttctcgcttctcatgaacgtactaagccgacacctcaatctgttgagtgtgttttcttgagctttggtgatgaacaagggatatcattgttgggatcctgttgctcgtcatatgtggatttctcaagacgtcactttgatgagtctcaaacattctatcctcaaccttcctccgttgtttgagcgacttttattcttgacgtttccaactacacatatccccactgtgtttcttcctccaccacctcctgcaccctctcctatgttgccctctgagtcacctttgcaggctcctcttaagtccatttgtgattccaaaccccctgtcattcagacctacaaccgtctttgccacctctaggatccctcacctcttgttgagttgtctcctaatgtttcaccacctattgaggcaccttcagttgcggatctttcctctcaaccatcctctcatttagaacttcggagtcgagggtcgctgaagcctgcaaactggtatggttttgccggtaccgctctttcttagccgactacataccatgatgccatttgtcatctagaatggcaacatgcaatggatgaggagatcactactcttgagtgcactaacacttgggatcttgtttctcttccttcgcatgttcgtcccatcacatgtataagattcaggctcgttgtgatagctttggagccttataaggcatgtcttccttctcatgctcgtcccatcacatgtataagattaaggatctcaacaggagcatagtcatgactacgatgagaccttagctcatgtggttcacatgaccactgttcacattgtcctcattgtggcctctgcttgtgccttgttcatctctcaacttgatgtaaaaatacctttcttaatgatggactccattaggtctacatgtgaccacctcctagataccttgttcctgaaggcatggtttgtcatcttcgtcgctctcttctttatggtctgaaacaagctcctcatgcttggtttcaacgcttcgcctctatgatcactgatgttggtttctcctcgagcgctcatgagcctgccttgtttattcatgctccatcttgtggccgcacacttctttatgttgatgatatgatgaactgttgtgtctttgatggtatctctccttgccttagatcagctatggcaatggctggagatgagctgaagctttggggtttagccagggtgtgggatttttcctaccttttggccttgatgtctagttgagtttctgtgtgctcccatatttagtaaggtggtggctagtgttcatttcagtagtcctagtggtatccctgcgtttgtgctctttgggcacttttgtaaggctatctcttgcagatctcatatcccatcccctatctcatcacatatttcaaacttctctctacaaatagtgtcaaacagtgtcatctacagttctgtgtcccctattttacaccatctactagagacagactaagggcttattacccctttccttcttaatgcaaagatgcatagctctcctgcgtattcgagaaaaaaatgatcatcactagtgatgattctgagtatactgtgtttgtgaaggtacatctcggtgagcagtttctcatgtttgacctcgatctgtgtcgttacttttgtggaattgatgtctcttccacctcggatggcatttatcggatgcaagagaagtacatccaagatcttctttatcgttcctctctcattgaccaatgaccatcgcactgtcgagactcctatagagcttaatcttcatcttcaccctagtgatggtgaacctcattgatcccattcgatatcaccatattgtagggaatcttgtttattaggtgtgacttgtcctgtcatctcatatgttgtgcacattcttagcagtttgtttccaacccatgtcacctccactatggtcatcttttttatgtcttgtgttaccttcaagggccattactcaccatctattcatcttgtgtgctagctcttttcaactctaagcctactctgatgccacttgggctagcgacttatccgacaatcgctctttctgtctattgtattttccttggtggttctctcattgcttcgaagactaagaagcaaactgtggtatctcgttcgagtgcagatactgagttgcgagctatggctcttgcaacagcaaaggctacttggttgcgatgattacttgaggatttcagtgtttggctcttgtgacagtagaggctacttggctacgatagttaattgaggatttcggtgtttcaatttccgcgtcaactatcttgtctgacaatattggtgctatcaccatagctcgttatccaatgaagcatgagttcaccaagcattatcagcgttgatgcgttttaaactcagacacaagtataggataatgtcattactcttcgccatgtgccttcagagcttacttcttcacaaaggcacaaacgagagctcaacatcgattctttctctcgaactcggttttcatgatcaatcctgcgttctagggggtattagatatatgtatcttatatatttctgttcgtataagggtctctttgcattatggtacatgtacatattgggctttggcccttctaaatataagcagtgccaacaataggatagaaaccttaaagctcccataataggatagaatgaaccagcgtagtagagaagacggaatgaatagcatgtctcaaatgatgcagcatacttcagcctaatatcccttcccattgtctgatcatcacaaattaggaagcccacttaatagccaatactcatagctaaggtaagattaacc

SEQ ID NO: 43428 - DNA, 643 bp, Zea Mays
cgacacgcgcctccgtccaccggtggcggtactggaagccgcgcctcccggctgcattgctttatgctgccctggctgctggttgtgctgggcgtcgggttgtgctctgcgctgcgcttggttgcttgcgcttggaggctcctggtccaggtgctcccttgtggtggcgctgcgggctgtacccgtcccttccgaaattcctttcctgctctgccttctgctgcactcaaactcggagttggagcgagagtggtgagtgggctgtaaggagcagggtgccgcaggctttaccgttgtgaatccgaggggtcctttcacctttattctctcgtttgtggaggtgactggtgagggtgtgagggagggtggggttggagacgaaggagagcgcttttggtatggtggatcggcgagcagagctgagcgcaagctcctgtgtgcacgtctagtgctggggctgtgcttggcgttctggcaagcgactgggggcaggtgtcgagtgtcgtttcaggatcttgggtgggcagagacttatctccaatcattttcctcatattttttttatcctatatatactttctatcacattttactatattacaccaaaactacttctctatatctagaacgtcttcatccattc

SEQ ID NO: 43429 - DNA, 141 bp, Zea Mays
ccttggtgcggagcagtttgctcgtcgtcgtcaatggccatgtgatcctgcagatccagcatctctttttcttcctcctcgtctgtctcctgctcctcgtccaacaattcaccctccgcgccgtcgtcgtggtcgtcgtcg

SEQ ID NO: 43430 - DNA, 4467 bp, Zea Mays
ggcggccgccaccacggccttcttgtgggtgcacgactcccaggcgtccctcagcctctccagccagaacctgcctgcacacgcacgacatggaaatcaatcaatcaatcaatcaaccgaagagctgagcagtcgggatactttatcgccgttgggcttcctgtctggccggcccagccggggtttccgccgatgtgcttttcgccctttgcccatgctatcaatcatggaggtggaattattaagtccggactccggacatgtgagagtatgcagtgggggtctagtgtaaaagtgctacgtactgccctggcatcatgaaaaaagtctacatgatggatgcatggaagggaaccgagcatgaagtttcactgcatgcatagtgtttcttttactgaactatgagtggttcaatgtccctcgatgcaatatttcacttcactatttccatagactatgcagcccaatgccaatagaagttagtaaaacagagttgaagatgggacaaatccccgctcaatggtggaggtttcagacggtttacaaaaccttgaaaaagagttcgttgacgtggtttttcatagggatgaaactgattttatcccatgaaactcagttctcttaaatgttacgtcatgtcatggcgcactactaaatacgtgaaataccattgagaacagactcacatgctgatgcttacgctatactacgaccagtctaattagtcgggatgagtggatgacacacaaggtttttcctcggaattatcgcctaatatcgaagggcaccgctagacgacgctacaggcatggtagcgcagcaacatcacaccgggaacatctattagggctagtttggatactcaaatccccttcgggattgaaggggattggagaggaaattagtttatttgcacctcaatcccctctaatcccgaaggggatttgaggttccgaaagtagcctttcacgtggggatgttataaggaacaatagatgttgtttatttgtatctttggcgcggtttggttggactttcacgtggggatctgagtctgactgaccacagtgtgtgtgtgtgaccacatatataatgctacgggacaccgctgcatcagtgcatctgcaagttggttccttttacgacgtttgcgttacctactgtaccctacaaccaagcagctgttttgcgtgggccagaaaaaatgctgatgtgggggttggtgagcaaacaccaagcagatggccctgcgaaaagagcagaggtgacagctagctagctagcgaggacgctgagaccagatccaggagagtgtgatccacatgtgggtacgctacgctacaactgcaaaggggcaaggctaggaaggttcagtactgacggcacatatcatgccttgtgactaataagtccatatacattgtagttgcctttagtgatgtgagtgtttggttaaacaaggggagttgtcttagctactcccgaccaactaaacaaaagagagagagagagagagagagatagagaggcaattctctctttttgacgagcaaatcaatctcaagtttaatcagaggatcatggtcacattttgtgccacgaatttgtgtttaaatctgctggctgaggccattaaagaactatggcctaagaagacaaacttcaggagcaggttcactaagcccatgttcgtttaccccctaattatatactccagcttaaataagttgaaaggtaaacaaacaacacatattattaccaggtgggttatgtaatctaaatacctatattatggtaattcataagcaggtcaataggtgcttatataatcaataagctggattatataatcccgaaagcaacaaacaaaaagggcctcagccaaacaaaggtggcacattaccgatggcaccattagagcaaaagaagaaaaaaaaggggagtcttcaacatcagcttctatgcacccccaaagattggcaatggcaagggtgatgcacccacacttatgtttcacttgagcctaatattgtcctatccacatgatgtagtagctttgaaactacccctcacatggtttggttactaaactaatccacaaagaaaacaaggtttgcagtccttcatgacacaaccagcataacataagatgggatgagaatgaagccgcacaactgtagtcgtttggaaatattctcttacctttttgccccccgcgaatacgaaaaggtgagggagtgtcactaactcactatggacagcatccatcagattcatatcgttggagcatgatgcatggggcacagcgtaaaatgacaatcgagccccctccttgaccagccgacacctcgcacgtgcaaaaggtagggaggataaccgtgcgctccccccccccccctcccctcccccctttaaatcaggagatgaaaaaaatcacttgccccatggagttatacatgcccttatgggtctcttgctttacggtggatccgaataagtgatcatttcttttaccatcaccgcctagctaggcctacgctgtcacttgtactagtttattcgctaacctaggttgaagaacgcaaacaagtcatgattctcgttggagatgctaaacatcaagtgtaggccaccccccactttgtgcctaactttcacataattcttttgtcatgctccataatttacattgtgtatattactctctccgtccaaatatttctacctaccaagtcaatctatctctactttaatatacacacaaaaaaatattatggtatcaaacacctataatttgattcaccatggagttttttttccttatagcataactatttgaagtaataaatgtaaataatattttgtaacttagttaaacttagataaattttgactcaagcccagaattacattctttctggaatgagatagtagtaactgctaaggcactgcctccacatgctctcgtatggctggggaccagtaccttatgctacagaggataaaactttggatccaacactaaaattttcttttttttaaaaaaaaaaagcagaaaccacatcgaacggtgggattccattgaggccatttatgggtgaacgggttttcgtgttcgtagcaccttcgttctggtaaaaaaaaaatagagatgaagtagagagctttatcacttaccgtatcgtgccagctgcgtggagtaagaggagcacaccttggggatgatgaagaccccaaagaacactgcaatgcaaacgcagccagaacaaaggcaggaaaaagtcagtggctgccgtacttcttgctgcacctttaggctttttatctgcacatgtaaagttgctgaagctgctggtcccagcattttccctacggttaaagctaaatttaactcttcgtggaaggctaaagatttgttgcatcaaaaactcttcccatggcacatcttttggtttcatgttgaaatgaagaaacagaagagattaccatggggtaacggaattacagagagagagagaaggaagagactgagagatggtgatgcatgtattatcacttacccagtttggccagcgtccagagggtgacaaagttgccgcaccgggccatcgcgaacagtatcagcgccagctgcagaccagcacagcacatgtgtctacatgtcagtagtacaaaatccagagatgcgcgtctatgccaggcactacgtaccagatcgtacagtgttttttctttctttcatttttttgcctaaaatattcacacgaacacacacacggcgcctttctctggctttcacctaccttcatggtggtcgcaggctcgccggagaagagagacctcaggtttagcagcacctcgttgacgtacggcagcaccagcctcagcagccacacggcatcctcctccccgaccaggtagcagcacctatcgccgccgacgcctccatcatcgtcgcactccacactttcacccctgcgtttttttttaccttaccatggttatcaatgacacaagaaatggttttgcttggtcctccgaggagattagattagcagcgttttttacctgctcagtatggacttgcgcaggaagcgtagaccgaggtagatcaggcctgcatacgacgccgccgtgatcgtgctgcagaaggcataagatttttcaacgcttttaggttctgccaacttcagggttacagcaggtgcatgcagcaaaggttggacagcgagtttacttacttgaagtttaggtctttggcgtaggaggaggagacgagcaagaaagtccctagtccgaacaccagcgcggattttgacacgtcggtccacatcaccagattcactgcgaaacccatgttcttgaactagattgtttgtgtgtgttgttgggaacagaagcatgccgattggtgtcatggaggctagtggtactagagacattaccaatgttctgcattctcgcttg

SEQ ID NO: 43431 - DNA, 687 bp, Zea Mays
ctctaaccgaaacaaggccctaaggagttttgagttttcaaactagtctttaagggtttgaatctttataagaatttggagccttgctaaaagtatgaaatgctaagatgtggagtataaactgtaacagcgaaatggcgcagagattggcaaattctgaagtaacctcaggtgctgtttgcttcaagagctaacaagttgtaccggttcctgaggtggaacagctctcaagattctagaacgactccccccccccccccccccaaaaaaaaaaaaaaagaggatgtcctgtctatgaaccaaatacgaaagcagaaccactctattgtttcaacgaaccactagaacgaaccatccccccaaccaactccattcgtggctcattagcagtgggctcgagtggtttggtcgaggcgtttagcgcgaacacactgcgtctgcgtgtatgggatccctcgttattgcctgccgatcgcaggagcaggaccgcaacagatcaaagcctcatgcagcctctaaatgcaaccccaaccgtcaccgaggctggatgccgccccgagccctgagcctctcgcgggcgaactcgccggagaccggcgcccgcctgtgccgcggcggcgccccgaactcctgccgcggcgacgacgactcgtcctgggccctgtgcttcggcggcggcggcggcgg

SEQ ID NO: 43432 - DNA, 248 bp, Zea Mays
gtcgtcgtgttgggctggccattccctagtcctccctccaccagagaacccgcagcgcccgccatggccgtctccgattccctcgcgcatccagggctggcgatcgtggtcatgggagtcagcggctgcggcaaatcaaccgtcgcggcaatgctcgccgaagccctgggctgcagcttcatcgaagcagacgactaccattccgaggcaaacaaaggcatccgctctcaactcgtgcgcaaacccag

SEQ ID NO: 43433 - DNA, 2555 bp, Zea Mays
cgaaaacgagaatggagtttctgtaccgcgccgtcgacgagcctcgaagccggtccccgccaccgccagcggcaccagttactcctggttccggatcgactgacggccacggaagcgacggtccggcggagtgcgtgggtaattctgccgtgacgctatggcagtccgatctgcccccaccggagacggcggaagccgacgcctacgaactgcggcggcaagcggagaaggcgaggatcagggagcggatcctcagggaggaagcggagcaattggagctcgagatggtggtgcgtagcgagttaagggagcaaatgctgcaactcttgtggcctacgctagggcggccgacgaggggatcagagacgaaggtggtgctgtcaccgggaacgattaccgccgccaattcgtcgccgccgattctcgcgcttgaggtgcccaccaaaaagcaaacgcactagcaaatgcgccgaccaagcggaagagccctgatcatgcagccggaacatccacaccatctttggcgccaagcagcaagaagcagaagagcaccttaacctgcacggtgtgtggcatcaccgcaaacagcgagaaggtcatgcaagaccacctcaatgggaagccgcacaagaggaagttggtagcacttccggagctgccaaagccagtgccagagacagagcaggagagggggctcgagacaggggaggaagaggcaatggcgatggagacattgagagattacaaacccaccaagttcatgatggcgacgacagcaggagcgctgaacgaagtgatacagatggacggttacctcctctgtgagctgtgcaatgtgcggacgtctgaccgtgttacaatgatgtgccacatacaagggagcaaacacatctctaatgaccagaagaagcatgaactttccagcaggccatcaggagtggctattgccagtgctgatcctgatgtaaagctggctctggaggattacagtgtggagctgccacccaccgtgcgccgcttggaaggctttctgctctgcgagctgtgtgacgtgaaggccccatcgatgaatggcatgcgtcaacacttgtcagggaagaagcacgagaagaaggcgagtaccagctcatctgatgcctccgtcaacggctccatagccataggtggaaaggaagaagccgaagcacagccgatagacacaaatcacacggttgtcatctctgacgacatggcagcaaaggcgaaagcgctactggcgaataagtcgttgcaaccaaagcacggtgatgacattgggctgcaagaaacgactgtggcagcagcaaaggaacgcgtcgccactggggacgacagtactgcaactcctggaacggaaatgatgaaaggcagtgcaacttctgctggggctcaggtcaacaatgtctgtgattctgactcactggccatggaagtagacggtgtgttgcaccctctgcggcgggtggatggcttcctcgtctgcctgagctgcaatgcaaaggcaccatctgagatcgtcatgcggtctcacctgtctgggaagaagcacaagcgcaagatcacactcgctgctgccggaggaaacaatggcttgtgtgtccttgccaccgccggggctgatggggcccaagaaaacatcggctcaaagcctaccaaaggcaacgtggaggcagaatcggcggcggcacaagcaaaaaccgctgccaacgaagaagcagaatcagccccgtcgttggaagtgtcacaaacgaagaacactgcatccacggcatgcatcattgagccagctgaggatggcgagattgctaaggaagctgaagaagagcaggcagctgcaggcaccaatggtggtgtgatccaagccaaggaaaccgtgagagcagatgacgccacttcccctgtcaagtcaatcaaggcgtccaccgtgatgcagcaggagaatggcaggtcagcatgatcctgcatctctacaccagtacgcactggggcctcggacatggctgcagttgcaatggtggataaggatgtctcaggtgtgacaacgatgtccgtgtgataaaatctaatggtgaagaacttgaacgtagcgttgcatgaaaaacgattggttccgcctctgcctatttcttgtgtgatgtgtagggctacaatctagtcatgaatacttgatgctttgaacgacagtaccttctcgaaatcttaacctttaatttggtcactattttcttgcaaagtatatatgtgattcgaatggacattgctttttttttcatatctacaaaattacttaaatgtttcatctgttacccctgttagagaactgatttctagatgcggcggcggggatacccctgttaggtaaataattagctaacaaaaataagccagagtatgtttagaaacttaggcaatagatgtcttttttttctctttatataatctattagcaaagtcaaatgtctaacgggcagccgggctaacaattagtcaatttgtttgccgaatttgttagccgatctgtttggaggttaatgtgc

SEQ ID NO: 43434 - DNA, 2671 bp, Zea Mays
ccgtcttttgcgacagcttgaggacccgcacaggcatcccaaacgtttccacgttcccggatccatcccctactttatatagccttccaaaaacccaaacctccgcgtctctccctcacgaaaacgagaatggagtttctgtaccgcgccgtcgacgagcctcgaagccggtccccgccaccgccagcggcaccagttactcctggttccggatcgactgacggccacggaagcgacggtccggcggagtgcgtgggtaattctgccgtgacgctatggcagtccgatctgcccccaccggagacggcggaagccgacgcctacgaactgcggcggcaagcggagaaggcgaggatcagggagcggatcctcagggaggaagcggagcaattggagctcgagatggtggtgcgtagcgagttaagggagcaaatgctgcaactcttgtggcctacgctagggcggccgacgaggggatcagagacgaaggtggtgctgtcaccgggaacgattaccgccgccaattcgtcgccgccgattctcgcgcttgaggcccaccaaaaagcaaacgcactagcaaatgcgccgaccaagcggaagagccctgatcatgcagccggaacatccacaccatctttggcgccaagcagcaagaagcagaagagcaccttaacctgcacggtgtgtggcatcaccgcaaacagcgagaaggtcatgcaagaccacctcaatgggaagccgcacaagaggaagttggtagcacttccggagctgccaaagccagtgccagagacagagcaggagagggggctcgagacaggggaggaagaggcaatggcgatggagacattgagagattacaaacccaccaagttcatgatggcgacgacagcaggagcgctgaacgaagtgatacagatggacggttacctcctctgtgagctgtgcaatgtgcggacgtctgaccgtgttacaatgatgtgccacatacaagggagcaaacacatctctaatgaccagaagaagcatgaactttccagcaggccatcaggagtggctattgccagtgctgatcctgatgtaaagctggctctggaggattacagtgtggagctgccacccaccgtgcgccgcttggaaggctttctgctctgcgagctgtgtgacgtgaaggccccatcgatgaatggcatgcgtcaacacttgtcagggaagaagcacgagaagaaggcgagtaccagctcatctgatgcctccgtcaacggctccatagccataggtggaaaggaagaagccgaagcacagccgatagacacaaatcacacggttgtcatctctgacgacatggcagcaaaggcgaaagcgctactggcgaataagtcgttgcaaccaaagcacggtgatgacattgggctgcaagaaacgactgtggcagcagcaaaggaacgcgtcgccactggggacgacagtactgcaactcctggaacggaaatgatgaaaggcagtgcaacttctgctggggctcaggtcaacaatgtctgtgattctgactcactggccatggaagtagacggtgtgttgcaccctctgcggcgggtggatggcttcctcgtctgcctgagctgcaatgcaaaggcaccatctgagatcgtcatgcggtctcacctgtctgggaagaagcacaagcgcaagatcacactcgctgctgccggaggaaacaatggcttgtgtgtccttgccaccgccggggctgatggggcccaagaaaacatcggctcaaagcctaccaaaggcaacgtggaggcagaatcggcggcggcacaagcaaaaaccgctgccaacgaagaagcagaatcagccccgtcgttggaagtgtcacaaacgaagaacactgcatccacggcatgcatcattgagccagctgaggatggcgagattgctaaggaagctgaagaagagcaggcagctgcaggcaccaatggtggtgtgatccaagccaaggaaaccgtgagagcagatgacgccacttcccctgtcaagtcaatcaaggcgtccaccgtgatgcagcaggagaatggcaggtcagcatgatcctgcatctctacaccagtacgcactggggcctcggacatggctgcagttgcaatggtggataaggatgtctcaggtgtgacaacgatgtccgtgtgataaaatctaatggtgaagaacttgaacgtagcgttgcatgaaaaacgattggttccgcctctgcctatttcttgtgtgatgtgtagggctacaatctagtcatgaatacttgatgctttgaacgacagtaccttctcgaaatcttaacctttaatttggtcactattttcttgcaaagtatatatgtgattcgaatggacattgctttttttttcatatctacaaaattacttaaatgtttcatctgttacccctgttagagaactgatttctagatgcggcggcggggatacccctgttaggtaaataattagctaacaaaaataagccagagtatgtttagaaacttaggcaatagatgtcttttttttctctttatataatctattagcaaagtcaaatgtctaacgggcagccgggctaacaattagtcaatttgtttgccgaatttgttagccgatctgtttggaggttaatgtgc

SEQ ID NO: 43435 - DNA, 1804 bp, Zea Mays
ctctgttctctggtgcgtgctctccgtgcctctcctgtctggctgtctcctctggaggttgagagagaaggcacacgcggcttccaagaatgcccgatgaggcgaggccaagcaagacctcttctcgctcagacacgggagatgtgcggaagcaagtcggagagggacagcggcccactactccccaatccacgcaccattaccaccggcctcctgtcgtccaccactgctgataggatgatgggtagagagagataaggggtgggggatacagtccagagtcgttgggggcggtggcgtttcttgccgggcatgcgtgcttcctcaatctcgccccgtccgccccggactcctattgccaccaatcgttgggcctttttgggttttcgacctcacctcacccatgggtcagaggagctctccgcctctccccttcacacggccgcccacggcaggagagagaaagcggggacgagcaacagcaggccagggcaggcaggcgcaagaaacttcccccacctccacctcctcctcgccttccgcctttatttcttctcgtctccttcctcggtcctatctcctctcctgctccgccttttcctcatcggtccctcctcccctatcctctgctcctcatcccctgcgctccgtttcttcggggtttgaggcgagtgatctaggccatggcggccaccaagaaaaccaagatcgtcttggcccagccggcggttggggctccgacgtcgcggctgccgttcttttctcgcgcgcccggcccggtccgaggcgccggggacgaggcggcgcacagggcgagcctcaggtaccggtccctcctccaggactaccaggagctcatcaaggaaacccaagcaaagaaggagaggctgtacatggagaggctcaggaagaagaggcttttggctgaagtcaagtaattctcagatcataccatttttgctcaaattcttgcgtaagagataccaatctatggctaagaacccctctcagacaattgcttgtagagtgaagaatccagcactgtcgtctgcatcctggagggctgcttcggtaagtgacgcccagcaccagttggttcgtgctgtcgggagctccagtagaaaccagctggtgcagccaaggcgcggtggttctccaagggtgtatccggcgattgacctcaatgaggcctgtgagccgggttatgagatggaaatcgtcgaagagcgccatggcaacagggcccctcttggcatcaacaagtcaaagaggtatccaatggaaagtgatgctgctgccggcaacaactcaaagaggtatcctatggagatgggaagtgatgttgttgccggcccaacccaggggaggatgcctgtgttctgggatgtccagaacccagcagggcgatctgggaagaggaagatctcatgtcaggatcaacgttagtccttagagtataggtaaacgacaatgttagctctggtacagcagtagtgccctagtaggatcagtatgtgccgttgctagcctggtagatgtaaagggatggctgggacaatcttgacggttatctgctcatgtttattgatgatgaaaacatatgctgttgcatgatgaagtaggtgggcatgtgtgtctgtcattgttttaaagactaccgacccaaaaaaatcctaggcgcggctaggcgtcgccttaccgctttaagaagcatggtgtctgtgatccatcaccaaaatcttgtggttagtactggtatggagggctattgattaatgagagatgtatacgctttcaagcaagt

SEQ ID NO: 43436 - DNA, 1730 bp, Zea Mays
ccactctgttctctggtgcgtgctctccgtgcctctcctgtctggctgtctcctctggaggttgagagagaaggcacacgcggcttccaagaatgcccgatgaggcgaggccaagcaagacctcttctcgctcagacacgggagatgtgcggaagcaagtcggagagggacagcggcccactactccccaatccacgcaccattaccaccggcctcctgtcgtccaccactgctgataggatgatgggtagagagagataaggggtgggggatacagtccagagtcgttgggggcggtggcgtttcttgccgggcatgcgtgcttcctcaatctcgccccgtccgccccggactcctattgccaccaatcgttgggcctttttgggttttcgacctcacctcacccatgggtcagaggagctctccgcctctccccttcacacggccgcccacggcaggagagagaaagcggggacgagcaacagcaggccagggcaggcaggcgcaagaaacttcccccacctccacctcctcctcgccttccgcctttatttcttctcgtctccttcctcggtcctatctcctctcctgctccgccttttcctcatcggtccctcctcccctatcctctgctcctcatcccctgcgctccgtttcttcggggtttgaggcgagtgatctaggccatggcggccaccaagaaaaccaagatcgtcttggcccagccggcggttggggctccgacgtcgcggctgccgttcttttctcgcgcgcccggcccggtccgaggcgccggggacgaggcggcgcacagggcgagcctcaggtaccggtccctcctccaggactaccaggagctcatcaaggaaacccaagcaaagaaggagaggctgtacatggagaggctcaggaagaagaggcttttggctgaagtcaaacaattgcttgtagagtgaagaatccagcactgtcgtctgcatcctggagggctgcttcggtaagtgacgcccagcaccagttggttcgtgctgtcgggagctccagtagaaaccagctggtgcagccaaggcgcggtggttctccaagggtgtatccggcgattgacctcaatgaggcctgtgagccgggttatgagatggaaatcgtcgaagagcgccatggcaacagggcccctcttggcatcaacaagtcaaagaggtatccaatggaaagtgatgctgctgccggcaacaactcaaagaggtatcctatggagatgggaagtgatgttgttgccggcccaacccaggggaggatgcctgtgttctgggatgtccagaacccagcagggcgatctgggaagaggaagatctcatgtcaggatcaacgttagtccttagagtataggtaaacgacaatgttagctctggtacagcagtagtgccctagtaggatcagtatgtgccgttgctagcctggtagatgtaaagggatggctgggacaatcttgacggttatctgctcatgtttattgatgatgaaaacatatgctgttgcatgatgaagtaggtgggcatgtgtgtctgtcattgttttaaagactaccgacccaaaaaaatcctaggcgcggctaggcgtcgccttaccgctttaagaagcatggtgtctgtgatccatcaccaaaatcttgtggttagtactggtatggagggctattgattaatgagagatgtatacgctttcaagcaagt

SEQ ID NO: 43437 - DNA, 1719 bp, Zea Mays
ccaccactctgttctctggtgcgtgctctccgtgcctctcctgtctggctgtctcctctggaggttgagagagaaggcacacgcggcttccaagaatgcccgatgaggcgaggccaagcaagacctcttctcgctcagacacgggagatgtgcggaagcaagtcggagagggacagcggcccactactccccaatccacgcaccattaccaccggcctcctgtcgtccaccactgctgataggatgatgggtagagagagataaggggtgggggatacagtccagagtcgttgggggcggtggcgtttcttgccgggcatgcgtgcttcctcaatctcgccccgtccgccccggactcctattgccaccaatcgttgggcctttttgggttttcgacctcacctcacccatgggtcagaggagctctccgcctctccccttcacacggccgcccacggcaggagagagaaagcggggacgagcaacagcaggccagggcaggcaggcgcaagaaacttcccccacctccacctcctcctcgccttccgcctttatttcttctcgtctccttcctcggtcctatctcctctcctgctccgccttttcctcatcggtccctcctcccctatcctctgctcctcatcccctgcgctccgtttcttcggggtttgaggcgagtgatctaggccatggcggccaccaagaaaaccaagatcgtcttggcccagccggcggttggggctccgacgtcgcggctgccgttcttttctcgcgcgcccggcccggtccgaggcgccggggacgaggcggcgcacagggcgagcctcaggtaccggtccctcctccaggactaccaggagctcatcaaggaaacccaagcaaagaaggagaggctgtacatggagaggctcaggaagaagaggcttttggctgaagtcaaagtgaagaatccagcactgtcgtctgcatcctggagggctgcttcggtaagtgacgcccagcaccagttggttcgtgctgtcgggagctccagtagaaaccagctggtgcagccaaggcgcggtggttctccaagggtgtatccggcgattgacctcaatgaggcctgtgagccgggttatgagatggaaatcgtcgaagagcgccatggcaacagggcccctcttggcatcaacaagtcaaagaggtatccaatggaaagtgatgctgctgccggcaacaactcaaagaggtatcctatggagatgggaagtgatgttgttgccggcccaacccaggggaggatgcctgtgttctgggatgtccagaacccagcagggcgatctgggaagaggaagatctcatgtcaggatcaacgttagtccttagagtataggtaaacgacaatgttagctctggtacagcagtagtgccctagtaggatcagtatgtgccgttgctagcctggtagatgtaaagggatggctgggacaatcttgacggttatctgctcatgtttattgatgatgaaaacatatgctgttgcatgatgaagtaggtgggcatgtgtgtctgtcattgttttaaagactaccgacccaaaaaaatcctaggcgcggctaggcgtcgccttaccgctttaagaagcatggtgtctgtgatccatcaccaaaatcttgtggttagtactggtatggagggctattgattaatgagagatgtatacgctttcaagcaagt

SEQ ID NO: 43438 - DNA, 844 bp, Zea Mays
aaaaaaacagtcttcgtatttgacagctattctgttcgaagttatatgttataaaaaggaaaggttaagcctaatgcaggagaagttaaatcaatttgagaactgggacaaagcaccacttcgcccttctactacactaaatacacaagcagcagcaaggttcattggacactcactttcccatctgacatccgatcagaagaggagcatgcatgaaataagtagaggagaaaggcggagttggtctgggcagaagagaaagcctgaaccttcagtagaaaagaagtctgttcgtgctgctgcagaagagttccttgcaaaggcttctcaggaacttattggacatagtgatagcagggtcaagggtcctgttatactcatttctgatgaagatgaggactagatcaaaaaaatgggcgcttaccagattacatgcctgattcatcggctaggataaaggaaggtagaagttcctggtgatgaagataaacttatgtacattgctgtggtgatgaagatgaatttatctgcattgctgtgttgttctacatgtaacagggaatggagcaaagctgcataggcttgcttaattccccagttctgggagcaattggcctcgaatcttgagtgcaatttatctgagtttctttccggaaagaattttgacattctatttgctagtggaactggagcagcaatatatgatttatgtgctacagtaccccatataatgagtgctatctatctatatattcgaatgacaacaagatctatgacctccagcaatttggagtactcagactgtacaagacataggtctcgattgaatccaccccaatttaag

SEQ ID NO: 43439 - DNA, 1183 bp, Zea Mays
aaccgatttggtgaacctccagagcctagagatgcatgcgaattgatcccaaatctgaaataagagaacctttattactgttcactcagaggacccaccaccctgaattcctcgccgccgtcttcgtccaccagaaccatggcctccgacaccgcctcggcagttccgtcgtctgtggtctcagctgccgaggagacgctcggatataccgaatccgtaggggaccatctctcccatctgctcgcggcggcggcggcggaccccgacgccgtggccgagctcccaccccttctccgggcgcgcgctttccttgccttggcgcaggccgcgacctcccttctcggagttcgtttaaggtgttcgggagttgaccctgacgagcaccccatcagaaaggagtttgaaaggttaagcctaatgcaggagaagttaaatcaatttgagaactgggacaaagcaccacttcgcccttctactacactaaatacacaagcagcagcaaggttcattggacactcactttcccatctgacatccgaagaggagcatgcatgaaataagtagaggagaaaggcggagttggtctgggcagaagagaaagcctgaaccttcagtagaaaagaagtctgttcgtgctgctgcagaagagttccttgcaaaggcttctcaggaacttattggacatagtgatagcagggtcaagggtcctgttatactcatttctgatgaagatgaggactagatcaaaaaaatgggcgcttaccagattacatgcctgattcatcggctaggataaaggaaggtagaagttcctggtgatgaagataaacttatgtacattgctgtggtgatgaagatgaatttatctgcattgctgtgttgttctacatgtaacagggaatggagcaaagctgcataggcttgcttaattccccagttctgggagcaattggcctcgaatcttgagtgcaatttatctgagtttctttccggaaagaattttgacattctatttgctagtggaactggagcagcaatatatgatttatgtgctacagtaccccatataatgagtgctatctatctatatattcgaatgacaacaagatctatgacctccagcaatttggagtactcagactgtacaagacataggtctcgattgaatccaccccaatttaag

SEQ ID NO: 43440 - DNA, 1116 bp, Zea Mays
attatctaccgctttttggaagtaaccgatttggtgaacctccagagcctagagatgcatgcgaattgatcccaaatctgaaataagagaacctttattactgttcactcagaggacccaccaccctgaattcctcgccgccgtcttcgtccaccagaaccatggcctccgacaccgcctcggcagttccgtcgtctgtggtctcagctgccgaggagacgctcggatataccgaatccgtaggggaccatctctcccatctgctcgcggcggcggcggcggaccccgacgccgtggccgagctcccaccccttctccgggcgcgcgctttccttgccttggcgcaggccgcgacctcccttctcggagttcgtttaaggtgttcgggagttgaccctgacgagcaccccatcagaaaggagtttgaaaggttaagcctaatgcaggagaagttaaatcaatttgagaactgggacaaagcaccacttcgcccttctactacactaaatacacaagcagcagcaaggttcattggacactcactttcccatctgacatccgatcagaagaggagcatgcatgaaataagtagaggagaaaggcggagttggtctgggcagaagagaaagcctgaaccttcagtagaaaagaagtctgttcgtgctgctgcagaagagttccttgcaaaggcttctcaggaacttattggacatagtgatagcagggtcaagggtcctgttatactcatttctgatgaagatgaggactagatcaaaaaaatgggcgcttaccagattacatgcctgattcatcggctaggataaaggaagggaatggagcaaagctgcataggcttgcttaattccccagttctgggagcaattggcctcgaatcttgagtgcaatttatctgagtttctttccggaaagaattttgacattctatttgctagtggaactggagcagcaatatatgatttatgtgctacagtaccccatataatgagtgctatctatctatatattcgaatgacaacaagatctatgacctccagcaatttggagtactcagactgtacaagacataggtctcgattgaatccaccccaatttaag

SEQ ID NO: 43441 - DNA, 4277 bp, Zea Mays
acaaaacgcgcataaagttcgggctattcaaccattctcccccctacgatcctagctctgctccaatataaaacccgagctcggcgctgccttggccatctagtactataccgccgagggctatcatagaagttaatagccaccgccgtcgtgagcaattggggatcagagtgagccatcagcggggcgaagagaaaggttgcggccaccgttagtgatccccttccatgcctctatactgcgctcaaaattgtgcccaagttcttcatcgcgctaaattgaagactcctaaagcttgaccggccgataatcccttgtcggccttcacagccacaacgcctcccatcgccgtggctacaggccatcacctcaccaactctgaggcgaggtgacgagtaacttgaagcccaacttttgggtcaacgcctattatcacaagtcacaggcatgttgtgcccttgatcatgcttctttacctaataatgttcctgttaatcactgtgacatgctcaggttaatttgatgggacccaataggtttccctagttttatttaccccacaccttacaaacaaatgaactatcgggtagactcgctattgctctacctggatttgggattaatgttatattgaattatgataatgttccattaatactgttagtttaattattgttcacgataagattattatgttaaatggaacatggatcaaccacccaggaaaacagtgctaccaaaagggtggaatgggacacccttagttgaataattaggaaagctagtgtgagttaatcctttcccaaaaagggcaagtggggtggaggagtgcaggtgtagagaggtcctcgggttggactatatttttagctttccgaaaaaggaattcctacatcaccttcggcgcagaatccgtagcgggttctctcctctagtggaactttgtaaaggcctcgcagtggatccctagccattcaccttagaagtgtccaagggtctagctaaccctggctaaacaggaaagtcttgtgggtaaagatatgcaacctcagcagagtataaaactgatatatcaaccgtgctaacgatcatgagcagctcggaccctcacatgagtaacttatggaactaaacttaatctgtcatttgcattgcattgtgggttttattattaattatgatcttttatttaaatgggttggtatctacttatacttagtaactgctaataaaatttgaccaactctaaaagcaatattcagctttaatcatcttctttggtaagccttacaattcacctgaacccccatcgtaagtgagctcatgcacattattccccaaaacttgttgagcgataaacatatgtgagctcacccttgatgtactcacatccccccaagtcaagaacaggtactgcaatatggggagcaggaaggatgtcgcgatgagttcgtgagaggtctaggtcatcatctcccagtcaactatggttgcggaggatcgttgtcttcatatgatgtaattatttagctattttgtagagaactcctattatatagtaaagatgtgacattcatttttgtaccatgggtcatcatatgtgtgagacttgatcctagcacacatttgattcgcgctaagatttgcccttaaattcgggtgtgacactatccactccaacgggggcgaaatggccaactcctaggttctcgatccgacaaccacgtccttcacatggagttgctttgcctttacgcaccctcctctatcatgccatgtgacgccactagttccctccaaaaccgtcgttgccgagttttgaggtccaaactcagcaaaacgatccatttgtggcattgggtagttttgaggcccaatccaccaaattcatcgtgagtaccacacctcgtgcgtgtcctccacgaccagacatgtatcccaccagtccttgactacgctggcaacacggtccactccaccatgtcctcatgcgagtgcatgtcccaggtgtcagccaccgcggctagtcacccggctgctctagtccgtcagtcaagacctagcattctcccttcgccgctcctggttcatcagcacgagcccgcattaccttcacctcagccatcgaccaccgaccctgtgctccacacctgcacaccacaagctgaccgacatggttgcacaagcataatctcacactccagtcagtccactgtctatctcagagtgctacccgttgacgatcactcatcattaacccgaaccacaagggacaagtcaaccttgtgtttgcagctccatagttcatgtttgagggatgctgaatcgttgcatattgtgctcggtaatagactaaattacttccttatgtatcatattcttcaatggaataacctcagaccatttactcaagtaatcaataacaaccaagaaaaataatgtccctttgatgatgggggatgaattttgcaaatgaggtcttgctcccatccatgaaacgtcaatggattgattaggatgaagcattgaagcattcacaagcaaaatagtcccaaaccgttggtactcctcacgacctttgtagcagtgaaaaaattgaccataatagtagtccaataaaaatcaggtctacacaataactatttcatctttggagctgattgatgtgtaataaatatacattcatgaacttgtcccataaccactctagcttgatcagaatacaaacacttaagaaacaagtctttgatagtgttttgatataattcatcattgtgtacaaacgtaaatggactttgtttaacacttttattaacttcagcacttggaatatataaataggttgctataggatccctccaaccatccaaattgaccttagcattggcaggatttaaattagttaatttgggccttcatagagaaattggtatggccaacttcacaagccaacatagatggatagtcaatcttgccgccattatggtcggactagctagatctatcccatgtatagaaataccaacaaagccaacctagctaacttttaaagctagcctagccaactctgactattgagagtcaagtaaaaataatctcattggcctttgtttgatagaaaaaaatacacccactaacgttgcaatcatatgccttttgagccaacatgtttgccttataattcccatgccttggaatatactggattcaaaatttggtaaatgaagatataatattaagagcaactccaaaaggtaatgtaatttttcctcaaaaactaattataggggacatacataaaattttgtaagagtgaaataaggtgttactccagtcgttccctcaaaataaaaactgaaaacgaaactgggctagcttttaaaaatcctaggcccattttgtctaaatcgttggcccctctaatgcaagtcgctagcattttttggattacatgtctctggttacaacaggactcagatggggggagaaatctactcccgcaaatctgagggacgtctggcctcgtttctgggacgcgaataattgcgggtgacgaatggggttttgttggattaataaaatccagatttctcctgtaaacaaggttttggggagcctttatgttgtttcttggagatgctctaaggcatgaatcaagataaatattgagtgacccctctaaacatcgaagttctctagccacatgttgcactattagcaaggaatcactaaggagattgcatatttacattccaatgtttgtaatatttgcttgctttggttgtgttgtcatcaatcaccaaaaagggggagattgtaaggaaaatggacctcgtgtcatttggctaaataggttttggtgtttgatgatcaacatagcctgtggagtaatgaatttgctagtgtttatgattgtagttcacaggatgctaaagttacttggaccaagacattgaggaaagcaacacctcaaaagaagacattatgaagatcaagtgaagtccaagaaacaaaggaagtgttgcctgcgggctgtctggtttagagcactggactgtccgatggcacaacagactatccggtgcactatggaacaatagcccaacggctagttccaggtggcactggtggagagaagccaccagactattcagtgtgacgtccggagtgtccggtgtaaaaagcctgcgcgccaacggtcacctgcggtgtcagatccaatggctaggcgcaccggataggggcaccggactatccagtgcgccaccagactgtcc

SEQ ID NO: 43442 - DNA, 5411 bp, Zea Mays
caggaccatccctatcccctcaacaaaacgcgcataaagttcgggctattcaaccattctcccccctacgatcctagctctgctccaatataaaacccgagctcggcgctgccttggccatctagtactataccgccgagggctatcatagaagttaatagccaccgccgtcgtgagcaattggggatcagagtgagccatcagcggggcgaagagaaaggttgcggccaccgttagtgatccccttccatgcctctatactgcgctcaaaattgtgcccaagttcttcatcgcgctaaattgaagactcctaaagcttgaccggccgataatcccttgtcggccttcacagccacaacgcctcccatcgccgtggctacaggccatcacctcaccaactctggtaagtcccctactatccaaaccgtagtagccttctcgttgttttcttcccaatcgtgtcgatgatggagctgtggggagagtttgggtgctcggcgaccatggcgccgccgtaggggagaatacgctatcgtggggccctgttctgcgccgccgtgggtaagagttgtggtgtggatgaggcacatggccgttgatcgagtaaccgagggttgagattgagcgtccacgtaccccttcatttttttgatctgatccactggatcagagtcggatagaggagattaatcgatggtgtggccaaaccttgaccacgaatctgagatccaattattgagaactcgtattggtccaggtgttatgaagatctaatctaggccactcgggtatgatcgggcagtccataatgaaccgtacccccttcgtcgtaggatatatgcttaagagccctcacatttttaagaaattaacccgccatccaagactgtgtaaagagtcttgcggattggtcctagaatttatatattgaaccatgttcttcttagaaatagtactcgcaatccacagtttattaaattaagtaaaataaatccgatataatgattattagtataaaaataaatccaataaccttagaaaatccataacttttgcgatttaactccaaattggtatgttctagttgcattagctttgtagtaaaattgtctacacattaaaaacattatttgtatcattccacatacctctttaattgggtatttatttaacttatgatagttgataatcattctagtcaaagtcaatctgcctataattataatctgactaagatgtgatctctactcaagttataacctaaattaaagataaattaattatttattcatatcctttctgacttatattaatcaataaagaataaagttttactttttaaagaacctaaaactttagaatactatatttttaaccataactccgattttagtggttctcgaacctacgatctcgtagcggcgcgtagaatattcttacattgtttatttatatgctttggtgtaatgttaccatatccattatttgcttgattgtatgtattgctacgagtagaggcgaggtgacgagtaacttgaagcccaacttttgggtcaacgcctattatcacaagtcacaggcatgttgtgcccttgatcatgcttctttacctaataatgttcctgttaatcactgtgacatgctcaggttaatttgatgggacccaataggtttccctagttttatttaccccacaccttacaaacaaatgaactatcgggtagactcgctattgctctacctggatttgggattaatgttatattgaattatgataatgttccattaatactgttagtttaattattgttcacgataagattattatgttaaatggaacatggatcaaccacccaggaaaacagtgctaccaaaagggtggaatgggacacccttagttgaataattaggaaagctagtgtgagttaatcctttcccaaaaagggcaagtggggtggaggagtgcaggtgtagagaggtcctcgggttggactatatttttagctttccgaaaaaggaattcctacatcaccttcggcgcagaatccgtagcgggttctctcctctagtggaactttgtaaaggcctcgcagtggatccctagccattcaccttagaagtgtccaagggtctagctaaccctggctaaacaggaaagtcttgtgggtaaagatatgcaacctcagcagagtataaaactgatatatcaaccgtgctaacgatcatgagcagctcggaccctcacatgagtaacttatggaactaaacttaatctgtcatttgcattgcattgtgggttttattattaattatgatcttttatttaaatgggttggtatctacttatacttagtaactgctaataaaatttgaccaactctaaaagcaatattcagctttaatcatcttctttggtaagccttacaattcacctgaacccccatcgtaagtgagctcatgcacattattccccaaaacttgttgagcgataaacatatgtgagctcacccttgatgtactcacatccccccaagtcaagaacaggtactgcaatatggggagcaggaaggatgtcgcgatgagttcgtgagaggtctaggtcatcatctcccagtcaactatggttgcggaggatcgttgtcttcatatgatgtaattatttagctattttgtagagaactcctattatatagtaaagatgtgacattcatttttgtaccatgggtcatcatatgtgtgagacttgatcctagcacacatttgattcgcgctaagatttgcccttaaattcgggtgtgacactatccactccaacgggggcgaaatggccaactcctaggttctcgatccgacaaccacgtccttcacatggagttgctttgcctttacgcaccctcctctatcatgccatgtgacgccactagttccctccaaaaccgtcgttgccgagttttgaggtccaaactcagcaaaacgatccatttgtggcattgggtagttttgaggcccaatccaccaaattcatcgtgagtaccacacctcgtgcgtgtcctccacgaccagacatgtatcccaccagtccttgactacgctggcaacacggtccactccaccatgtcctcatgcgagtgcatgtcccaggtgtcagccaccgcggctagtcacccggctgctctagtccgtcagtcaagacctagcattctcccttcgccgctcctggttcatcagcacgagcccgcattaccttcacctcagccatcgaccaccgaccctgtgctccacacctgcacaccacaagctgaccgacatggttgcacaagcataatctcacactccagtcagtccactgtctatctcagagtgctacccgttgacgatcactcatcattaacccgaaccacaagggacaagtcaaccttgtgtttgcagctccatagttcatgtttgagggatgctgaatcgttgcatattgtgctcggtaatagactaaattacttccttatgtatcatattcttcaatggaataacctcagaccatttactcaagtaatcaataacaaccaagaaaaataatgtccctttgatgatgggggatgaattttgcaaatgaggtcttgctcccatccatgaaacgtcaatggattgattaggatgaagcattgaagcattcacaagcaaaatagtcccaaaccgttggtactcctcacgacctttgtagcagtgaaaaaattgaccataatagtagtccaataaaaatcaggtctacacaataactatttcatctttggagctgattgatgtgtaataaatatacattcatgaacttgtcccataaccactctagcttgatcagaatacaaacacttaagaaacaagtctttgatagtgttttgatataattcatcattgtgtacaaacgtaaatggactttgtttaacacttttattaacttcagcacttggaatatataaataggttgctataggatccctccaaccatccaaattgaccttagcattggcaggatttaaattagttaatttgggccttcatagagaaattggtatggccaacttcacaagccaacatagatggatagtcaatcttgccgccattatggtcggactagctagatctatcccatgtatagaaataccaacaaagccaacctagctaacttttaaagctagcctagccaactctgactattgagagtcaagtaaaaataatctcattggcctttgtttgatagaaaaaaatacacccactaacgttgcaatcatatgccttttgagccaacatgtttgccttataattcccatgccttggaatatactggattcaaaatttggtaaatgaagatataatattaagagcaactccaaaaggtaatgtaatttttcctcaaaaactaattataggggacatacataaaattttgtaagagtgaaataaggtgttactccagtcgttccctcaaaataaaaactgaaaacgaaactgggctagcttttaaaaatcctaggcccattttgtctaaatcgttggcccctctaatgcaagtcgctagcattttttggattacatgtctctggttacaacaggactcagatggggggagaaatctactcccgcaaatctgagggacgtctggcctcgtttctgggacgcgaataattgcgggtgacgaatggggttttgttggattaataaaatccagatttctcctgtaaacaaggttttggggagcctttatgttgtttcttggagatgctctaaggcatgaatcaagataaatattgagtgacccctctaaacatcgaagttctctagccacatgttgcactattagcaaggaatcactaaggagattgcatatttacattccaatgtttgtaatatttgcttgctttggttgtgttgtcatcaatcaccaaaaagggggagattgtaaggaaaatggacctcgtgtcatttggctaaataggttttggtgtttgatgatcaacatagcctgtggagtaatgaatttgctagtgtttatgattgtagttcacaggatgctaaagttacttggaccaagacattgaggaaagcaacacctcaaaagaagacattatgaagatcaagtgaagtccaagaaacaaaggaagtgttgcctgcgggctgtctggtttagagcactggactgtccgatggcacaacagactatccggtgcactatggaacaatagcccaacggctagttccaggtggcactggtggagagaagccaccagactattcagtgtgacgtccggagtgtccggtgtaaaaagcctgcgcgccaacggtcacctgcggtgtcagatccaatggctaggcgcaccggataggggcaccggactatccagtgcgccaccagactgtcc

SEQ ID NO: 43443 - DNA, 1710 bp, Zea Mays
ttacgtttttactaaacaagcactgtctttttttataatatgggcaattctctatccatttttgaaaaggaaaacatgttactctctagcctaattgattctaatatatttcagtgtatattgcatagttcatatttcacaatttacaacaatgttatcaagtcgtctagtcaatcctagtcggctagttgccatggaaccagacagacagtaactagtcgtgaccacagttccaatcgagtacttgtcccctagtcatcctatatatatcaggactaatatactatatgttctagagtacaaatcaagaatgaagataactctagggtggtggctgcatgcacagttggaaaatggtctgaaaaacatgagcatgtgtggcctaagatattcccagatgcagcccatgtcctaagctgcccagcaatttcattttatttctggtcattcaccctatagtcatctgactaatcatgattagtcaacaactcgacctgcgggggtaagacaaccctcgagtattgtattaagaagaccttctcacacaggtcgacaaaacccccgaacccatgccccacacatacacagcggcatcgaagcccatgtgagaacgaccgcgacctgggccgagccttagacctgtgctttggcgtggggcagacgaggggttttttttaaccacaacctgaaattcgctcccacggggagttgaacccaggacctgagaagtgctactcagaccacctaaccaactcggctagaggccctttcgcgattagtcaacaactaatcggatgaccagaaaactaatccatctagtcaaatcttagcccctagatgagtccaggatacaatcatacaaactaggatgattaatcgtgattaatcagacaacttgatagcgatgattgacaattttctccccattcttaaattcaaatcaggattatatttcaaaagaaattctaatgagctataggaaacagagatgtaaacatctggttaagaaagattcagtacattttttgaggtaaggagaggatctgttttgagatggacagaaaggcataagaatgaataaggttttgtttcttgaatacgcaggagagatgcgtatcattatattaagagagagaaagagagtgggtatggtattccggtacaaacttcaccccaaaccccggaccaaataaggggttgaagacacaggcaaccaactaataaaatacaactcggataagacctgaccactatgagctaaccccctccttgtctccatgtgccagactaagctggctaagactcttggctcccacaaagcaccagagaagacgttgctcctcgaaacgatgtttggagtaaagagaaaaaacaatggaaatggaattcaaataatggttgctgtttgggatgcctgattttgctgcagttatttcggaaaaaaatttgctgcagtttccagtccacgaaaaaagagaaaaagaaaatcattgcactgtcaactgccagcagatccttgatggataatcatcatttctggaaaagaatgataacctactgtatcacattagtcataaaaaaaatctgtagttaaagagaaagtataacattaatggacaagcagcgtttctggaatcatcatgacctattatgccacatgagagtccacggttcctagccataataacattaaacgaaccgagatctatt

SEQ ID NO: 43444 - DNA, 268 bp, Zea Mays
tccgtctcttcgagcccggggctcctccccggagaggcggccgcggcggaagagagggatccgattgcgatcagatcccaccaggtggattgaggggtcctcctgagcgccaaggagaagaaatacggggcggagtggggaagggggcgggggagaggcgagcagcggcggtgaggttgggaggctaaagtaggagatgggggcgggtggccgccgactggccgcgccgcccgcggccgccgcaaggagaaggacggggaagcttcgg

SEQ ID NO: 43445 - DNA, 673 bp, Zea Mays
ggcctatgcccttcagtatttctgaattaaagaaaaactcgatatgtcgtgacacggtgcggaggttgctgtcctctgcatcacaaaatctggtgaggttatcaactatcaagccttcacaaactccaagggcgtgtatactgtcgccgagactatgccggagagcgacaggtgggactcgtgcttggcgaggcctatgagcagcttccatctacattgcacacggcggggtgatgctcactctggggtgaagttcacttacaacaaatcgtctgggaacccgcacaccgtcaagcctttcctctacaagccggccaccgtccctctgtattgtagttaaacaacacatcttgctggaacgcagaagatagaacatacaggaagaaaatatgtattcgtgccccgactccatatgaccatatataagtaaacactgtttgatgtaaatcaaagattcagctgtctatgggagctgttctagtgtctggtcacccatacctgcgaggaaacagatgttgcgtgcttaatgttgataatatcagtgtttttcacctgctgtaaatgttttgcgaatgctattattatcttggttatgatgatattgtttttttctattctaagtttgtaaggactggtttgataacaaggaaattggaggagatgcatagaaagg

SEQ ID NO: 43446 - DNA, 527 bp, Zea Mays
gaggaatgataatattggtggccgacaagtgggggccgtgcactctctcctacgactcccacttcctctaccagcctagggcctaggctaccaccccagtgcgaaggaagtcagagctctccgcctccgccggcggggctcgatactgatgggtgtcttcgggacctcgcgtcctgcctccgtcaccctctgcgccttcctcacattcctcaacctcttcgccttccttctcgccgtcggcgccgagcgccgccgcagcaccgggaaggtggtgccggacgagtacgacgagcggtcctactgcctctacgacaccgacgcctccacagtctacggcgtttccgctttcttcgtgctgctgctccagcaggccattgtcaccgccgccacgcgttgcctttgcttcggccccgtgctctcctcccgcggctgcgccgtcaccgcattcgtcctctcctgcttattatgtgtccaaatggtgaatggcagtaaggctattatggatggatggattagcaacatagcct

SEQ ID NO: 43447 - DNA, 1337 bp, Zea Mays
gccggcagtggcactcgcagactcgcttctccccgaaaaacggctgaaccctgaaccctcactacgtcccgccgcctgcttcacagttcaccccggccatggtctccaccgctcgcgccgccctcccgacgccccacctctctctcgcttcctcctcccgccgcaggccccatctgtttttcacgccctcctccgcacctcgcctgcgcggcggcgctgccacctccatcaccgccggcagctccgcctcgccgcagcagcaccaggtcaccacgcgcctgggcgacgtgatagaggcgcagcagttcgatcgggactcgcttaacgagatctttgaggtggcgcgggagatggaggccgtggagcggagctcccacggcgctcccagtcgcgtcctcgaggggtacctcatggccactctcttctacgagccctccacgcgcacgcgcctctccttcgaggccgctatgcggaggctcggcggggaggtgctcaccaccgagaacgcgcgcgagttctcttccgccgccaagggggagacactcgaagataccataagaaccgttgagggttattctgatattattgttctgagacattttgaaagtggagctgcaaggagagcagcatatactgcgaatattcctgttattaatgcaggtgatgggccagggcaacatccaacccaggctttgttggatgtttatacaataaagagagaaattggcacactagatggaataaaacttggtttggttggtgaccttgctaatgggaggacagttcgttctctggcttacttgattgctaagtaccagaacattaagatatactttgtatctccagatgttgttaaaatgaaggatgatatcaaggactacttaaattcccaaggtgttgaatgggaagaatgttcagatttgttggaggtggcatccaagtgtgatgttatttatcaaacacgtattcaaaaagaaagatttggtgagaggattgatctttataaagctgctcgtggtaagtacattgtggataagaaggtcttagatgtgctgccaaagcatgctgtgatcatgcatccccttccaaggcttgatgagatcacggcagaagtcgatagtgatccaagagctgcatattttaggcaggctaagaatggcctctacataaggatggcattgctcaaacttctgcttgttggtcactgacatatctgctagtgtgtgagcttgtgctgcgtcaagggatgaggaaatgtactaataatcagcagctcctgtcaaaattcaacgttcctgcgctgtcagggttcaatgcaatgcatccaatacattata

SEQ ID NO: 43448 - DNA, 775 bp, Zea Mays
ggttcgagttggagaagacgaacttccaccatcttgggaccctacaccctctcctttacgtacttgttatgtcctatatgttctttattacatcatgttctgtttttgttggtgtttattttctgttatggatttctttttagttagcaatggatgtgacactaagagatcgccttagaaagagaagggatgaggatgatgatgatatgatgctgtttttttcctatgctacatatattgggctttagttcaaacatagcaagggaaaagaagcgaaggcatacatcaaagttaagtggccaagaacatgttcaagagttgcttcaagatctgctatctttcacttatgttcaatgtttcacttgtgccagtgaatggtgatgatgcattgctccttgttgctgacgaccgcctgctactgcttgctacttttaccacgacaacaacgattgctgcttgctgctggccatgtgtgcaaggcctggtcatgcataaacaattgtgcatgtcatgaactctttaagcgtagggcatttcagtgcattggatggattacttgtcctgtaatgaaacctataataatggtgcttctatgcgactgctgcaagacattacttgtctgctctttcttgtgtaaactgaggacaattatatgctattccacttgtctgcaattttacttgtctgctatcttcgtagtatttcacttgtctgctatttcagtgcattgtatgctgcctgacggtaggaaatgaaatatgttgataagtctttt

SEQ ID NO: 43449 - DNA, 697 bp, Zea Mays
atcggttcgagttggagaagacgaacttccaccatcttgggaccctacaccctctcctttacgtacttgttatgtcctatatgttctttattacatcatgttctgtttttgttggtgtttattttctgttatggatttctttttagttagcaatggatgtgacactaagagatcgccttagaaagagaagggatgaggatgatgatgatatgatgctgtttttttcctatgctacatatattgggctttagttcaaacatagcaagggaaaagaagcgaaggcatacatcaaatgaatggtgatgatgcattgctccttgttgctgacgaccgcctgctactgcttgctacttttaccacgacaacaacgattgctgcttgctgctggccatgtgtgcaaggcctggtcatgcataaacaattgtgcatgtcatgaactctttaagcgtagggcatttcagtgcattggatggattacttgtcctgtaatgaaacctataataatggtgcttctatgcgactgctgcaagacattacttgtctgctctttcttgtgtaaactgaggacaattatatgctattccacttgtctgcaattttacttgtctgctatcttcgtagtatttcacttgtctgctatttcagtgcattgtatgctgcctgacggtaggaaatgaaatatgttgataagtctttt

SEQ ID NO: 43450 - DNA, 2100 bp, Zea Mays
gctagttcccaagatctcacttgttgtttattggatcctgcattccacctcttttaattcttggggctctatccttggtctctaccgtcgacgagcccgagcagcaggccactggagcggacactgttgccgtgacggccgtggccctggtggtcgtgatggctgtctcgtagctcatgtcctgctgagagacccaaatgaccgatggccattgcgaacagaatagggaggctttgagtgtgaggccgtgacaacacagtcatctcactagaatctttatcacgttcacatctctaatgtgttagaactggatatttgtttacttgttcaaggtattgagattgcaataatgaactactgtctacgctcagctttagcatctatacctttctgatacttagaattagtttatgtagtttagtcgcaaagttataccaaagcacaatatataactgacaatacatttatggactaaccactattcatttacctgcctagttatgctatataactgacaatatatttatgaattagttatgctatataactgacaatacgcattcactgatttgcagttagtattaataggcaactaactggacacattcacagattcataaaggcatgcacctaataaggtcacatgactgaaatcatatttatatgcaaaacagattcagatactaagaacttgagcaccagtccaaactgcagtatctagctcagtagaatggagtatggtcatcgatgatggagaggctaggcgtgtgtcactgtatcgatgtaggaggcaattgtccaatacaaatcatatatttgcataccttgagtagagtaattctctatatactgagcagagtaatttaaaaaaattagatacactgagcagagtaattctctattatggcatcatatatttgctttacctggagtagtttgaatgtgcaagacagtaataatagtttgaatgtgcaagacaatactagtattttctcatatctgaatatttaacgtttgtccatctatacaagcataggattagttggcactagaatcatgtgacgaggagaaggagcacatgccatgtaactgcatgtagaaagccagtttcattatgcaatgcaagtttagagttttgttttgaaataaagggcgcatggagaaatagaaacgtcatgctagctaataaacaacttatggtagctaataaacagaaatgtatttttcacaaatctcatttatttccaattagttgtctatgtatttctaacaaaaacctattatatttctagattatccctgcatcggttcgagttggagaagacgaacttccaccatcttgggaccctacaccctctcctttacgtacttgttatgtcctatatgttctttattacatcatgttctgtttttgttggtgtttattttctgttatggatttctttttagttagcaatggatgtgacactaagagatcgccttagaaagagaagggatgaggatgatgatgatatgatgctgtttttttcctatgctacatatattgggctttagttcaaacatagcaagggaaaagaagcgaaggcatacatcaaagttaagtggccaagaacatgttcaagagttgcttcaaggtcatttgaagaactgttgggtaacgttcaggatggagcctgaaattttcaaatcgttggcatgaatggtgatgatgcattgctccttgttgctgacgaccgcctgctactgcttgctacttttaccacgacaacaacgattgctgcttgctgctggccatgtgtgcaaggcctggtcatgcataaacaattgtgcatgtcatgaactctttaagcgtagggcatttcagtgcattggatggattacttgtcctgtaatgaaacctataataatggtgcttctatgcgactgctgcaagacattacttgtctgctctttcttgtgtaaactgaggacaattatatgctattccacttgtctgcaattttacttgtctgctatcttcgtagtatttcacttgtctgctatttcagtgcattgtatgctgcctgacggtaggaaatgaaatatgttgataagtctttt

SEQ ID NO: 43451 - DNA, 3148 bp, Zea Mays
gaaaaactgaaccctagcactccgggtcctgttttatagacgtccggatgtggtccggattgcactgtctgccccgggcttcctttagttattggaagcccagggctcctaatatacaatctatatatatattatcgagttttcaaaattttatagttttcgtaaatactaaattttaggaatttaattaatattagaaaaactgaaattcatatttaatactcgaagaaacatttcgaaggttcccgaaagtttccgaaaacataaacaagataattcgatatagtttgaaaacatttgcacttataaacactatacaacgacataaataaaaccttcaaagcttctccaggattttattttactacgctaaaaaacttatatatatatatataactcttcattatttagaaaaaaagaagaaaagcggtaaaggagaggataacatctgaatttggtgaatattagaaaagaaattttatactttcatattcagcgtgttacattacagctaggttgtcagatgtttcttcaacggatcacatcgagcctcgacgagaaaacatggattatgttaggaattgtaaccgagcccagcctcatggtttgatgtgtcgcggtgccgggttataaagtatcatgtgatgcgggccccttgatcctcatatggtggccgaactggggcgagttgtgcggcgtcgttgagagaagggcggaagccgccacggagacaactccggtgcactggcgccggtgcttcggatggtggtcagggagctccttcgggccatgttcgtttaagccaaacccggtcgagatcgagcccaatcccccgtggatcagcgtgggctagaaaagatcacagcccacaacgaaacagcgttcgtttcaccccgtccgggtttcaactccggcccaccctgactattccgagctcaacccgggtcgggaaacatccctcgtcaccccgtcgtggaaagaacccgcgagcgagagtgctcagcgcgaggtggcggcggtggctagcggcggtggctacatcgacgcatacgcacgacacggcgaccggcgtggagaacaacaaattttcgccggtactcacgccgtcctcctctaactcctcgctagtacgcacttgccatcccgattccatttccagatctcgctaggtctcgctagttcccaagatctcacttgttgtttattggatcctgcattccacctcttttaattcttggggctctatccttggtctctaccgtcgacgagcccgagcagcaggccactggagcggacactgttgccgtgacggccgtggccctggtggtcgtgatggctgtctcgtagctcatgtcctgctgagagacccaaatgaccgatggccattgcgaacagaatagggaggctttgagtgtgaggccgtgacaacacagtcatctcactagaatctttatcacgttcacatctctaatgtgttagaactggatatttgtttacttgttcaaggtattgagattgcaataatgaactactgtctacgctcagctttagcatctatacctttctgatacttagaattagtttatgtagtttagtcgcaaagttataccaaagcacaatatataactgacaatacatttatggactaaccactattcatttacctgcctagttatgctatataactgacaatatatttatgaattagttatgctatataactgacaatacgcattcactgatttgcagttagtattaataggcaactaactggacacattcacagattcataaaggcatgcacctaataaggtcacatgactgaaatcatatttatatgcaaaacagattcagatactaagaacttgagcaccagtccaaactgcagtatctagctcagtagaatggagtatggtcatcgatgatggagaggctaggcgtgtgtcactgtatcgatgtaggaggcaattgtccaatacaaatcatatatttgcataccttgagtagagtaattctctatatactgagcagagtaatttaaaaaaattagatacactgagcagagtaattctctattatggcatcatatatttgctttacctggagtagtttgaatgtgcaagacagtaataatagtttgaatgtgcaagacaatactagtattttctcatatctgaatatttaacgtttgtccatctatacaagcataggattagttggcactagaatcatgtgacgaggagaaggagcacatgccatgtaactgcatgtagaaagccagtttcattatgcaatgcaagtttagagttttgttttgaaataaagggcgcatggagaaatagaaacgtcatgctagctaataaacaacttatggtagctaataaacagaaatgtatttttcacaaatctcatttatttccaattagttgtctatgtatttctaacaaaaacctattatatttctagattatccctgcatcggttcgagttggagaagacgaacttccaccatcttgggaccctacaccctctcctttacttagcaatggatgtgacactaagagatcgccttagaaagagaagggatgaggatgatgatgatatgatgctgtttttttcctatgctacatatattgggctttagttcaaacatagcaagggaaaagaagcgaaggcatacatcaaagttaagtggccaagaacatgttcaagagttgcttcaaggtcatttgaagaactgttggtgaatggtgatgatgcattgctccttgttgctgacgaccgcctgctactgcttgctacttttaccacgacaacaacgattgctgcttgctgctggccatgtgtgcaaggcctggtcatgcataaacaattgtgcatgtcatgaactctttaagcgtagggcatttcagtgcattggatggattacttgtcctgtaatgaaacctataataatggtgcttctatgcgactgctgcaagacattacttgtctgctctttcttgtgtaaactgaggacaattatatgctattccacttgtctgcaattttacttgtctgctatcttcgtagtatttcacttgtctgctatttcagtgcattgtatgctgcctgacggtaggaaatgaaatatgttgataagtctttt

SEQ ID NO: 43452 - DNA, 262 bp, Zea Mays
gccatttcctctccctccctctccccacgccactctccctactccctccctctctctctatctccctctctctagctccccatgcagcagcagcccctcctcccttggagctggcgaccagccctcccaagctccactctcaccttggcaagctctcccatggcgtctccccctcctctacggcagtaagatgtagacgccggttctccctgttctccacaccggcaaatcccaagggagatttttctccctttgaacaatt

SEQ ID NO: 43453 - DNA, 664 bp, Zea Mays
cggccatttcacctctgtttcgatttcgaaccaacacatgcggtgaggctagtgacgcagcatagaagaagaggaggagcacactgcactgcactgcacctttcatgtcgtcggcagtgacgctgtacgggtgcgaaagaggtgaaatggccgatcgagatcctgggggcccagaacgacacgaccacgccgccgaaagaagtgtaccggttcgtgcatgtgctacgtgaaagacacgaggttccctactacgccaagatcttccagggagtcgagcacgggttcgcctgcaggtacaacaccaccgaccctttcgccgtcaagaccgcagagacggccctcgcctacatggtcagctggttcaacaagcacctcaactgaatcaagcctgcactgcacccaccagactgaattcaataaaccacagcagtgctgtgatattttgtttggattcatggctccccagattgatttgtcatggctaagacctctactactgtaatttccctcattttttgtctcttcaaactctctgtattctttttttttgcttttttatgaccgcaataaagttcagtaggggtatacccctcatgtttgcttcaaaccgcacttgagtgcttgactctgtccgtcagtccatctccgcgcgcctcaggtgacg

SEQ ID NO: 43454 - DNA, 2522 bp, Zea Mays
actcgacttcccccacctccctcgtcagctgcagtgtcaatccctcctctccgccgcctacagctgcggggagctcgccagtcgccacttcgccagtcgccacttcgccagaatgttccatcagtaccaggcagcgggtcgcgcgctgccagtccccgctgatgagcaccccaagatctaccgcatggagcttgcgctaccaacgaggtctgctccaaatccaagctctggtactatctgaggaagctcaagtctcaagaaggtttaagagcaacggtcagattctcgccatagacgagatctttgagtgtaaccctacaacaatcaagagctgtggcatctggctgtgttaccagtgcaggacaggttaccacgacctgcacaaggagtaccgtaataccaccctgaatggtgccatggagcagatgtacaatgagacggcttcctgtcatcgtgtggtcaccctacatacagatcatcaagacggcaacaatcaactttaagctttgcaagagggacaacgccaagcagttccacaattcaaagttcaagtttcctttggtttactgcaacaagtcaggccaccaaataggaagctgaagaccaccttcaaggctttaaggcccaacttgttcgtgttatccaacttgccctgacaccctcccaaatctgtgaggctgtcagtctggtggtttgctagttcagggtaatgcaatctacatgcaacctattgtttctaagttctagttggaggtccatgaaagggttcttagtgtgatggcaaaggcttccgagtagcaccctagtgacccgggtctggtgggttgctagttcaggatgtctgaccataggcgtagaggagggagacgtacccagcaagagcaacatgattcgtaggatgaggcaccccattcgcagttgcctcccccatccccgatgacaatggagaagatgttcctcatgcaaactcaagcagttcagtcaattgtgcagaccctgatagccatccagcaggtgcaacaacaacctcagccacagatacagatatcgtagatgccaagagataatgtgcggagtttatgagaggtcatctcctgtgttcgctcagtctgctgacctcatggacgtcgaggattgcctgcgtatcgtggagcgtgagttgcacatcgcccaatgcaacgacagagaaaaggttatgtttggtcctcgcctgttaaggggagtagctcagtcctggtgggagtactatctcgctatccacgccgagcccgagaccattacttgggaggaattcagggataactttcgtcggtgtcatattctagaaggtctaataatagtgaagaaaggaaattctgacactaaagcaaggacccatgtcagtgagtatagagatatgtttctgcaattgtctcgctatgctactgaagatgtcaacactgatgccaagatgcagtaccgtttcctaagaggctttgttgatccccttcactaccaattgatgaatcataccttctccatctttcagcacctgatcgacagagctatcataattgagaacaagcgcaaagagatgaaagatcaaaaacgtaagattggtggacctcagcccgagagcaacaatcgtccccgtttctcaggtaatccacctcagcagttaaaacaaaatcactgtcagggatatcaacagcagaactagcgtctgcatcagtagcaattccagaggcagtaaccccagcatcagcagcagtatagttagaacagtcaatcgggaggaaatcagttctagaggcagaataatcagtcacctcgtcttcctgccccagcaaccaactagagtagtcaaccagcggccgatgcactgcacctgggatcttttcagatactgtaccatgacgatcttcttcagtgtgcctgacataccaacttcagggcacttgttcttcgatttcatgcaacaaaccactaagccgactgtaccaaagttgttcccctatataccagcttaaattttgttacaaagatcttagtcaaacattcactggatcgagcactatttggttttaaagttgattcgatgccactgttagtctaatttcagagtgatactcgactgaaagcccatcttctagtccattttgctacaatttctgtacaattatatatctcaatcacttaatcaaacattcactggaagaaaatgagttgtctttgtaagccggtgcactatgacccaaatagagtcacatcttttagatgtcttgggtagtcccacaacaaaatccatactgatgtctttccatttccaggttgggatcgacaatgattgtaaaagtccagtagctttcatatgcactgccttaacttgtctacaagtgtcatattttgccacatagcgagcgatttcaatcttcatcttagtccaccaataatgttgtttcaagtcttggtacatcttattacttctagggtgaatggaataacgactaagatgagcttcatccaaaatttgttgatggatt

SEQ ID NO: 43455 - DNA, 2368 bp, Zea Mays
actcgacttcccccacctccctcgtcagctgcagtgtcaatccctcctctccgccgcctacagctgcggggagctcgccagtcgccacttcgccagtcgccacttcgccagaatgttccatcagtaccaggcagcgggtcgcgcgctgccagtccccgctgatgagcaccccaagatctaccgcatggagcttgcgctaccaacgaggtactatctgaggaagctcaagtctcaagaaggtttaagagcaacggtcagattctcgccatagacgagatctttgagtgtaaccctacaacaatcaagagctgtggcatctggctgtgttaccagtgcaggacaggttaccacgacctgcacaaggagtaccgtaataccaccctgaatggtgccatggagcagatgtacaatgagacggcttcctgtcatcgtgtggtcaccctacatacagatcatcaagacggcaacaatcaactttaagctttgcaagagggacaacgccaagcagttccacaattcaaagttcaagtttcctttggtttactgcaacaagtcaggccaccaaataggaagctgaagaccaccttcaaggctttaaggcccaacttgttcgtgttatccaacttgccctgacaccctcccaaatctgtgaggctgtcagtctggtggtttgctagttcaggatgtctgaccataggcgtagaggagggagacgtacccagcaagagcaacatgattcgtaggatgaggcaccccattcgcagttgcctcccccatccccgatgacaatggagaagatgttcctcatgcaaactcaagcagttcagtcaattgtgcagaccctgatagccatccagcaggtgcaacaacaacctcagccacagatacagatatcgtagatgccaagagataatgtgcggagtttatgagaggtcatctcctgtgttcgctcagtctgctgacctcatggacgtcgaggattgcctgcgtatcgtggagcgtgagttgcacatcgcccaatgcaacgacagagaaaaggttatgtttggtcctcgcctgttaaggggagtagctcagtcctggtgggagtactatctcgctatccacgccgagcccgagaccattacttgggaggaattcagggataactttcgtcggtgtcatattctagaaggtctaataatagtgaagaaaggaaattctgacactaaagcaaggacccatgtcagtgagtatagagatatgtttctgcaattgtctcgctatgctactgaagatgtcaacactgatgccaagatgcagtaccgtttcctaagaggctttgttgatccccttcactaccaattgatgaatcataccttctccatctttcagcacctgatcgacagagctatcataattgagaacaagcgcaaagagatgaaagatcaaaaacgtaagattggtggacctcagcccgagagcaacaatcgtccccgtttctcaggtaatccacctcagcagttaaaacaaaatcactgtcagggatatcaacagcagaactagcgtctgcatcagtagcaattccagaggcagtaaccccagcatcagcagcagtatagttagaacagtcaatcgggaggaaatcagttctagaggcagaataatcagtcacctcgtcttcctgccccagcaaccaactagagtagtcaaccagcggccgatgcactgcacctgggatcttttcagatactgtaccatgacgatcttcttcagtgtgcctgacataccaacttcagggcacttgttcttcgatttcatgcaacaaaccactaagccgactgtaccaaagttgttcccctatataccagcttaaattttgttacaaagatcttagtcaaacattcactggatcgagcactatttggttttaaagttgattcgatgccactgttagtctaatttcagagtgatactcgactgaaagcccatcttctagtccattttgctacaatttctgtacaattatatatctcaatcacttaatcaaacattcactggaagaaaatgagttgtctttgtaagccggtgcactatgacccaaatagagtcacatcttttagatgtcttgggtagtcccacaacaaaatccatactgatgtctttccatttccaggttgggatcgacaatgattgtaaaagtccagtagctttcatatgcactgccttaacttgtctacaagtgtcatattttgccacatagcgagcgatttcaatcttcatcttagtccaccaataatgttgtttcaagtcttggtacatcttattacttctagggtgaatggaataacgactaagatgagcttcatccaaaatttgttgatggatt

SEQ ID NO: 43456 - DNA, 2425 bp, Zea Mays
gctcattagggttcctcacccaactataaataccactcgacttcccccacctccctcgtcagctgcagtgtcaatccctcctctccgccgcctacagctgcggggagctcgccagtcgccacttcgccagtcgccacttcgccagaatgttccatcagtaccaggcagcgggtcgcgcgctgccagtccccgctgatgagcaccccaagatctaccgcatggagcttgcgctaccaacgaggtctgctccaaatccaagctctggtactatctgaggaagctcaagtctcaagaaggtttaagagcaacggtcagattctcgccatagacgagatctttgagtgtaaccctacaacaatcaagagctgtggcatctggctgtgttaccagtgcaggacaggttaccacgacctgcacaaggagtaccgtaataccaccctgaatggtgccatggagcagatgtacaatgagacggcttcctgtcatcgtgtggtcaccctacatacagatcatcaagacggcaacaatcaactttaagctttgcaagagggacaacgccaagcagttccacaattcaaagttcaagtttcctttggtttactgcaacaagtcaggccaccaaataggaagctgaagaccaccttcaaggctttaaggcccaacttgttcgtgttatccaacttgccctgacaccctcccaaatctgtgaggctgtcagtctggtggtttgctagttcaggatgtctgaccataggcgtagaggagggagacgtacccagcaagagcaacatgattcgtaggatgaggcaccccattcgcagttgcctcccccatccccgatgacaatggagaagatgttcctcatgcaaactcaagcagttcagtcaattgtgcagaccctgatagccatccagcaggtgcaacaacaacctcagccacagatacagatatcgtagatgccaagagataatgtgcggagtttatgagaggtcatctcctgtgttcgctcagtctgctgacctcatggacgtcgaggattgcctgcgtatcgtggagcgtgagttgcacatcgcccaatgcaacgacagagaaaaggttatgtttggtcctcgcctgttaaggggagtagctcagtcctggtgggagtactatctcgctatccacgccgagcccgagaccattacttgggaggaattcagggataactttcgtcggtgtcatattctagaaggtctaataatagtgaagaaaggaaattctgacactaaagcaaggacccatgtcagtgagtatagagatatgtttctgcaattgtctcgctatgctactgaagatgtcaacactgatgccaagatgcagtaccgtttcctaagaggctttgttgatccccttcactaccaattgatgaatcataccttctccatctttcagcacctgatcgacagagctatcataattgagaacaagcgcaaagagatgaaagatcaaaaacgtaagattggtggacctcagcccgagagcaacaatcgtccccgtttctcaggtaatccacctcagcagttaaaacaaaatcactgtcagggatatcaacagcagaactagcgtctgcatcagtagcaattccagaggcagtaaccccagcatcagcagcagtatagttagaacagtcaatcgggaggaaatcagttctagaggcagaataatcagtcacctcgtcttcctgccccagcaaccaactagagtagtcaaccagcggccgatgcactgcacctgggatcttttcagatactgtaccatgacgatcttcttcagtgtgcctgacataccaacttcagggcacttgttcttcgatttcatgcaacaaaccactaagccgactgtaccaaagttgttcccctatataccagcttaaattttgttacaaagatcttagtcaaacattcactggatcgagcactatttggttttaaagttgattcgatgccactgttagtctaatttcagagtgatactcgactgaaagcccatcttctagtccattttgctacaatttctgtacaattatatatctcaatcacttaatcaaacattcactggaagaaaatgagttgtctttgtaagccggtgcactatgacccaaatagagtcacatcttttagatgtcttgggtagtcccacaacaaaatccatactgatgtctttccatttccaggttgggatcgacaatgattgtaaaagtccagtagctttcatatgcactgccttaacttgtctacaagtgtcatattttgccacatagcgagcgatttcaatcttcatcttagtccaccaataatgttgtttcaagtcttggtacatcttattacttctagggtgaatggaataacgactaagatgagcttcatccaaaatttgttgatggatt

SEQ ID NO: 43457 - DNA, 1219 bp, Zea Mays
actcgacttcccccacctccctcgtcagctgcagtgtcaatccctcctctccgccgcctacagctgcggggagctcgccagtcgccacttcgccagtcgccacttcgccagaatgttccatcagtaccaggcagcgggtcgcgcgctgccagtccccgctgatgagcaccccaagatctaccgcatggagcttgcgctaccaacgaggtctgctccaaatccaagctctggtactatctgaggaagctcaagtctcaagaaggtttaagagcaacggtcagattctcgccatagacgagatctttgagtgtaaccctacaacaatcaagagctgtggcatctggctgtgttaccagtgcaggacaggttaccacgacctgcacaaggagtaccgtaataccaccctgaatggtgccatggagcagatgtacaatgagacggcttcctgtcatcgtgtggtcaccctacatacagatcatcaagacggcaacaatcaactttaagctttgcaagagggacaacgccaagcagttccacaattcaaagttcaagtttcctttggtttactgcaacaagtcaggccaccaaataggaagctgaagaccaccttcaaggctttaaggcccaacttgttcgtgttatccaacttgccctgacaccctcccaaatctgtgaggctgtcagtctggtggtttgctagttcagggcaactttgccaaggttaccaactataaatttggtatcctttttttccctgttgccaataccactgttgctactggatgtttgaactttccatgagctattttattggtttcatgtgtaagcatccttgccaacattgttcagtaaaggaacattgtacttccaaatctgcacaaacttgtaactgtaatggtttgaattctcatgtacttttccatgcagcaccaacatcagtttctttttgcgtggcattgtgtaatctatttgttttttcattagtgacattttgaattcaaacgtgttgctattttacccctttgagaatgcagtgtgaacgtaaattaattttagtattctaatttagtttctgattaccattcactttggttaactttgtcaagcttacctatttactttggttaactttttcccctgttctgttgcctatatcatccattgcttgattttcgtatttaatgcaccgtcttttattataggcattctggcaactatt

SEQ ID NO: 43458 - DNA, 1347 bp, Zea Mays
actcgacttcccccacctccctcgtcagctgcagtgtcaatccctcctctccgccgcctacagctgcggggagctcgccagtcgccacttcgccagtcgccacttcgccagaatgttccatcagtaccaggcagcgggtcgcgcgctgccagtccccgctgatgagcaccccaagatctaccgcatggagcttgcgctaccaacgaggtactatctgaggaagctcaagtctcaagaaggtttaagagcaacggtcagattctcgccatagacgagatctttgagtgtaaccctacaacaatcaagagctgtggcatctggctgtgttaccagtgcaggacaggttaccacgacctgcacaaggagtaccgtaataccaccctgaatggtgccatggagcagatgtacaatgagacggcttcctgtcatcgtgtggtcaccctacatacagatcatcaagacggcaacaatcaactttaagctttgcaagagggacaacgccaagcagttccacaattcaaagttcaagtttcctttggtttactgcaacaagtcaggccaccaaataggaagctgaagaccaccttcaaggctttaaggcccaacttgttcgtgttatccaacttgccctgacaccctcccaaatctgtgaggctgtcagtctggtggtttgctagttcagggtaatgcaatctacatgcaacctattgtttctaagttctagttggaggtccatgaaagggttcttagtgtgatggcaaaggcttccgagtagcaccctagtgacccgggtctggtgggttgctagttcagggtaactcaatctacatgcaacctattgtttctaagttctagttggaggtccacaaaagggctcttagtgtgatggccaaggcttccgagtagcaccctagtgacctgggttatgactcccagtgggagtggatttatgtggactgggtaaaaatatccctttgtctaaccatacgtcaaagcacgatttaaggcctgtcccatgctcacataggcaatgtggtcgtcgtgtaagggtgtgggaaagtaggtttaagggttcccttaggcaatgcttgggggcctatcccatcctcatttctttttgttctttaccgtctggtgccttataaattataatagcatgtacaaatctcatgtgctttaaacttacccaaaaaagagcagacctgttactggagggatctggacggggtataaacggaggcaatggtgacttagtgagacagctctcaccactgcattatgcctgctttaaaattcactcaaatgtcaaaactggtgtttgcttatggctatgttgctgcggtcttc

SEQ ID NO: 43459 - DNA, 1302 bp, Zea Mays
actcgacttcccccacctccctcgtcagctgcagtgtcaatccctcctctccgccgcctacagctgcggggagctcgccagtcgccacttcgccagtcgccacttcgccagaatggttgcccacacgttccatcagtaccaggcagcgggtcgcgcgctgccagtccccgctgatgagcaccccaagatctaccgcatggagcttgcgctaccaacgaggtactatctgaggaagctcaagtctcaagaaggtttaagagcaacggtcagattctcgccatagacgagtgcaggacaggttaccacgacctgcacaaggagtaccgtaataccaccctgaatggtgccatggagcagatgtacaatgagacggcttcctgtcatcgtgtggtcaccctacatacagatcatcaagacggcaacaatcaactttaagctttgcaagagggacaacgccaagcagttccacaattcaaagttcaagtttcctttggtttactgcaacaagtcaggccaccaaataggaagctgaagaccaccttcaaggctttaaggcccaacttgttcgtgttatccaacttgccctgacaccctcccaaatctgtgaggctgtcagtctggtggtttgctagttcagggtaatgcaatctacatgcaacctattgtttctaagttctagttggaggtccatgaaagggttcttagtgtgatggcaaaggcttccgagtagcaccctagtgacccgggtctggtgggttgctagttcagggtaactcaatctacatgcaacctattgtttctaagttctagttggaggtccacaaaagggctcttagtgtgatggccaaggcttccgagtagcaccctagtgacctgggttatgactcccagtgggagtggatttatgtggactgggtaaaaatatccctttgtctaaccatacgtcaaagcacgatttaaggcctgtcccatgctcacataggcaatgtggtcgtcgtgtaagggtgtgggaaagtaggtttaagggttcccttaggcaatgcttgggggcctatcccatcctcatttctttttgttctttaccgtctggtgccttataaattataatagcatgtacaaatctcatgtgctttaaacttacccaaaaaagagcagacctgttactggagggatctggacggggtataaacggaggcaatggtgacttagtgagacagctctcaccactgcattatgcctgctttaaaattcactcaaatgtcaaaactggtgtttgcttatggctatgttgctgcggtcttc

SEQ ID NO: 43460 - DNA, 1313 bp, Zea Mays
actcgacttcccccacctccctcgtcagctgcagtgtcaatccctcctctccgccgcctacagctgcggggagctcgccagtcgccacttcgccagtcgccacttcgccagaatgttccatcagtaccaggcagcgggtcgcgcgctgccagtccccgctgatgagcaccccaagatctaccgcatggagcttgcgctaccaacgaggtctgctccaaatccaagctctggtactatctgaggaagctcaagtctcaagaaggtttaagagcaacggtcagattctcgccatagacgagtgcaggacaggttaccacgacctgcacaaggagtaccgtaataccaccctgaatggtgccatggagcagatgtacaatgagacggcttcctgtcatcgtgtggtcaccctacatacagatcatcaagacggcaacaatcaactttaagctttgcaagagggacaacgccaagcagttccacaattcaaagttcaagtttcctttggtttactgcaacaagtcaggccaccaaataggaagctgaagaccaccttcaaggctttaaggcccaacttgttcgtgttatccaacttgccctgacaccctcccaaatctgtgaggctgtcagtctggtggtttgctagttcagggtaatgcaatctacatgcaacctattgtttctaagttctagttggaggtccatgaaagggttcttagtgtgatggcaaaggcttccgagtagcaccctagtgacccgggtctggtgggttgctagttcagggtaactcaatctacatgcaacctattgtttctaagttctagttggaggtccacaaaagggctcttagtgtgatggccaaggcttccgagtagcaccctagtgacctgggttatgactcccagtgggagtggatttatgtggactgggtaaaaatatccctttgtctaaccatacgtcaaagcacgatttaaggcctgtcccatgctcacataggcaatgtggtcgtcgtgtaagggtgtgggaaagtaggtttaagggttcccttaggcaatgcttgggggcctatcccatcctcatttctttttgttctttaccgtctggtgccttataaattataatagcatgtacaaatctcatgtgctttaaacttacccaaaaaagagcagacctgttactggagggatctggacggggtataaacggaggcaatggtgacttagtgagacagctctcaccactgcattatgcctgctttaaaattcactcaaatgtcaaaactggtgtttgcttatggctatgttgctgcggtcttc

SEQ ID NO: 43461 - DNA, 1359 bp, Zea Mays
actcgacttcccccacctccctcgtcagctgcagtgtcaatccctcctctccgccgcctacagctgcggggagctcgccagtcgccacttcgccagtcgccacttcgccagaatggttgcccacacgttccatcagtaccaggcagcgggtcgcgcgctgccagtccccgctgatgagcaccccaagatctaccgcatggagcttgcgctaccaacgaggtactatctgaggaagctcaagtctcaagaaggtttaagagcaacggtcagattctcgccatagacgagatctttgagtgtaaccctacaacaatcaagagctgtggcatctggctgtgttaccagtgcaggacaggttaccacgacctgcacaaggagtaccgtaataccaccctgaatggtgccatggagcagatgtacaatgagacggcttcctgtcatcgtgtggtcaccctacatacagatcatcaagacggcaacaatcaactttaagctttgcaagagggacaacgccaagcagttccacaattcaaagttcaagtttcctttggtttactgcaacaagtcaggccaccaaataggaagctgaagaccaccttcaaggctttaaggcccaacttgttcgtgttatccaacttgccctgacaccctcccaaatctgtgaggctgtcagtctggtggtttgctagttcagggtaatgcaatctacatgcaacctattgtttctaagttctagttggaggtccatgaaagggttcttagtgtgatggcaaaggcttccgagtagcaccctagtgacccgggtctggtgggttgctagttcagggtaactcaatctacatgcaacctattgtttctaagttctagttggaggtccacaaaagggctcttagtgtgatggccaaggcttccgagtagcaccctagtgacctgggttatgactcccagtgggagtggatttatgtggactgggtaaaaatatccctttgtctaaccatacgtcaaagcacgatttaaggcctgtcccatgctcacataggcaatgtggtcgtcgtgtaagggtgtgggaaagtaggtttaagggttcccttaggcaatgcttgggggcctatcccatcctcatttctttttgttctttaccgtctggtgccttataaattataatagcatgtacaaatctcatgtgctttaaacttacccaaaaaagagcagacctgttactggagggatctggacggggtataaacggaggcaatggtgacttagtgagacagctctcaccactgcattatgcctgctttaaaattcactcaaatgtcaaaactggtgtttgcttatggctatgttgctgcggtcttc

SEQ ID NO: 43462 - DNA, 979 bp, Zea Mays
ttccctgggaaataaattgccacgaaatttaaacaccaacctctgatttcctctcctccgtgtcgccggccacccactgatccatccactcgccccaatggatcacgccgccgagcacctcgaccccaccgccccggcaccctcgtccgcctcctcctctgctgccgtcgcggagctttgtagtggcaagtgcagacttgtctctgaggcgagcagaggtggaggagaagagggacaaagtgcataaggagtccaaggcactacttgactacacacggaaggccataaacaagcttactgagctgaagaagatgctggagaaatttaagaatgatgtggagaagcaacaagtggagcaaatgactgattggcaaacaaagcttgttatgatggactccaaggaacggcaatatatcctccaagtctcaaattataaggcaatgcttaatcgagtgggttatacgccagagatcaatcatggtgtgttgatggaaatggctgagcataagaaggatctcgagaggaagactaaacccatagctgacacattaaggagctaccaggatttacctccagataaagctttagctgcactagctatagaggacaaaaagaggcagtatgcagccgcagagaagtacctagaagatgtgttgcaatctgctctaaccacaagtggcctataatgtgcatagttttgtttgctgtgtcttatatgttgccatcgattgaaggtgaaatggaagcagatcgatggtatcctacaaatgtgaagacgaaatcctacgagtgcgagctctactatatgtataaattgtgatgcacatcttgtttaaatgttctgataacgctattctaccccttggtgctaacagatgttccttgtcttgccttaccctgtttcctgtaaactgtaaatataatagtgaagaaaatgtctacttgactgtaaaatatattttcatttgcagtcttgttt

SEQ ID NO: 43463 - DNA, 1316 bp, Zea Mays
ttccctgggaaataaattgccacgaaatttaaacaccaacctctgatttcctctcctccgtgtcgccggccacccactgatccatccactcgccccaatggatcacgccgccgagcacctcgaccccaccgccccggcaccctcgtccgcctcctcctctgctgccgtcgcggaggtaaatgcgtggctggcctccctcgccgcggatgtgggagggcgaggcggtggcggaggtgcggcggcggagctgtcgctgggtcccgaccccacaccgcgcggggtggcctacctccgcgcgctggcctctgcttcgcaggggcggtcccgcgctgccggaatcgcggctgcggggctgcgtgcgcaggcggccgagtaccgcgccgaggcggcgcggttgcgggaggctctcgagcgggcggggctcgcgagggacgcactcccaccacctgcagccgcggcggcacgagccgttgctgcagtcgctaacctcctcgccatccgtgacaccgagatgagcagctttgtagtggcaagtgcagacttgtctctgaggcgagcagaggtggaggagaagagggacaaagtgcataaggagtccaaggcactacttgactacacacggaaggccataaacaagcttactgagctgaagaagatgctggagaaatttaagaatgatgtggagaagcaacaagtggagcaaatgactgattggcaaacaaagcttgttatgatggactccaaggaacggcaatatatcctccaagtctcaaattataaggcaatgcttaatcgagtgggttatacgccagagatcaatcatggtgtgttgatggaaatggctgagcataagaaggatctcgagaggaagactaaacccatagctgacacattaaggagctaccaggatttacctccagataaagctttagctgcactagctatagaggacaaaaagaggcagtatgcagccgcagagaagtacctagaagatgtgttgcaatctgctctaaccacaagtggcctataatgtgcatagttttgtttgctgtgtcttatatgttgccatcgattgaaggtgaaatgatcgatggtatcctacaaatgtgaagacgaaatcctacgagtgcgagctctactatatgtataaattgtgatgcacatcttgtttaaatgttctgataacgctattctaccccttggtgctaacagatgttccttgtcttgccttaccctgtttcctgtaaactgtaaatataatagtgaagaaaatgtctacttgactgtaaaatatattttcatttgcagtcttgttt

SEQ ID NO: 43464 - DNA, 1315 bp, Zea Mays
ttccctgggaaataaattgccacgaaatttaaacaccaacctctgatttcctctcctccgtgtcgccggccacccactgatccatccactcgccccaatggatcacgccgccgagcacctcgaccccaccgccccggcaccctcgtccgcctcctcctctgctgccgtcgcggaggtaaatgcgtggctggcctccctcgccgcggatgtgggagggcgaggcggtggcggaggtgcggcggcggagctgtcgctgggtcccgaccccacaccgcgcggggtggcctacctccgcgcgctggcctctgcttcgcaggggcggtcccgcgctgccggaatcgcggctgcggggctgcgtgcgcaggcggccgagtaccgcgccgaggcggcgcggttgcgggaggctctcgagcgggcggggctcgcgagggacgcactcccaccacctgcagccgcggcggcacgagccgttgctgcagtcgctaacctcctcgccatccgtgacaccgagatgagcagctttgtagtggcaagtgcagacttgtctctgaggcgagcagaggtggaggagaagagggacaaagtgcataaggagtccaaggcactacttgactacacacggaaggccataaacaagcttactgagctgaagaagatgctggagaaatttaagaatgatgtggagaagcaacaagtggagcaaatgactgattggcaaacaaagcttgttatgatggactccaaggaacggcaatatatcctccaagtctcaaattataaggcaatgcttaatcgagtgggttatacgccagagatcaatcatggtgtgttgatggaaatggctgagcataagaaggatctcgagaggaagactaaacccatagctgacacattaaggagctaccaggatttacctccagataaagctttagctgcactagctatagaggacaaaaagaggcagtatgcagccgcagagaagtacctagaagatgtgttgcaatctgctctaaccacaagtggcctataatgtgcatagttttgtttgctgtgtcttatatgttgccatcgattgaaggaagcagatcgatggtatcctacaaatgtgaagacgaaatcctacgagtgcgagctctactatatgtataaattgtgatgcacatcttgtttaaatgttctgataacgctattctaccccttggtgctaacagatgttccttgtcttgccttaccctgtttcctgtaaactgtaaatataatagtgaagaaaatgtctacttgactgtaaaatatattttcatttgcagtcttgttt

SEQ ID NO: 43465 - DNA, 1346 bp, Zea Mays
ggacagcagcagttctagtggcttcatccctttagaaatatcagtttggatccatttaagtctgcacacactagaattcttatctgttggtttactgtctacagaaagggacaaatcagatatttggctgctagaagtgaccaagttcagtttttcttgccgtgaccaactttggaataggatgaagattgggatggagtgttggcaggggtattcagatttgttcatcactgaaatatcacctgtgcaaatatccagaacagtgccatcctatcttcacctccctcccttgccctggataatcttcaccctgcagcaccggcgtgggcttccttgagtaagccacgactgcaccccatgcacatagttatcccccctgtaaactcaagaatccagtcccttgatcttttccctgcctatataaagagcaacagggtgagggaaagaaagcagaagccagtgcagtgatccgtgcctcgatcatcaaccatagtgagtagcttcagtcagcagtattgctcttccttccccaaatcataccctggacgcgcccaattccatcgatcaaggcactgaatgtgtctggtgaccacacctgcagatcttccactttaccgtggccagaaaacgaagaagagagtaaagtgactgaagagaagacaccaccacctttggaatctcaggcagggacttggctctacttcgacatctgcggatccgagcctgactcacctgtgaacaaaggcaagccccggtgcatgcaacccctttccttgtgttttaaatacttttcgcacactttaagtctagtgaaatgtgcattaggttcataggagttgcttggaaccctttaatgcattgctttccttgatatccatacctttatagatacttctgtgaagtatcaaaatatgatttacaaaaatgcttagccttgcttagaccttgtggatagaggttgtcctcagtctaacccgggagaggatggcttctacctgcaagaatattttcatttggagcaatagtgggatcttactgcaaagttccctgtgatgctctttcatcctaaggaacagacacaatcctaaggatggaaatacttaaattgagacttgggttaggaacaggtgatgttctacccaggttggttaaggattaatgcgtatgtaggcgtgctgaccgaggaccctttaactggtcacatgcctcgtcatgggtaagccttgcctcgggcagactaaggccagaataagataacacgaaatggcgcatggagcggtggcgagagtagcgtgtaccctccgtggcaagaggctggacggtggtgtatctgtgctctcggtttg

SEQ ID NO: 43466 - DNA, 3395 bp, Zea Mays
gtttggtgctacacagaaaaaggagtaaaagtggctcaaaattggactgtcaggctggttccaactgctttgggttcagtctctgaaacctgaatttcagtatatgatgcttaatttggagctgttttgtgataaatatgagtggttttagactatagtttctatagcaaagttggagaacagatatagatggacaagtttcatgcaaggagatggtcctgttgttatgtaaagatggagagagaatggagctgcaaagtcctctgtcagaaatagtgagggctgttcagttaagctgagaccaagtgtttggctgtttctgctataatttggaacaccacaacttcaattctgagtagtttcagctttggagtgttgtaccaaagtggaatacctatggttggagaataaggcttgttaagggagatgggtctgttgtcatatggaattgtgagtaaaatgctctctaatatgccttgtcagacttaaagggttgcatttgggttcagctctctgaagaagagtttcagagtgtgtgcttggctttggaaccttatagtttgtgatccatgtgtttctagcagtggaatgctgtagtgggttgaagagctatagtcaatgagcaagtttcctatgattaaattaaggtgttgctacatggaaaatgtaagggaatgaccttgaaaggcccctgtcagtccagctaagcaacagtaattcgtttaggactgaagacagtttctgaagaagattatctcctctccctgctggtttctttggatgtttgggtagagataaggtcgaagtccagagccagggatctagtggcctcagatctactaaaaaaatatccaaattttgacctattttgtgagcagtgaatgagagggggtcctcatctaatgaatctttaatggggtatgctggacagcagcagttctagtggcttcatccctttagaaatatcagtttggatccatttaagtctgcacacactagaattcttatctgttggtttactgtctacagaaagggacaaatcagatatttggctgctagaagtgaccaagttcagtttttcttgccgtgaccaactttggaataggatgaagattgggatggagtgttggcaggggtattcagatttgttcatcactgaaatatcacctgtgcaaatatccagaacagtgccatcctatcttcacctccctcccttgccctggataatcttcaccctgcagcaccggcgtgggcttccttgagtaagccacgactgcaccccatgcacatagttatcccccctgtaaactcaagaatccagtcccttgatcttttccctgcctatataaagagcaacagggtgagggaaagaaagcagaagccagtgcagtgatccgtgcctcgatcatcaaccatagtgagtagcttcagtcagcagtattgctcttccttccccaaatcataccctggacgcgcccaattccatcgatcaaggcactgaatgtgtctggtgaccacacctgcagatcttccactttaccgtggccaggtatgctcagaaagtttctcacccgtgtggcttgtgttccatgatctgtattggtcagtgaagctgatcaagtggtttgttcaagctctaccgccatacgttgagtagaacacggtcgcgccgtcgcggtcgggcgccgaggacagcctcggtgtggaccgtattaaccgcgccattcccgagcgattgcgcgcgcgcaccgtagacttaagtggtctctaaagctccctggcccgtttgtttgaacactaccgtgcggtgatcggggaatagagttcgtcggatccagtgctccgccgtcgctgccgataaatgggttgtggagttctcatggatcgattgagcccatacccgagttcactgcgattcggggttcgcgtgggtaccatcgccgtcgccggtgttgcgccaccatggccgagctggcgctgggtcgccggagttcgtacgggcgatgtcggggccgagtgcttgtaaataagtggaagccaaggggttttagcgaggatgtcagagacacaagcaacagtggctgggagctctgattgttttaaccagagcgcaaggtcctttgtgcaagctggccaaagcgggcgcgggctcccgggtttgggccagctttgcctggttgttggaccacaccagcggtttgggcccaacactgttagtagtttttccttttctttttccaatcagctttagaaatccatagaaaatttctgaaaaatggtaaaaatgtcaaaccaattttgtcagattcctaattttccatagaatttaataaaaatagttttatgatttttagatcaaatagggaattttggagtatttaaaatagcctaaaaccttgtgtcttgatttttagaaaatcaataataattccaaaaatgcccaaactttttatatgagcttaaaataatatttagaagccttgggtaggatttggtttgatttggaccttgtttgataactagaacccaaaaccctaccccctaccctttgaactcctttactaactccggaaaccctaagttctcggagttccgtgaaggaatgttgtattcaaaacttagttaataaacctttattatctatgcactctcataagcattacatggcattcattcttatatatatacctatatggttatatttagaaaacgaagaagagagtaaagtgactgaagagaagacaccaccacctttggaatctcaggcagggacttggctctacttcgacatctgcggatccgagcctgactcacctgtgaacaaaggcaagccccggtgcatgcaacccctttccttgtgttttaaatacttttcgcacactttaagtctagtgaaatgtgcattaggttcataggagttgcttggaaccctttaatgcattgctttccttgatatccatacctttatagatacttctgtgaagtatcaaaatatgatttacaaaaatgcttagccttgcttagaccttgtggatagaggttgtcctcagtctaacccgggagaggatggcttctacctgcaagaatattttcatttggagcaatagtgggatcttactgcaaagttccctgtgatgctctttcatcctaaggaacagacacaatcctaaggatggaaatacttaaattgagacttgggttaggaacaggtgatgttctacccaggttggttaaggattaatgcgtatgtaggcgtgctgaccgaggaccctttaactggtcacatgcctcgtcatgggtaagccttgcctcgggcagactaaggccagaataagataacacgaaatggcgcatggagcggtggcgagagtagcgtgtaccctccgtggcaagag

SEQ ID NO: 43467 - DNA, 461 bp, Zea Mays
aggatttggtttgatttggaccttgtttgataactagaacccaaaaccctaccccctaccctttgaactcctttactaactccggaaaccctaagttctcggagttccgtgaaggaatgttgtattcaaaacttagttaataaacctttattatctatgcactctcataagcattacatggcattcattcttatttatatacctatatggttatatttagaaaacgaagaagagagtgaagtgactgaagagaagacaccaccacctttggattctcaggcagggacttggctctacttcgacatctgcggatccgagcctgactcacctgtgaacgaaggcaagccccggtgcatgcaacccctttccttgtgttttaaatacttttcgcacactttaagtctagtgaaatgtgcattaggttcataggagttgcttggaaccctttaatgcattgattt

SEQ ID NO: 43468 - DNA, 918 bp, Zea Mays
gaatgaccttgaaaggcccctgtcagtccagctaagcaacagtaattcgtttaggactgaagacagtttctgaagaagattatctcctctccctgctggtttctttggatgtttgggtagagataaggtcgaagtccagagccagggatctagtggcctcagatctactaaaaaaatatccaaattttgacctattttgtgagcagtgaatgagagggggtcctcatctaatgaatctttaatggggtatgctggacagcagcagttctagtggcttcatccctttagaaatatcagtttggatccatttaagtctgcacacactagaattcttatctgttggtttactgtctacagaaagggacaaatcagatatttggctgctagaagtgaccaagttcagtttttcttgccgtgaccaactttggaataggatgaagattgggatggagtgctggcaggggtattcagatttgttcatcactgaaatatcacctgtgcaaatatccagaacagtgccatcctatcttcacctccctcccttgccctggataatcttcaccctgcagcaccggcgtgggcttccttgaagcaacagggtgagggaaagaaagcagaagccagtgcagtgatccgtgcctcgatcatcaaccgtagtgagtagcttcagtcagcagtattgctcttccttccccaaatcataccctggacgcgcccaattccatcgatcaaggcactgaatgtgtctggtgaccacacctgcagatcttccactttaccgtggccagaaaacgaagaagagagtgaagtgactgaagagaagacaccaccacctttggattctcaggcagggacttggctctacttcgacatctgcggatccgagcctgactcacctgtgaacgaaggcaagccccg

SEQ ID NO: 43469 - DNA, 1661 bp, Zea Mays
tccacatcggcgccccagctgctagacctggcctccatgccaggattgttagcccctgctcccgtcgatacctcggtccttcgccatgggggagcccgctcccgccggtgcccggattggtgagatcatcagttgttttgagaagaagggcttcaatctcaagattctgaaaacagagtgttgctggtccatggaccatagtccatttctccaacacaacagccattgtctcagatagataaccttctacagacatcttatgatcaaggggacaaatgagatcatgccaactctactccatgtactgctggtgtcacaggattaatatacaatgaagatgttgattcttcttggagttgcacgaatgaaccttgtgattgtgattagttacttcaaagcatttttttggtcttaatgcatggatgggagagtgtcggatgcttcttcagatactatttcttggtccgtcaaatctgcttgacccaaatgaaagtttttctcaaatgtggcaaaaataattgtctcatcaattgtcagcgcgcctgcttccagcaaagtttcagagaaggtggttatgctctggatcatgcttagtacattttcttcttcgatgaaggcaagtgaatgtagcggtggttgctaccgttttgacttgttgtttcatcgcctacactctactattcagaatcatcaaattctttcgtaattgaactctatggtgatgctttacttgattgtattatattgatgcttaatcatatattgatgatgatgatgattcgagtatgacccacgagattaattcacactcctgaaggtgaatgaagtattatttgaggtttgtattatatctgaaggtaaacgaagtattgtttgaggtttgtattctatttgaaggaagtgaagtatattgataaatgcagcatgccatatacattgcatgattcacttgcatatgaagttttgtcgtgacctatggtccgaccgtaccggtacaacttagcatcgtacgttgcacgaggaggggtacgatgcggcttcatacccttagaggtatgaaggcagaggacatatgcattgcattcatatgcattcattgaagtgatatttgcagatggtgtggttttatactctaagagggaagtgttatacaacctattgtggtcattcgaggaaatgagatggcattggttattttgggactattgagttctatatctacaagtatttctgatctcaattgtgatcccttttaaaatgttgattaattcaattcttttggtttaaatatctcgtcaaaataatttacttgctgagatatttcatctcactcttgcattactcaatgcaggtacttgattcatattgggaatgagggaagtagtagcacgtccaccttcactctcataataacgctgcctaggcacaaccatgatttaattagaaacttcttgtcaaggatgtttgtttttaactagtcgtgcacactagttaattcagtttatgtcgttatggttatcttcccattgctagcagattattaatgcctagtatgttttcttatcatgatatttgtttatactctgttgcttccacgtttatgcaaatttccaaaggagatgttgtcgaaattttatatatgaatgttagttgtgtagttt

SEQ ID NO: 43470 - DNA, 1858 bp, Zea Mays
caccctccacatcggcgccccagctgctagacctggcctccatgccaggattgttagcccctgctcccgtcgatacctcggtccttcgccatgggggagcccgctcccgccggtgcccgggtcggtcgccaagatccccgccctttgccctgcccgtcccttagctccagcccccgctcttgctagcaatagccctcgccccaaagccccactcgcttgcagtcacggaatggagagtattttcatcatgtccaagcatacgttttccagagcagcctcattggtgagatcatcagttgttttgagaagaagggcttcaatctcaagattctttcctgacagagggttgcgttcttttctccaaggaaaacagagtgttgctggtccatggaccatagtccatttctccaacacaacagccattgtctcagatagataaccttctacagacatcttatgatcaaggggacaaatgagatcatgccaactctactccatgtactgctggtgtcacaggattaatatacaatgaagatgttgattcttcttggagttgcacgaatgaaccttgtgattgtgattagttacttcaaagcatttttttggtcttaatgcatggatgggagagtgtcggatgcttcttcagatactatttcttggtccgtcaaatctgcttgacccaaatgaaagtttttctcaaatgtggcaaaaataattgtctcatcaattgtcagcgcgcctgcttccagcaaagtttcagagaaggtggttatgctctggatcatgcttagtacattttcttcttcgatgaaggcaagtgaatgtagcggtggttgctaccgttttgacttgttgtttcatcgcctacactctactattcagaatcatcaaattctttcgtaattgaactctatggtgatgctttacttgattgtattatattgatgcttaatcatatattgatgatgatgatgattcgagtatgacccacgagattaattcacactcctgaaggtgaatgaagtattatttgaggtttgtattatatctgaaggtaaacgaagtattgtttgaggtttgtattctatttgaaggaagtgaagtatattgataaatgcagcatgccatatacattgcatgattcacttgcatatgaagttttgtcgtgacctatggtccgaccgtaccggtacaacttagcatcgtacgttgcacgaggaggggtacgatgcggcttcatacccttagaggtatgaaggcagaggacatatgcattgcattcatatgcattcattgaagtgatatttgcagatggtgtggttttatactctaagagggaagtgttatacaacctattgtggtcattcgaggaaatgagatggcattggttattttgggactattgagttctatatctacaagtatttctgatctcaattgtgatcccttttaaaatgttgattaattcaattcttttggtttaaatatctcgtcaaaataatttacttgctgagatatttcatctcactcttgcattactcaatgcaggtacttgattcatattgggaatgagggaagtagtagcacgtccaccttcactctcataataacgctgcctaggcacaaccatgatttaattagaaacttcttgtcaaggatgtttgtttttaactagtcgtgcacactagttaattcagtttatgtcgttatggttatcttcccattgctagcagattattaatgcctagtatgttttcttatcatgatatttgtttatactctgttgcttccacgtttatgcaaatttccaaaggagatgttgtcgaaattttatatatgaatgttagttgtgtagttt

SEQ ID NO: 43471 - DNA, 461 bp, Zea Mays
catattttggttcaaatgattctggatcggattaatatacaatgaagatgttgattcttcttggagttgcacgaatgaaccttgtgattgtgattagttacttcaaagcatttttttggtcttaatgcatggatgggagagtgtcggatgcttcttcagatactatttcttggtccgtcaaatctgcttgacccaaatgaaagtttttctcaaatgtggcaaaaataattgtctcatcaattgtcagcgcgcctgcttccagcaaagtttcagagaagatggaatgtaacacaatttttggtggccgcataagtgtggagacttgattcatatatacttagttaggctcatattagtgcaaacagctgatacagttttcattagtatttagtatggcttagagtacacttatgtatgagttatttgacatgtttattatgagaatattgatggtacttatt

SEQ ID NO: 43472 - DNA, 546 bp, Zea Mays
ctaattcattttgcttgttggatatcgatatgcacatgcattttcagacatcttatgatcaaggggacaaatgagatcatgccaactctactccatgtactgctggtgtcacaggattaatatacaatgaagatgttgattcttcttggagttgcacgaatgaaccttgtgattgtgattagttacttcaaagcatttttttggtcttaatgcatggatgggagagtgtcggatgcttcttcagatactatttcttggtccgtcaaatctgcttgacccaaatgaaagtttttctcaaatgtggcaaaaataattgtctcatcaattgtcagcgcgcctgcttccagcaaagtttcagagaagatggaatgtaacacaatttttggtggccgcataagtgtggagacttgattcatatatacttagttaggctcatattagtgcaaacagctgatacagttttcattagtatttagtatggcttagagtacacttatgtatgagttatttgacatgtttattatgagaatattgatggtacttatt

SEQ ID NO: 43473 - DNA, 812 bp, Zea Mays
tccacatcggcgccccagctgctagacctggcctccatgccaggattgttagcccctgctcccgtcgatacctcggtccttcgccatgggggagcccgctcccgccggtgcccggattggtgagatcatcagttgttttgagaagaagggcttcaatctcaagattctgtgtttcttctgtgctttccaaaactagttcctgacagagggttgcgttcttttctccaaggaaaacagagtgttgctggtccatggaccatagtccatttctccaacacaacagccattgtctcagatagataaccttctacagacatcttatgatcaaggggacaaatgagatcatgccaactctactccatgtactgctggtgtcacaggattaatatacaatgaagatgttgattcttcttggagttgcacgaatgaaccttgtgattgtgattagttacttcaaagcatttttttggtcttaatgcatggatgggagagtgtcggatgcttcttcagatactatttcttggtccgtcaaatctgcttgacccaaatgaaagtttttctcaaatgtggcaaaaataattgtctcatcaattgtcagcgcgcctgcttccagcaaagtttcagagaagatggaatgtaacacaatttttggtggccgcataagtgtggagacttgattcatatatacttagttaggctcatattagtgcaaacagctgatacagttttcattagtatttagtatggcttagagtacacttatgtatgagttatttgacatgtttattatgagaatattgatggtacttatt

SEQ ID NO: 43474 - DNA, 902 bp, Zea Mays
tccacatcggcgccccagctgctagacctggcctccatgccaggattgttagcccctgctcccgtcgatacctcggtccttcgccatgggggagcccgctcccgccggtgcccgggtcggtcgccaagatccccgccctttgccctgcccgtcccttagctccagcccccgctcttgctagcaatagccctcgccccaaagccccactcgcttgcagtcacggaatggagagtattttcatcatgtccaagcatacgttttccagagcagcctcattggtgagatcatcagttgttttgagaagaagggcttcaatctcaagattctagtgttgctggtccatggaccatagtccatttctccaacacaacagccattgtctcagatagataaccttctacagacatcttatgatcaaggggacaaatgagatcatgccaactctactccatgtactgctggtgtcacaggattaatatacaatgaagatgttgattcttcttggagttgcacgaatgaaccttgtgattgtgattagttacttcaaagcatttttttggtcttaatgcatggatgggagagtgtcggatgcttcttcagatactatttcttggtccgtcaaatctgcttgacccaaatgaaagtttttctcaaatgtggcaaaaataattgtctcatcaattgtcagcgcgcctgcttccagcaaagtttcagagaagatggaatgtaacacaatttttggtggccgcataagtgtggagacttgattcatatatacttagttaggctcatattagtgcaaacagctgatacagttttcattagtatttagtatggcttagagtacacttatgtatgagttatttgacatgtttattatgagaatattgatggtacttatt

SEQ ID NO: 43475 - DNA, 946 bp, Zea Mays
tccacatcggcgccccagctgctagacctggcctccatgccaggattgttagcccctgctcccgtcgatacctcggtccttcgccatgggggagcccgctcccgccggtgcccgggtcggtcgccaagatccccgccctttgccctgcccgtcccttagctccagcccccgctcttgctagcaatagccctcgccccaaagccccactcgcttgcagtcacggaatggagagtattttcatcatgtccaagcatacgttttccagagcagcctcattggtgagatcatcagttgttttgagaagaagggcttcaatctcaagattcttttaggtgtttcttctgtgctttccaaaactagttcctgacagagggttgcgttcttttctccaaggaaaacagagtgttgctggtccatggaccatagtccatttctccaacacaacagacatcttatgatcaaggggacaaatgagatcatgccaactctactccatgtactgctggtgtcacaggattaatatacaatgaagatgttgattcttcttggagttgcacgaatgaaccttgtgattgtgattagttacttcaaagcatttttttggtcttaatgcatggatgggagagtgtcggatgcttcttcagatactatttcttggtccgtcaaatctgcttgacccaaatgaaagtttttctcaaatgtggcaaaaataattgtctcatcaattgtcagcgcgcctgcttccagcaaagtttcagagaagatggaatgtaacacaatttttggtggccgcataagtgtggagacttgattcatatatacttagttaggctcatattagtgcaaacagctgatacagttttcattagtatttagtatggcttagagtacacttatgtatgagttatttgacatgtttattatgagaatattgatggtacttatt

SEQ ID NO: 43476 - DNA, 915 bp, Zea Mays
caccctccacatcggcgccccagctgctagacctggcctccatgccaggattgttagcccctgctcccgtcgatacctcggtccttcgccatgggggagcccgctcccgccggtgcccgggtcggtcgccaagatccccgccctttgccctgcccgtcccttagctccagcccccgctcttgctagcaatagccctcgccccaaagccccactcgcttgcagtcacggaatggagagtattttcatcatgtccaagcatacgttttccagagcagcctcattggtgagatcatcagttgttttgagaagaagggcttcaatctcaagattctgaaaacagagtgttgctggtccatggaccatagtccatttctccaacacaacagccattgtctcagatagataaccttctacagacatcttatgatcaaggggacaaatgagatcatgccaactctactccatgtactgctggtgtcacaggattaatatacaatgaagatgttgattcttcttggagttgcacgaatgaaccttgtgattgtgattagttacttcaaagcatttttttggtcttaatgcatggatgggagagtgtcggatgcttcttcagatactatttcttggtccgtcaaatctgcttgacccaaatgaaagtttttctcaaatgtggcaaaaataattgtctcatcaattgtcagcgcgcctgcttccagcaaagtttcagagaagatggaatgtaacacaatttttggtggccgcataagtgtggagacttgattcatatatacttagttaggctcatattagtgcaaacagctgatacagttttcattagtatttagtatggcttagagtacacttatgtatgagttatttgacatgtttattatgagaatattgatggtacttatt

SEQ ID NO: 43477 - DNA, 1130 bp, Zea Mays
caccctccacatcggcgccccagctgctagacctggcctccatgccaggattgttagcccctgctcccgtcgatacctcggtccttcgccatgggggagcccgctcccgccggtgcccgggtcggtcgccaagatccccgccctttgccctgcccgtcccttagctccagcccccgctcttgctagcaatagccctcgccccaaagccccactcgcttgcagtcacggaatggagagtattttcatcatgtccaagcatacgttttccagagcagcctcattggtgagatcatcagttgttttgagaagaagggcttcaatctcaagattcttttaggtgtttcttctgtgctttccaaaactagttcctgacagagggttgcgttcttttctccaaggaaaacagagtgttgctggtccatggaccatagtccatttctccaacacaacagccattgtctcagatagataaccttctacagacatcttatgatcaaggggacaaatgagatcatgccaactctactccatgtactgctggtgtcacaggattaatatacaatgaagatgttgattcttcttggagttgcacgaatgaaccttgtgattgtgattagttacttcaaagcatttttttggtcttaatgcatggatgggagagtgtcggatgcttcttcagatactatttcttggtccgtcaaatctgcttgacccaaatgaaagtttttctcaaatgtggcaaaaataattgtctcatcaattgtcagcgcgcctgcttccagcaaagtttcagagaaggtaagttatttttgatagatccaaaatctagcataattctatcattttatacacatctatatgaccttttgtgacatgtcacaatatgaggtgttcaaatgtgtctaactactaattattgtcttctcctatttattttacatgaaaagatggaatgtaacacaatttttggtggccgcataagtgtggagacttgattcatatatacttagttaggctcatattagtgcaaacagctgatacagttttcattagtatttagtatggcttagagtacacttatgtatgagttatttgacatgtttattatgagaatattgatggtacttatt

SEQ ID NO: 43478 - DNA, 1097 bp, Zea Mays
caccctccacatcggcgccccagctgctagacctggcctccatgccaggattgttagcccctgctcccgtcgatacctcggtccttcgccatgggggagcccgctcccgccggtgcccgggtcggtcgccaagatccccgccctttgccctgcccgtcccttagctccagcccccgctcttgctagcaatagccctcgccccaaagccccactcgcttgcagtcacggaatggagagtattttcatcatgtccaagcatacgttttccagagcagcctcattggtgagatcatcagttgttttgagaagaagggcttcaatctcaagattctttcctgacagagggttgcgttcttttctccaaggaaaacagagtgttgctggtccatggaccatagtccatttctccaacacaacagccattgtctcagatagataaccttctacagacatcttatgatcaaggggacaaatgagatcatgccaactctactccatgtactgctggtgtcacaggattaatatacaatgaagatgttgattcttcttggagttgcacgaatgaaccttgtgattgtgattagttacttcaaagcatttttttggtcttaatgcatggatgggagagtgtcggatgcttcttcagatactatttcttggtccgtcaaatctgcttgacccaaatgaaagtttttctcaaatgtggcaaaaataattgtctcatcaattgtcagcgcgcctgcttccagcaaagtttcagagaaggtaagttatttttgatagatccaaaatctagcataattctatcattttatacacatctatatgaccttttgtgacatgtcacaatatgaggtgttcaaatgtgtctaactactaattattgtcttctcctatttattttacatgaaaagatggaatgtaacacaatttttggtggccgcataagtgtggagacttgattcatatatacttagttaggctcatattagtgcaaacagctgatacagttttcattagtatttagtatggcttagagtacacttatgtatgagttatttgacatgtttattatgagaatattgatggtacttatt

SEQ ID NO: 43479 - DNA, 347 bp, Zea Mays
ctcgcgccgccatcaccctccacatcggcgccccagctgctagacctggcctccatgccaggattgttagcccctgctcccgtcgatacctcggtccttcgccatgggggagcccgctcccgccggtgcccggattggtgagatcatcagttgttttgagaagaagggcttcaatctcaagattctgaaaacagagtgttgctggtccatggaccatagtccatttctccaacacaacagccattgtctcagatagataaccttctacagacatcttatgatcaaggggacaaatgagatcatgccaactctactccatgtactgctggtgtcacagaaacttggag

SEQ ID NO: 43480 - DNA, 3796 bp, Zea Mays
ggcgaacacctcctctttgttcttctccaatacatcttgctgtgttccatctcttctggtttcccgtatctcgagtgttaacatttggtatccgattaagtcatcctagatccacttgttgatgtgccatggcgaccccgatcttccacaatagagcatcaagacgccgccatccgcaagctgctcgatgaaatgcgactcatggagacgcttgtccgagcgcatcagccctgtgacgagacgtctcaagaagagccctgtgacgagacgtctcaagggtcccatcttcgacgtggagccctgtttccaccgccgcatcctcaattcggatccaatctctccctacgactaggtcgatctgctttcggtcgtccgtgtcgcggccccgagctcccgggatttgcttcctccactgggcatccgtgctgtgccgagcagctacgtcgcgagcgggcatccacaggaggtggtcggcgtcgacgtccgagccgacacgctgcaggatcttctcctgcttcgcctccagctcggacagcacgacagagaacttgtccagccctcgcgacgagtcgagtcggctactcgcgtcgagtcgagcgttcctagggcctccagcaccgagatggacagggagttcagcgccgccttcgtcacagcatcagccgcctccggcaccagcgccctcgaggaagcgcagctgcacctcaacgacctctacacaatcgccaccgaggggattgacacggccatcgcgacgacgcggagggagagcaagcccgtgtacatcagcgtgagctgcaacctggtcggcctctcccacccgaccttcagtcgagagccggtacccctattcaagagcttcggcggcccggtcgacatcgtcaagaacgaccagccgtacgtcctgttcgacgacagcaagcgatgcgtctgcaggtccatcgacgaggacgacgaggttcccaacacattgcccaccaggtgttttaggaatggtttcatattcgtatagagcttctcgcctccattcaattgcagctgggatgccgtgccgcataggcaaccttggccaccaccacatatgcaagttgagtttggatatagccatgatgatttacgtacaattccatggtcgtctctcaacatagtagttcatgaggttgctattggggagtattgcatttttgtccaagaaacctccatggccacctccagctcatcaatatttcagatctatgcatactgaaactgtgggaagttggaaacacgagatggtgactacagagtggagtttccatatgctcattcaaggagaacgacaacaacaatggggcggtactgttgaactggcttggcagagggatagcataatggtgcccaagtggcttgctaatagagtgatggcatttctaataatatatagtgaggccattatagttcttctctgttgtgcaatcactatggcccttttattgctagaattactcaaactcaaggataattggcagtgttctgtttgcttggaaccaacacatcttggtatcgctagtggttgcttcctagagggatgtgtcattgccaatctatgtggttgtgtggtactgacaggatgtggccatatagccagtgatatacatgtgctagttctgttgatagctgatgagctaattcaagagcaaaaccagacgaatcgcaatggaggtggaggcaatacaaatgccataatgtcaattcaacaagattcggttcagttttgtatttctttcacattgaatgattgttgttccatgtgtttggttgtccgttggaaaccaccatgactacttcaaactcgacaggacatcagtgctgaactgcgaccagtactgtggccctccttcagagcattccatgaagctactgcaaggtggtggtgtttgagttggatcaggctacaaacatggctatcttcaggttggtgctattctgggtaccaaagcgagatgctgcagatattgtcaaggatcaccccttctatgtttgcaatatggctcagttcaaattcatatgatgcgcattattctcatatgaatttaatggcatgcatgactctggtccgtctcagttgcttcggtaacatgctaattctcacgatgcaatctgtcagctatatggtgctcgcactctacatattcgggtaccatacacatctccaggttgttgtccctgttctcatagttcgcgtcactgctttgtacaaggtagagattgcttgctgttcagttatacctggataatccaacagaaaaatcacctgatcagttttgatgcacttcgtagtagctacttacttagtttcgaggaggtggttctgatttgggtttggggcatctggatatctattttctttgcacaagttgacttgttcagttggtgttctgaaaattcagacttgagcagattaatagctctcaattgccctgccgacagtgacaatgcaatggtgcttctgatgtaccatggtgcacccagcacgtatcttccttatggtgcaatcgtcatggtgcagcctttattaacccaagtagctaatggacaacgctatatacctatgaaggtggctggggttaacaaatggattgtgattcagtatcagtgttcacctacctgtttacagggtattttaccatcgttttccacgggtgcagtagtggaattactgttgatatcagacgactcggcacctcaggcatccaaggacagctgtctcaattcaaagtctttactgatcggaccaatattatttccgattgcgacagtcttcaaaagcactttttggcaacagctattgagtttgttggacgctcaactaagtctgaattcagcctggtcaggcatgcgccctccatgtcaactggggaagaggctgaagcattgaagacccggtttccacaagcccatgcttggggacaagcataatttgaaggggaggagaatgtcagcacagctgctccaggcaaacatgaggtactggctttcggaggcaggaaccatggagaatgggaccaaatgtcgcgaggccacgcagacggaggcgcgcgagtgttccgggtaactgggccagactgggattactgggctttgtaagcgcgtgcgtcgtaggttggcccgagagaggaatatatggtgcccaatgtgtagtaggaaagctatcacacaagaagaacctgaactcgctgcacgcaaacacttcctctatgttcttattctccaatacatattgctgcgttccatggcttctggtttcccctattcgagtgttaacatttggtatcagattcagtcatcctggatccacttgctgctgtgtcgtggcgaccccgatcttccgtgatggagcaccaagatgccgccatcctctatgttcttctccaatacatctcgctgcgttccatctcttctggtttcccctatctcgagcgttaacagtcggcccacgcattctccctcccattgccgttctcggggtcatcccgtcgcgaaatccccgcccccaaccttctcagccgccttgtcccttctcccctgccttgtggaatctgcagttcgcatttagccttgtggaatctgcggttcacaagttgtgtaatatttctagtaactggcaaggtttgcaagttcaagtttttatgatctgaagaactgacaacaaaggttcctaggtgctgcgttgatggagtttatgatggatatcagaatgggttgttgttggatgtctcactgaagatgtggttgctgttatacatattaccatttc

SEQ ID NO: 43481 - DNA, 563 bp, Zea Mays
caattttggctacccgtatatatacagcgaatctctaaactcatacacgaatcgacaaatcgcattaattttacaacaataattcacaagattcataaagtaatttaaaacatgatttagaaagtaaattagtgggttgtcttcaaccttgtggtgaatcgagggattcgatcgcggtgaggcgagacgcgaactccggcgaggctccacggatggcgaacggcgtacggatgcagacggtccggcaacgagcttcacgacggcgaactgtgcaaggaattgcttcgacgaagtggctggcgggcttcgccaaggggtccctggagcgacggcgcgacggcgttggattttggtgagctgaactgtgtcggtgatgacgtgacaatctgcaactactgcgtggtgacgggatcagacgacgcagggacgactgcggcgatcctcgacgtcagtgagcaagggaccactggaggagctctagcacgcaacagaaatgaggggcagagcgagctgagcacgcaagaagcaagctgagtgcactgcagcgagcgggagggcgagag

SEQ ID NO: 43482 - DNA, 369 bp, Zea Mays
atgccttccctagcttccttggggtcgccgagcatgccgaccatggcagcgtcgatggcgtcctggttctcgaccctggaggccctggccgcgaggaggatgaccccgttggcgtcgacccccttggcgaagatctcgatgaggcccctgtcgacgctgagcttgttgacggtgagcgtgcccgtcttgtcgctgcagagcacggtcatgccggccatctcctcgatggccgtcatgcgcttggtgatggcgccctgcgtggcgaggcggtgcgagccgatggccatggtgacggagagcacggtgggcatggcgatggggatgccgccgatgaggagcacgaggaggttgtcgatgccgtcgcggtac

SEQ ID NO: 43483 - DNA, 299 bp, Zea Mays
catcaatcatcacaaccatttcaattcctgttgttattatttcccaatgagtacagcaacaattacaaatacactacactttgtggcagtttatatattaaggctgtatctgtgaccaaaacggcgttagcaaggcagtcgaagatgaaacaaacgtacgtagagtgtggcgccgtcgcagaaaatgggcgacgagcgagagcagaaagcggcggccgtgcatgccgtcgagaatccgatgacggcgagccaccaccaccgcattcactcacagggtgtagtgctgctggacgccttcc

SEQ ID NO: 43484 - DNA, 1526 bp, Zea Mays
tggctctttcctatgttcatgcatgctgtatcagtttaggatgcaatctgatatctcacggctggaagctaagattgagagaatggatgctcaattagcagcgaaagatcgagagctagccactcttactcgaacggaggccaaaaacactgctgctctgaagtctcagattgataagctgcaacaagaacgtgatgaatttcagaaaatggttataggaaatcagcaagtacgcacccagcaaattcatgaaatgaagaagaaagagaaagaatacataaagttgcaggaaaagctaaatcaggtattgatggagaagaaaaaggaatcatcccgttctggaatggagataatgaacttgttacagaaagaaggacgacaacgcggaacatggaatggaaaaaagaacgacaatgattattacaaaatgattgttgatgcatatgaagtgaagaaacaagagctgatgcaagagaatgcagatttacgggcactgttacgttcaatgcagatggacatgcgtgactttctcaatgccccgaatgggtcatcacaatctactgttactgataatggaagacaggagtcagggtctcctcagtctccgcttggtggcaagacggatgtttttgacttgccctttcatatggccagagatcagatagaagagagtttgcgcacaaaaatgacttcaatcaaggcacgaatgacacaacttcaagatgctcagaaaggtgcagaagtgacttctgaggcaactgaccgggagcttgagcttgaagctcaactggttgaagcaagaagcatcatccaagagcaggcctgcatcatgtccaagcacttcaagtctgataagccaaggtgatccaatatttctttcccttcgcctctcttcagactccaactagaccttcaattcatggattccgtcacagtggcaggaggcatagcggtctggatggcgagcgtgaggcatctgccgaggtgtaaaagcatgtctgtagcaaggatatatctgttctgcaagacctcctgattttagtaagtaccgaggtagtatgttgcaggatataacatggtcctgtgctgttgtagcccgagtttaggtgctgtctatgcagtatgatgtgcaggagcatatcctccagcacatggctaacccgatcacatctaagtcacatgtagcgtaactgtaatcctattcatactatatgaagaatgtcagtgtagcaacccttgaaaaaaatggacctttcggaccttacatcttgaagctctgttcgcatgattttttttttagtttattctatcagcggtgacagcacgttgtgacccttgttccctgctgaaacatgcaagttggttgccacctgggcataatctggtagtagattattagcccagctttaggatgttgagaagatccttctccaatgtactgtcacacggatccttttttttttgaaagccaaccgcttggcattgtgtactgctgtcctgtttcccccaaatatatatgacttgtg

SEQ ID NO: 43485 - DNA, 1544 bp, Zea Mays
gtgaagtttaactttcagagtgcaattctttggctctacctttcgatcaaaagtagaccagacaattatggaatactgttttccttgacatcacgcaatcactttgtgccatgagccaaccctgtcaccaccaacaggatgcaatctgatatctcacggctggaagctaagattgagagaatggatgctcaattagcagcgaaagatcgagagctagccactcttactcgaacggaggccaaaaacactgctgctctgaagtctcagattgataagctgcaacaagaacgtgatgaatttcagaaaatggttataggaaatcagcaagtacgcacccagcaaattcatgaaatgaagaagaaagagaaagaatacataaagttgcaggaaaagctaaatcaggtattgatggagaagaaaaaggaatcatcccgttctggaatggagataatgaacttgttacagaaagaaggacgacaacgcggaacatggaatggaaaaaagaacgacaatgattattacaaaatgattgttgatgcatatgaagtgaagaaacaagagctgatgcaagagaatgcagatttacgggcactgttacgttcaatgcagatggacatgcgtgactttctcaatgccccgaatgggtcatcacaatctactgttactgataatggaagacaggagtcagggtctcctcagtctccgcttggtggcaagacggatgtttttgacttgccctttcatatggccagagatcagatagaagagagtttgcgcacaaaaatgacttcaatcaaggcacgaatgacacaacttcaagatgctcagaaaggtgcagaagtgacttctgaggcaactgaccgggagcttgagcttgaagctcaactggttgaagcaagaagcatcatccaagagcaggcctgcatcatgtccaagcacttcaagtctgataagccaaggaggcatagcggtctggatggcgagcgtgaggcatctgccgaggtgtaaaagcatgtctgtagcaaggatatatctgttctgcaagacctcctgattttagtaagtaccgaggtagtatgttgcaggatataacatggtcctgtgctgttgtagcccgagtttaggtgctgtctatgcagtatgatgtgcaggagcatatcctccagcacatggctaacccgatcacatctaagtcacatgtagcgtaactgtaatcctattcatactatatgaagaatgtcagtgtagcaacccttgaaaaaaatggacctttcggaccttacatcttgaagctctgttcgcatgattttttttttagtttattctatcagcggtgacagcacgttgtgacccttgttccctgctgaaacatgcaagttggttgccacctgggcataatctggtagtagattattagcccagctttaggatgttgagaagatccttctccaatgtactgtcacacggatccttttttttttgaaagccaaccgcttggcattgtgtactgctgtcctgtttcccccaaatatatatgacttgtg

SEQ ID NO: 43486 - DNA, 1961 bp, Zea Mays
cgagatcagatctgtgtgtgtgaccattcgtgccacagacatcgcggccctaccttaccgttgccggcctgcccttcccagcccggcagtccacaccgtccccgtcctcccactccccactcgcaaccatttcaaatcgctctctcgacccaactgtactcgccgtcgtcaattcatcatccatccccatccccccatcgactcccagatctctatccccctctccctgtcctcactctctcgagcgcgttgtggcggatgtcctcgtcggcgcgtttcgatctccgggcctcgtcgcatcagttgcagccgccgccgtcgcacgccagcatgagcgacgggggcgcgttcgcaaacgcggagaacctggagcactgcgcccggtacctgaaccagacgctcgtcaccttcggattcccggcatctctcgacctcttcgccaccgatccggtctcgattgcaagaacttgtaactgcatctatgcgctgctgcagcagcgacagagggacattgagttcagggagtctacaaatgaccagcggcagcggatgcaatctgatatctcacggctggaagctaagattgagagaatggatgctcaattagcagcgaaagatcgagagctagccactcttactcgaacggaggccaaaaacactgctgctctgaagtctcagattgataagctgcaacaagaacgtgatgaatttcagaaaatggttataggaaatcagcaagtacgcacccagcaaattcatgaaatgaagaagaaagagaaagaatacataaagttgcaggaaaagctaaatcaggtattgatggagaagaaaaaggaatcatcccgttctggaatggagataatgaacttgttacagaaagaaggacgacaacgcggaacatggaatggaaaaaagaacgacaatgattattacaaaatgattgttgatgcatatgaagtgaagaaacaagagctgatgcaagagaatgcagatttacgggcactgttacgttcaatgcagatggacatgcgtgactttctcaatgccccgaatgggtcatcacaatctactgttactgataatggaagacaggagtcagggtctcctcagtctccgcttggtggcaagacggatgtttttgacttgccctttcatatggccagagatcagatagaagagagtttgcgcacaaaaatgacttcaatcaaggcacgaatgacacaacttcaagatgctcagaaaggtgcagaagtgacttctgaggcaactgaccgggagcttgagcttgaagctcaactggttgaagcaagaagcatcatccaagagcaggcctgcatcatgtccaagcacttcaagtctgataagccaagtggcaggaggcatagcggtctggatggcgagcgtgaggcatctgccgaggtgtaaaagcatgtctgtagcaaggatatatctgttctgcaagacctcctgattttagtaagtaccgaggtagtatgttgcaggatataacatggtcctgtgctgttgtagcccgagtttaggtgctgtctatgcagtatgatgtgcaggagcatatcctccagcacatggctaacccgatcacatctaagtcacatgtagcgtaactgtaatcctattcatactatatgaagaatgtcagtgtagcaacccttgaaaaaaatggacctttcggaccttacatcttgaagctctgttcgcatgattttttttttagtttattctatcagcggtgacagcacgttgtgacccttgttccctgctgaaacatgcaagttggttgccacctgggcataatctggtagtagattattagcccagctttaggatgttgagaagatccttctccaatgtactgtcacacggatccttttttttttgaaagccaaccgcttggcattgtgtactgctgtcctgtttcccccaaatatatatgacttgtg

SEQ ID NO: 43487 - DNA, 2478 bp, Zea Mays
cgagatcagatctgtgtgtgtgaccattcgtgccacagacatcgcggccctaccttaccgttgccggcctgcccttcccagcccggcagtccacaccgtccccgtcctcccactccccactcgcaaccatttcaaatcgctctctcgacccaactgtactcgccgtcgtcaattcatcatccatccccatccccccatcgactcccagatctctatccccctctccctgtcctcactctctcgagcgcgttgtggcggatgtcctcgtcggcgcgtttcgatctccgggcctcgtcgcatcagttgcagccgccgccgtcgcacgccagcatgagcagcgacgggggcgcgttcgcaaacgcggagaacctggagcactgcgcccggtacctgaaccagacgctcgtcaccttcggattcccggcatctctcgacctcttcgccaccgatccggtccttcctcttccctctctcccccggctcgcagctgcttcacgtttatgtattcatttcggtcgcgggggtttgtttgcttatgattttcggggtttaagggatttattcatcttgtcgccattccttaaaaaacaaattttcgaggccaattcgtcgatcgttctgttatactcgtacctgcttaatttttcccctctctacctctctatttacatcttccattgtctttatctgggttgccatttgcgttttgtccgtgttttttttccagcaatcattttgttatttatccagtaggaatgctactgttattgttaccttgtcccttatcagatcttctgatatgttgtcacttgttatttttttaattacattctgaattttgtgttctgcgcgcactggtagtgcagggcaacttcttttgaaatttggggatcaatatatgcggagggctttaaggttcctccatgtgctttttttaaaacttaccacaccttttttgggttctgttatgcaggtctcgattgcaagaacttgtaactgcatctatgcgctgctgcagcagcgacagagggacattgagttcagggagtctacaaatgaccagcggcagcggatgcaatctgatatctcacggctggaagctaagattgagagaatggatgctcaattagcagcgaaagatcgagagctagccactcttactcgaacggaggccaaaaacactgctgctctgaagtctcagattgataagctgcaacaagaacgtgatgaatttcagaaaatggttataggaaatcagcaagtacgcacccagcaaattcatgaaatgaagaagaaagagaaagaatacataaagttgcaggaaaagctaaatcaggtattgatggagaagaaaaaggaatcatcccgttctggaatggagataatgaacttgttacagaaagaaggacgacaacgcggaacatggaatggaaaaaagaacgacaatgattattacaaaatgattgttgatgcatatgaagtgaagaaacaagagctgatgcaagagaatgcagatttacgggcactgttacgttcaatgcagatggacatgcgtgactttctcaatgccccgaatgggtcatcacaatctactgttactgataatggaagacaggagtcagggtctcctcagtctccgcttggtggcaagacggatgtttttgacttgccctttcatatggccagagatcagatagaagagagtttgcgcacaaaaatgacttcaatcaaggcacgaatgacacaacttcaagatgctcagaaaggtgcagaagtgacttctgaggcaactgaccgggagcttgagcttgaagctcaactggttgaagcaagaagcatcatccaagagcaggcctgcatcatgtccaagcacttcaagtctgataagccaaggaggcatagcggtctggatggcgagcgtgaggcatctgccgaggtgtaaaagcatgtctgtagcaaggatatatctgttctgcaagacctcctgattttagtaagtaccgaggtagtatgttgcaggatataacatggtcctgtgctgttgtagcccgagtttaggtgctgtctatgcagtatgatgtgcaggagcatatcctccagcacatggctaacccgatcacatctaagtcacatgtagcgtaactgtaatcctattcatactatatgaagaatgtcagtgtagcaacccttgaaaaaaatggacctttcggaccttacatcttgaagctctgttcgcatgattttttttttagtttattctatcagcggtgacagcacgttgtgacccttgttccctgctgaaacatgcaagttggttgccacctgggcataatctggtagtagattattagcccagctttaggatgttgagaagatccttctccaatgtactgtcacacggatccttttttttttgaaagccaaccgcttggcattgtgtactgctgtcctgtttcccccaaatatatatgacttgtg

SEQ ID NO: 43488 - DNA, 2474 bp, Zea Mays
cgagatcagatctgtgtgtgtgaccattcgtgccacagacatcgcggccctaccttaccgttgccggcctgcccttcccagcccggcagtccacaccgtccccgtcctcccactccccactcgcaaccatttcaaatcgctctctcgacccaactgtactcgccgtcgtcaattcatcatccatccccatccccccatcgactcccagatctctatccccctctccctgtcctcactctctcgagcgcgttgtggcggatgtcctcgtcggcgcgtttcgatctccgggcctcgtcgcatcagttgcagccgccgccgtcgcacgccagcatgagcagcgacgggggcgcgttcgcaaacgcggagaacctggagcactgcgcccggtacctgaaccagacgctcgtcaccttcggattcccggcatctctcgacctcttcgccaccgatccggtccttcctcttccctctctcccccggctcgcagctgcttcacgtttatgtattcatttcggtcgcgggggtttgtttgcttatgattttcggggtttaagggatttattcatcttgtcgccattccttaaaaaacaaattttcgaggccaattcgtcgatcgttctgttatactcgtacctgcttaatttttcccctctctacctctctatttacatcttccattgtctttatctgggttgccatttgcgttttgtccgtgttttttttccagcaatcattttgttatttatccagtaggaatgctactgttattgttaccttgtcccttatcagatcttctgatatgttgtcacttgttatttttttaattacattctgaattttgtgttctgcgcgcactggtagtgcagggcaacttcttttgaaatttggggatcaatatatgcggagggctttaaggttcctccatgtgctttttttaaaacttaccacaccttttttgggttctgttatgcaggtctcgattgcaagaacttgtaactgcatctatgcgctgctgcagcagcgacagagggacattgagttcagggagtctacaaatgaccagcggcagcggatgcaatctgatatctcacggctggaagctaagattgagagaatggatgctcaattagcagcgaaagatcgagagctagccactcttactcgaacggaggccaaaaacactgctgctctgaagtctcagattgataagctgcaacaagaacgtgatgaatttcagaaaatggttataggaaatcagtacgcacccagcaaattcatgaaatgaagaagaaagagaaagaatacataaagttgcaggaaaagctaaatcaggtattgatggagaagaaaaaggaatcatcccgttctggaatggagataatgaacttgttacagaaagaaggacgacaacgcggaacatggaatggaaaaaagaacgacaatgattattacaaaatgattgttgatgcatatgaagtgaagaaacaagagctgatgcaagagaatgcagatttacgggcactgttacgttcaatgcagatggacatgcgtgactttctcaatgccccgaatgggtcatcacaatctactgttactgataatggaagacaggagtcagggtctcctcagtctccgcttggtggcaagacggatgtttttgacttgccctttcatatggccagagatcagatagaagagagtttgcgcacaaaaatgacttcaatcaaggcacgaatgacacaacttcaagatgctcagaaaggtgcagaagtgacttctgaggcaactgaccgggagcttgagcttgaagctcaactggttgaagcaagaagcatcatccaagagcaggcctgcatcatgtccaagcacttcaagtctgataagccaaggaggcatagcggtctggatggcgagcgtgaggcatctgccgaggtgtaaaagcatgtctgtagcaaggatatatctgttctgcaagacctcctgattttagtaagtaccgaggtagtatgttgcaggatataacatggtcctgtgctgttgtagcccgagtttaggtgctgtctatgcagtatgatgtgcaggagcatatcctccagcacatggctaacccgatcacatctaagtcacatgtagcgtaactgtaatcctattcatactatatgaagaatgtcagtgtagcaacccttgaaaaaaatggacctttcggaccttacatcttgaagctctgttcgcatgattttttttttagtttattctatcagcggtgacagcacgttgtgacccttgttccctgctgaaacatgcaagttggttgccacctgggcataatctggtagtagattattagcccagctttaggatgttgagaagatccttctccaatgtactgtcacacggatccttttttttttgaaagccaaccgcttggcattgtgtactgctgtcctgtttcccccaaatatatatgacttgtg

SEQ ID NO: 43489 - DNA, 1051 bp, Zea Mays
gtttaactttcagagtgcaattctttggctctacctttcgatcaaaagtagaccagacaattatggaatactgttttccttgacatcacgcaatcactttgtgccatgagccaaccctgtcaccaccaacaggatgcaatctgatatctcacggctggaagctaagattgagagaatggatgctcaattagcagcgaaagatcgagagctagccactcttactcgaacggaggccaaaaacactgctgctctgaagtctcagattgataagctgcaacaagaacgtgatgaatttcagaaaatggttataggaaatcagcaagtacgcacccagcaaattcatgaaatgaagaagaaagagaaagaatacataaagttgcaggaaaagctaaatcaggtattgatggagaagaaaaaggaatcatcccgttctggaatggagataatgaacttgttacagaaagaaggacgacaacgcggaacatggaatggaaaaaagaacgacaatgattattacaaaatgattgttgatgcatatgaagtgaagaaacaagagctgatgcaagagaatgcagatttacgggcactgttacgttcaatgcagatggacatgcgtgactttctcaatgccccgaatgggtcatcacaatctactgttactgataatggaagacaggagtcagggtctcctcagtctccgcttggtggcaagacggatgtttttgacttgccctttcatatggccagagatcagatagaagagagtttgcgcacaaaaatgacttcaatcaaggcacgaatgacacaacttcaagatgctcagaaaggtgcagaagtgacttctgaggcaactgaccgggagcttgagcttgaagctcaactggttgaagcaagaagcatcatccaagagcagagtttctatagacagtgtatgaagggcgggcctagtgcagcggtagagcctaccgtctgtaaccggaaggtcccggattcgagccccatattatgcggataaggcttgtcgcttaaagatacccttccccagaccccg

SEQ ID NO: 43490 - DNA, 1467 bp, Zea Mays
cgagatcagatctgtgtgtgtgaccattcgtgccacagacatcgcggccctaccttaccgttgccggcctgcccttcccagcccggcagtccacaccgtccccgtcctcccactccccactcgcaaccatttcaaatcgctctctcgacccaactgtactcgccgtcgtcaattcatcatccatccccatccccccatcgactcccagatctctatccccctctccctgtcctcactctctcgagcgcgttgtggcggatgtcctcgtcggcgcgtttcgatctccgggcctcgtcgcatcagttgcagccgccgccgtcgcacgccagcatgagcgacgggggcgcgttcgcaaacgcggagaacctggagcactgcgcccggtacctgaaccagacgctcgtcaccttcggattcccggcatctctcgacctcttcgccaccgatccggtctcgattgcaagaacttgtaactgcatctatgcgctgctgcagcagcgacagagggacattgagttcagggagtctacaaatgaccagcggcagcggatgcaatctgatatctcacggctggaagctaagattgagagaatggatgctcaattagcagcgaaagatcgagagctagccactcttactcgaacggaggccaaaaacactgctgctctgaagtctcagattgataagctgcaacaagaacgtgatgaatttcagaaaatggttataggaaatcagcaagtacgcacccagcaaattcatgaaatgaagaagaaagagaaagaatacataaagttgcaggaaaagctaaatcaggtattgatggagaagaaaaaggaatcatcccgttctggaatggagataatgaacttgttacagaaagaaggacgacaacgcggaacatggaatggaaaaaagaacgacaatgattattacaaaatgattgttgatgcatatgaagtgaagaaacaagagctgatgcaagagaatgcagatttacgggcactgttacgttcaatgcagatggacatgcgtgactttctcaatgccccgaatgggtcatcacaatctactgttactgataatggaagacaggagtcagggtctcctcagtctccgcttggtggcaagacggatgtttttgacttgccctttcatatggccagagatcagatagaagagagtttgcgcacaaaaatgacttcaatcaaggcacgaatgacacaacttcaagatgctcagaaaggtgcagaagtgacttctgaggcaactgaccgggagcttgagcttgaagctcaactggttgaagcaagaagcatcatccaagagcagagtttctatagacagtgtatgaagggcgggcctagtgcagcggtagagcctaccgtctgtaaccggaaggtcccggattcgagccccatattatgcggataaggcttgtcgcttaaagatacccttccccagaccccg

SEQ ID NO: 43491 - DNA, 1016 bp, Zea Mays
cgtattcttttctctcagttattcttccagcaaccgttcgcccaaatccattgccgctcctgcccccaacggcgcatgccttcacctcctcagccatggagctcacgagcatctccctctgtgcaccccctccgcgcgtccctgctccctcgtcaccaggtgcacgcgcgcagcttcctgcgcgccgggatggccctccagccccagctcgcccctgccctcagctatggcgccttgccgccgccgcccctgctttccatggcggcacttcctgcttcctggtggtcggcgccctccccaacctctctgctggtggttgtctccatcccctccatggcgagctcgcccctgcattcctgctcgcccaagatccccttccatgttccagccacctcccatggacgccagccctcacctcatagtcgccccagctcgcccaaccccctctctgctggtggccggccacctctgctgcttccatggtgtagcacttacgatgtccatcttgactgtgagtcaaagatagctaaatttttggggactccagactccattctttattcatatgggatttctacaatattcagtgtgatacctgccttctataagaaaggagatatcatagtcgctgatgagggtgttcactgggcagtgcaaaatggtctccatctatcaagaagcactgtggtgtacttcaagcacaatgatatggcttcacttgcaagcactttggaaaaacttactcgtggaaataaacgtgctgaaaagattagacgctacattgttgtagaatccatttaccagaattctggccaaattgcccccttggatgagattgtcaggttgaaggagaaatatcgattccatgttattctggaggagagtcattcttttggggtgcttggcaagtctgggtgtggtcttgctgaacattatggagttcctcaagaatggagtcatggaacatcggcaggagggttacggcagcggcaaccgatgtatcccatggacagtct

SEQ ID NO: 43492 - DNA, 1777 bp, Zea Mays
cctatttccacatttacttacacgaataggcctgatcttgtccgggagaggttcgtacatcccattttgttggtcaacttcacttactgccacattggatgctttcttgtacatgtattgatatatgttggtttatttgttaaaaatctcgttatttccctctaaataccagaaaagtgatctgtgaagatttaacaatatagatcatattgttgttcttcgatctcctgcctcattctgcaatctgcaccatgccagtatggcactacttaagtaacattgccaaaagactagggtaccacagcaatgcagtttgtggctgatgttccactaccaaatggagtgctgatttcccagccattgacatgctattcgtgctttcgttttcccctaactaactcatttgagtgaatatgcggaccttgcctgtgttcttattggttgctgctggcacctctcaggctcttactttgtttaacatttttttctgaattggttgatatttccaaggcaacataatcgaaaagtttgcacacatctttgtgtggggcaaaggggccataaaaaacattgacgagcatgctagagccacatgcttagattgtcaggtggttaactcttatgatgggtacctagcagtagagtatgaggccataagtcaatcctaaattctcctccaaaacaaagatacgaagtgctgcttttgtattttttaaggaaaatttacattttacatcccttgaacttttaatttacattaactatgaaatagtctaattgacaggcctcaactatcaaatattttactttactctgtagacctgaaacaactaggacacacacttaggtcttggatgcacttgtacctatctcagtccacatgcaatctattcccgtcctttccatccactgtaatttcgatcttaggggagtggtgttatgtgggaacaggcctacaaccaatgcatgaagaccagctcatcaactaacatctagaatcgagacataagatatgtcccattgtgttctgtatatgggggagtgggcattccttgatgaataaagaaaggcaagcaaaagtcggtaccttaccctgcgtctccgttccatgatcctagcactagggaggcaaggattatcaagcatagcagctggtctacgacaccctccttaaggtcgtggacaagcacttgtcggctctggcaaaacagcacgtggagacacggttcgtgaaggtccacgccgagaaggccccctttctgacagagaagctcaggatagtcgtcctcccgaccctcgccatagttaagaacgccaaggtcgaggactacgtggtcggcttcgacgagctcggcggcaaggacgacttcagcaccgaggacctggaagagcgcctggcgaggtcccaggtcgtcttcctggacggcgaagggtccgcgcacgcttcgaagcaggccgccgccgccaccaaacggagcgtccggcagtcgggcaccggcgactcgtccgactccgagtagctctcgtgtgttgttgttgttgttattattatatatatctaaatgggtacacagcacagacatgttttggttgctatgccaacaggcaacattagcattgcaaggatatgcgtcttattgggacctggaagcaaaagtggttgtggtttgagttgctgtacagtgctgcggcgctgccgtgtggatcacatctgatctgaatatctgattgggtgggtcttgctctagtggttttgtttgccctgtaccgccaggag

SEQ ID NO: 43493 - DNA, 2000 bp, Zea Mays
cctatttccacatttacttacacgaataggcctgatcttgtccgggagaggttcgtacatcccattttgttggtcaacttcacttactgccacattggatgctttcttgtacatgtattgatatatgttggtttatttgttaaaaatctcgttatttccctctaaataccagaaaagtgatctgtgaagatttaacaatatagatcatattgttgttcttcgatctcctgcctcattctgcaatctgcaccatgccagtatggcactacttaagtaacattgccaaaagactagggtaccacagcaatgcagtttgtggctgatgttccactaccaaatggagtgctgatttcccagccattgacatgctattcgtgctttcgttttcccctaactaactcatttgagtgaatatgcggaccttgcctgtgttcttattggttgctgctggcacctctcaggctcttactttgtttaacatttttttctgaattggttgatatttccaaggcaacataatcgaaaagtttgcacacatctttgtgtggggcaaaggggccataaaaaacattgacgagcatgctagagccacatgcttagattgtcaggtggttaactcttatgatgggtacctagcagtagagtatgaggccataagtcaatcctaaattctcctccaaaacaaagatacgaagtgctgcttttgtattttttaaggaaaatttacattttacatcccttgaacttttaatttacattaactatgaaatagtctaattgacaggcctcaactatcaaatattttactttactctgtagacctgaaacaactaggacacacacttaggtcttggatgcacttgtacctatctcagtccacatgcaatctattcccgtcctttccatccactgtaatttcgatcttaggggagtggtgttatgtgggaacaggcctacaaccaatgcatgaagaccagctcatcaactaacatctagaatcgagacataagatatgtcccattgtgttctgtatatgggggagtgggcattccttgatgaataaagaaaggcaagcaaaagtcggtaccttaccctgcgtctccgttccatgatcctagcactagggaggcaaggattatcaagcatagcagctggtctacgacaccctccttaaggtcataacctcacaacaaatggtgcagattgcaatggttgggatttcttgcaagattcaagtagtttttttttgttcgaactttcaattctttttttattggggtcgtacaatgttaaagctaatgttcctttgttctgtatttgttgtcgtctttctataatcctatcgatacatttatcatccgttcattgtatccatgtccctctcctgacctgcaacaggtcgtggacaagcacttgtcggctctggcaaaacagcacgtggagacacggttcgtgaaggtccacgccgagaaggccccctttctgacagagaagctcaggatagtcgtcctcccgaccctcgccatagttaagaacgccaaggtcgaggactacgtggtcggcttcgacgagctcggcggcaaggacgacttcagcaccgaggacctggaagagcgcctggcgaggtcccaggtcgtcttcctggacggcgaagggtccgcgcacgcttcgaagcaggccgccgccgccaccaaacggagcgtccggcagtcgggcaccggcgactcgtccgactccgagtagctctcgtgtgttgttgttgttgttattattatatatatctaaatgggtacacagcacagacatgttttggttgctatgccaacaggcaacattagcattgcaaggatatgcgtcttattgggacctggaagcaaaagtggttgtggtttgagttgctgtacagtgctgcggcgctgccgtgtggatcacatctgatctgaatatctgattgggtgggtcttgctctagtggttttgtttgccctgtaccgccaggag

SEQ ID NO: 43494 - DNA, 430 bp, Zea Mays
cgggttgtcagatccgtcctcccaaccaactcgtgataggcgcggccgagctccccgcgccgcacgattccagcggacctggcgcctgcttgtcctcctggagtatatataggacactcctgcctcctccttggccacccaaacgttgagagcacgcaaatctgagggcacagggggaatcgcggagcgcgccaaaggaaaagcaccaccgccgcgggcgggattgaggagcgtcgccattcggggtctggattcgtgtctgggtgcttcgtggagacataaggaagataagaggcataaatttaggacgcaaggacaaacaaatcatcgagaattcgtcgccggagtgctccctccgccgtagagccacgctacaccatcgaacaacctcgccaccacctctaccctcggtcaagaacaagtaccatag

SEQ ID NO: 43495 - DNA, 424 bp, Zea Mays
cgggttgtcagatccgtcctcccaaccaactcgtgataggcgcggccgagctccccgcgccgcacgattccagcggacctggcgcctgcttgtcctcctggagtatatataggacactcctgcctcctccttggccacccaaacgttgagagcacgcaaatctgagggcacagggggaatcgcggagcgcgccaaaggaaaagcaccaccgccgcgggcgggattgaggagcgtcgccattcggggtctggattcgtgtctgggtgcttcgtggagacataaggaagataagaggcataaatttaggacgcaaggacaaacaaatcatcgagaattcgtcgccggagtgctccctccgccgtagagccacgctacaccatcgaacaacctcgccaccacctctaccctcgcagtgaggtcacga

SEQ ID NO: 43496 - DNA, 228 bp, Zea Mays
acaggagaagaacaggtggttcaagaggatccgtgtatcgaggagttcgattcgatctaggtggagtctcccagttgactttctggcgccaaggatattttagatcctgctatatttatcttttattttgtaagacttccgctatgtaataagtactctgattattgtgacatttatctctatacactttgttattatatatgttgtcttctttggcgcatgtatgag

SEQ ID NO: 43497 - DNA, 4247 bp, Zea Mays
aggaagaggaggagcaggtagggtagagagccggcggctcagagtttcatttaggaatttcttgtccaagatgattacaccacgccacttgcgcggcttaagtatccagcctcacgcacacacacgtaacaccttacatactccattctgggcctgaaacacggacattgggcttcctgacgcgttttgacaaccggtgctccttgttgctgcttggctggactgacttcggtccctgaataccgccttcttcagacgctgatctgctttccaccacacgaacctaggtagtgtctgtaacaatcccccggcgatgaaaggctgcttgcccccaagcaggagcatatggaaatttctggcgcaataacagttcatcttcccaggtggccaacaaagtaggcatgcctgaccactggatgagcaattgagacaaccctgcagagttcagacgacgttgtaaaattttgtcaggtacctgcaaaccttctagggactgaggtagctgagcgactgtaacagtcggagagatagccttctttagttgagaaacatggaaaatgggatgtattttagacgaagcaggtaaatccaatttgtaagcaaccgaacccactttgttgagaacagtgaagggcccaaaataccgaaaagcaagtttttggttcgatctgggagcaagggaagactggatatatggctgtaaacgcaggtatacttgatcccccacagcaaaaactctttcagacctgtttttatcagcctgggccttcatacgtaactgagcacggtgcaggtgttgctgaaccaaggttgttatgacagccttgtcttgcagccactcatccagggaaggattttgagagttatcaacagcattcaaaccgaatggtttcggcgaataaccatataacacttcaaagggggaaagacccagtgcttcgtgcttgcaggagttgtaccagaactctgccaggtaaagccaatcgatccacttgctgggacacgcgttgacaaagcaacggaggaaggtctccatacattggttaacgcgctctgtttgcccgtctgtttgtgggtggtaggaggagctcatgtgaagcttcacatcagctagcttgaataaagcttgccacaattggctagtgaatatgcggtcacggtcagagacaattgctgttggcatgccatggagcttatatatatgctgcataaagtgtttagccaccaccagtgctgaaaaagggtgtttgagggcaataaagtgactgaacttcgaaaacttgttgaccactaccattacacagtttttgttgcctgaatttggaagtccctccacaaaatccagtgtaactgtctgccaagcgccagcgggtacagacagaggctgcaagagtccagggtacttgaccctctccggcttggactgctgacacacggagcacgaagccacaaaatgtttagcaaacttcctcataccggaccaggcaaacagctgcttcagcttgtgatacgtgacagggaaaccagagtgcccacctacagcagaactgtgcatggcctccaagatggcttgatgcattggccggttgttgcccacccaaatcttgttgttgaatttgataataccatcctgtaacgaaaagtgaggaactgatgaaccatctactatcagtttggctagaagctgtttagcttcttcatcctgcagatagccatcgataatgttttggcaccattgtggagaacagacagaaatggccagaaccgtagggatatcatgcgctcttctagatagggcatcagcaaccctattgtcggaaccttgtttgtatactatcttgtactgcatgccgagtaactttgtaaataccttctgctgccatggagtgttcaacctctggtcacttaagtggatcaagcttttttgatctgtgaagataatgaattcggcatgtaacagataatggcgccactggtcgacagccatcagaatggctagatattctttctcatatgttgagagaccttgtgttttggtgcccaaaggtttactgtgaaacgctagtggatgaccctcctgcatcaagacagcacccacaccatttttacaggcatcggtttccaagcaaaacggtttagcaaaatttggtaatgccaagacaggtgctgaaacgagagcttgtttcaaagtagagaacacaagctgatgatcttgagtccacacaaagagagctccttttttcaatagattgtgcaggggtcttgcaataatggcaaaatgtttcacaaacttgcgataatatcctgcaagaccgagaaagcttctcaagtctttggcattgtttggtatgggccaggacaacacagcctcaacttttgcttcatcggtggccaccccttcctcacttattacatgtccgaggtaagaaattttgcgttgggcaaatttgcacttagacattttgacaaaccaagtgtcttgctggaggagagttaacacctgttgcaagtggtctaagtggtcatccaaagtggcactataaattaatatgtcatcaaagaacactataacacattttctgagtaatggtgccagtgtagtgttcatagcactctggaaggtgcctggagctccacataaaccgaaagccatgaccaaaaattcgtactgcccatgatgagtttggaaagccgttttgaattcttctccaggcttcaaccttacttggtggtaccctgacaagagatccagtgtggaaaaccatgatgccccagcgagttcatccattaactagtcaaagacaggaatgggaaacttccatttgatagtcaaggcattgaggtaacgataatctacacaaaacctgaaactgccatctttctttcttactaacaacaccggggaagaaaactcagaggagctaggtcttataataccattttgaagcatcttcacaatatgttgctcaatctcatccttcaacgatggggaatatcgatagggccggatattgactggagtcgcaccaggtaccaagggaattgcatggtcacatgccctgacaggaggaagagaacttggttgtgcaaaaacttggtggaactgagataatatagcagacactgcagggtgcacagcttcaggtggggtatcaagcacgaaagacataactggtgtaatatgcaaaagaatgtcagttgcttgtgcagcacaaccataaagcaccacttgtctgtcgtggtagggaatacacaaccatctgtgttgccaatgtacctccatgggactgtaaaattctaaccaatccattcccaaaatgagatcaaactttggcagaggcaacaccctcaaatcttgagagaattcacacccttggatgctccaaactgcatgaggtatcatcttgtcacaggatagcagtccaccatttgccacttggactctgaaaggagttgcagctactggaacaatagtgtgatgctgaacagttgactgattaatgaaggaatgtgtactgccagaatcaaccaaaatcaggatgtcctttccaagcatgcttcccagaaatctcatggatctttttgcagaagaccctgtcacagcttcagcagaaatagccataataataggttcctcgagtgtctgttcatgaattgatgagtcctcccctgaattttctgacagcaattcccacacctcctgtaatgcatgcagctgcacagttgcgttacaagtatgtccacgatgccacttctcagcacacctatcacatagaccacgagcacgtcgataagctttgagtgcagccaatttgccatccacagacgaaggaacaccatctcttttcttctgataagattctggtttatgaagagaagatgtgggtggagggggtagttgcattggtcgggcacttgctgtagccgacttcagccagggctgataagcttccttgcgatgttcatgtcgtcccgacggcagcgccacctcttcctgcaacaaagccaaggaacatgcggagtccaagtccagaggacgttgaagcataaccactgctctaatgtcggtacgtagaccatctacaaagcgagtagcaaaaaacaagggatctggcactgactcataaacagccaactgatcaactaatgtgacaaaacgatcctggtaatcagttacgctactctgctgatggatacgaaacagctgccgcaacaatgactggtactggtctcgaccgaaccgctcg

SEQ ID NO: 43498 - DNA, 2098 bp, Zea Mays
tcgtcagcaatcctaatccaaaccgccgcggccacggccgcagccttccatagttctgtcagaaattccccttctcatccctgatccctccaactcccaccccaatacatcctgccgacgccatcagccggcgggacgcacacacgaggtcgaccttcgaaccctagtccttggccgagccgccttgcgggatcgtccccgccgcgcggcagctctgcctcgacccttttagtctccgtccgacaccgcttggatcagagatggaatcaccacccctcacagctgaagcaattgcttttaccgagaaaaagatggacatgactttggaggatataatcaagatgtcaaagaaaaagaatcctggaggcaagaacccccctaggcagccgatcaaaaagcgtccattccagaatgccaacactaataaagggaatggcaaggttcaacggtttatggaatctagatcaaccattagacaaggtgttcttgcacagagaaggtcaaatcttggtggaagtcagtttgctgctacaaagcaggctgcaaagaaggctgctgctatgccaatgcgcagcggggctgtctattggaagaagcctagtgcaagtaccttagtgcagaggaggtcagtaggtgatgcttttcaaaataccaagctcttagaagcgatatgcaaccaaagaaaaggccgagaagctcaagtgaagcgattcagtgcagacgaacaggggaagcagacagataactcaagctgtttagtgcagacaggcagctcaagcaggagtcggaattggatgatgaatcggattagggagggagagatcaaaggaggggaagagatagggaggcgggggccggggagggagatgagagggtggtcaggaggattacctggtggtggtggtggccggtggcaattcgtgagggttggcggcgcgcaaccgctgacggtggcagcggcgcgtctagggttgctgtgctcgtgtgcgggagcgggagtcaccaagtatagcgaaggccatacaggtaagttgtccgctcttcaaagtatactacttatccccaggtaacccgtgtatccgctttttaaattaaatttctacttattccgatatgtataggatatgtatccgagctgtatcgctatccgatacggatacgagctctttgggaagtatcctggtatcataggcatcaatgtagcgactttcctgatttgttgcgcttcccttctttgctccatacacctctaacaatacttttttcttgatatgttttaatgtatagttttctcacataatccatcttctggtatctccatgtcactttataaccattcatagtactttcaggaccgtgatgaatgctatacttgggtccatttttatttttagaagtcaaggagtcgcagaaccatgcagcaccaaggacgatggatgcactctttgcacggatgaaggcgcaacgcatgaggaccgcaccacagcagcaggcaaatcctgcctctggacgtgatttcaaccagcagcgacgtgttcagcagcagcagaggcgaggtagagcatatggtggccgtgttgtcggcaaccaatgagcatatttggtgcatcgaagccccttctcttcactggtcttaaggaccttgagggctagtttgggaactctatgtttctctattttctcaagtgaaaatgagctaatttttcttgggaaaatgaggttttcaaactagccttgaatgaaaggacgccgggggaaaatctaacttgactttctttgttggatgaaaggatgtggacagaatatgaagcgaattttgtgtgactctagttgtctgcttctgttcagcatgtacactgacctacggaaattacttgctagattttgatgtcatgtttattgagttgatttggttcgtctcttcaacagaactaggagtattcgccttttaccatatgtataaaattttaaatacctttactgtgaggtagacaagctgaatttatcatagtcctttcgttttaaaattatatctatactgtgtatagatacatagtgtatggtagaacctagctatatagaaaagtcaaaatgttct

SEQ ID NO: 43499 - DNA, 1916 bp, Zea Mays
tcgtcagcaatcctaatccaaaccgccgcggccacggccgcagccttccatagttctgtcagaaattccccttctcatccctgatccctccaactcccaccccaatacatcctgccgacgccatcagccggcgggacgcacacacgaggtcgaccttcgaaccctagtccttggccgagccgccttgcgggatcgtccccgccgcgcggcagctctgcctcgacccttttagtctccgtccgacaccgcttggatcagagatggaatcaccacccctcacagctgaagcaattgcttttaccgagaaaaagatggacatgactttggaggatataatcaagatgtcaaagaaaaagaatcctggaggcaagaacccccctaggcagccgatcaaaaagcgtccattccagaatgccaacactaataaagggaatggcaaggttcaacggtttatggaatctagatcaaccattagacaaggtgttcttgcacagagaaggtcaaatcttggtggaagtcagtttgctgctacaaagcaggctgcaaagaaggctgctgctatgccaatgcgcagcggggctgtctattggaagaagcctagtgcaagtaccttagtgcagaggaggtcagtaggtgatgcttttcaaaataccaaggaccatgggggtgaacactgaaggacttggaggaggccccaatctccttcatggtgtccttggctgcagtgcctagaaacattctctgagaagggctgtaagttaggttgcacatgtgagggacctccaggttaggttgttttcaaaagatcatattttggtgagcatgaatagtgcaaccgcgtcagctcttagaagcgatatgcaaccaaagaaaaggccgagaagctcaagtgaagcgattcagtgcagacgaacaggggaagcagacagataactcaagctgtttagtgcagacaggcagctcaagcaggagtcggaattggatgatgaatcggattagggagggagagatcaaaggaggggaagagatagggaggcgggggccggggagggagatgagagggtggtcaggaggattacctggtggtggtggtggccggtggcaattcgtgagggttggcggcgcgcaaccgctgacggtggcagcggcgcgtctagggttgctgtgctcgtgtgcgggagcgggagtcaccaagtatagcgaaggccatacaggtcaaggagtcgcagaaccatgcagcaccaaggacgatggatgcactctttgcacggatgaaggcgcaacgcatgaggaccgcaccacagcagcaggcaaatcctgcctctggacgtgatttcaaccagcagcgacgtgttcagcagcagcagaggcgaggtagagcatatggtggccgtgttgtcggcaaccaatgagcatatttggtgcatcgaagccccttctcttcactggtcttaaggaccttgagggctagtttgggaactctatgtttctctattttctcaagtgaaaatgagctaatttttcttgggaaaatgaggttttcaaactagccttgaatgaaaggacgccgggggaaaatctaacttgactttctttgttggatgaaaggatgtggacagaatatgaagcgaattttgtgtgactctagttgtctgcttctgttcagcatgtacactgacctacggaaattacttgctagattttgatgtcatgtttattgagttgatttggttcgtctcttcaacagaactaggagtattcgccttttaccatatgtataaaattttaaatacctttactgtgaggtagacaagctgaatttatcatagtcctttcgttttaaaattatatctatactgtgtatagatacatagtgtatggtagaacctagctatatagaaaagtcaaaatgttct

SEQ ID NO: 43500 - DNA, 2286 bp, Zea Mays
tcgtcagcaatcctaatccaaaccgccgcggccacggccgcagccttccatagttctgtcagaaattccccttctcatccctgatccctccaactcccaccccaatacatcctgccgacgccatcagccggcgggacgcacacacgaggtcgaccttcgaaccctagtccttggccgagccgccttgcgggatcgtccccgccgcgcggcagctctgcctcgacccttttagtctccgtccgacaccgcttggatcagagatggaatcaccacccctcacagctgaagcaattgcttttaccgagaaaaagatggacatgactttggaggatataatcaagatgtcaaagaaaaagaatcctggaggcaagaacccccctaggcagccgatcaaaaagcgtccattccagaatgccaacactaataaagggaatggcaaggttcaacggtttatggaatctagatcaaccattagacaaggtgttcttgcacagagaaggtcaaatcttggtggaagtcagtttgctgctacaaagcaggctgcaaagaaggctgctgctatgccaatgcgcagcggggctgtctattggaagaagcctagtgcaagtaccttagtgcagaggaggtcagtaggtgatgcttttcaaaataccaaggaccatgggggtgaacactgaaggacttggaggaggccccaatctccttcatggtgtccttggctgcagtgcctagaaacattctctgagaagggctgtaagttaggttgcacatgtgagggacctccaggttaggttgttttcaaaagatcatattttggtgagcatgaatagtgcaaccgcgtcagctcttagaagcgatatgcaaccaaagaaaaggccgagaagctcaagtgaagcgattcagtgcagacgaacaggggaagcagacagataactcaagctgtttagtgcagacaggcagctcaagcaggagtcggaattggatgatgaatcggattagggagggagagatcaaaggaggggaagagatagggaggcgggggccggggagggagatgagagggtggtcaggaggattacctggtggtggtggtggccggtggcaattcgtgagggttggcggcgcgcaaccgctgacggtggcagcggcgcgtctagggttgctgtgctcgtgtgcgggagcgggagtcaccaagtatagcgaaggccatacaggtaagttgtccgctcttcaaagtatactacttatccccaggtaacccgtgtatccgctttttaaattaaatttctacttattccgatatgtataggatatgtatccgagctgtatcgctatccgatacggatacgagctctttgggaagtatcctggtatcataggcatcaatgtagcgactttcctgatttgttgcgcttcccttctttgctccatacacctctaacaatacttttttcttgatatgttttaatgtatagttttctcacataatccatcttctggtatctccatgtcactttataaccattcatagtactttcaggaccgtgatgaatgctatacttgggtccatttttatttttagaagtcaaggagtcgcagaaccatgcagcaccaaggacgatggatgcactctttgcacggatgaaggcgcaacgcatgaggaccgcaccacagcagcaggcaaatcctgcctctggacgtgatttcaaccagcagcgacgtgttcagcagcagcagaggcgaggtagagcatatggtggccgtgttgtcggcaaccaatgagcatatttggtgcatcgaagccccttctcttcactggtcttaaggaccttgagggctagtttgggaactctatgtttctctattttctcaagtgaaaatgagctaatttttcttgggaaaatgaggttttcaaactagccttgaatgaaaggacgccgggggaaaatctaacttgactttctttgttggatgaaaggatgtggacagaatatgaagcgaattttgtgtgactctagttgtctgcttctgttcagcatgtacactgacctacggaaattacttgctagattttgatgtcatgtttattgagttgatttggttcgtctcttcaacagaactaggagtattcgccttttaccatatgtataaaattttaaatacctttactgtgaggtagacaagctgaatttatcatagtcctttcgttttaaaattatatctatactgtgtatagatacatagtgtatggtagaacctagctatatagaaaagtcaaaatgttct

SEQ ID NO: 43501 - DNA, 3399 bp, Zea Mays
tcgtcagcaatcctaatccaaaccgccgcggccacggccgcagccttccatagttctgtcagaaattccccttctcatccctgatccctccaactcccaccccaatacatcctgccgacgccatcagccggcgggacgcacacacgaggtcgaccttcgaaccctagtccttggccgagccgccttgcgggatcgtccccgccgcgcggcagctctgcctcgacccttttagtctccgtccgacaccgcttggatcagagatggaatcaccacccctcacagctgaagcaattgcttttaccgagaaaaagatggacatgactttggaggatataatcaagatgtcaaagaaaaagaatcctggaggcaagaacccccctaggcagccgatcaaaaagcgtccattccagaatgccaacactaataaagggaatggcaaggttcaacggtttatggaatctagatcaaccattagacaaggtgttcttgcacagagaaggtcaaatcttggtggaagtcagtttgctgctacaaagcaggctgcaaagaaggctgctgctatgccaatgcgcagcggggctgtctattggaagaagcctaggtaaacaatggttatcttattgcttatgagaaagtttactgcattcaaggagttgttaaatttattgtgtcatgcaccttgggttatattggctgagaatgattgtgatgctggtgtttgcatggaactgccttgacttctctggttatacacagttacacacatgttattaaagaacaatgaacttcatattcctgttctgcaaggcttgttttcttggttgaactgctacaaatacatggtgaatataacatatgagccttaaagcttcattgaaagttatggcatttccctttattctggttgagctggtcaaatttgtgaacctgctgggacaccctggatatgtatctgctgttggctgacatttttctatgcaattcagcagtattcatggtgtaatctatagctgctggatgagtgctatttttggacaccagtgtctgaggtttacgttagtgttatttgtcaactatggttggaaggaccgaaggagatgtgataatgactagcatctcatgccactggtgactgatcatccagatacagggatgctacatgcctgagttggaattggtttttactactggctccttggctgtgctcagtgtttgtttgaatgatgaatgcaatgtgaatctagggtagtgatgctatagcaggacaattgtatgcctccaaggagtacattttgcttctgcctcctattaaagttggctgtatccataacagcattctatcataaagttgttcactagtttccacagatattgcttgcttgcatttctactggatgagaataaatcgtgttatcttgcgatttatctgactatatgctgagctgtatggatgctttcttttcaaggtcaactgttggaatttattttcatgatttcttatgtcttgttgatcctggatcagtggtcactaattacatgacttgagtttatcagttcaatcaatcaataagtggtgttaacttgggaaatttttgaaccatgtgtgttgaaattttggtggaaataaacagtctagactctagaatgttgggggccttggaaaccaagaggatgcactagatattttcagtgactactttatcatttctgtttgattttatttcgaagcatggtatgtacttcctgactccccttgagaagtgagaattgtatccttgttttgatggggcatggtgagtttgctcagaaaacagtattgatcctggttctccattgtttatgattcatggtacttgagcactcctgctcatgtgagatactaatgtttttattttgatacagtgcaagtaccttagtgcagaggaggtcagtaggtgatgcttttcaaaataccaagctcttagaagcgatatgcaaccaaagaaaaggccgagaagctcaagtgaagcgattcagtgcagacgaacaggggaagcagacagataactcaagctgtttagtgcagacaggcagctcaagcaggagtcggaattggatgatgaatcggattagggagggagagatcaaaggaggggaagagatagggaggcgggggccggggagggagatgagagggtggtcaggaggattacctggtggtggtggtggccggtggcaattcgtgagggttggcggcgcgcaaccgctgacggtggcagcggcgcgtctagggttgctgtgctcgtgtgcgggagcgggagtcaccaagtatagcgaaggccatacaggtaagttgtccgctcttcaaagtatactacttatccccaggtaacccgtgtatccgctttttaaattaaatttctacttattccgatatgtataggatatgtatccgagctgtatcgctatccgatacggatacgagctctttgggaagtatcctggtatcataggcatcaatgtagcgactttcctgatttgttgcgcttcccttctttgctccatacacctctaacaatacttttttcttgatatgttttaatgtatagttttctcacataatccatcttctggtatctccatgtcactttataaccattcatagtactttcaggaccgtgatgaatgctatacttgggtccatttttatttttagaagtcaaggagtcgcagaaccatgcagcaccaaggacgatggatgcactctttgcacggatgaaggcgcaacgcatgaggaccgcaccacagcagcaggcaaatcctgcctctggacgtgatttcaaccagcagcgacgtgttcagcagcagcagaggcgaggtagagcatatggtggccgtgttgtcggcaaccaatgagcatatttggtgcatcgaagccccttctcttcactggtcttaaggaccttgagggctagtttgggaactctatgtttctctattttctcaagtgaaaatgagctaatttttcttgggaaaatgaggttttcaaactagccttgaatgaaaggacgccgggggaaaatctaacttgactttctttgttggatgaaaggatgtggacagaatatgaagcgaattttgtgtgactctagttgtctgcttctgttcagcatgtacactgacctacggaaattacttgctagattttgatgtcatgtttattgagttgatttggttcgtctcttcaacagaactaggagtattcgccttttaccatatgtataaaattttaaatacctttactgtgaggtagacaagctgaatttatcatagtcctttcgttttaaaattatatctatactgtgtatagatacatagtgtatggtagaacctagctatatagaaaagtcaaaatgttct

SEQ ID NO: 43502 - DNA, 2648 bp, Zea Mays
agaacgctgacgtggcacgtgagtgggatatagagggagaaatttaggggaacggttgaagacagtctaaaggaagccagacaacggaccctctctcctcgtcagcaatcctaatccaaaccgccgcggccacggccgcagccttccatagttctgtcagaaattccccttctcatccctgatccctccaactcccaccccaatacatcctgccgacgccatcagccggcgggacgcacacacgaggtcgaccttcgaaccctagtccttggccgagccgccttgcgggatcgtccccgccgcgcggcagctctgcctcgacccttttagtctccgtccgacaccgcttggatcagagatggaatcaccacccctcacagctgaagcaattgcttttaccgagaaaaagatggacatgactttggaggatataatcaagatgtcaaagaaaaagaatcctggaggcaagaacccccctaggcagccgatcaaaaagcgtccattccagaatgccaacactaataaagggaatggcaaggttcaacggtttatggaatctagatcaaccattagacaaggtgttcttgcacagagaaggtcaaatcttggtggaagtcagtttgctgctacaaagcaggctgcaaagaaggctgctgctatgccaatgcgcagcggggctgtctattggaagaagcctaggtaaacaatggttatcttattgcttatgagaaagtttactgcattcaaggagttgttaaatttattgtgtcatgcaccttgggttatattggctgagaatgattgtgatgctggtgtttgcatggaactgccttgacttctctggttatacacagttacacacatgttattaaagaacaatgaacttcatattcctgttctgcaaggcttgttttcttggttgaactgctacaaatacatggtgaatataacatatgagccttaaagcttcattgaaagttatggcatttccctttattctggttgagctggtcaaatttgtgaacctgctgggacaccctggatatgtatctgctgttggctgacatttttctatgcaattcagcagtattcatggtgtaatctatagctgctggatgagtgctatttttggacaccagtgtctgaggtttacgttagtgttatttgtcaactatggttggaaggaccgaaggagatgtgataatgactagcatctcatgccactggtgactgatcatccagatacagggatgctacatgcctgagttggaattggtttttactactggctccttggctgtgctcagtgtttgtttgaatgatgaatgcaatgtgaatctagggtagtgatgctatagcaggacaattgtatgcctccaaggagtacattttgcttctgcctcctattaaagttggctgtatccataacagcattctatcataaagttgttcactagtttccacagatattgcttgcttgcatttctactggatgagaataaatcgtgttatcttgcgatttatctgactatatgctgagctgtatggatgctttcttttcaaggtcaactgttggaatttattttcatgatttcttatgtcttgttgatcctggatcagtggtcactaattacatgacttgagtttatcagttcaatcaatcaataagtggtgttaacttgggaaatttttgaaccatgtgtgttgaaattttggtggaaataaacagtctagactctagaatgttgggggccttggaaaccaagaggatgcactagatattttcagtgactactttatcatttctgtttgattttatttcgaagcatggtatgtacttcctgactccccttgagaagtgagaattgtatccttgttttgatggggcatgtgcaagtaccttagtgcagaggaggtcagtaggtgatgcttttcaaaataccaaggtcaaggagtcgcagaaccatgcagcaccaaggacgatggatgcactctttgcacggatgaaggcgcaacgcatgaggaccgcaccacagcagcaggcaaatcctgcctctggacgtgatttcaaccagcagcgacgtgttcagcagcagcagaggcgaggtagagcatatggtggccgtgttgtcggcaaccaatgagcatatttggtgcatcgaagccccttctcttcactggtcttaaggaccttgagggctagtttgggaactctatgtttctctattttctcaagtgaaaatgagctaatttttcttgggaaaatgaggttttcaaactagccttgaatgaaaggacgccgggggaaaatctaacttgactttctttgttggatgaaaggatgtggacagaatatgaagcgaattttgtgtgactctagttgtctgcttctgttcagcatgtacactgacctacggaaattacttgctagattttgatgtcatgtttattgagttgatttggttcgtctcttcaacagaactaggagtattcgccttttaccatatgtataaaattttaaatacctttactgtgaggtagacaagctgaatttatcatagtcctttcgttttaaaattatatctatactgtgtatagatacatagtgtatggtagaacctagctatatagaaaagtcaaaatgttct

SEQ ID NO: 43503 - DNA, 1967 bp, Zea Mays
tcgtcagcaatcctaatccaaaccgccgcggccacggccgcagccttccatagttctgtcagaaattccccttctcatccctgatccctccaactcccaccccaatacatcctgccgacgccatcagccggcgggacgcacacacgaggtcgaccttcgaaccctagtccttggccgagccgccttgcgggatcgtccccgccgcgcggcagctctgcctcgacccttttagtctccgtccgacaccgcttggatcagtgctgtgtgctgtcaggagccgtggggcggcgcgaccgcgctggctgcctggctcggaggcagcttggcagcttgcagtggccagcgcccagcggctgctcgcgcgtaggcgcaggcgcgcacggcgcagcggccagcggcggctcggacgctcggtcagcccctggggcctggctgcctgggctcggtcgctcggaggcaggcagggaggcaggcatcggctctgcctctgctggctgcggctgctcgtggcctcgcgccgtcgcgctcgcgcgcaggggtgggaaactggggccgctgctcggtcgcgcgcaaggagatggaatcaccacccctcacagctgaagcaattgcttttaccgagaaaaagatggacatgactttggaggatataatcaagatgtcaaagaaaaagaatcctggaggcaagaacccccctaggcagccgatcaaaaagcgtccattccagaatgccaacactaataaagggaatggcaaggttcaacggtttatggaatctagatcaaccattagacaaggtgttcttgcacagagaaggtcaaatcttggtggaagtcagtttgctgctacaaagcaggctgcaaagaaggctgctgctatgccaatgcgcagcggggctgtctattggaagaagcctaggtaaacaatggttatcttattgcttatgagaaagtttactgcattcaaggagttgttaaatttattgtgtcatgcaccttgggttatattggctgagaatgattgtgatgctggtgtttgcatggaactgccttgacttctctggttatacacagttacacacatgttattaaagaacaatgaacttcatattcctgttctgcaaggcttgttttcttggttgaactgctacaaatacatggtgaatataacatatgagccttaaagcttcattgaaagttatggcatttccctttattctggttgagctggtcaaatttgtgaacctgctgggacaccctggatatgtatctgctgttggctgacatttttctatgcaattcagcagtattcatggtgtaatctatagctgctggatgagtgctatttttggacaccagtgtctgaggtttacgttagtgttatttgtcaactatggttggaaggaccgaaggagatgtgataatgactagcatctcatgccactggtgactgatcatccagatacagggatgctacatgcctgagttggaattggtttttactactggctccttggctgtgctcagtgtttgtttgaatgatgaatgcaatgtgaatctagggtagtgatgctatagcaggacaattgtatgcctccaaggagtacattttgcttctgcctcctattaaagttggctgtatccataacagcattctatcataaagttgttcactagtttccacagatattgcttgcttgcatttctactggatgagaataaatcgtgttatcttgcgatttatctgactatatgctgagctgtatggatgctttcttttcaaggtcaactgttggaatttattttcatgatttcttatgtcttgttgatcctggatcagtggtcactaattacatgacttgagtttatcagttcaatcaatcaataagtggtgttaacttgggaaatttttgaaccatgtgtgttgaaattttggtggaaataaacagtctagactctagaatgttg

SEQ ID NO: 43504 - DNA, 4475 bp, Zea Mays
atggctatggtcgcctgtgcttttcttgttatggctagcgcatctgctctgctgcactctttgcagtgcagctactgcttcgcaaacagtgatgcaccgagaacagctgtagccgcggccaagggaagaagggcaacgtttctagctgctgcaacaagggtttcagatctggtccggtttgcgcctgtgtctgcaactgacccagcagtccggcttgcagctgcgcttgtgagtgcccctgtgattgtagttgtgcctgaggttgcggttgggaggtttgctgggctgatgattgcaactgcgcttcttggggctgcacttcgggctgctggtggacctgcacttgtgggggttgctgcagctgctgatggacctgcaattgtgggggcaactgcggctgagggtgcagatgcacttggggttgcagctgcggctgagagtgcagctgcacttgtgggagctgttgtggctgatggtggagctgcagttgaggttggaggtagtgttgtgtttgcgaatgcaactgaacttgagattgcatgggttgctgtggttcagtatgcagctgaagttggggttgtgcttgtggtagctgtggcggttcttgttctggctcctttggcttgggggctccgttattcatccttgctcgagcctcagcaaacatcctttgttgctcagcaacagcttcttcctctgtcatctcaatcctagtgaacttgccagcttttggagaatcctactcaagacatattggtgtcaagcacagtacacagattagagaagggaatgatatgcacagccctgtgactaagaagtggtacaaaccagagtctcgagtttgtgctgttcatacgcagcataaacctcctcaatgtactctctgaagccaagatcctgatttcggaagaataatgataagctacgggacctcccatgttttattagtaataatatgtacagctcgaatttaaacaaataaacactactccctcgtcctcgtcccaaaataaatcaacttctacagtcagcctcaagtcaaactatcttaattttgaccaaatttctggaaagaacaccaatatttatgcaccaaattagtactccctccattgcaaatgataagacatttgacttttcttttttactatgtacttagatatagattatgtctagctgcacagtaaaaacaatgcatctagaaaatcaaaacatcttatagtttgcaatggagagagtaacaactagatagaccatgaaatatttttccatggcgtacttatttgttgctcagatattggtgctttgcttcataaaaagttggccaaacctaaggtggtttgacttaggacaactcaaattgatttattatgggagggagtatacacaaagatagcacatatcaaatgcgcccccagaacgtaacatataacagtcccaaatattttgttgatctcaaaaaaattttatggtctattatacaagatcagatgagttcaaatattcacattctaaattgtgttaatcattaatatgcttctcttacacgcagtccccaagtatattattatatttatatagagagacaataacaacaacaacaaagccttttagtccaagtaagttagggtaggttagagttaaaaaatcaacatatctcaaagtcaaggttcgggcacataaatagttattttccatgcactcctgttcaaggctaaatctttatgtatatctcattctttcaaatctccttttattgcctcttcccatgtcaacttcggtctttctcttcctctcttctcattgctatcgcaccttataatcccacgacacatcgacgactctggaggtctccgttagacatgtccaaaccatctcaacaaatgttggacaagcttttcttcaattggtgttactcctagcctatcaggtatatcatcatgtccctcaagtggttagatgttacttttccaacttctatagagaaattggaaattgggccactattctggaagaataagtggctaaataaaatgagcatccacagcttgctccgagattatttgctgcagtatctaatagagctatcaagtctagaacagttctcgaggccatcactgagggaagttgggttgctgatattattggtgctcggtcggttggggttttagtggagtttttgtaagtatatgacctaatattggaggtggaggctgcatgagcagattgaggataggcatgtgtttatgcttgctaccacagtattcttctaaggctgtatatgaggctctcttccttgggtctgtccactttgagcctgctaaccgaatttggaagccttgggctccggctaagtgtaaattcttcatttggctaactgctcttaataaatgttggacagctgatcggttaagcaaaagggggctgcctcatcctattagatgtccactttgtgatcaacaacaggaaataattgatcacctgctggttaactgtgtattcgccagggaattctggttccatgtgctcagtaaagtcaatcttcaaagcttgtctccacagcttcataatcgggggtttatggtttggtgagagtgggtttctatgcagatttctgggattgtgcagaaggggatcaactccttgataatccttggagcttggacattgtggaagcatagaaatagggggtgtctttgatagttttcctcctaatatgggtgctgctatctcccagttcaatcagaagttggagaggtgggctttggctggagctagggatctctccttccttactgctcccattcctggcctccagctgtagtttgttgcattagctataatgttagatgtctttatgttttgttgttttcgaccgccatgagctatttggccacagacttttgtattggtctattttagacctgtttcttcttaatatatattatgcgtagctctcctacgctttcgagagagaaaacacacacacatttctgcaacacttatctgctgaacgtgtcatctatttgtaggccaacattatgcaccatacagcataaacaggactaatcaacatcctataaaacttgccttttagcttctatcatttagaacaccagatgattgatgccatatgattgatgccatttagaataccagatgattgatgtcatttcttcttaatatatattatgtgtaccctcttgtcatttagaacaccagacgattgatggcatgccacttcattcaccttgctttgattctatggctaacatctttacaatatcctcatctctctgtaacattgatcctaaatacctaaaggtgtccttcctaagcactactcgtccttccaaactaacatcttcttccttatgtgtactgccgaaatcacatctcatgtattctattttagtgagtctaaaaccttgaattctagagtccctccccacaactctagttttctatctactcttgcccgacattcatcaactaacactacatcgtctacaaaaaacatacaacaagggatatctccttgtatgtcccttgtggctttatccatcaccaaggaaaaaaggtaagggctcaaagctgacccttgatgtagtcctattccaatcgaaaagaaatttgtgtcgccatcgctcgaacaccaacattgttgtacttgtacatgtccttaataatccaacgtacttccgtcgttggaactttatgtttgtccaaaaccaaacacataacattacttggtattttgtcataagctttctccaagtcaatgaaaatcatatgtagatccttcttctattctctatactactccatcacatgtcttattaaaaaaatggtttccatggttgaccttccgcacatgaatccaaattggttcaaagagatccccgttactccgctcaaacgatgctcgttatttatatatagagagagtttgtgaaaaaatgaacgataaagatgatgtgcttctatattaaacaagcatctacaaaagcatgtctacccaaaattaaaaaattaaagttcgccaagaatccccaaaaccatcaaagatatcacacctaatcgtatgcctcatatctaaccatgtgtttaccactttacctcaaattattcttagagaaatctgacataaaaaattatgaggagaaaatactaacacttagagccttgataacatgctcaggagcaattgttttcttctcttctctgctgcacacttcattggattcagacgaaaggagattgatgaactctgaaaattggttttacaagtagttagattagaaaaggagagaccaatctctatgcttatgaagattctttctttgttgaaagtaaggttgtgagagatccatacaagtgtaaaccatttaaacagaacaagttatgcagttacttcattaatggcctgaatacagtaggagtatattggctttctcatgaaaacagaatataat

SEQ ID NO: 43505 - DNA, 1996 bp, Zea Mays
cccgtttaacggcggcacgacaagcaagcggtcacgtgagagctgatttttctcgcagcgggtagcggtagccctgtccctgacctgatcctgacccgtgcgggcgtgcggctcctcgcggacagctccagactccagagccgcctcttcgccctctcgccatcggcaggctacggtggctgcttccccgagcctgcaggtagaccaccttgtgttgattcctcgagtcttcacctggtgcttccgtttgcagcttcatttttaactaagtctgtaatttattggctgtttatctgagtgacactacactctctgttttttcttattagatgtcacaagccaaggaagtgaggtacactgcacggtctattacacctcctgctgatagaaatggcacttcaaggtcgcctcctccaaagagacgcagcccttcaaggtcacctccaccaaagagtgcttcacggtccccacgtccaaggagtccaaagagacgcagcacttcaaggtctcctcctaggagacgtggtagatcaaggtcaagggataggagtcggtccaggagcccagatgatagaaatccagggaataacctttatgtaactggattgtctactcgtgtaacggaagatgatcttgagaagttctttagtaaagaaggaaaggttaagaactgtcatgttgttcttgatcctaggacaaaagaatcccgtggctttgccttcgtgactatggatactcttgaaggtgcaagacgctccatcaagtatctgcaccgcactgtacttgaaggtcgcctggtcactgtagagaagtttaacatggtgctgggctgcctctacgtcaacctggttggtccaggctgtgcagtctccaaccatggttgtctccaaaggatgtgcagctgacgtgatggtgcttatcaccacaccctcagagctcatcaccacttgccgtcttcacctcgctcaccgacaatgcatacatgctacatcaacacgacggctgtcgccatagagcgatcttggagtcttgttgtgcatcgcgtcaccaccatcgccaccgcaacttctaccacaaccgccatcgtcaacatcacgctcgtgatccaacaggctctacgatttgtctgcttcgactaagcttacatggtgcatgctgctgccatgtcacgacaccaaccaccaagtctgatgcgaacttcatcgaccagtatcttgatttgatggacatcacgagaggcataatctggcgcttccttggaccatggctacaccgaccacggaacaagctaaaagaactcgtgaaaggacccctactcctggaaaatactgtggtcgaagaggaggatctcaaaggagcccatcaccttaccgccctcgcagaagggagcgttcgcgctcaagggaacgcagaagggagcgttcgcgttcaagggatcgaagggagcggtctcgctcaagggatcgaagggagcggtctcgctcaagggaacgccgaagggagcggtctcgttcaagggaccgcagggagaggtctcgctcaagggaccgccggagggagcgctcacgctcaagggaccgcagaagggagcgctcacgctcaagggaccggaggggcagttcaccccatggcagaaggcatagagatcggtccaggtcacccaccagcaatgggaaccataaggcagactaggaagcgcttttatggacttgtcgttgattgcgtgaacaaaggaacttgtaacactacctataaactggtcagactgagacggttagcatggatttttagtagtgttgctgtattttgttgtttcatacaagtactctattctgttagctttcggatcgaaatgtcggatgatgatggttgttattgttctggaaatcgtagacatgtcctccagaatacctatgaaactatggcatactcgtgtgtttgcttaaggttgctgtggtatgttctgatcttaagattgacacgttgcacggtagat

SEQ ID NO: 43506 - DNA, 2645 bp, Zea Mays
cccgtttaacggcggcacgacaagcaagcggtcacgtgagagctgatttttctcgcagcgggtagcggtagccctgtccctgacctgatcctgacccgtgcgggcgtgcggctcctcgcggacagctccagactccagagccgcctcttcgccctctcgccatcggcaggctacggtggctgcttccccgagcctgcaggtagaccaccttgtgttgattcctcgagtcttcacctggtgcttccgtttgcagcttcatttttaactaagatgtcacaagccaaggaagtgaggtacactgcacggtctattacacctcctgctgatagaaatggcacttcaaggtcgcctcctccaaagagacgcagcccttcaaggtcacctccaccaaagagtgcttcacggtccccacgtccaaggagtccaaagagacgcagcacttcaaggtctcctcctaggagacgtggtagatcaaggtcaagggataggagtcggtccaggagcccagatgatagaaatccagggaataacctttatgtaactggattgtctactcgtgtaacggaagatgatcttgagaagttctttagtaaagaaggaaaggttaagaactgtcatgttgttcttgatcctaggacaaaagaatcccgtggctttgccttcgtgactatggatactcttgaaggtgcaagacgctccatcaagtatctgcaccgcactgtacttgaaggtcgcctggtcactgtagagaaggttagatgctgactgtactgattcattccattatgcatttttctattgtattttttgttgaatagtgctagttttgtcatgttatcgttgtatagtaatgtcaagtagtctaatactagcagtagtacagttaaaaatttaaagctactatacggtcatgcatgttttttgtcttatgcttgtccctccccttcccactttagccttgaaatcactgatgtcttagtaacataaatgcattaatcttgtgcactggaaattatattccattacattaaggggcttcaatgatgctatgctctgttcagtttaaaactctggtgaaggtccttgaggtgaggtatgttatgacttatgagtagaagattacaaatatgctctttccctatgatggaagagtatattctgtaacagacaagcctggaaaccccactcaggtgaaatgtgccagagtaaattgaaaggggatcatttatgatgtgttctgatgcaatcctaatgtggtgaatggggaaaacctcttctgtggctcttcaactggggtcttaactctcatctcgtgctgacttcctgaccttccagtttaacatggtgctgggctgcctctacgtcaacctggttggtccaggctgtgcagtctccaaccatggttgtctccaaaggatgtgcagctgacgtgatggtgcttatcaccacaccctcagagctcatcaccacttgccgtcttcacctcgctcaccgacaatgcatacatgctacatcaacacgacggctgtcgccatagagcgatcttggagtcttgttgtgcatcgcgtcaccaccatcgccaccgcaacttctaccacaaccgccatcgtcaacatcacgctcgtgatccaacaggctctacgatttgtctgcttcgactaagcttacatggtgcatgctgctgccatgtcacgacaccaaccaccaagtctgatgcgaacttcatcgaccagtatcttgatttgatggacatcacgagaggcataatctggcgcttccttggaccatggctacaccgaccacggaacaagtgcacaaaagtcatctttggtttagttggcatgcaacgtaaagtttaatctacctatatcacaagattttgatcaagagttgacaagcttaatggaccatgactatttttcaccaaaagggcaaagctaaaagaactcgtgaaaggacccctactcctggaaaatactgtggtcgaagaggaggatctcaaaggagcccatcaccttaccgccctcgcagaagggagcgttcgcgctcaagggaacgcagaagggagcgttcgcgttcaagggatcgaagggagcggtctcgctcaagggatcgaagggagcggtctcgctcaagggaacgccgaagggagcggtctcgttcaagggaccgcagggagaggtctcgctcaagggaccgccggagggagcgctcacgctcaagggaccgcagaagggagcgctcacgctcaagggaccggaggggcagttcaccccatggcagaaggcatagagatcggtccaggtcacccaccagcaatgggaaccataaggcagactaggaagcgcttttatggacttgtcgttgattgcgtgaacaaaggaacttgtaacactacctataaactggtcagactgagacggttagcatggatttttagtagtgttgctgtattttgttgtttcatacaagtactctattctgttagctttcggatcgaaatgtcggatgatgatggttgttattgttctggaaatcgtagacatgtcctccagaatacctatgaaactatggcatactcgtgtgtttgcttaaggttgctgtggtatgttctgatcttaagattgacacgttgcacggtagat

SEQ ID NO: 43507 - DNA, 2034 bp, Zea Mays
cccgtttaacggcggcacgacaagcaagcggtcacgtgagagctgatttttctcgcagcgggtagcggtagccctgtccctgacctgatcctgacccgtgcgggcgtgcggctcctcgcggacagctccagactccagagccgcctcttcgccctctcgccatcggcaggctacggtggctgcttccccgagcctgcaggtagaccaccttgtgttgattcctcgagtcttcacctggtgcttccgtttgcagcttcatttttaactaagtctgtaatttattggctgtttatctgagtgacactacactctctgttttttcttattagatgtcacaagccaaggaagtgaggtacactgcacggtctattacacctcctgctgatagaaatggcacttcaaggtcgcctcctccaaagagacgcagcccttcaaggtcacctccaccaaagagtgcttcacggtccccacgtccaaggagtccaaagagacgcagcacttcaaggtctcctcctaggagacgtggtagatcaaggtcaagggataggagtcggtccaggagcccagatgatagaaatccagggaataacctttatgtaactggattgtctactcgtgtaacggaagatgatcttgagaagttctttagtaaagaaggaaaggttaagaactgtcatgttgttcttgatcctaggacaaaagaatcccgtggctttgccttcgtgactatggatactcttgaaggtgcaagacgctccatcaagtatctgcaccgcactgtacttgaaggtcgcctggtcactgtagagaagtttaacatggtgctgggctgcctctacgtcaacctggttggtccaggctgtgcagtctccaaccatggttgtctccaaaggatgtgcagctgacgtgatggtgcttatcaccacaccctcagagctcatcaccacttgccgtcttcacctcgctcaccgacaatgcatacatgctacatcaacacgacggctgtcgccatagagcgatcttggagtcttgttgtgcatcgcgtcaccaccatcgccaccgcaacttctaccacaaccgccatcgtcaacatcacgctcgtgatccaacaggctctacgatttgtctgcttcgactaagcttacatggtgcatgctgctgccatgtcacgacaccaaccaccaagtctgatgcgaacttcatcgaccagtatcttgatttgatggacatcacgagaggcataatctggcgcttccttggaccatggctacaccgaccacggaacaagtgcacaaaagtcatctttggtttagttggcatgcaacgctaaaagaactcgtgaaaggacccctactcctggaaaatactgtggtcgaagaggaggatctcaaaggagcccatcaccttaccgccctcgcagaagggagcgttcgcgctcaagggaacgcagaagggagcgttcgcgttcaagggatcgaagggagcggtctcgctcaagggatcgaagggagcggtctcgctcaagggaacgccgaagggagcggtctcgttcaagggaccgcagggagaggtctcgctcaagggaccgccggagggagcgctcacgctcaagggaccgcagaagggagcgctcacgctcaagggaccggaggggcagttcaccccatggcagaaggcatagagatcggtccaggtcacccaccagcaatgggaaccataaggcagactaggaagcgcttttatggacttgtcgttgattgcgtgaacaaaggaacttgtaacactacctataaactggtcagactgagacggttagcatggatttttagtagtgttgctgtattttgttgtttcatacaagtactctattctgttagctttcggatcgaaatgtcggatgatgatggttgttattgttctggaaatcgtagacatgtcctccagaatacctatgaaactatggcatactcgtgtgtttgcttaaggttgctgtggtatgttctgatcttaagattgacacgttgcacggtagat

SEQ ID NO: 43508 - DNA, 2093 bp, Zea Mays
cccgtttaacggcggcacgacaagcaagcggtcacgtgagagctgatttttctcgcagcgggtagcggtagccctgtccctgacctgatcctgacccgtgcgggcgtgcggctcctcgcggacagctccagactccagagccgcctcttcgccctctcgccatcggcaggctacggtggctgcttccccgagcctgcagatcgggtggtagatctggttggcctagtcgctgtcggatgcagttgccgagctaggtcgcggctgcgcggcggcggtcggggtcttgcgtcgccagatctggataggaaaacgccgcgcacaagctgagctaaattctgttcgattcgagttcttataggggttcttgtggctgcgtgttttgaattttttcccactggttctggggtgccgagaaagggaatcgtggctgactcttgttgccgtcgtcgagccagatctggtcatgctgctaccgtggatgtcttattgcttgatctcctttgttttttaattccttcggttcaagaatagcatcattaccatgagcatacataccagagaaacggagacagattcggaaattttcatttattgctagcttgtagttttggggtcctataatatttttcttggttctcttaattaattgagctagtaaatcaacaaatctgccactacagccgtcacgggcaaacataaaaaaactgaacaacaccaaattgaggcgcctagtccacaaacctgaactgctgaacttaaatgtctggaagccacagtttctgatttctgatggtttgtttttatgctcatttactctttctttcttccaggtagaccaccttgtgttgattcctcgagtcttcacctggtgcttccgtttgcagcttcatttttaactaagatgtcacaagccaaggaagtgaggtacactgcacggtctattacacctcctgctgatagaaatggcacttcaaggtcgcctcctccaaagagacgcagcccttcaaggtcacctccaccaaagagtgcttcacggtccccacgtccaaggagtccaaagagacgcagcacttcaaggtctcctcctaggagacgtggtagatcaaggtcaagggataggagtcggtccaggagcccagatgatagaaatccagggaataacctttatgtaactggattgtctactcgtgtaacggaagatgatcttgagaagttctttagtaaagaaggaaaggttaagaactgtcatgttgttcttgatcctaggacaaaagaatcccgtggctttgccttcgtgactatggatactcttgaaggtgcaagacgctccatcaagtatctgcaccgcactgtacttgaaggtcgcctggtcactgtagagaaggctaaaagaactcgtgaaaggacccctactcctggaaaatactgtggtcgaagaggaggatctcaaaggagcccatcaccttaccgccctcgcagaagggagcgttcgcgctcaagggaacgcagaagggagcgttcgcgttcaagggatcgaagggagcggtctcgctcaagggatcgaagggagcggtctcgctcaagggaacgccgaagggagcggtctcgttcaagggaccgcagggagaggtctcgctcaagggaccgccggagggagcgctcacgctcaagggaccgcagaagggagcgctcacgctcaagggaccggaggggcagttcaccccatggcagaaggcatagagatcggtccaggtcacccaccagcaatgggaaccataaggcagactaggaagcgcttttatggacttgtcgttgattgcgtgaacaaaggaacttgtaacactacctataaactggtcagactgagacggttagcatggatttttagtagtgttgctgtattttgttgtttcatacaagtactctattctgttagctttcggatcgaaatgtcggatgatgatggttgttattgttctggaaatcgtagacatgtcctccagaatacctatgaaactatggcatactcgtgtgtttgcttaaggttgctgtggtatgttctgatcttaagattgacacgttgcacggtagat

SEQ ID NO: 43509 - DNA, 1447 bp, Zea Mays
cccgtttaacggcggcacgacaagcaagcggtcacgtgagagctgatttttctcgcagcgggtagcggtagccctgtccctgacctgatcctgacccgtgcgggcgtgcggctcctcgcggacagctccagactccagagccgcctcttcgccctctcgccatcggcaggctacggtggctgcttccccgagcctgcaggtagaccaccttgtgttgattcctcgagtcttcacctggtgcttccgtttgcagcttcatttttaactaagatgtcacaagccaaggaagtgaggtacactgcacggtctattacacctcctgctgatagaaatggcacttcaaggtcgcctcctccaaagagacgcagcccttcaaggtcacctccaccaaagagtgcttcacggtccccacgtccaaggagtccaaagagacgcagcacttcaaggtctcctcctaggagacgtggtagatcaaggtcaagggataggagtcggtccagaaatccagggaataacctttatgtaactggattgtctactcgtgtaacggaagatgatcttgagaagttctttagtaaagaaggaaaggttaagaactgtcatgttgttcttgatcctaggacaaaagaatcccgtggctttgccttcgtgactatggatactcttgaaggtgcaagacgctccatcaagtatctgcaccgcactgtacttgaaggtcgcctggtcactgtagagaaggctaaaagaactcgtgaaaggacccctactcctggaaaatactgtggtcgaagaggaggatctcaaaggagcccatcaccttaccgccctcgcagaagggagcgttcgcgctcaagggaacgcagaagggagcgttcgcgttcaagggatcgaagggagcggtctcgctcaagggatcgaagggagcggtctcgctcaagggaacgccgaagggagcggtctcgttcaagggaccgcagggagaggtctcgctcaagggaccgccggagggagcgctcacgctcaagggaccgcagaagggagcgctcacgctcaagggaccggaggggcagttcaccccatggcagaaggcatagagatcggtccaggtcacccaccagcaatgggaaccataaggcagactaggaagcgcttttatggacttgtcgttgattgcgtgaacaaaggaacttgtaacactacctataaactggtcagactgagacggttagcatggatttttagtagtgttgctgtattttgttgtttcatacaagtactctattctgttagctttcggatcgaaatgtcggatgatgatggttgttattgttctggaaatcgtagacatgtcctccagaatacctatgaaactatggcatactcgtgtgtttgcttaaggttgctgtggtatgttctgatcttaagattgacacgttgcacggtagat

SEQ ID NO: 43510 - DNA, 2063 bp, Zea Mays
cccgtttaacggcggcacgacaagcaagcggtcacgtgagagctgatttttctcgcagcgggtagcggtagccctgtccctgacctgatcctgacccgtgcgggcgtgcggctcctcgcggacagctccagactccagagccgcctcttcgccctctcgccatcggcaggctacggtggctgcttccccgagcctgcaggtagaccaccttgtgttgattcctcgagtcttcacctggtgcttccgtttgcagcttcatttttaactaagatgtcacaagccaaggaagtgaggtacactgcacggtctattacacctcctgctgatagaaatggcacttcaaggtcgcctcctccaaagagacgcagcccttcaaggtcacctccaccaaagagtgcttcacggtccccacgtccaaggagtccaaagagacgcagcacttcaaggtctcctcctaggagacgtggtagatcaaggtcaagggataggagtcggtccaggagcccagatgatagaaatccagggaataacctttatgtaactggattgtctactcgtgtaacggaagatgatcttgagaagttctttagtaaagaaggaaaggttaagaactgtcatgttgttcttgatcctaggacaaaagaatcccgtggctttgccttcgtgactatggatactcttgaaggtgcaagacgctccatcaagtatctgcaccgcactgtacttgaaggtcgcctggtcactgtagagaagtttaacatggtgctgggctgcctctacgtcaacctggttggtccaggctgtgcagtctccaaccatggttgtctccaaaggatgtgcagctgacgtgatggtgcttatcaccacaccctcagagctcatcaccacttgccgtcttcacctcgctcaccgacaatgcatacatgctacatcaacacgacggctgtcgccatagagcgatcttggagtcttgttgtgcatcgcgtcaccaccatcgccaccgcaacttctaccacaaccgccatcgtcaacatcacgctcgtgatccaacaggctctacgatttgtctgcttcgactaagcttacatggtgcatgctgctgccatgtcacgacaccaaccaccaagtctgatgcgaacttcatcgaccagtatcttgatttgatggacatcacgagaggcataatctggcgcttccttggaccatggctacaccgaccacggaacaagtgcacaaaagtcatctttggtttagttggcatgcaacgtaaagtttaatctacctatatcacaagattttgatcaagagttgacaagcttaatggaccatgactatttttcaccaaaagggcaaagctaaaagaactcgtgaaaggacccctactcctggaaaatactgtggtcgaagaggaggatctcaaaggagcccatcaccttaccgccctcgcagaagggagcgttcgcgctcaagggaacgcagaagggagcgttcgcgttcaagggatcgaagggagcggtctcgctcaagggatcgaagggagcggtctcgctcaagggaacgccgaagggagcggtctcgttcaagggaccgcagggagaggtctcgctcaagggaccgccggagggagcgctcacgctcaagggaccgcagaagggagcgctcacgctcaagggaccggaggggcagttcaccccatggcagaaggcatagagatcggtccaggtcacccaccagcaatgggaaccataaggcagactaggaagcgcttttatggacttgtcgttgattgcgtgaacaaaggaacttgtaacactacctataaactggtcagactgagacggttagcatggatttttagtagtgttgctgtattttgttgtttcatacaagtactctattctgttagctttcggatcgaaatgtcggatgatgatggttgttattgttctggaaatcgtagacatgtcctccagaatacctatgaaactatggcatactcgtgtgtttgcttaaggttgctgtggtatgttctgatcttaagattgacacgttgcacggtagat

SEQ ID NO: 43511 - DNA, 2753 bp, Zea Mays
cccgtttaacggcggcacgacaagcaagcggtcacgtgagagctgatttttctcgcagcgggtagcggtagccctgtccctgacctgatcctgacccgtgcgggcgtgcggctcctcgcggacagctccagactccagagccgcctcttcgccctctcgccatcggcaggctacggtggctgcttccccgagcctgcagatcgggtggtagatctggttggcctagtcgctgtcggatgcagttgccgagctaggtcgcggctgcgcggcggcggtcggggtcttgcgtcgccagatctggataggaaaacgccgcgcacaagctgagctaaattctgttcgattcgagttcttataggggttcttgtggctgcgtgttttgaattttttcccactggttctggggtgccgagaaagggaatcgtggctgactcttgttgccgtcgtcgagccagatctggtcatgctgctaccgtggatgtcttattgcttgatctcctttgttttttaattccttcggttcaagaatagcatcattaccatgagcatacataccagagaaacggagacagattcggaaattttcatttattgctagcttgtagttttggggtcctataatatttttcttggttctcttaattaattgagctagtaaatcaacaaatctgccactacagccgtcacgggcaaacataaaaaaactgaacaacaccaaattgaggcgcctagtccacaaacctgaactgctgaacttaaatgtctggaagccacagtttctgatttctgatggtttgtttttatgctcatttactctttctttcttccaggtagaccaccttgtgttgattcctcgagtcttcacctggtgcttccgtttgcagcttcatttttaactaagtctgtaatttattggctgtttatctgagtgacactacactctctgttttttcttattagatgtcacaagccaaggaagtgaggtacactgcacggtctattacacctcctgctgatagaaatggcacttcaaggtcgcctcctccaaagagacgcagcccttcaaggtcacctccaccaaagagtgcttcacggtccccacgtccaaggagtccaaagagacgcagcacttcaaggtctcctcctaggagacgtggtagatcaaggtcaagggataggagtcggtccaggagcccagatgatagaaatccagggaataacctttatgtaactggattgtctactcgtgtaacggaagatgatcttgagaagttctttagtaaagaaggaaaggttaagaactgtcatgttgttcttgatcctaggacaaaagaatcccgtggctttgccttcgtgactatggatactcttgaaggtgcaagacgctccatcaagtatctgcaccgcactgtacttgaaggtcgcctggtcactgtagagaagtttaacatggtgctgggctgcctctacgtcaacctggttggtccaggctgtgcagtctccaaccatggttgtctccaaaggatgtgcagctgacgtgatggtgcttatcaccacaccctcagagctcatcaccacttgccgtcttcacctcgctcaccgacaatgcatacatgctacatcaacacgacggctgtcgccatagagcgatcttggagtcttgttgtgcatcgcgtcaccaccatcgccaccgcaacttctaccacaaccgccatcgtcaacatcacgctcgtgatccaacaggctctacgatttgtctgcttcgactaagcttacatggtgcatgctgctgccatgtcacgacaccaaccaccaagtctgatgcgaacttcatcgaccagtatcttgatttgatggacatcacgagaggcataatctggcgcttccttggaccatggctacaccgaccacggaacaagtgcacaaaagtcatctttggtttagttggcatgcaacgtaaagtttaatctacctatatcacaagattttgatcaagagttgacaagcttaatggaccatgactatttttcaccaaaagggcaaagctaaaagaactcgtgaaaggacccctactcctggaaaatactgtggtcgaagaggaggatctcaaaggagcccatcaccttaccgccctcgcagaagggagcgttcgcgctcaagggaacgcagaagggagcgttcgcgttcaagggatcgaagggagcggtctcgctcaagggatcgaagggagcggtctcgctcaagggaacgccgaagggagcggtctcgttcaagggaccgcagggagaggtctcgctcaagggaccgccggagggagcgctcacgctcaagggaccgcagaagggagcgctcacgctcaagggaccggaggggcagttcaccccatggcagaaggcatagagatcggtccaggtcacccaccagcaatgggaaccataaggcagactaggaagcgcttttatggacttgtcgttgattgcgtgaacaaaggaacttgtaacactacctataaactggtcagactgagacggttagcatggatttttagtagtgttgctgtattttgttgtttcatacaagtactctattctgttagctttcggatcgaaatgtcggatgatgatggttgttattgttctggaaatcgtagacatgtcctccagaatacctatgaaactatggcatactcgtgtgtttgcttaaggttgctgtggtatgttctgatcttaagattgacacgttgcacggtagat

SEQ ID NO: 43512 - DNA, 2507 bp, Zea Mays
ctcggtcgttcaaccaaacaagctcactcccggccatcaggcgcacaccgctctcccgccgccgtcctgcgtcggagcgatatccctacatccccacctcatttgcacccggattggcttcttcttctactactactgtacagaactttttatgtggctgcaaagttctgtaattctagaggagcaaaatggagattattatcattatctcacttgtcattcttttggcactaggagctctctttgcgatcccaaaatcgcaaaataaaggtaaatcaaaaggaaccgacttaggagctggaatgacatctaggagctttacgaaggaagagatctctaaacataacacaaggaaggactgttggatcgtcatcaaggacaaggtctatgatgtcactccttatgtagaggagcatccaggcggagatgccattctaaataatgctggtggtgattccacagagggcttttttgggccacagcacggcactagggtcttcgatatcatcgaggatttctgcatcggtcagttgaaggcatagggtagcttgtattgaattcgtggaattttccggaaatcaagttttgagaagctacatgttatccaacattttaagcattgcaaccttcaagcatttgagatgtcagtgtaattgttccacaattgtcatcggggctgctaggagctgtgatgtagcactgcgtttttattctgctgttgtgtgactgtgtctttacatttctgttgttggacaagactccaaaacgcttgtaattgttctggctaagggcccgttcggttattcaggaatctactccagaaaggatttcagctggaataattgtataatttgtataacaattagtaacctggaatagttcctagttttgttccagcctaaccgaacggggcttaaatcagaatctgtttcacacgatcatttctcgagtgatgttacattgaagatgtcccgagtttgattttaacttggctgttgaatgcgttatttaagatttgtcgtgctctaaggaattgatggtatgcaaacatgaaagtgaacagtatgaagagaacataatttctgagattgagctgattgttccgtgagtagtaaaaattaacttttctcttgctgagtgaaatcaacaaaacccaacccatgaaagggaaagaaagaaagaaagaaaagataatgagacattaaaatgtatcctaaaagctttgctggcttctgctactgcacagttctcaggaataggctcctctgctgcagctctgctcctccctcctgtcttggagaagtggacagtgctgccgatcagttgctcttctcatggatagtagaggcttggcattgcggtgtcaatgtcgaagttctggtcgaatacgtattcgacgcattcgagaggcatgaattcgtcgtcaggcaccggaaggggcgcaaccgacgagacggcggcgaacgccgatgacaccacctcctggaggtccacgtccgaggtccagtccctgtacccgggcaccgggcaaggcgagatgccctggtgcaggcagccgttgaagtcggagccgacgggcgacgcgagggaccacggggacgaggcgccccgcacggggcagctctcgggcgtcatcggcgggagcccggcggcgttgtccgtggtggtggtggccaccgtgagccgcgcggcgaggccctgcagcgcggcctgcgcgtgcgggttgtgctgctgcgccctcttggacccgccgccggcggcggcgggcctgcaggtgtgctcgccgtggtagacgacgtcgaagagcgcggggtggtcgtcggcgcgctgcacctgcttggtggccaggcagttctgcgagttgcggtgcgtgcagcggtagtaggcccgcgggtgcctggcgccgaggatgtccttctggccgtacttgcgccagctgtggccgtcgtcggcgctgacgcgcacctgctggctggtccagcgcgccgtggccttgcgcttcttggggctggcgccggcggggcggaaggggtggtggtcggaggcggcgtcactgcttatcgggctccccgtggcggtcagcggcgagggggcgaggtccggtgacgagtggagcatgccgatggagcggtcggtgagcgcgacgatctgttgcacgaggcagcggcagaggtcgacggagtccgcgtccgcgggcgcgcgcagctgcagctcgagctggctcaccaggtcctgcacgcggcccaactccgagaccaggagcgcccgcccgccgctctccacggcttcagccattgctgcttcgaggataggtgagagctggagcaggggagtccggtcgtgaggtggcgagcgatcggagatcaggactcaggagtggcttggctcgacgtggaggaagaggaggatgtttttatagcaagcgaaagcgagggagggaggccggagggggaagcgcgtccgcgtgggggaatttcaagtgagctgaggcgaggcgaggcgagcag

SEQ ID NO: 43513 - DNA, 2404 bp, Zea Mays
attaaagatcgtgttggtcctaaaatttttatcggaaagcacgatagatcgtgtccggcccccggttaactttcacgtccggatgcaaattcgcctcggtcgttcaaccaaacaagctcactcccggccatcaggcgcacaccgctctcccgccgccgtcctgcgtcggagcgatatccctacatccccacctcatttgcacccggattggcttcttcttctactactactgtacagaactttttatgtggctgcaaagttctgtaattctagaggagcaaaatggagattattatcattatctcacttgtcattcttttggcactaggagctctctttgcgatcccaaaatcgcaaaataaaggtaaatcaaaaggaaccgacttaggagctggaatgacatctaggagctttacgaaggaagagatctctaaacataacacaaggaaggactgttggatcgtcatcaaggacaaggtctatgatgtcactccttatgtagaggagcatccaggcggagatgccattctaaataatgctggtggtgattccacagagggcttttttgggtctgtaacttatattgcttcctatacctcataacatgctctgtcattgcctgattagttcagcacttcagtgcctttcttggaattgtctcttcagaaattagaaaatcatgctttttgatcattaaaaatttacatagtatgccttttcatattgagattattcatctccgatattttaaacaatattcgatgaagacttagcatcattttagatattctgtaaaaaagcattcgaaaggaaatgaaaaaaaaagactgacagtattgctataatgataggcaaaaatggtcagtttttttagttccggtgctgcctatccaggtattgctactgctaatactttctacagaaatactatacacaaccaataatttcatagaagttgctagatgcttttgtaatgcttgtcttattattgttggttttgtttgtttagtaaaaattaacttttctcttgctgagtgaaatcaacaaaacccaacccatgaaagggaaagaaagaaagaaagaaaagataatgagacattaaaatgtatcctaaaagctttgctggcttctgctactgcacagttctcaggaataggctcctctgctgcagctctgctcctccctcctgtcttggagaagtggacagtgctgccgatcagttgctcttctcatggatagtagaggcttggcattgcggtgtcaatgtcgaagttctggtcgaatacgtattcgacgcattcgagaggcatgaattcgtcgtcaggcaccggaaggggcgcaaccgacgagacggcggcgaacgccgatgacaccacctcctggaggtccacgtccgaggtccagtccctgtacccgggcaccgggcaaggcgagatgccctggtgcaggcagccgttgaagtcggagccgacgggcgacgcgagggaccacggggacgaggcgccccgcacggggcagctctcgggcgtcatcggcgggagcccggcggcgttgtccgtggtggtggtggccaccgtgagccgcgcggcgaggccctgcagcgcggcctgcgcgtgcgggttgtgctgctgcgccctcttggacccgccgccggcggcggcgggcctgcaggtgtgctcgccgtggtagacgacgtcgaagagcgcggggtggtcgtcggcgcgctgcacctgcttggtggccaggcagttctgcgagttgcggtgcgtgcagcggtagtaggcccgcgggtgcctggcgccgaggatgtccttctggccgtacttgcgccagctgtggccgtcgtcggcgctgacgcgcacctgctggctggtccagcgcgccgtggccttgcgcttcttggggctggcgccggcggggcggaaggggtggtggtcggaggcggcgtcactgcttatcgggctccccgtggcggtcagcggcgagggggcgaggtccggtgacgagtggagcatgccgatggagcggtcggtgagcgcgacgatctgttgcacgaggcagcggcagaggtcgacggagtccgcgtccgcgggcgcgcgcagctgcagctcgagctggctcaccaggtcctgcacgcggcccaactccgagaccaggagcgcccgcccgccgctctccacggcttcagccattgctgcttcgaggataggtgagagctggagcaggggagtccggtcgtgaggtggcgagcgatcggagatcaggactcaggagtggcttggctcgacgtggaggaagaggaggatgtttttatagcaagcgaaagcgagggagggaggccggagggggaagcgcgtccgcgtgggggaatttcaagtgagctgaggcgaggcgaggcgagcag

SEQ ID NO: 43514 - DNA, 542 bp, Zea Mays
gccaccacgatgccctcctctcccatgccccgctcatctgcaacaccaaccatcgtctccatccgctgtccgcgcccggttccgacccctgcacctccatctcccgcgctacatgcgggctcaaaaaatactttggccctgttcttgattgaccccttttcagtacagaactttttatgtggctgcaaagttctgtaattctagaggagcaaaatggagattattatcattatctcacttgtcattcttttggcactaggagctctctttgcgatcccaaaatcgcaaaataaaggtaaatcaaaaggaaccgacttaggagctggaatgacatctaggagctttacgaaggaagagatctctaaacataacacaaggaaggactgttggatcgtcatcaaggacaaggtctatgatgtcactccttatgtagaggagcatccaggcggagatgccattctaaataatgctggtggtgattccacagagggcttttttgggcaaaaatggtcagtttttttagttccggtgctgcctatcca

SEQ ID NO: 43515 - DNA, 633 bp, Zea Mays
aagctcactcccggccatcaggcgcacaccgctctcccgccgccgtcctgcgtcggagcgatatccctacatccccacctcatttgcacccggattggcttcttcttctactactactggtaaggagttcctagcctagtctcgcttggatgggatgttcgtgctgtcctctaatcaggatcttcctttgtgctattgggatagtcgctccaaaatccgaatccatagtcacggtgttcctcttttttggatcgtacagaactttttatgtggctgcaaagttctgtaattctagaggagcaaaatggagattattatcattatctcacttgtcattcttttggcactaggagctctctttgcgatcccaaaatcgcaaaataaaggtaaatcaaaaggaaccgacttaggagctggaatgacatctaggagctttacgaaggaagagatctctaaacataacacaaggaaggactgttggatcgtcatcaaggacaaggtctatgatgtcactccttatgtagaggagcatccaggcggagatgccattctaaataatgctggtggtgattccacagagggcttttttgggcaaaaatggtcagtttttttagttccggtgctgcctatcca

SEQ ID NO: 43516 - DNA, 864 bp, Zea Mays
ctgccccagtgacggctcgctagccggcctgcccgcccggcccacacgcgcgcatgcccagccgcgcgcctgcagtcaccaagcacgtgcatgggctcctaggcgccgtcggggccctgttcacctttccctgccatctctctcttccccaacttctctccctgctttcccatgacgcgcatcaccattttttcctctctctgatgcttgcaaccgccaatgcccctattgcctcgtcgttgccgatcccagcgcccagacgcccagatctcccctctcctcccctagccagccgggacgcccaacttggcagccttagctcgatgtccaatgcctaccgacgcggcggcgcggtggctcggcggggcaatcttcgcggctcgcccgtagcgacgcagatcgtcctccccgcagcccgcttccctccgtccctgcgcgccatccagcagcacccagcgcagtgcgcgaggcccagccccgtccccggttgggttttgcgcagccccagcgcaacagcagtctcgccattctcgtgcctcgcctcgagctcgtctggtcgtccgccgtcgttgcgaggaacttgaatcttgtttgggaaaggagggaagtagcagcacgttcacctacacttttaaataactttgccactgcttagtaatgacattaattagggacttcgggtcaatgatgttggtctcttttaaataatgtgtgcaagtggtttaatctgttctggtcattatggtgatcgtttctttgctagctgagttaataatgttatgtatgtttatccttatcatgcattatgtttatacactgtggtttcctcgtttatgagactaagggagaggatgccgattttct

SEQ ID NO: 43517 - DNA, 1245 bp, Zea Mays
ctgccccagtgacggctcgctagccggcctgcccgcccggcccacacgcgcgcatgcccagccgcgcgcctgcagtcaccaagcacgtgcatgggctcctaggcgccgtcggggccctgttcacctttccctgccatctctctcttccccaacttctctccctgctttcccatgacgcgcatcaccattttttcctctctctgatgcttgcaaccgccaatgcccctattgcctcgtcgttgccgatcccagcgcccagacgcccagatctcccctctcctcccctagccagccgggacgcccaacttggcagccttagctcgatgtccaatgcctaccgacgcggcggcgcggtggctcggcggggcaatcttcgcggctcgcccgtagcgacgcagatcgtcctccccgcagcccgcttccctccgtccctgcgcgccatccagcagcacccagcgcagtgcgcgaggcccagccccgtccccggttgggttttgcgcagccccagcgcaacagcagtctcgccattctcgtgcctcgcctcgagctcgtctggtcgtccgccgtcgttgcgagagtgcgatccatctccaagcttcaaggagtcgacggtcaagcttcgacgaccaagtgatcaagctctctgagttctatgaggttgaagaccctgagcatctgtttggtgaaggcaagtgtcctctgacccattatgtcccatttactttataatacattgtcccgcatactatgaacaacctaaggatttactagctttctatttacctggtccttgatttaccttttgggttactatggttagctacatgctagcgctttactttaatcaatgaacatgatgagatacaatgatgatactatgatttcattctggatatgatgatatacttgtggcatttaggggactcgggctgtttctcgagtgcctctccgtaaggacctgttcgttgagagatcacccgggataacagtgcaaccatgagggtgaaatgggatgcccttagctaattaattagaggaactagaggtgtagtttcttcgccgtcgtgtcgtcaatggggtccaggcacagtgcttgctctgccgaggctgagtgccaaggttctttcgttttgcttttgttagtcaccctcctgcggggagaggtactgtgtttatcaaactggagaaacctaacgggcggctatgacctctagggaatctttgtaacagctacgtagtgatacc

SEQ ID NO: 43518 - DNA, 2071 bp, Zea Mays
ctccaccggcgctccaaaggtccaggaaggttgcttttgatgacatcttcatattgttgcgagatctgacaatttcattcatgtcaaagcaagagagaaaggtttgtattctggatttttggttcattcttgtgttattgcacgacataacaaaacaaattaataatctttacttcattctgtcagtgccttaatgccttgaattactggaatgctggatacaccccatgttttcacatattgcttttagtcgatgatgtaattcatggttgtacttcttacatggtcatgagctactacatagtatcagtcgcgagattatctcagttaaacataatgccttctgcaaggagtttaacattctttctgcccccaaaaagggactattgacatcattgcggtaggatacaatttcctagaattaaggtttcttaattcgggtatatagcttcaaaaggcattcattatttttacctatttttgtaacagtaatgtacaaaacattttggttgttgtgttattgcgccccctcccacatgcacacattagcattagtcttttctgaatatgctcacgtgaagacatttattgtgcattatagaaagtcttgactcatgtgttacaagaaagtgggtacacacaaaagattgacatttcaccctctgagactttatgaagatggaaagaagatatcaaaatgcagtcaggatgtcaaggccagttcttgatgcaatgatcagttaaatctgcctttgtcatgcttttctaagttcaatattaggttcgaatcattgaacttctctggttgtgtaccaagttagatagtagcagagaaataatgaatattttctgttggtgttgaaaccaaaggagaatgagggacaggctgtagcggttggctggttcttgcaggacattaggtactaaaaatatgtattttttaaacctcagttttggtgtctaatgtaatagttagatttgttgtgcgccaatgcccaatctttcattgatggcaggaatgtgtcatgtgttgtagaattttccttcatttgttgtctgcgaacaagggtacatagcttttaatttggaaatctaattcatttggactgaaataaattctgaaagaatgggaataccttcaatatcatgtgcttgactcaagtgacattcagtagtacataacattttaaagatgtcgtgctctttagtattccttgagctattgatatgccaaaatagaaaatctatgtactgaatactagatgaaaagctcatgaacctaacaaaatccatcaaaacttgatggatgcagatctttgaggaaagtagtaatagtggcattgaaggtgctgactccagcaacgcatgctatggtgggacaacaaccatactgaattgtgtgaattggattgaaagtaactcctgggatgaccgtcatggtcttgccgtttgcccagatagagtggtttatgtcgaagggccaactcgaccaacaggaggtgttgttgctatagcaatgctcattggttctaatgctccaatttctttcgagagaaaatatagagcttctcacatgactcatgtttatgatttctgcaaacctgatcttacaagtaaatatccaattagtttttgattgataaaacaatttatactacttccgtttttaatatttttcgtccctagtttatttttgaactaaaacgcgataattaaaaaaagaacggaaggaactgaccttcatagtctagatgacccaagtgaatattttatccatcttagacttacaatattttttacaagaacacatttattctagattgttgatagtaaactatcccaaacatgcttacctaatggctctaggcttatgctacaaacagctccacaacaacaagtaagttgttgcacctttttccctttccctttaataatagttagattgaatttgcttaaaattatccctatgtcccaatgcaatttctgaaactaggtatgagaagattgctggtaaacaattctcaatttctgatacagaatattcagtgttccattctctatgcaacaaggt

SEQ ID NO: 43519 - DNA, 1813 bp, Zea Mays
ctgcctttgcttgtgccgctgaagaacagcaagagtcaattaaccaaatcagaggcgatgagaaggaatcagtccaattttttccattcccatcatcaatgtagttcggttgctacatcatcaagcaaaaaggaagggggagaaaggaagaaaggaaagtgaaaatatggacaacaccttgtacgggagagcgacgccttaagtagcgtgaatctggagggggatctaggcgaggccggcgccgacagcgcctgcagcagcggcactcagtggttcctggtggccgccagcgcggcgggtggcgtcacgggggccaggtccaccggctgctgtagcggcctagtgcggcaacagaggaccgtcgtggacgagccggttgctgctattgctgctgcgggtggccggtggtcgtcaagcgatacgtgccatgagtctcactcatcatctaccccttcccactactgtaagtaatcacactaagccgttgcactgattaaattgttgaatctgagatttgtctgtaccaaatttggctaatcaaaatagcagttaaaaaaggtgagctcgtggaggatcctctgtttcagactgagtgtccttgatttggtgatggtgtcgctatgatgtcgcttaactgctttgggatggacaattatgttagcaaaccattttttctcttattcatgctgtttttaggatatataagtttgttgcgcttgccaacgcactttttaaatttctaatgctaaaggtagttcatgattttgaccaggttgaatgtaggtattagaatcttaataatttttttgttatttgtcaatgtgtattatggatattctttcaaatcctttatagttagattttattgttatctctccaattattttcacgttttatgatactgacgacaataggaaggttgcttttgatgacatcttcatattgttgcgagatctgacaatttcattcatgtcaaagcaagagagaaaggtttgtattctggatttttggttcattcttgtgttattgcacgacataacaaaacaaattaataatctttacttcattctgtcagtgccttaatgccttgaattactggaatgctggatacaccccatgttttcacatattgcttttagtcgatgatgtaattcatggttgtacttcttacatggtcatgagctactacatagtatcagtcgcgagattatctcagttaaacataatgccttctgcaaggagtttaacattctttctgcccccaaaaagggactattgacatcattgcggtaggatacaatttcctagaattaaggtttcttaattcgggtatatagcttcaaaaggcattcattatttttacctatttttgtaacagtaatgtacaaaacattttggttgttgtgttattgcgccccctcccacatgcacacattagcattagtcttttctgaatatgctcacgtgaagacatttattgtgcattatagaaagtcttgactcatgtgttacaagaaagtgggtacacacaaaagattgacatttcaccctctgagactttatgaaggtaagcgtatttctcctttaagaggtaaatttactcagtcataactcataaacatgttatcaccattcataatctactttgggcacataaatattactttcatgttaccacaagatgttatgccaatgttcttacagatggaaagaagatatcaaaatgcagtcaggatgtcaaggccagttcttgatgcaatgatcagttaaatctgcctttgtcatgcttttctaagttcaatattaggttcga

SEQ ID NO: 43520 - DNA, 1741 bp, Zea Mays
agtatatttgttccactgattcctctctttgcctggcagacaaatagcacacaatcaaccgtcgtctccttcctcgccttcataggcttctccaaattccaaatcgttgctagagaaaccaccaaaccggccggcagcccggcacctctcactcagtctctcaccccttgccaccactctcccgtggcgccttctagaagcttccggaaccagacaaccactgtgcgccgagttttctgaaggcggctttggtctttcgagatctcgttgtcggtgccatggcgggtcagtactgagtgcgcgggcgggagcaggtgaaggtctgccagctcgagatcccgatgcagatccgggagggcccggcgcggcggcaggcgccgtcggccgcgggggcgctgcggtcgccgttgtccgccatgatgctcgccatgttcgctaccatggcctccttctacgtcgccggacggcagcaagggaagcggttggcatcgcttgagatggagctggctgcagcaaagcatgaaggttttgttggcaaatatactcccgagacaaatggaactcattctgggaaaaagccactggttgttattggaataatgactagctttgggaggaaaaactaccgtgatgctgtcaggaaatcatggcttccgacaggttcaatgttgaagaaactagaagaagaaaaaggcattgtagtacgttttgttgttggaagaagtgcaaatcgaggagatacttttgatagggagatcgatgacgaaaataggagcaccaaggatttcttgatattggatgatcatatagagtcagatgaagagcttcctaagaagacaaaaagtttctttgctaatgcagcaaatacattcgatgctgcattttatgctaaggtcaatgatgatatatacataaacgttgacactttaagtgcaatgctcgaaactcactgggacaagccccgtgtatatataggttgcatgaaatcgggcgaggttttctctgactcaacccacaagtggtatgaaccagactggtggaaatttggtgatgggaaatcgtacttccggcacgcttctagtgaaatgtttgtcatatcaagggccattgctcagttcatttctataaacaagtctgttctccggacatatgcccatgatgatgttagtgtaggatcgtggatgattggccttgctgtgaagcatgtaaatgaagcaaagctgtgctgttcatcgtggccctcaggtgcaatgtgttcagcgctataacgagcaacaatgcatgctgaggagttttgcaaacatcgtgcctggtggataatacatgcaatatgaggtcgaatacctgaggaaattttgttttcttctgccattttctgtaacgtcttttggaggaagcttttgcgagccagttcataccgaatcagatatcttgttttttttctttgcaaggccactacactagaatcgtggcttctaacaaaaagccttctgcagattttatcctgttccgtgtgccatttgtagatgccccacccttaccattctttttctgacagacactaccattgttggagtgacagaaatcaatagcaattcaggaaattattttggtccagaatatatatgtatgcgtaatgcgtgtcttcagacctgttgtcatggtggtgaagttggcacatacataaggatgtccttttgaagtcaagaatctgccattcacattctctgggtttgaactt

SEQ ID NO: 43521 - DNA, 1497 bp, Zea Mays
agtatatttgttccactgattcctctctttgcctggcagacaaatagcacacaatcaaccgtcgtctccttcctcgccttcataggcttctccaaattccaaatcgttgctagagaaaccaccaaaccggccggcagcccggcacctctcactcagtctctcaccccttgccaccactctcccgtggcgccttctagaagcttccggaaccagacaaccactgtgcgccgagttttctgaaggcggctttggtctttcgagatctcgttgtcggtgccatggcgggtcagtactgagtgcgcgggcgggagcaggtgaaggtctgccagctcgagatcccgatgcagatccgggagggcccggcgcggcggcaggcgccgtcggccgcgggggcgctgcggtcgccgttgtccgccatgatgctcgccatgttcgctaccatggcctccttctacgtcgccggacgattgtggcaggatgctcagaaccgagtctacctcattaaggagctagacagacgaacaggccagggacaatcagcaatatctgtggatgataccttgaaggttgttgcatgcaggcagcaagggaagcggttggcatcgcttgagatggagctggctgcagcaaagcatgaaggttttgttggcaaatatactcccgagacaaatggaactcattctgggaaaaagccactggttgttattggaataatgactagctttgggaggaaaaactaccgtgatgctgtcaggaaatcatggcttccgacaggttcaatgttgaagaaactagaagaagaaaaaggcattgtagtacgttttgttgttggaagaagtgcaaatcgaggagatacttttgatagggagatcgatgacgaaaataggagcaccaaggatttcttgatattggatgatcatatagagtcagatgaagagcttcctaagaagacaaaaagtttctttgctaatgcagcaaatacattcgatgctgcattttatgctaaggtcaatgatgatatatacataaacgttgacactttaagtgcaatgctcgaaactcactgggacaagccccgtgtatatataggttgcatgaaatcgggcgaggttttctctgactcgtgagtgtttagaacaattcattttaggaacttgatagttttcttttcccgtttgaatgcttcttcgtttgacaaactaaactagagatccattggaaacagaacccacaagtggtatgaaccagactggtggaaatttggtgatgggaaatcgtacttccggcacgcttctagtgaaatgtttgtcatatcaagggccattgctcagttcatttctataaacaagtctgttctccggacatatgcccatgatgatgttagtgtaggatcgtggatgattggccttgctgtgaagcatgtaaatgaagcaaagctgtgctgttcatcgtggccctcagattcttgattctcccgatttttaaatcctgtatctg

SEQ ID NO: 43522 - DNA, 1426 bp, Zea Mays
accggttgcattgcatagactcttccgagtttaacaaatcctgtctgaattccgatgctctccttcgtgcacacgtggtcttgtattaggaagtgagccagtttgtcctcctgactgcttccagtacaaggggacacttgatgtattcttgaaagtggttagacaggaggggttcgttagactatggagaggaacaaatgcaggcttagcattagctgtacccactgttgggatatacttgccttgttatgatatattccgcaactggattgaggatttcacaagaagtaatgctcctggcttgacaccatatgccccgctagtagcaggatctgttgcacgctcgttagcatgtattgcttgttctccaattgagctcgcaaggacgcgtatgcaggcatataaagagtttcgtcctggcgtaaagcctcctggaatgtggaaaaccttggttggtgttctcccaccacttccaagttcgagtcagaatgtacaaaattaccgtgttctgtggactggggtgggtgcacaacttgctcgagatgttcctttctctgctatatgctggtcaactcttgagcctatgcgaagaaaactacttggttttgttggagaagaaggcaatgcaggtagtgtattgggagtgaattttgctgctggttttgtagcaggcagtcttgctgctggtgctacatgccctctggatgttgcaaaaacaaggagacaaatagagaaggatactgagaaggcaatgaggatgactacaaggcaaacattagctgagatatggaggtctggaggcatgaaaggtctgttcgccggcgttggcccacgtgttgcacgcgctggtccatcagttggtattgtcatttccttctacgaggttgtcaagtacgctcttcatcaaaggcacacctcatgacctagttttgttgataagatggaagccctcccacttggtgaaaggcatggtaggctagttactctgacagggctaggtgtaagttggaagatcagagtgcccaacagtcaagacacgacaggcttttttatggacagtgtccatttcagtcaaggatagcaataccagttttgccatggagcaggcttcagtttcgcccgtgtcaggttttggaccatcgtctaagcttatgtcttggccggatctgaagctgctccggtaaacttacttggtgtagtccctgtaattgaaggaaaggagagtgtagtagcgtagatactgatcaataattttgcacacccttgaaactacagaagaaattttgcacatcctagtcttgtgtcgatgccttaaaaaaaccgttttggtcttcttgttgacttgttactgtaaaaaccaacggggatatgtttacttggcggaatcattaaattcaaaggggatggattcgttagatatatggct

SEQ ID NO: 43523 - DNA, 3318 bp, Zea Mays
tttgacttcatgtgacttattttagaaacttgagctcacaacctttctcttatttggtctctctatggtggaattatgttattttataatctctgttcgttcaatcagtcgttgtgaactcttttctaatcgctcacttcattggccgtgttgtaccaagacatattgcatggagtaaacaataatatcagttagacaaatcaaaaaatattatacagagagcggagacaataaataaaaaatcttaatttttttattgattgtttacgtgggtattgttgtaagtcgtcggaacgcacgggcaaccgactagtatctcttaaatccggttctgacataataccatcctcttcgtaagtgcttatatcacactttgacctgtctacaaaaatttagggaaaaaacatttgccggaattcaaaggtggaaaccaaagatggaaatatagacacgactacgatctgtccacacgagaaaaagaaaacctaacgccctcccggccttccccccccccccccccccccccccctctattccaggagcctcctccccctcctcttctagagggagggaccacagccgcggccgcaccggcgcacaccagctacaccgcccgaattcccgatcgataccggaggtggacgtggcctagggtttccgagccaggccggcgctatggtgggctgctctaggggctccctccccacctggatgaccgccgccgccgcgcgggtcgacctctcgggcggcgtaacgccttcgcaccagggcccatcctcttcgtccccctcctcgggtccctctccggccgcgggggcggaccaggagctcgggatgtacgagcgcgcgttctccgctgccggcgccgccttcgtctcagctatcatcgtcaaccctctagatgtcgccaagactagattgcaggcgcaggcggcaggggtgctgtacaaccagcctgcccagatggcggcgctcggccctgatgcgatcctgtctgaattccgatgctctccttcgtgcacacgtggtcttgtattaggaagtgagccagtttgtcctcctgactgcttccagtacaaggggacacttgatgtattcttgaaagtggttagacaggaggggttcgttagactatggagaggaacaaatgcaggcttagcattagctgtacccactgaccagatgacgatgtccaagttatagggtcaatgtcagcatcatccaaggcttcctcatgtactgtgctaagttctggaacagctgccaaaagaaacaaagcaattttccaattgaagccccacccaattgcagctccaaagaagtccattgcatctatgattcgacgaacacctcaagaaattgtagcagagggacatgcaaagggacctgctcaaactaccataagtgctggtgggtgtgtgagagggaatgaagaccttgagaaagaggagactaattgagcaaatgaagatgatgaggacgaggaatatattcttgatgatcttgacgtggaagatgaaattgaaggaagcaatagtggaaaagatggtgatgatcaaggcgtggatgctctcttaatattgatgagttcgatgatggttactgatcatgcataaaagttgtaacttatgttgttgaacttgatctgtttctttttatgctatttggtttgtgaactcaagtactcaacttatgtatgaacttattctatatttgaacttctatgtcaagtctgaaaagacgtttcaacgttcgtttaaacgtttaaatgttaaaaagttgttcataacgttttaacgttttaccgctttaataaccatgatccttttttatagaagccttatgggcttacctcttgactaatttgcacttgtctaactaatgcacatagtattataattcatgttgattttttttgtcgtgtcacccatcaatcttgtacaacttgctatctccatctctctattttccctctacaacgtaatattctgaatcatattacacctgttcaaatcaattgccccgctatctccatctaactgatgcacatagtattttccctctactttttatgttcaaatcaattgcacctgttactaattgtttgatcacaaacaggttgggatatacttgccttgttatgatatattccgcaactggattgaggatttcacaagaagtaatgctcctggcttgacaccatatgccccgctagtagcaggatctgttgcacgctcgttagcatgtattgcttgttctccaattgagctcgcaaggacgcgtatgcaggcatataaagagtttcgtcctggcgtaaagcctcctggaatgtggaaaaccttggttggtgttctcccaccacttccaagttcgagtcagaatgtacaaaattaccgtgttctgtggactggggtgggtgcacaacttgctcgagatgttcctttctctgctatatgctggtcaactcttgagcctatgcgaagaaaactacttggttttgttggagaagaaggcaatgcaggtagtgtattgggagtgaattttgctgctggttttgtagcaggcagtcttgctgctggtgctacatgccctctggatgttgcaaaaacaaggagacaaatagagaaggatactgagaaggcaatgaggatgactacaaggcaaacattagctgagatatggaggtctggaggcatgaaaggtctgttcgccggcgttggcccacgtgttgcacgcgctggtccatcagttggtattgtcatttccttctacgaggttgtcaagtacgctcttcatcaaaggcacacctcatgacctagttttgttgataagatggaagccctcccacttggtgaaaggcatggtaggctagttactctgacagggctaggtgtaagttggaagatcagagtgcccaacagtcaagacacgacaggcttttttatggacagtgtccatttcagtcaaggatagcaataccagttttgccatggagcaggcttcagtttcgcccgtgtcaggttttggaccatcgtctaagcttatgtcttggccggatctgaagctgctccggtaaacttacttggtgtagtccctgtaattgaaggaaaggagagtgtagtagcgtagatactgatcaataattttgcacacccttgaaactacagaagaaattttgcacatcctagtcttgtgtcgatgccttaaaaaaaccgttttggtcttcttgttgacttgttactgtaaaaaccaacggggatatgtttacttggcggaatcattaaattcaaaggggatggattcgttagatatatggct

SEQ ID NO: 43524 - DNA, 3362 bp, Zea Mays
tttgacttcatgtgacttattttagaaacttgagctcacaacctttctcttatttggtctctctatggtggaattatgttattttataatctctgttcgttcaatcagtcgttgtgaactcttttctaatcgctcacttcattggccgtgttgtaccaagacatattgcatggagtaaacaataatatcagttagacaaatcaaaaaatattatacagagagcggagacaataaataaaaaatcttaatttttttattgattgtttacgtgggtattgttgtaagtcgtcggaacgcacgggcaaccgactagtatctcttaaatccggttctgacataataccatcctcttcgtaagtgcttatatcacactttgacctgtctacaaaaatttagggaaaaaacatttgccggaattcaaaggtggaaaccaaagatggaaatatagacacgactacgatctgtccacacgagaaaaagaaaacctaacgccctcccggccttccccccccccccccccccccccccctctattccaggagcctcctccccctcctcttctagagggagggaccacagccgcggccgcaccggcgcacaccagctacaccgcccgaattcccgatcgataccggaggtggacgtggcctagggtttccgagccaggccggcgctatggtgggctgctctaggggctccctccccacctggatgaccgccgccgccgcgcgggtcgacctctcgggcggcgtaacgccttcgcaccagggcccatcctcttcgtccccctcctcgggtccctctccggccgcgggggcggaccaggagctcgggatgtacgagcgcgcgttctccgctgccggcgccgccttcgtctcagctatcatcgtcaaccctctagatgtcgccaagactagattgcaggcgcaggcggcaggggtgctgtacaaccagcctgcccagatggcggcgctcggccctgatgcgcatttccagatcctgtctgaattccgatgctctccttcgtgcacacgtggtcttgtattaggaagtgagccagtttgtcctcctgactgcttccagtacaaggggacacttgatgtattcttgaaagtggttagacaggaggggttcgttagactatggagaggaacaaatgcaggcttagcattagctgtacccactgcctttagatgatgatgtattggaagatgaagcaggaccagatgacgatgtccaagttatagggtcaatgtcagcatcatccaaggcttcctcatgtactgtgctaagttctggaacagctgccaaaagaaacaaagcaattttccaattgaagccccacccaattgcagctccaaagaagtccattgcatctatgattcgacgaacacctcaagaaattgtagcagagggacatgcaaagggacctgctcaaactaccataagtgctggtgggtgtgtgagagggaatgaagaccttgagaaagaggagactaattgagcaaatgaagatgatgaggacgaggaatatattcttgatgatcttgacgtggaagatgaaattgaaggaagcaatagtggaaaagatggtgatgatcaaggcgtggatgctctcttaatattgatgagttcgatgatggttactgatcatgcataaaagttgtaacttatgttgttgaacttgatctgtttctttttatgctatttggtttgtgaactcaagtactcaacttatgtatgaacttattctatatttgaacttctatgtcaagtctgaaaagacgtttcaacgttcgtttaaacgtttaaatgttaaaaagttgttcataacgttttaacgttttaccgctttaataaccatgatccttttttatagaagccttatgggcttacctcttgactaatttgcacttgtctaactaatgcacatagtattataattcatgttgattttttttgtcgtgtcacccatcaatcttgtacaacttgctatctccatctctctattttccctctacaacgtaatattctgaatcatattacacctgttcaaatcaattgccccgctatctccatctaactgatgcacatagtattttccctctactttttatgttcaaatcaattgcacctgttactaattgtttgatcacaaacaggttgggatatacttgccttgttatgatatattccgcaactggattgaggatttcacaagaagtaatgctcctggcttgacaccatatgccccgctagtagcaggatctgttgcacgctcgttagcatgtattgcttgttctccaattgagctcgcaaggacgcgtatgcaggcatataaagagtttcgtcctggcgtaaagcctcctggaatgtggaaaaccttggttggtgttctcccaccacttccaagttcgagtcagaatgtacaaaattaccgtgttctgtggactggggtgggtgcacaacttgctcgagatgttcctttctctgctatatgctggtcaactcttgagcctatgcgaagaaaactacttggttttgttggagaagaaggcaatgcaggtagtgtattgggagtgaattttgctgctggttttgtagcaggcagtcttgctgctggtgctacatgccctctggatgttgcaaaaacaaggagacaaatagagaaggatactgagaaggcaatgaggatgactacaaggcaaacattagctgagatatggaggtctggaggcatgaaaggtctgttcgccggcgttggcccacgtgttgcacgcgctggtccatcagttggtattgtcatttccttctacgaggttgtcaagtacgctcttcatcaaaggcacacctcatgacctagttttgttgataagatggaagccctcccacttggtgaaaggcatggtaggctagttactctgacagggctaggtgtaagttggaagatcagagtgcccaacagtcaagacacgacaggcttttttatggacagtgtccatttcagtcaaggatagcaataccagttttgccatggagcaggcttcagtttcgcccgtgtcaggttttggaccatcgtctaagcttatgtcttggccggatctgaagctgctccggtaaacttacttggtgtagtccctgtaattgaaggaaaggagagtgtagtagcgtagatactgatcaataattttgcacacccttgaaactacagaagaaattttgcacatcctagtcttgtgtcgatgccttaaaaaaaccgttttggtcttcttgttgacttgttactgtaaaaaccaacggggatatgtttacttggcggaatcattaaattcaaaggggatggattcgttagatatatggct

SEQ ID NO: 43525 - DNA, 1976 bp, Zea Mays
tttgacttcatgtgacttattttagaaacttgagctcacaacctttctcttatttggtctctctatggtggaattatgttattttataatctctgttcgttcaatcagtcgttgtgaactcttttctaatcgctcacttcattggccgtgttgtaccaagacatattgcatggagtaaacaataatatcagttagacaaatcaaaaaatattatacagagagcggagacaataaataaaaaatcttaatttttttattgattgtttacgtgggtattgttgtaagtcgtcggaacgcacgggcaaccgactagtatctcttaaatccggttctgacataataccatcctcttcgtaagtgcttatatcacactttgacctgtctacaaaaatttagggaaaaaacatttgccggaattcaaaggtggaaaccaaagatggaaatatagacacgactacgatctgtccacacgagaaaaagaaaacctaacgccctcccggccttccccccccccccccccccccccccctctattccaggagcctcctccccctcctcttctagagggagggaccacagccgcggccgcaccggcgcacaccagctacaccgcccgaattcccgatcgataccggaggtggacgtggcctagggtttccgagccaggccggcgctatggtgggctgctctaggggctccctccccacctggatgaccgccgccgccgcgcgggtcgacctctcgggcggcgtaacgccttcgcaccagggcccatcctcttcgtccccctcctcgggtccctctccggccgcgggggcggaccaggagctcgggatgtacgagcgcgcgttctccgctgccggcgccgccttcgtctcagctatcatcgtcaaccctctagatgtcgccaagactagattgcaggcgcaggcggcaggggtgctgtacaaccagcctgcccagatggcggcgctcggccctgatgcgcatttccagatcctgtctgaattccgatgctctccttcgtgcacacgtggtcttgtattaggaagtgagccagtttgtcctcctgactgcttccagtacaaggggacacttgatgtattcttgaaagtggttagacaggaggggttcgttagactatggagaggaacaaatgcaggcttagcattagctgtacccactgttgggatatacttgccttgttatgatatattccgcaactggattgaggatttcacaagaagtaatgctcctggcttgacaccatatgccccgctagtagcaggatctgttgcacgctcgttagcatgtattgcttgttctccaattgagctcgcaaggacgcgtatgcaggcatataaagagtttcgtcctggcgtaaagcctcctggaatgtggaaaaccttggttggtgttctcccaccacttccaagttcgagtcagaatgtacaaaattaccgtgttctgtggactggggtgggtgcacaacttgctcgagatgttcctttctctgctatatgctggtcaactcttgagcctatgcgaagaaaactacttggttttgttggagaagaaggcaatgcaggtagtgtattgggagtgaattttgctgctggttttgtagcaggcagtcttgctgctggtgctacatgccctctggatgttgcaaaaacaaggagacaaatagagaaggatactgagaaggcaatgaggatgactacaaggcaaacattagctgagatatggaggtttgaaccctacatatggctcagtcaattgagcaatatgcttttaccatgttgtcctgctgtaccccaatagagttgctgccaaccattgcctctattcagtagcaagttgtgttcacataattgatttcttcttatagcccagtttgcaaacccttggtatatgccatcctaaatttgttctctatacagcccagtttgcgaaccccaggtatatgacatagg

SEQ ID NO: 43526 - DNA, 1202 bp, Zea Mays
tttgacttcatgtgacttattttagaaacttgagctcacaacctttctcttatttggtctctctatggtggaattatgttattttataatctctgttcgttcaatcagtcgttgtgaactcttttctaatcgctcacttcattggccgtgttgtaccaagacatattgcatggagtaaacaataatatcagttagacaaatcaaaaaatattatacagagagcggagacaataaataaaaaatcttaatttttttattgattgtttacgtgggtattgttgtaagtcgtcggaacgcacgggcaaccgactagtatctcttaaatccggttctgacataataccatcctcttcgtaagtgcttatatcacactttgacctgtctacaaaaatttagggaaaaaacatttgccggaattcaaaggtggaaaccaaagatggaaatatagacacgactacgatctgtccacacgagaaaaagaaaacctaacgccctcccggccttccccccccccccccccccccccccctctattccaggagcctcctccccctcctcttctagagggagggaccacagccgcggccgcaccggcgcacaccagctacaccgcccgaattcccgatcgataccggaggtggacgtggcctagggtttccgagccaggccggcgctatggtgggctgctctaggggctccctccccacctggatgaccgccgccgccgcgcgggtcgacctctcgggcggcgtaacgccttcgcaccagggcccatcctcttcgtccccctcctcgggtccctctccggccgcgggggcggaccaggagctcgggatgtacgagcgcgcgttctccgctgccggcgccgccttcgtctcagctatcatcgtcaaccctctagatgtcgccaagactagattgcaggcgcaggcggcaggggtgctgtacaaccagcctgcccagatggcggcgctcggccctgatgcgatcctgtctgaattccgatgctctccttcgtgcacacgtggtcttgtattaggaagtgagccagtttgtcctcctgactgcttccagtacaaggggacacttgatgtattcttgaaagtggttagacaggaggggttcgttagactatggagaggaacaaatgcaggcttagcattagctgtacccactgcctttagatgatgatgtattggaag

SEQ ID NO: 43527 - DNA, 4005 bp, Zea Mays
aaaagaccacatcaaggacaacaagtttcatacaaagaatgggcttgctactgtataagttggcagtaaaaagaattcccagaagaagatgaaattcaagaagtagtttctgaagaggagtctgctccagtgcctgctcatcaagtggatggagctatctaactaaaggttgggtagaaggatctagaacctcctcactgcaacaaaggcaagccccggtgcatgcaaccccttccttgtgtttttaaaagatttttatacactttaagtctagtgaaatgtgcattaagtttataggagttgcttggaaactattggatgcattgcctaccttgatatccatacctttatagatacttctgatgaagtatcaaaatatgatttacaaaaatgcttagccctgcttagatcttgtggatagaggttgtcttttgcattaatgcctagctcaggggttatcctgagaaaggacggcttctacctgcaagaatatatttttattgggagcatagtgggatcttactgcaaagttccctataatgctcttttcatcctaaggaacacagacaatcctaaggatggaagtacttaaatcaggacttgggctaggaacaggtgatgttccgtccaggttaattaaggattggatgcgtatgtaggcatgtatgatcaaggactatcttaactggccacatgccctggatatgggacagggtaagcttgaacccggctattccatacatgaaaagacaatcacgcactgggagtggagagatggcgagagtggcacgtaccctcctggcaaaggaccgcctaaaaggggtggtgtgctctcgggtggcgcggacctgttcatgcagtggaggatccgtgggaacggttgacatatgcaaaggttaagtgctacatatgtcatgtggttagagatcctcagctgagtaaatcgattcggatcaccgttatatccccgaagagtggagacttgatcgctgccctgcaacctaagtcaggatgcaaacattaggaataaaaatgatgttgtattgatgagatggtgaaattatactagatgcaaccagagtctattaatatttaatctggcgttaaaatattgaaagtaaggactcactttagtaagctatttctgcaaaagtatctaagttgattcttgctaaagccttttccttgattcctatttaaccagcatatccttgagagtcattttcccttagtcgggtaaggcttgcgaaagtacactccgtactcagggttttcgaacccatgttgttgtaggtgatgagaagtactctaagtgttcctgtggctggagggcgtttccagttctgggggaggattagttaggcttgtgtataagctttggagggttcctaccttcctgctattgtaataagttatgcactttgagtatatcaggacttgtaataaatgtaactcttcctatgtaataagcttcagttttagaaataaaaagaatgttttgtaaagtcttccgctcttatctccgaagtgtgtgtatcgaatgtgattactgtaatatgcatgtatggtgggagatccttgggatgatgagttcaagttgttgaactcgtgataggcttgttaagttacctggtacacgtgcatagccatctgagtccatcaaggcaaggattggtgcacgtgggcctgataacttgggagggctgccacagggagtagcccaatcctggtgagagtcctacctcgccacccatgctggccctgaagctatcacttgggaggagttcagagacaactttcgctggtaccacgttactgaaggtctgatgatagtgaggaaggaagaatttgtggcattgaagcaaggccccctgtctgtcagtgagtaccgggacaaatttctgcactatctcgctatgcacccaaggatgtcaacactgatgccaagaggcagtacatgttcttgagaggtttggttgacccccttcactaccagttgatgaaccataccttccctacctttcaacacctcattgatagagctataatgactgagaggaagcgctgggaaatggaagactgaaagcgcaagattggtggacctcaggctgggagcagcagtcatccccgtttttcaggcaattcaccccagcagttcaagcagagtcaccctcagagacaccaacactagcaccaacatcaacatcaacgtcagcatcaacagcagtatcagaggcagttccctcagcggcagtagcagtagtaccgccagaacaaccaacagggaggaaaccagtaccagaggaagaacaaccaggcacctcgccttcctaccccagcaaccaatcagagcaatcagacagccccagcacaaggaggaggccgaggatgttcccactgtggggaacaaggccactgggcgtcgcattggccaaagaaagcagctcaacagcagtcagcacccagtgccccagcaagacagaatgcacctcagcaaggagcaaaccatcgtggacagccccgtgcccagtatgaaaaggtgaaccacctgggggccgacacagttcaggagaccccaggagtggcactaggtacgttctcagtcgaatctcattctgcaaatgtgttatttgatactagagccacacattcttttgtgactgcatcatgggtacaaacacacaacatatcagtagcacccatgtacctgcctatgagggttaggtcaattggtgggaggacccaaacagataaaattttcccaagtgcaagagtttaaataagggggatagagttccccgctgatctgttagtaatgggtacccgtgatgtagacatagatgtcatcctagggatgaattggctgaccaagtaccaaacatgccttagctatgataagaggactgtgaaattagtgtccttgtcaggagaagaagtattggtggagttggtcttgtctggaccaaggagaggaatctgtcaccagatcactgccagagcttgctactccatcaaccggttatatcttcaccgaatcctcaagaagacatcatacaaactccttaccggtaaaaagcctatgtttcatattttagagtctttgggagtaaatgctttattcttattaagagaggtagaaaatctaaatttgctcctaaggctgtagaaggctttttactaggttatgactcaaacacaagggcatatagagtcttcaacaaatccacttgattagttgaggtttcttgtgacattgtgtttgatgagactaatggctcccaagtggagcaagttgatcttgatgagctagatgatgaagaggctccatgcatcgcactaaagaacatgtccttgggaatgtgtgcccaaaggaattcgaagagcccacacaagcacaagatcaaccgtcatcttccaaccaagcatctccaccaacccaagatgaggatcaggttcaagatgatgaaaatgaagatcaagaggatgagccacctcaagaggaggacattgatcaagggggagatgacaacaaagaagacaaggaagaggatcaagaaattagatgtaacacccacttgtaaattgctagaaaaaaaataccaatagagaaacaatttctctttatgtgagtttgatctttatgcatcatcatatgtgaacaccatgtccaaaaaaacaattaataaagagatatgctactaaatctttgcatcatgctgaatattttatttgtgtgtgcatttttgtgacaatattataataatgcaaaaagaaatatgttaaatatccaaatggggatttaaatcctaaaataatcctagaattaagaaaagagagaaggaagagattatacaaaatagaggaaaataaatatatgaaagaatacattttgttcctactaatattttaatttaggtacttaactcagttatgaagctcacaaacaagtttgaattcaaaatggagatttaaaaacgaaatgaaacagaaaataaaaagaaaaaa

SEQ ID NO: 43528 - DNA, 4176 bp, Zea Mays
catctctgggaactcttcacctccatgcactgcacaggttcagtgacatctgtccttaatctgtggctataaaacttggtccagggaagttttcctccttatcctcaagctccagccaggttgcagcgtgtgtgtgggtggtaaatcttctgtccacaccagtgttcacctctcccctgcccaagtttgcccagtccctaggtggtgaccatcgttggcaattagtccacctcgccgtaaccagaattcccagaagaagatgaaattcaagaagtagtttctgaagaggagtctgctccagtgcctgctcatcaagtggatggagctatctaactaaaggttgggtagaaggatctagaacctcctcactgcaacaaaggcaagccccggtgcatgcaaccccttccttgtgtttttaaaagatttttatacactttaagtctagtgaaatgtgcattaagtttataggagttgcttggaaactattggatgcattgcctaccttgatatccatacctttatagatacttctgatgaagtatcaaaatatgatttacaaaaatgcttagccctgcttagatcttgtggatagaggttgtcttttgcattaatgcctagctcaggggttatcctgagaaaggacggcttctacctgcaagaatatatttttattgggagcatagtgggatcttactgcaaagttccctataatgctcttttcatcctaaggaacacagacaatcctaaggatggaagtacttaaatcaggacttgggctaggaacaggtgatgttccgtccaggttaattaaggattggatgcgtatgtaggcatgtatgatcaaggactatcttaactggccacatgccctggatatgggacagggtaagcttgaacccggctattccatacatgaaaagacaatcacgcactgggagtggagagatggcgagagtggcacgtaccctcctggcaaaggaccgcctaaaaggggtggtgtgctctcgggtggcgcggacctgttcatgcagtggaggatccgtgggaacggttgacatatgcaaaggttaagtgctacatatgtcatgtggttagagatcctcagctgagtaaatcgattcggatcaccgttatatccccgaagagtggagacttgatcgctgccctgcaacctaagtcaggatgcaaacattaggaataaaaatgatgttgtattgatgagatggtgaaattatactagatgcaaccagagtctattaatatttaatctggcgttaaaatattgaaagtaaggactcactttagtaagctatttctgcaaaagtatctaagttgattcttgctaaagccttttccttgattcctatttaaccagcatatccttgagagtcattttcccttagtcgggtaaggcttgcgaaagtacactccgtactcagggttttcgaacccatgttgttgtaggtgatgagaagtactctaagtgttcctgtggctggagggcgtttccagttctgggggaggattagttaggcttgtgtataagctttggagggttcctaccttcctgctattgtaataagttatgcactttgagtatatcaggacttgtaataaatgtaactcttcctatgtaataagcttcagttttagaaataaaaagaatgttttgtaaagtcttccgctcttatctccgaagtgtgtgtatcgaatgtgattactgtaatatgcatgtatggtgggagatccttgggatgatgagttcaagttgttgaactcgtgataggcttgttaagttacctggtacacgtgcatagccatctgagtccatcaaggcaaggattggtgcacgtgggcctgataacttgggagggctgccacagggagtagcccaatcctggtgagagtcctacctcgccacccatgctggccctgaagctatcacttgggaggagttcagagacaactttcgctggtaccacgttactgaaggtctgatgatagtgaggaaggaagaatttgtggcattgaagcaaggccccctgtctgtcagtgagtaccgggacaaatttctgcactatctcgctatgcacccaaggatgtcaacactgatgccaagaggcagtacatgttcttgagaggtttggttgacccccttcactaccagttgatgaaccataccttccctacctttcaacacctcattgatagagctataatgactgagaggaagcgctgggaaatggaagactgaaagcgcaagattggtggacctcaggctgggagcagcagtcatccccgtttttcaggcaattcaccccagcagttcaagcagagtcaccctcagagacaccaacactagcaccaacatcaacatcaacgtcagcatcaacagcagtatcagaggcagttccctcagcggcagtagcagtagtaccgccagaacaaccaacagggaggaaaccagtaccagaggaagaacaaccaggcacctcgccttcctaccccagcaaccaatcagagcaatcagacagccccagcacaaggaggaggccgaggatgttcccactgtggggaacaaggccactgggcgtcgcattggccaaagaaagcagctcaacagcagtcagcacccagtgccccagcaagacagaatgcacctcagcaaggagcaaaccatcgtggacagccccgtgcccagtatgaaaaggtgaaccacctgggggccgacacagttcaggagaccccaggagtggcactaggtacgttctcagtcgaatctcattctgcaaatgtgttatttgatactagagccacacattcttttgtgactgcatcatgggtacaaacacacaacatatcagtagcacccatgtacctgcctatgagggttaggtcaattggtgggaggacccaaacagataaaattttcccaagtgcaagagtttaaataagggggatagagttccccgctgatctgttagtaatgggtacccgtgatgtagacatagatgtcatcctagggatgaattggctgaccaagtaccaaacatgccttagctatgataagaggactgtgaaattagtgtccttgtcaggagaagaagtattggtggagttggtcttgtctggaccaaggagaggaatctgtcaccagatcactgccagagcttgctactccatcaaccggttatatcttcaccgaatcctcaagaagacatcatacaaactccttaccggtaaaaagcctatgtttcatattttagagtctttgggagtaaatgctttattcttattaagagaggtagaaaatctaaatttgctcctaaggctgtagaaggctttttactaggttatgactcaaacacaagggcatatagagtcttcaacaaatccacttgattagttgaggtttcttgtgacattgtgtttgatgagactaatggctcccaagtggagcaagttgatcttgatgagctagatgatgaagaggctccatgcatcgcactaaagaacatgtccttgggaatgtgtgcccaaaggaattcgaagagcccacacaagcacaagatcaaccgtcatcttccaaccaagcatctccaccaacccaagatgaggatcaggttcaagatgatgaaaatgaagatcaagaggatgagccacctcaagaggaggacattgatcaagggggagatgacaacaaagaagacaaggaagaggatcaagaaattagatgtaacacccacttgtaaattgctagaaaaaaaataccaatagagaaacaatttctctttatgtgagtttgatctttatgcatcatcatatgtgaacaccatgtccaaaaaaacaattaataaagagatatgctactaaatctttgcatcatgctgaatattttatttgtgtgtgcatttttgtgacaatattataataatgcaaaaagaaatatgttaaatatccaaatggggatttaaatcctaaaataatcctagaattaagaaaagagagaaggaagagattatacaaaatagaggaaaataaatatatgaaagaatacattttgttcctactaatattttaatttaggtacttaactcagttatgaagctcacaaacaagtttgaattcaaaatggagatttaaaaacgaaatgaaacagaaaataaaaagaaaaaa

SEQ ID NO: 43529 - DNA, 1748 bp, Zea Mays
gaggtggcacgccgcacgtgccacggcctcttgtcctggtccgtccatctccctagcagctatactttcccactgccgcagttcgccactctcgccatcggggacgagggactgggagccaggatacttctgccgcgcggcgaccggtcgagcgaaatcgatctaccccaggtgcggcgggcgcggctttattctcaagattttttctgtgttctttagagagcagccatggacgagtggattcgccaaaccgaggtgtgggtgcaccaaaccgacagctggatccggcagcagcccccggagcagatctatgtagcggccgcggtggttgccgtcacaatcctgttgcttatcgtagcatcttgtctgaaatcgtctagaccaaacaccatagttctatctgggcttagtggcagtggcaaaaccactatttactaccagcttcgggatggatcatcacatcaaggaactgttacttcaatggaagaaaacagtgatacttttgtgctgcattcggagcaagaaaggaaagacaaagtaaaacctgtgcatattattgatgttcctggtcatgctaggctcaaacccaaacttgatgaagtcctgcctaaagctgctgcggttgtctttgttgttgatgctcaagatttcttgtctagcatgcaagctgctgcagagtaaattttgcccctccccttccttaatttttaccaaatgcatttggtgtctatttctatttcatctactttcactttcctttgtgctaagtttaagttaacagtgtaattaggagcccttttcatattccgagattgcagaaacaattctgtttgaataatttcctatattatcatttgtgtgaataggaaccttctccactattcccaacattgtagagcattactctgttttatcatttcttacgttgttaacatttcataacaatattatcatctttttgcaggtacctttatgacattctgacaaaggcaactgtagtgaagaaaaaggtccctgtgcttatattctgcaacaagacagataaagttaccgcccactcgaaggaattcatcaagaagcagttggagaaagaattgaacaagcttagggaatctaggaacgccgtatcgtcagccgacatctctgatgaagtccagcttggggtccctggagaggcattcaacttcagccagtgccagaacaaggtggctgttgcggagggtgctggtttgacaggtgatgtttcggccgtggaacaattcatccgtgaacatgtgaaggcataggttgttcttattgtttttggggctccaaatggctatcctgatgagataagatgtacattgcgtcaatgtggttgttacctttcatgcatgtacaccttcatccggtgctctgaagttgcttagagacagtgaagcacagtcatattttgaactggttcagctgaccttgttatagaggcattgcatgttgcactgcttatgcctgacagtcatcggatatgaacagagcatgttgaaactgactggctttggttgttttccacttttgctccataagttttactagcaaaaatgcctgtgctttgcaacgggtttcaaatagatgatttcatgacaataaatttctcagtgaagcaaaacaaacagaaaatgtcatgctgacagattttaatttgttctcatgtttgtaagttgaatatttgttaacaccatgactcttaaccttagatatgacgatttctt

SEQ ID NO: 43530 - DNA, 1642 bp, Zea Mays
gaggtggcacgccgcacgtgccacggcctcttgtcctgcggtcgagcgaaatcgatctaccccaggtgcggcgggcgcggctttattctcaagattttttctgtgttctttagagagcagccatggacgagtggattcgccaaaccgaggtgtgggtgcaccaaaccgacagctggatccggcagcagcccccggagcagatctatgtagcggccgcggtggttgccgtcacaatcctgttgcttatcgtagcatcttgtctgaaatcgtctagaccaaacaccatagttctatctgggcttagtggcagtggcaaaaccactatttactaccagcttcgggatggatcatcacatcaaggaactgttacttcaatggaagaaaacagtgatacttttgtgctgcattcggagcaagaaaggaaagacaaagtaaaacctgtgcatattattgatgttcctggtcatgctaggctcaaacccaaacttgatgaagtcctgcctaaagctgctgcggttgtctttgttgttgatgctcaagatttcttgtctagcatgcaagctgctgcagagtaaattttgcccctccccttccttaatttttaccaaatgcatttggtgtctatttctatttcatctactttcactttcctttgtgctaagtttaagttaacagtgtaattaggagcccttttcatattccgagattgcagaaacaattctgtttgaataatttcctatattatcatttgtgtgaataggaaccttctccactattcccaacattgtagagcattactctgttttatcatttcttacgttgttaacatttcataacaatattatcatctttttgcaggtacctttatgacattctgacaaaggcaactgtagtgaagaaaaaggtccctgtgcttatattctgcaacaagacagataaagttaccgcccactcgaaggaattcatcaagaagcagttggagaaagaattgaacaagcttagggaatctaggaacgccgtatcgtcagccgacatctctgatgaagtccagcttggggtccctggagaggcattcaacttcagccagtgccagaacaaggtggctgttgcggagggtgctggtttgacaggtgatgtttcggccgtggaacaattcatccgtgaacatgtgaaggcataggttgttcttattgtttttggggctccaaatggctatcctgatgagataagatgtacattgcgtcaatgtggttgttacctttcatgcatgtacaccttcatccggtgctctgaagttgcttagagacagtgaagcacagtcatattttgaactggttcagctgaccttgttatagaggcattgcatgttgcactgcttatgcctgacagtcatcggatatgaacagagcatgttgaaactgactggctttggttgttttccacttttgctccataagttttactagcaaaaatgcctgtgctttgcaacgggtttcaaatagatgatttcatgacaataaatttctcagtgaagcaaaacaaacagaaaatgtcatgctgacagattttaatttgttctcatgtttgtaagttgaatatttgttaacaccatgactcttaaccttagatatgacgatttctt

SEQ ID NO: 43531 - DNA, 1543 bp, Zea Mays
gaggtggcacgccgcacgtgccacggcctcttgtcctggtccgtccatctccctagcagctatactttcccactgccgcagttcgccactctcgccatcggggacgagggactgggagccaggatacttctgccgcgcggcgacgtagccctcctcctcctcttgctctccccgccaccctctgcttatcgtgtacctcgtattagatctaattttggtatccgtgcggtcgagcgaaatcgatctaccccaggtgcggcgggcgcggctttattctcaagattttttctgtgttctttagagagcagccatggacgagtggattcgccaaaccgaggtgtgggtgcaccaaaccgacagctggatccggcagcagcccccggagcagatctatgtagcggccgcggtggttgccgtcacaatcctgttgcttatcgtagcatcttgtctgaaatcgtctagaccaaacaccatagttctatctgggcttagtggcagtggcaaaaccactatttactaccagcttcgggatggatcatcacatcaaggaactgttacttcaatggaagaaaacagtgatacttttgtgctgcattcggagcaagaaaggaaagacaaagtaaaacctgtgcatattattgatgttcctggtcatgctaggctcaaacccaaacttgatgaagtcctgcctaaagctgctgcggttgtctttgttgttgatgctcaagatttcttgtctagcatgcaagctgctgcagagtacctttatgacattctgacaaaggcaactgtagtgaagaaaaaggtccctgtgcttatattctgcaacaagacagataaagttaccgcccactcgaaggaattcatcaagaagcagttggagaaagaattgaacaagcttagggaatctaggaacgccgtatcgtcagccgacatctctgatgaagtccagcttggggtccctggagaggcattcaacttcagccagtgccagaacaaggtggctgttgcggagggtgctggtttgacaggtgatgtttcggccgtggaacaattcatccgtgaacatgtgaaggcataggttgttcttattgtttttggggctccaaatggctatcctgatgagataagatgtacattgcgtcaatgtggttgttacctttcatgcatgtacaccttcatccggtgctctgaagttgcttagagacagtgaagcacagtcatattttgaactggttcagctgaccttgttatagaggcattgcatgttgcactgcttatgcctgacagtcatcggatatgaacagagcatgttgaaactgactggctttggttgttttccacttttgctccataagttttactagcaaaaatgcctgtgctttgcaacgggtttcaaatagatgatttcatgacaataaatttctcagtgaagcaaaacaaacagaaaatgtcatgctgacagattttaatttgttctcatgtttgtaagttgaatatttgttaacaccatgactcttaaccttagatatgacgatttctt

SEQ ID NO: 43532 - DNA, 1457 bp, Zea Mays
gaggtggcacgccgcacgtgccacggcctcttgtcctggtccgtccatctccctagcagctatactttcccactgccgcagttcgccactctcgccatcggggacgagggactgggagccaggatacttctgccgcgcggcgaccggtcgagcgaaatcgatctaccccaggtgcggcgggcgcggctttattctcaagattttttctgtgttctttagagagcagccatggacgagtggattcgccaaaccgaggtgtgggtgcaccaaaccgacagctggatccggcagcagcccccggagcagatctatgtagcggccgcggtggttgccgtcacaatcctgttgcttatccatcttgtctgaaatcgtctagaccaaacaccatagttctatctgggcttagtggcagtggcaaaaccactatttactaccagcttcgggatggatcatcacatcaaggaactgttacttcaatggaagaaaacagtgatacttttgtgctgcattcggagcaagaaaggaaagacaaagtaaaacctgtgcatattattgatgttcctggtcatgctaggctcaaacccaaacttgatgaagtcctgcctaaagctgctgcggttgtctttgttgttgatgctcaagatttcttgtctagcatgcaagctgctgcagagtacctttatgacattctgacaaaggcaactgtagtgaagaaaaaggtccctgtgcttatattctgcaacaagacagataaagttaccgcccactcgaaggaattcatcaagaagcagttggagaaagaattgaacaagcttagggaatctaggaacgccgtatcgtcagccgacatctctgatgaagtccagcttggggtccctggagaggcattcaacttcagccagtgccagaacaaggtggctgttgcggagggtgctggtttgacaggtgatgtttcggccgtggaacaattcatccgtgaacatgtgaaggcataggttgttcttattgtttttggggctccaaatggctatcctgatgagataagatgtacattgcgtcaatgtggttgttacctttcatgcatgtacaccttcatccggtgctctgaagttgcttagagacagtgaagcacagtcatattttgaactggttcagctgaccttgttatagaggcattgcatgttgcactgcttatgcctgacagtcatcggatatgaacagagcatgttgaaactgactggctttggttgttttccacttttgctccataagttttactagcaaaaatgcctgtgctttgcaacgggtttcaaatagatgatttcatgacaataaatttctcagtgaagcaaaacaaacagaaaatgtcatgctgacagattttaatttgttctcatgtttgtaagttgaatatttgttaacaccatgactcttaaccttagatatgacgatttctt

SEQ ID NO: 43533 - DNA, 1247 bp, Zea Mays
gaggtggcacgccgcacgtgccacggcctcttgtcctggtccgtccatctccctagcagctatactttcccactgccgcagttcgccactctcgccatcggggacgagggactgggagccaggatacttctgccgcgcggcgaccatcttgtctgaaatcgtctagaccaaacaccatagttctatctgggcttagtggcagtggcaaaaccactatttactaccagcttcgggatggatcatcacatcaaggaactgttacttcaatggaagaaaacagtgatacttttgtgctgcattcggagcaagaaaggaaagacaaagtaaaacctgtgcatattattgatgttcctggtcatgctaggctcaaacccaaacttgatgaagtcctgcctaaagctgctgcggttgtctttgttgttgatgctcaagatttcttgtctagcatgcaagctgctgcagagtacctttatgacattctgacaaaggcaactgtagtgaagaaaaaggtccctgtgcttatattctgcaacaagacagataaagttaccgcccactcgaaggaattcatcaagaagcagttggagaaagaattgaacaagcttagggaatctaggaacgccgtatcgtcagccgacatctctgatgaagtccagcttggggtccctggagaggcattcaacttcagccagtgccagaacaaggtggctgttgcggagggtgctggtttgacaggtgatgtttcggccgtggaacaattcatccgtgaacatgtgaaggcataggttgttcttattgtttttggggctccaaatggctatcctgatgagataagatgtacattgcgtcaatgtggttgttacctttcatgcatgtacaccttcatccggtgctctgaagttgcttagagacagtgaagcacagtcatattttgaactggttcagctgaccttgttatagaggcattgcatgttgcactgcttatgcctgacagtcatcggatatgaacagagcatgttgaaactgactggctttggttgttttccacttttgctccataagttttactagcaaaaatgcctgtgctttgcaacgggtttcaaatagatgatttcatgacaataaatttctcagtgaagcaaaacaaacagaaaatgtcatgctgacagattttaatttgttctcatgtttgtaagttgaatatttgttaacaccatgactcttaaccttagatatgacgatttctt

SEQ ID NO: 43534 - DNA, 11491 bp, Zea Mays
caagggtctggaacaaatcgcgtgagcccaaggagcggcggcggcggcggtgcaagaagacgagccatcctccccgccctccggggacctctacctcttcgcgagcttctctttgatatgatgttcacaagaggttctcccaaaattttgatgttatctaaagctgctcaaaagaaggtttctcctaaagattctacatcaaagaagtgtggtgtttagagagcggcatggaattctgaattggagaagagccacgatgatttgttgtttgagcacaatgtacctccatatagggctcaaaattgctggagtccagatgcttggaacaaaattgttactaaattcaataagcatgagtatgtcacattcaacaagattcaaattcaggagaaggagagggaattgaaaagggattacaagatgttgaaagaggctagaaagcaaagtggtgtttcctggaatgagaaacgatgcatgattgttgcagatccaccaatatgggaaaatatcataaaagacttgagagtagactacaaaccctcgcaaagtgcacactgcgtaggtgcggatgcactcactaagctagccttctcaagtaaggctatcctagcattcttcgaggtgaagatgggcaaatttcttggttgcttggtatcaacaaagggtattgaagctaatccaagtaagatagaagccatacttcgaatggagccaccgaagtcaagaaaaggtgctcaaagattgacaggaaggttggcatcattgaacagattcatttcaaggtcagcagagaggaacttgccattcttcgaagtgctgaagtcagccgaagtctttcaatggggatcaaatcagcaaaaagccttcgaagaactgaaacaatatttgatagaactgacagccttaactccaccttcattaggaactccattgatgttgtatgtagctgcttcccacgctgcggttagtgcagcactggtgcaagagaagcaggagaaccaggcaagaaaacaagtgtcagtttacttcgtttccgaagttcttagtgtatcaaagaaaaaattatacagagttagagaaggtactatatgttgtactaattgcttccaggaagcttcgacgttattttcaagcataccacatcatagtaccttcttcacaacctctcaaggacataatgagaaatagagaggccacaggaagagttggaaaataggctgcagagctgaacgaattcactatagatttcatccatagatcttcgatccaatcccaagcgttagcagacttcattgctgattggacgctaggggctcaggatgaagagaaaacaaccgatgccaaagcctggacagtattttgtgatgggtcttggggaaccttcggtgcaggagcagcagctgtcttgatttcaccatcaaaaatcaaaacctgctatgcagcaagattggacttcaattgcacaaataatatcgcagagtatgaagcccttatcttggggctccgaaagcttaaggcaatgggaataagaagggctatacttaaatctgactcacaggtcatctcaggtcacgttgacaaaagcagcaaagcaagagacccgaagctagaaaatatatggatgcagtccgaaggatggaagcctctttcgaaggtttttctgtaaaaaatatcccgagaggagaaaaggagcatgcagatttgctagcaaaatcagtggtacaggggttttcgttacctttggaagtattcttcgaaacaataaaagcaccttcggtcgagctcatggaaagggcggtgctcaaaatttcactagtacatagtgaagattggaggactgagactatatatttcctccaaggcaattgtctttcagatgacgaagtttacaataaaagaatggaagcaagaacaagaccatatgtaatcatagaggggaagttatataaacatggagtttgctctccattactcaagtgcttgtccaaagccgaaggtcaagaattgatgaaggaaatacatgcagaattatgtggggctcatattggatctaggcctttgctggggaaggtttttagacaaggattttactggccgaaggcagcttcagatgcaacagatttggttcaaaattgtgaaaattgccaaagatgcgctagagaccagaaacaaccttcgtctctaacccagctaatacagccaacttggccactgtaaaggtggggtctggatttgttaggtcaacttccaccagcacaaggaaacttgaaatatgttgtcatagcagtggaatatttctctaagtggatcgatgcaaagcccttagctacaataacttcggccacaatacagaaattcttttggcaaaatattgtttgtcgcttcggcgcgccgaaggcaataaccgttgatatcggaactcagttcaatgctaaaacattcaaaacattttgtagccagattggtacaaaaatacatttcgcatcagtgaggcatccagagtcaaatggactggtagaaagagcaaacagaatcataacaataggaataatgaagtcaatcttcaaccaacccaaaggaaagtggccagacgaattaataaaagtgctgtggaaccacaacactgctgtatcaaggtcaacaggatttaccccgttcaagcttctgtttggtgacgaagcaataacactggaagaagcaagaacgggttcaataagaaccttagcttcgacagaggatgaaggtgattgccaaataacaagagacaccatagaagggactagactgcaagcaatagaacacatcaataagtatcaggctgaaacaatcaaatggtgtgatagaaaggtaaaattgaagaatattaagccaggacatttggtgctttgtagagtggccaaccctgatacaatggggaagcttcagctcaagtgggaaggtccctttttggtggtatcttcgtcaagacctggatcttacagattgaaatacatggatggcaacgacataccaaggtcttggaatgcggatgagcttcgacgatattatgtggaaacaatgaaattttcttatttcttccctatggcacccttttcctttcaagaggggagaaaggtttttaatggggccataggttgtaattttcattttttgtttagccctatgcaatacaagggccaaattcccccacatgtaaaatgtaacatcagggaccacaccatcgagtgcaagaggccatggagaagctcaaaagtcgtccctaaggggatgcagagctaaaatgccacctaagaggtgaagaagctacagagctgttcctaaagggacgcagagtaagttacgaagctccaaagtcattcattaggggatgcagatcttaaataccacctaagtaaaaggtgaagaagctccaaagtcgttcccaagggaatgcagatcttaaataccacctaagtaaaaggtgaagagactcaaaagtcgttcctaaggggatgcagagtctaggtgtgtttttggcatacatttgcatatttcatcacatcatccttcgcattcatatgaacatacattagacatttgtaggctcatcatcatggcataaagcatagacattaacaggaaaaacaggaaatgcttgtccttgatgagaaaatacttcgttgcatacgaagatgcttcgtcttcaatgaaaaatgctttgatgtgaacaaaaagaagagaaggtgtttttcgccttcggctcaaaagactacaagcattggtttcgtccacaacaaagcagcccacacatgagcgaaaggtaaaatgctattacaaggtattaacaaatatttacaataatttgtctagctgtcaattacaattttttgtcatatgatacaaagagtttctaagtccttctacagataaatacaaaaggagattctagggttttcagtatttcagaacaagcttcggcttagcgatcttcagtgccatcattctgcacaaaaacaaggtataaggtaatcggaaatttaataaggaaaaatcaaggtaaaaggacaaaggcaaagttttatactgagtgaagcagctttcgtgtttcatccctggccaattcacacccgccctttgcccaaatttgggtaataaacctatttcctatacttcgagcctcggtcggaacgtcaaccaaatccaatgatgaaagattgaagtttagcttattgacagctctcgcgtgattgcacccggccttcatgaatgctgcagttgtgccgcatgaagccaccagaacacagaaatatctgtgcccagttataacttcatcaagggcctcaacttcattctcgatatgctcgaaggccccggggatatcttcagtagaaggggtgatttcttcagaagtggctccaactgtgttaaatatccccttcaatcgagtaatacatcgagtgacaaagccagagcatttatcctgaaggttcttaacagtttcacttagcttcgcattcttttcagcttcggctttgacctttgctttaagttccttcgtttcgtggtcaaagcgctctgatctctcgttcaaggttgctcgagctttgtctagctctccgctcagcttatcattctgagaccgcgtttccacgagagagccttcggttgattgcagcaggctgtctttttcttttaaagaatcttcaagtttcttaattttatcttctaagccttcaataatatctttgttttttctatctttggtatcctgctgcattttcaaggctttgcttaataacatactatgcaaaacaagttaaaattagaatactcaaaccattacgaaggtaatattaaaaagtttagagaaaaacctcaccttgaaattggaataaaacaaactaccgacaatatgttgccgcctgtagcagctaatgtcagtctccaaatttgggaatccaacactcttggataaggtgcctacaatcttcgccccggcgcggtcgcgaatgcatcccaagatttcttcatcgaccccaccgaagagtatggttggtaaccacaagacatagcaaattcttttaactctgacttatcttccttagaaagttcctggccacccaagtgccgaaggtcaaaatctttcttttccaaaagaacatcttcaattttctttcctttatcaggcactacggccatgcttttctccgcaaccacatctgatataagtttgtcaatttctgacattatggttgcgaattctttagcttcgactttgctagcatcttcagcgtcggcaggaatcgctgctttcaccaccgaagctgaaggcgacgtttgcttgctcaatcgcttgcattaattcacaatccgctgtttcttctgccctccaaccttctcctccgtagccgaaggcgcttccttcttctgtaaaaggttggtcagttccgatctcataggacttatcagcttgaatggtgggtgatgaggacatcactaccatggatacaaacaacactcccctagttgatgttcaaggtccgattactcgcacacgcgcaagactattgaatttgcaggtgagctcgttcctatgtacttattcttgtgcatttgagaatagtgtgctacctaatgaattaattgtacttaggaatgaaggaaaggaccagcaaggacatggtgaaggacttggaggcgtggaaggccagcaaggacgttcggatcaaggtggaggaccaaactgacgtccgtaatctgtctcggtgctgcgacaccgtaattggcctttgggccgtgtatctttgttgggcccattagggtgcgtccagggaggggtcacgctcctaacccttatataatcagtagccgccaccacattaggggcgggtttttcttaagttagatctgttaagaacagtcgtcgtagatcggtttgtgagaccccaacttgtgagcttaatcattcatccgcaatattctagattgtgttctttcttgttcttgcttgtcttcgattctcaggcaggaattagccctcgtggcgaggtcaatcgcgcagtgcacggttgataaccagagaagaagtggtgctgcgattgcggggttctagccgtgttgattggaagtcggatcgtctgtgtgacatcttcaccaaatcgatagttaccttcacctgacggaagatcgggcagccccattcctatcaagtggtattcaaagactcaggtttttcatcctataactccaaataattgccatacaaaaaaaattccgttgtcctagaacccttgtttagcctttgcaatttctttttcagtttggctttgttcagttcgtgtccatggtcgagtcgtgttgctgttttagggtgtatcttcgtcgtagatcaactgcaccttcgccgctatcccatccaccattacccagatcacaagttgatccaccccattaatcgacttgccctcgctaaccgccgccgcgccagccctagatagattgcagatagggaagttttgccctaaccgcgccgccttctagtggtgcctcccaaaaacataacttgaggtaccttccttaaaccgggcataactttttgctcggttgttcaaaaagtctgaaatttttacaggagcttggtgacgccattctgaggccaaccaaacaggccttcgataaaatcatcaaaaaattcaggaaaataaagaaaaaatttgtcaaagttcttgcacgtttttcagagaacttgctcattttctgtagaccacatctgatctctgttttaggtgaaacttgctgtaactcctattttgttgcttcttgtgctgagaaaaatatcaaaaaaatcatacaaaaaagaaaaacaaaatcatcagtgaatcttactagtgcctttttggcctcgcgagtacaatatttacggtactgccattctgctagttccattgttctttgttccaacttgttgagctacgcctcggatacatctcttagccagcaattgtgacttgtgctttggatatttattgaacttcgctcatctgaactcgattttgttccacattcacatacatattgtgcctgtcctacagctccacatactatatcttctgattaatatagatttgaccttgcaatcgcggtttcactacctcttggtaagtatcacgaaccagcctccgattgtaccatcctttgctttgtatttcgtcagacacttgtaagagcttggtaagatacaatagagtgtgttcctgtgttccacctgagaggagagtgtagtgaaattattaggataaccttcaccgtttgtttcctgtttttgtgtttcgatggcaggcgacgaagaagaagcaatgatccctacagacttcgatgaatgtgttagccaccaagatcttgaggcaaacaacaagctcctgaaggagcaaatggaggagacggtccacaagtcagtgcatgatgccttcattgacatgaaccttggcaagacttaagagagactggatcgacgattgtccgagatcgtcgacagacttgctgtgttggagacgcaacaacaagcaccgtcaccaccacctcctcgtccacgtcttcctgatgatgcagtgtttgatgaagaaggtaattatgatgaagcggccaccagagatttgcgcctacgtcgccgtcttcatcaaaacacagaaggtatgccacaccgctagcaaggtaatgacaatcatgctcctgacgacccttgtgctaagattaaattttctatactatctttttcggctcattatgatgctgagggatatcttgattggaagatgacgatagaacagaaatttgctgcccaccttgtacctgaacgacatcaagttagacaagccactagtgaatttaaagattttgctattgtctggtggactggtctagttggggatggtagagcacctacgacttgggaagatcttaaggtagctatgcgcgataaatttattcccccatcttatcatagagaattgtgtaagaaattgatgcgtttagagcaaggggataaatctgttcaagattattatgctgagcttcagaagggattgcagcgttgtgggataatagagggacatgaggacgctctttccgtttttactcaggtttgcggtgtgacattcaggatattatggattacaaagaatttaacactgttaacaagttgttctagtttgctatgcttgcagagaaggaattgcagggacaccaacatcgacctagggctacttttggcgcctcctctacatcacggacgcacacacctgccttgagtcatacaccttcgaccactccagcgtccacgcgacctccctcgacacctgctgcacatgttggtaaacttcctttgcaggtacccgccaagaaacagaattcaccagcacctgcaacaccttccagtggtcgttgttcgggtattgtttgccaccgctgtcatgggattggtcacgtgaagaaggattgcccgagtcagcgaacatacattgctacagatgatggctacattagtgcttccgacggtgagggtgacgatgatgactccagtgatgtttctgctaatgatgatgccatgcttggtgctaatgctacggtgaaccttcgaagcatcatggtgcagcgtgttcttagttctcagcctgaatcatcacagaagcagcaacgccataattttttccaggctttcttcgccatcgagaatcggcatgcacgtgttattattgatggtggaagctgcaataatttggtgagttcagatttggtcaagaagcttggccagaccacacgtccacgaccatatccataccacattcagtggatcaatgattcaggcaaggttaaggtaacacacatggtacgagtgcatttctccattggtatgtattctgattatgcggattgcgatgtagtacctatggaagcttgttctcttttgttgggtagaccttgggaatatgatactgatgcacgtcaccatggtaggagtaatacatacacttttaggcataaagataaaaacattactttgctacctttgactcttgttgaaattgtacaagccgataaggatagagctgcaagtacccataaggaaccaaataatgagacagaaattcagcaacaaattaaattgaaagctcctgtcatgcttgctactaaatctgatcttcttaaaactcatgctactgatgcttgttgctatgccttggtttgcaaatatgctttcttttctattgatgatattgctagcactttgcctgcatttgtgactaaccttttgtagtagttccgagatgtttttccctctaagttacctccaggacttcctcccattcgtgggattgagcaccagattgatttgattcctggagtgagcttgcccaaccgtgctgcatatcgagcaaatcctgaggagactaaggagattcagcgccaagtccaagtccttttggaccataggtatgtacgtgagagccttagtccttgttctgttcctgtcattttggttccaaagaaagatggcagttggcgcatgtgtgtagattgtagagccattaacaacatcactattcggtaccgtcatcctattcctcgattagatgatatgcttgatgagttaagtggttctaaaatattttctaagattgatttgcgcagtgggtaccaccaaattagaatgaaactaggcgatgaatggaaaactgcttttaaaaccaagttcgacttgtatgagtggttagtgatgccttttggattaactaatgcccctagtacttttatgcgtttgatgaacgaggttttgcgcccatttattggaaaatttgtggttgtttattttgatgatatcttgatctatagcacttgtttatctgaacatcttgaccatctacgtgctgtttttgatgctttgcgcgtcgcgcgcttatttgctaaccttgagaaatgcaccttttgcatcgaacgcgtatcgtttcttggctatgttgtcactccacaaggtattgaggttgatgaggctaaggtgcatgctattcagagttggccaacgccatcgacggtgacacaagtgcggagttttcttggacttgcaggactttatcgtcgtttcgtgaaggatttcagcaccatcgctgccccattacatgagttgaccaagaagggtgtttcatttaattgggggcagtcacaagaggattctttttctcttttaaaagagaagcttactcacgcgccactactccaacttcctgactttggtaagacttttgaactcgaatgtgatgcaagtggagttggcattggtgctgttttgatgcaaggaggtaaacccattgcatattttagtgagaaattgaatggccatgttcttaattattccacttatgataaagaattatatgctctcatacgatctttgcaaacatggaaacattatttatggtctaaggaatttgttattcattctgatcatgagtcacttaagcatcttcgtagtcaaacaaatctgaaccgtagacatgctaagtgggtagaatttcttgaaacttttccttaaatcattaaatataaaaaggggaatgataatgtgattgccgatgctttgtctagacgctatgctatgttgtctcaacttgattgtcgtatttttggacttgaaacaattaagggacaatatgcttttgatgatgattttaaagaggttgcattaaaatgtaaagagggccatacatggaataaatttgtgctaaatgatggatacttgtttagagctaaccgcctatgcatcccagttggttcggttcgtcttttgttgttgcaggaagcgcatggtggtggtttgatgggtcacttcggtgccaagaagacggaggctgtgttgtccacacacttcttttggcctcgaatgcggcgtgatgttgagcgctttgtagcaagatgcacgacgtgtcaaaaagctaagtcacgattgaacccacatggtttatatatgcctcttcctattccttcagttccatgggcggatatttctatggattttgttttgggattgcctaggacgaagagggggagcaatagtgtttttgttgtggttgatcatttttctaagatggcacattttataccttgtcacaaaacagatgatgccattcatattgctaacctctttttcaaagagattgttcgtttccatggtatgccttctactattgtttcagatcgtgatgtaaaattcttgagtcatttttggcgtactctatgggacaaattggagacaaaattgctgctttctactacttgtcatccccaaactgatggacaaatagaagttgtgaatagaacattgtctgcaatgctgcgagcaatattgaagaaaaacttgaaaatgtgggaagagtgtttgccgcatgtggagtttgcatataatcgggcggaacactccaccaccaaggtaagtccttttcaggtagtgtatggttttaac

SEQ ID NO: 43535 - DNA, 2596 bp, Zea Mays
caagggtctggaacaaatcgcgtgagcccaaggagcggcggcggcggcggtgcaagaagacgagccatcctccccgccctccggggacctctacctcttcgcgagcttctctttgcaagagtaggcgaggacgagcctcccccatcctgggtgttggtgcctgactcattttatcaagatatgatgttcacaagaggttctcccaaaattttgatgttatctaaagctgctcaaaagaaggtttctcctaaagattctacatcaaagaagtgtggaggtggtgtttagagagcggcatggaattctgaattggagaagagccacgatgatttgttgtttgagcacaatgtacctccatatagggctcaaaattgctggagtccagatgcttggaacaaaattgttactaaattcaataagcatgagtatgtcacattcaacaagattcaaattcaggagaaggagagggaattgaaaagggattacaagatgttgaaagaggctagaaagcaaagtggtgtttcctggaatgagaaacgatgcatgattgttgcagatccaccaatatgggaaaatatcataaaacttttggcatgactcatggctcgacagagttcagacaaaagcttaccccaaattgtactcgtaagcacacgacaaggagatcattctagtacaggctaaaacaatcacacaaacatagagcatgcccctgccacctatgtcaacagaagcttttgaacagttctagcccttgcacaaaagtattctaaatcattttcggcggccacatgcatgccgctgaaaatagcccaattaccgccagaaatagactattttcggtggcaatcggcctattttcggttgcatatggccactagacatttgtggaagaaaataaacacatattttcagtggccagccctacgcacccctgaaaatagtggccgccgaaaacaaaaataactttctatggccgcatgttcagccgtcaaaaataagtagtttcagggcaaaaatatgaagaaaataaattacatcagattcaaacaaatggcaaatacatacatcagattcacaataaggcatctcatcagattcacgacacatgacaaatacatcataataaaccaaattcacgacaccaatatcacaagctttaacaccaatattaaacacatgacaaagtcaccacaacgaccaaattcacaacaccaatattacaagcttctcaattctacacataataaaacataaatgtctcgagtccgccatacacacatttgatcacatatatggattgtttaagttttggccactacctttagaagcgaggaggttgtttacgaagtcttctggtttgaagtatagaaaaaggaataatacattagcaactcgaatgttaagtacaccacatttcaaatgactaaattcgtaaatttcaatttgggcaatccttggatgatgccaagtgagctcagtcgatacaaagattccagctcaggtgacctaacctcctatgctacttccaaatcaaagaggaagatcctaccaaatgacatcgataagggctagaagaatgtgtaaaattagctcgaaaaactcaaccaaatggggagacccgacagaccctttttaaagcgtacttcatagtcatcctcaagaagttgcgaatttagaaagcaaatttaaatgcaagtttggaaccaaagcaacatccttgatgataaaactatcattcactcaaacagagcaaagaaagacaactttacatcttgacttatacccgaatatgatgtattccttaccaatcatggggtcaaggctgaataaccatttggagcttccagtcatgtgacgcgaacaaccgaatccatcagccatgtcttctctagacctctgacctgcatcaattataagacacgtagtgagaaaatggcatagcactagggttagtaaactatgaaggatactagtgctgcaacatttgtccctaaaaagtgttagggaaaacaccaaacatcccatgtcccataggggattgcgatcaccacaagaaggaaaatgtggtccgctagggaagtggaaaccaaaaccactggcatagggtcccatatggcacatgaccagtaccccgccaggcaagaccaccttgtggtctcactgcctgaggcctagcagcaaaaggcaaatcacatctatacctcgcaagacatctctgagcaggaaacttatttacaccatgagaggggcaagtcatgttccttctgctcaactcagaaccccgtcgctcatctctcttcctcctaaagcaaaaagtagccaaatgaccctccctatcacaataatcacactaaaatttcatctctctctctcttaggtggagtttttttgtgagatttgggctttctgggtggctgggtgctttgggaaggggatgactagagatgtcgggaagggtgtcaagtgtgttcctgagatagtttggttttggataccacacttgtttctgaggaggtgctctcaaaggctcctcaatcactccatttttcacatcatgggtggaagatttatgtggagtgagcttgaaaagttt

SEQ ID NO: 43536 - DNA, 2541 bp, Zea Mays
caaggctccaagggtctggaacaaatcgcgtgagcccaaggagcggcggcggcggcggtgcaagaagacgagccatcctccccgccctccggggacctctacctcttcgcgagcttctctttgatatgatgttcacaagaggttctcccaaaattttgatgttatctaaagctgctcaaaagaaggtttctcctaaagattctacatcaaagaagtgtggaggtggtgtttagagagcggcatggaattctgaattggagaagagccacgatgatttgttgtttgagcacaatgtacctccatatagggctcaaaattgctggagtccagatgcttggaacaaaattgttactaaattcaataagcatgagtatgtcacattcaacaagattcaaattcaggagaaggagagggaattgaaaagggattacaagatgttgaaagaggctagaaagcaaagtggtgtttcctggaatgagaaacgatgcatgattgttgcagatccaccaatatgggaaaatatcataaaacttttggcatgactcatggctcgacagagttcagacaaaagcttaccccaaattgtactcgtaagcacacgacaaggagatcattctagtacaggctaaaacaatcacacaaacatagagcatgcccctgccacctatgtcaacagaagcttttgaacagttctagcccttgcacaaaagtattctaaatcattttcggcggccacatgcatgccgctgaaaatagcccaattaccgccagaaatagactattttcggtggcaatcggcctattttcggttgcatatggccactagacatttgtggaagaaaataaacacatattttcagtggccagccctacgcacccctgaaaatagtggccgccgaaaacaaaaataactttctatggccgcatgttcagccgtcaaaaataagtagtttcagggcaaaaatatgaagaaaataaattacatcagattcaaacaaatggcaaatacatacatcagattcacaataaggcatctcatcagattcacgacacatgacaaatacatcataataaaccaaattcacgacaccaatatcacaagctttaacaccaatattaaacacatgacaaagtcaccacaacgaccaaattcacaacaccaatattacaagcttctcaattctacacataataaaacataaatgtctcgagtccgccatacacacatttgatcacatatatggattgtttaagttttggccactacctttagaagcgaggaggttgtttacgaagtcttctggtttgaagtatagaaaaaggaataatacattagcaactcgaatgttaagtacaccacatttcaaatgactaaattcgtaaatttcaatttgggcaatccttggatgatgccaagtgagctcagtcgatacaaagattccagctcaggtgacctaacctcctatgctacttccaaatcaaagaggaagatcctaccaaatgacatcgataagggctagaagaatgtgtaaaattagctcgaaaaactcaaccaaatggggagacccgacagaccctttttaaagcgtacttcatagtcatcctcaagaagttgcgaatttagaaagcaaatttaaatgcaagtttggaaccaaagcaacatccttgatgataaaactatcattcactcaaacagagcaaagaaagacaactttacatcttgacttatacccgaatatgatgtattccttaccaatcatggggtcaaggctgaataaccatttggagcttccagtcatgtgacgcgaacaaccgaatccatcagccatgtcttctctagacctctgacctgcatcaattataagacacgtagtgagaaaatggcatagcactagggttagtaaactatgaaggatactagtgctgcaacatttgtccctaaaaagtgttagggaaaacaccaaacatcccatgtcccataggggattgcgatcaccacaagaaggaaaatgtggtccgctagggaagtggaaaccaaaaccactggcatagggtcccatatggcacatgaccagtaccccgccaggcaagaccaccttgtggtctcactgcctgaggcctagcagcaaaaggcaaatcacatctatacctcgcaagacatctctgagcaggaaacttatttacaccatgagaggggcaagtcatgttccttctgctcaactcagaaccccgtcgctcatctctcttcctcctaaagcaaaaagtagccaaatgaccctccctatcacaataatcacactaaaatttcatctctctctctcttaggtggagtttttttgtgagatttgggctttctgggtggctgggtgctttgggaaggggatgactagagatgtcgggaagggtgtcaagtgtgttcctgagatagtttggttttggataccacacttgtttctgaggaggtgctctcaaaggctcctcaatcactccatttttcacatcatgggtggaagatttatgtggagtgagcttgaaaagttt

SEQ ID NO: 43537 - DNA, 2538 bp, Zea Mays
agccaaggctccaagggtctggaacaaatcgcgtgagcccaaggagcggcggcggcggcggtgcaagaagacgagccatcctccccgccctccggggacctctacctcttcgcgagcttctctttgatatgatgttcacaagaggttctcccaaaattttgatgttatctaaagctgctcaaaagaaggtttctcctaaagattctacatcaaagaagtgtggtgtttagagagcggcatggaattctgaattggagaagagccacgatgatttgttgtttgagcacaatgtacctccatatagggctcaaaattgctggagtccagatgcttggaacaaaattgttactaaattcaataagcatgagtatgtcacattcaacaagattcaaattcaggagaaggagagggaattgaaaagggattacaagatgttgaaagaggctagaaagcaaagtggtgtttcctggaatgagaaacgatgcatgattgttgcagatccaccaatatgggaaaatatcataaaacttttggcatgactcatggctcgacagagttcagacaaaagcttaccccaaattgtactcgtaagcacacgacaaggagatcattctagtacaggctaaaacaatcacacaaacatagagcatgcccctgccacctatgtcaacagaagcttttgaacagttctagcccttgcacaaaagtattctaaatcattttcggcggccacatgcatgccgctgaaaatagcccaattaccgccagaaatagactattttcggtggcaatcggcctattttcggttgcatatggccactagacatttgtggaagaaaataaacacatattttcagtggccagccctacgcacccctgaaaatagtggccgccgaaaacaaaaataactttctatggccgcatgttcagccgtcaaaaataagtagtttcagggcaaaaatatgaagaaaataaattacatcagattcaaacaaatggcaaatacatacatcagattcacaataaggcatctcatcagattcacgacacatgacaaatacatcataataaaccaaattcacgacaccaatatcacaagctttaacaccaatattaaacacatgacaaagtcaccacaacgaccaaattcacaacaccaatattacaagcttctcaattctacacataataaaacataaatgtctcgagtccgccatacacacatttgatcacatatatggattgtttaagttttggccactacctttagaagcgaggaggttgtttacgaagtcttctggtttgaagtatagaaaaaggaataatacattagcaactcgaatgttaagtacaccacatttcaaatgactaaattcgtaaatttcaatttgggcaatccttggatgatgccaagtgagctcagtcgatacaaagattccagctcaggtgacctaacctcctatgctacttccaaatcaaagaggaagatcctaccaaatgacatcgataagggctagaagaatgtgtaaaattagctcgaaaaactcaaccaaatggggagacccgacagaccctttttaaagcgtacttcatagtcatcctcaagaagttgcgaatttagaaagcaaatttaaatgcaagtttggaaccaaagcaacatccttgatgataaaactatcattcactcaaacagagcaaagaaagacaactttacatcttgacttatacccgaatatgatgtattccttaccaatcatggggtcaaggctgaataaccatttggagcttccagtcatgtgacgcgaacaaccgaatccatcagccatgtcttctctagacctctgacctgcatcaattataagacacgtagtgagaaaatggcatagcactagggttagtaaactatgaaggatactagtgctgcaacatttgtccctaaaaagtgttagggaaaacaccaaacatcccatgtcccataggggattgcgatcaccacaagaaggaaaatgtggtccgctagggaagtggaaaccaaaaccactggcatagggtcccatatggcacatgaccagtaccccgccaggcaagaccaccttgtggtctcactgcctgaggcctagcagcaaaaggcaaatcacatctatacctcgcaagacatctctgagcaggaaacttatttacaccatgagaggggcaagtcatgttccttctgctcaactcagaaccccgtcgctcatctctcttcctcctaaagcaaaaagtagccaaatgaccctccctatcacaataatcacactaaaatttcatctctctctctcttaggtggagtttttttgtgagatttgggctttctgggtggctgggtgctttgggaaggggatgactagagatgtcgggaagggtgtcaagtgtgttcctgagatagtttggttttggataccacacttgtttctgaggaggtgctctcaaaggctcctcaatcactccatttttcacatcatgggtggaagatttatgtggagtgagcttgaaaagttt

SEQ ID NO: 43538 - DNA, 2752 bp, Zea Mays
cgtccatccacgcccgcgcggtcgcgtccgccatctctcctcgccccactctcatctctcctgcaatccccgcggtctctcttagatccacgtccgcgatatcctccgcgtcagatctcacgttctccatggaaggcgacatcctccgccctggatcaccgcgctcggctctctccacgccgccatcaaggggttctaccaacaacggacgccatcaacggatggcctcggatccgctccatcgcctcctaccatcaacggacgaggatctccgctccaccctcctccccatgccgtcaatggaagggggctcgggtccacctccgccgcgccgggccgcaggtccacctccaacatccgctcgctcttctcccggtcgttagccgccgtcggcggggctccgtcgggctccggcgtcgccgcgctaccggacctccgccgctgcaagtccttctcttacgggcacgggggtgacgtgctggccgccgcgggcaagccacaacggtggtcgtgcgacgtgcgcgggcggagcactctctgggcgctcttccaccaggacgaccgccaaccggttcgcgacgacaccgcgttcggcgccttcccggcctcgtcctccgccgccgcggccgcgctcgcccccgcagcctccgccgctgccacctcccacgtgcgtccctgagatgttctcggaggaggagatcgctgtggccgaggactctggcgagattgtctcagtgatggagcctgtctcggtcgtgggcacctctggggagatggagacggaggtgagtgcggagcgggatgttagggccatgaaggatcacatagatctcgaggcctcgcagtcgcagcagcccaggaagctgccgtccaaggacctcaaggagatcgtcgggagcttttggcttgccacctcgacattcagcaagaaatggcagaaatggaggggcaagcagaagctcaaagcaggaggcaaggagaatcgtgggtctgatccaccgctgccccgcggggtgcagggacggcgtgtccgacgccgccgaccgcgcgttctcggagccatggccggacctgcgcgtccgcggcagcttgatgacggttctaatgctcctgtcacatatgtgctgaaaggatcgcaggcagagcaaatgttgtgtcctcaatggcagccacaaacaatggaaaatactcctgtcactactaattcaacactcgaaaagcaaatacaagaagatttttgtcaaagagcaatgtcgcaagatggaacacaacaaccattttcatcagattggcgtctttctaattgcactgcaacttctattgatcctgcattgccgaagcctgcagctggagggtttgaacaggtcactggaaatatacattacctccgtcagataaagtggttgctgctactgtttcatgcaaaaacatgcacataccctgttggaagttgtaagttccatggttgtgttcagaactggggctttttgttgttcgcaaaatgtgtgcataaacggcaaggaatcccctgcaatgggcagctcggagttctaccacttccaccacgccgaagaccttttcgatcaccgcttcagcaccaactcactcgtcgaggacttctccgccagcctggacgctgccttccatggccccgcgaagaagccgccgcggtggcgcaaggcgtggagcctctggggcctgatccaccacccgtttaactcttgccactttctgctccttttttcttgatttgaaggaccagaccatggacaacgatgatgcacaaattggagttgctaaaactcagggaaagtattggggcattttcatctgctggcttcttggaaatggatgtctatttgggttcaatgagatgcttactattgaagattactacgtgtacctcttcccgaagtaccatccaacaaggattattactctcacctatcagccctttgttctcgccacaaccgccatattcacatatcacgaggcaaaggtcaacgccgaccgctcgttctcgaagccatagtcgcacctgcgcgtccacgggtacaacgacagaatgcagcggtgcaacagcaacgccagagcgcggagctcattcagcagcaacaacggcggtctgggcagctccaggcgcagctactaggacgcccacgggaagcggaggcgcgaggagtgcgcggcgctggagcggaaccgtagcgcgcggcactcgccgggcaacgcagacaacggtctgctgcggttctacctcacgccgatttgtagcgccagcatccgccggactggcgtcagctgaggtcgcagtcgttcgcgcggacgatgctggggctgtactagagtattgatgacggcgacctgatttctggtcaagctgcttcatttcagtaggcagtagccgatggcttatatgttgagtggtttgggcgggttgtataaccaaaatcgtttacatctgtgtgtagtgcagtgatccttttgttcattcggagggctggataaaatgaagtttaatctcgtaatcacgagttgactctgtgttgttggtctctgtctcggttctcagtcacaagtgatcctatcatgcggccatcggcggctcattcatatttctttgggtcaatgcatctcttccttgaattgtgactccctgacaaggagaaatagtaatggcggaatgaattaatctgcaaattaaatttgtgagttgttaaaatcagtgataatatatgttgttcatttttat

SEQ ID NO: 43539 - DNA, 795 bp, Zea Mays
cgccgcgcccgcccccgccgcacccgccgcggccgtcgatccatcagatggcgtcgccgcggggcgggttcgatgagcaagatcgccggacagagaagggcaccgaggtgttcgtcggcgggctgccgtggtcggccacagaaagcatgctcagacagatatttttcttcatgcggagagattattgacgcgtacgttatgaaaggtcagagtggtcactcaaagggatatggttttgtgcggtttgcaaagagggattatgctaatactgccaaaaggcaaaagaatggtattgagcttcaaggaaagaggcttgtgtttgagctttcaatggatcaagatacagttttctttggaaatctttgcaaagagtggactttagaagaatttgaagaattgattcacaaggcattcaaagatgttgtttcagttgaccttgcaatggcttcaaatcttgattcttcaaacaagaagaatatcaatcgaggctttggatttgtgagattttcttctcatgcagtatttgccaaatattattgcctcttcctatgcccccgcccgccccggcctcgcctgccgctcccgcccccgcccccgcccactgctctgctggcgtggccgcccctgtccccgcccgccgcgaccaaccccgcccccgcgataaaaacataccctctccatcctctcctcttttcttcttcctctcctcttcttcctcctcccgtagcggcttcccccgatttcccccgatattgtctcttattagtactggatgatgagatgtgtcttattatg

SEQ ID NO: 43540 - DNA, 853 bp, Zea Mays
ctctcgcgtctctctctccctcggtcccgcccgccaccggccactcccgccgcgcccgcccccgccgcacccgccgcggccgtcgatccatcaggtcgcagcctcgtctgatttggtacggattttggcaagataccacgtccctaactccgctgtttcaaggataacaaagatggcgtcgccgcggggcgggttcgatgagcaagatcgccggacagagaagggcaccgaggtgttcgtcggcgggctgccgtggtcggccacagaaagcatgctcagacagggatatggttttgtgcggtttgcaaagagggattatgctaatactgccaaaaggcaaaagaatggtattgagcttcaaggaaagaggcttgtgtttgagctttcaatggatcaagatacagttttctttggaaatctttgcaaagagtggactttagaagaatttgaagaattgattcacaaggcattcaaagatgttgtttcagttgaccttgcaatggcttcaaatcttgattcttcaaacaagaagaatatcaatcgaggctttggatttgtgagattttcttctcatgcagtatttgccaaatattattgcctcttcctatgcccccgcccgccccggcctcgcctgccgctcccgcccccgcccccgcccactgctctgctggcgtggccgcccctgtccccgcccgccgcgaccaaccccgcccccgcgataaaaacataccctctccatcctctcctcttttcttcttcctctcctcttcttcctcctcccgtagcggcttcccccgatttcccccgatattgtctcttattagtactggatgatgagatgtgtcttattatg

SEQ ID NO: 43541 - DNA, 2078 bp, Zea Mays
aaagaagaggctaaatagggtttttgatgctattggatttatgtaccctgactaccgctacccgccatgggggcagaagagaaagagtggaacttctaggaaggatgttgcttcagccgcctcaagcgagcccgcgccgaagaagaaaaaggtgaaggttcttactcaccgaccgcgctatattgaaccggccacagtgcctgactttggcggtgagacctcttcggctactgaagccgaaggacctgcccttacgcagaggattgaagagccggctgcaaagccgaaggctgacaaaattgaagaaccaagacccgaagaggcaaaaacatcataaattctaagcccttcggtaggagtggaggcgccgaagatacaaaaagatctggcagcaaccccaaagagaaaaaggatggctagtgtgttagatgtgttggagacgataaaaacttcaagctctactccaggaaaaattgccaaggcttcgaaagcacaggttgaaaccgagacaaagctgaccgaagccaaagctacaatgagccgggccgatgctgaaactgggccttcagagcccatcaaagagaaatcctcagaaattggagaaaaagcagcagaggaagaagctatagaacaaattttgcctgaaaaatctgccgctcctaatcccgaagcattgaaagagaatactgaatatattatccgtcatgcttcgggaaaaatctctctaaagaagaaaagcgagaagctcaacactatgctcagaaactgaaatatccaaagggggcattggtattcaacgacaactgagaagaagatttcttgtattgtctcccagacagcaaggagatttatgtctgtcgggagatgagcagaagcttcggattcccgacactagaagacgggctttcggtgctatcgaaagatgaattggctagcagtttagcatataatagtttaaaggtgtgagaatgaattttttgtacttaaaaacgatttttttatttgcttatacttaataccgcacttcttttgcagggcctaattcttagcaatgccctcagggcgcagaaaaatgccaaagacgaaggatgcactatagctctaaacaaccttcgttccgaagtaattgaactaaggaacgaaggtcttgaaaaagataaaatattaaattcattggtgagcaaaataaaagaagacgaagctacttccaaagcccaagctgaagcccagaaatgtgaaattgaagaccttcggaaatagctggctgaagcaaaattaaaatgcgctattgccgaagctgaacgagatgccagtgattactggaaaaattactgggaaaaaacagttgcagaacttcgcgcatcaagagaaaaatgttttgaaaaatctatagaatgtgtgaaaaagacaaaaactagcttcgccaatgttggcccatattcaagtgaagataacttcgtacgaggcgaccccgaaggcctaattgagtggatcagcaacgaagccgaagcttttgaagaaattttgagcgaccgcggggacgtctgtgccttctctggtgcaagaggagttgcagctattttggagaaagcagggtgcgaacatgtgaaaattctggcccaagccgaagctgctttctctgttgacgatacgaaagacccctcggccgaagcaagcttaactggtggaaaattcttcactgacatctgggaaaacggcggccgagggatggcccacgaaataataaagaagagcgaaaaagatactcatgatgctagggaagcaacgaaagcagctgaaaaagctgcggaactcgaaaggcggataggtattgcttaatgggttttaactttattgtttatttttgtgacttcgaactgatttatattttctaccacagctgaactgtctcctctccccgagcccttcgagtcattggccgacccagaggcaaaggagtcaacagaaattattagcatggccgaaactattatggacgaagttgttacccagctgctgaccgaagatgcagataaagttttgaaagaagaagaatagctatttgtaaaaacattgcc

SEQ ID NO: 43542 - DNA, 2510 bp, Zea Mays
atttctcgctgcgtgcccctggccgatgctcggctccctggctcacccctagtcttctccctccagccgcgctccggctcccttccgctcggcgcccagcccctgttcccatggcgctcgaccaccctccctgttcgcccagccgctcgtctctggtgcccagatgtggtccgtctcctccagcagagcttcctgcgcgcgcagtcactctcctcccccaagcgccctcgcttcctccctctgtctgctcgccaggcgcccaatccatggccgattgttcctgctcgctgctctccagccgagctcccctgttggccggtgcctagccgttcttcctcccatggctgctgcgtgcgctcggctgcagaccgccggtcgagctccctgaccgccgcgtcgtggattttcctacgcgcgcgtgtctccttgcacatgcgtcgccgtcgagttctctggtgtttgcgcaccatgaggttcctccagcgtcgtggtctgcagcttgtctgttccagctctctggtgccatgcgttgagcttcttgccgtcgctcagctcgccggtgtgcgtcctgctccttacgcgcccagcgccatgcgccgtgaagtccctgcgcgcaagctatctgttggccgcgtgtgaagctctctgttcgtcgtcatcgctcggttgtgcgataggctgactgcgtgtcgtgtgtcgcacatcctaggtcctcgtcgtcgtgtcgtgcgtgcaacagttctggatctgtgccaccctggtcttgttgtcgacatcgttcgccgtggcgtagtcgtggaacttcctcgacgccgcgcgcgtcagatcgttgggtcgcgtcttgctcggctctctgacatctggccgtcgttgctcctatgtgcgcgcgtgcccaggttccagctcgctccaaaaaacgattgcgtcgtcattctgtgtgccatcaagaaatcccgagatttgggtgaagaagcgattctcgcgtggcgctcgtcaaatattcgacgatcttcttaaacatgtgatcgtcgtcgtttctgcaattccaagtcgaatttaggtgcgataattaatcacgtgatgcgaaagatgagccaagtcgaccccaagcgcggactgattcgcgaggtgatgcggatgatgaacctgaagacggttaaatcaagcaagtgctcggtcgagtgatactcgtcaagcggacatcgcctaacaaacactaacctagtgttactcaggcaagccccggtgcatgcaaccccttccttgtgtttttaaataatttttgcacactttaagtctagtgaaatgtgcattaggttataggagttgcttggaaaccctttgatgcattgccttccttgatattcatacctttatagatacttctggtgaagtatcaaaatatgatttacaaaaatgcttatccctgcttagatcttgtggatagaggttgtcttttgcattaagtcctagctcaggggttatcctgaggaaagatgacttctacctgcaagaatattttcattgtgagcgtggtgggatcttactgcaaagttccctttgatgctcttttcatcctaggaacataaacaatcctaaggatggaagtacttaaatcgggacttgggctaggaacaggtgatgttctacccaggttagttaaggattggatgcgtatgtaggcctgttgatcaaggactatcttatctagccacatgccctggaaacgggacagggtaagcttgaacccggctattccatacatgaaaagacaatcgcgcactgggagtggagagatgacgagagtggcacgtaccctcctggcaaaggatcgcctaaaaggggtggtgtgctctcgggtggcgcggacctgttcatgcagtggaggatccgtgggaatggtagacatgcaaggtttacgagaaacatacgtcgtgtggttagagatcctcagctgagtaaatcgattcggatcgccgttatatccccggagagtggagacttgatcgctgccctgcaacctaagtcaggatgtgaacattatgaataaaaatgatgttgtattgatgagatggtgaaattaaactaggtgcaaatagagtctattaatatttaatctggcgttaaaatattggaagtaagactttagtaagctatttctgcaaaagtatctaagttgattattgctaaagcctctccttgattcccaaatccagcatacccttgagagtcttttctttagtcgggtaagtcttgctgagtaattccatactcagggttttattccctgttgtttttcaggttatagttttgtgctgctgtgatggtgttaagtgtcggtgggctcggccttcttataagtctaagtaactcttctatacttcttactgaggatggtcacttgagctagcatatatttcaaacttatacttttgtaatcactccgataaaataatgtaaaatttttgtaacttgtaaaatttggtaataatatttccgctgcaagaatg

SEQ ID NO: 43543 - DNA, 2319 bp, Zea Mays
catcctcccaccgctcactgccgcgggcgggcgtggagatttttcttccgccgctcaattcctgcagagatatccatcgcctagatctcttccctttgccgtggcctctcatttctcgctgcgtgcccctggccgatgctcggctccctggctcacccctagtcttctccctccagccgcgctccggctcccttccgctcggcgcccagcccctgttcccatggcgctcgaccaccctccctgttcgcccagccgctcgtctctggtgcccagatgtggtccgtctcctccagcagagcttcctgcgcacgcagtcactctcctcccccaagcgtcctcgcttcctccctctgtctgctcgccaggcgcccaatccatggccgattgttcctgctcgctgctctccagccgagctcccctgttggccggtgcctagccgttcttcctcccatggctgctgcgtgcgctcggctgcagatcgccggtcgagctccctgaccgccgcgtcgtggattttcctacgcgcgcgtctccttgcacatgcgtcgccgtcgagttctctggtgtttgcgcaccatgaggttcctccagcgtcgtggtctgcagcttgtctgttctagctctctggtgccatgcgttgagcttcttgccgtcgctcagctcaccggtgtgcgtcctgctccttacgcgcccagcgccatgcgccgtgaagtccctgcgcgcaagctatctgttggccgcgtgtgaagctctctgttcgtcgtcatcgctcggttgtgcgataggctgactgcgtgtcgtgtgtcgcacatcctaggtcctcgtcgtcgtgtcgtgcgtgcaacagttctggatctgtgccaccctggtcttgttgtcgacatcgttcgccgtggcgtagtcgtggaacttcctcgacgccgcgcgcgtcagatcgttgggtcgcgtcttgctcggctctctgacatctggccgtcgttgctcctatgtgcgcgcgtgcccaggttccagctcgctccaaaaaacgatcgcgtcgtcattccgtgtgccatcaagaaatcccgagatttgggtgaagaagcgattctcgcgtggcgctcgtcaaatattcgacgatcttcttaaacatgtgatcgtcgtcgtttctgcaattccaagtcgaatttaggtgcgataattaatcacgtgatgcgaaagatgagccaagtcgaccccaagcgcggactgattcgcgaggtgatgcggatgatgaacctgaagacggttaaatcaagcaagtgctcggtcgagtgatactcgtcaagcggacatcgcctaacaaacactaacctagtgttactcatgcaagccccggtgcatgcaaccccttccttgtgtttttaaataatttttgcacactttaagtctagtgaaatgtgcattaggttataggagttgcttggaaaccctttgatgcattgccttccttgatattcatacctttatagatacttctggtgaagtatcaaaatatgatttacaaaaatgcttatccctgcttagatcttgtggatagaggttgtcttttgcattaaggcctagctcaggggttatcctgagaaaagatggcttctacctgcaagaatattttcattgtgagcgtggtgggatcttactgcaaagttccctttgatgctcttttcatcctaggaacataaacaatcctaaggatggaagtacttaaatcgggacttgggttaggaacaggtgatgttctacccaggttagttaaggattggatgcgtatgtaggcctgttgatcaaggactatcttatctagccacatgccctggaaatgggacagggtaagcttgaacccggctattccatacatgaaaagacaatcgcgcactgggagtggagagatggcgagagtggcacgtaccctcctggcaaaggatcgcctaaaaggggtggtgtgctctcgggtggcgcggacctgttcatgcagtggaggatccgtgggaatggtagacatgcaaggtttacgagaaacatatgttgtcggtgttttgggtccgaccgcacacccggggttgcccctcaaggtgtttttaggagtaggacggtgtcgacgactgtagcaaaatggttcgtgcggatcgcacgagggacaatggacaagatttacaggttcgggccgcttagaagtgcgtaacaccctacgtcctggtgagtatatgagcgtggttacaagagggctctctggatagagggcgcagagaatttacgtgggtggctaagtaaaacagggtccctccttctgaaggggtgccccct

SEQ ID NO: 43544 - DNA, 349 bp, Zea Mays
gccgagcagatactgagatcaaaatgcatgtatcatgtatgcgtggcatgcatccgcgcagatgaacatagcagcaagccagcaacagtatgtgctctctgagctgagcatccgcgcagatgaacatacagctgacgacggctagcctaggtaggagtatatgcatgtgacgtgtgtggtgggcgtggcgcgccagatcgatttaggcagctaggacttggaggctaggaccgtcgcgggtttgtcggagcccgcgccgctgggcctgggcggtagcggcaccaccgggtcggacgccggcggcgtggcaagcgcgcacttctccttccactcctcgatccgcgccggc

SEQ ID NO: 43545 - DNA, 440 bp, Zea Mays
tacaaagactgtctgaaatcttctagaaacgacatcgaaaggaacttcaagctgaacaagcgaaagcatctatacaaagattgtctgaaatcttctaaaaaaacctaaaccctatcgggaatggagacgctctcggcgaagcaggagggcacggtggacgtgaagctgaagccgacttctaaccaatccaactcgtaggcgggcggggagcggatgtgccaactagaagagtggtctctcttggcgcttgcttgacaaacgtgtgttattaaccgttgtatataatgttattaattaatgtcctttattccctgatgcttctgctgtggctcacattctcaactttgtatctgatgatgaaagaccagatgttttcttgcagttttcgaaaaagtcttctagagacaacttaattttgattaacaacacaacacatggcc

SEQ ID NO: 43546 - DNA, 197 bp, Zea Mays
gacacatagtacttggcatcccaatccagagagtgtccaggatccattatggacgatgcaccactccagaaaaaaaatgcgagacctattcagccagagatgacctacacaagatactatcataccgctgaacactctagttgcaacaggatgttaattgttaagcacaccttgttaatttcgagcaatttatatgg

SEQ ID NO: 43547 - DNA, 1208 bp, Zea Mays
aactttagcagcgaaattcatccaaaagaaactcctgataaatataaaaaggaggggaaaaagaaaaacacttgcagcggcatccaccaccggagctcccatcatcggtctatccctccgtgtcaaccccctcctcagaagttctaattgcagttcagcccctggccggtccgccgggccaccggaaggagccgctcgccggaggaagccccccatctccttgccctgcggcgggtttatggggttctcgctgtaccccatgaagacgtccacgcggttgctctggagcactagcttcttccgccataagctcagctcctcctcctgcttcctctgagcccgccccacccgcgtcgatcacctcggcggcggcccgctgttgctgcgcggtcctagcacccgttcgagtgtgtgtgtttgtgttctttgagtttcaagattgggttttgttgcgttattggggagacgaagggactaaggcgcagtgagcggacaagaatcagcatggatccgagcgcggtcagtttcgactctggcggcacgcggcggggcggcggcgcgcagatgctgctcttcggcggcggaggcagcgccaacagcaacggcttcttccgaggtgttccgatggcggtcctgggcatggacgacgcgacgcgcgtgggcaagcggcccttcttcacgacacacgaggagctcctagaggaggagtactacgacgagcaggcgccggagaagaagcgccgactgacggcggagcaggtgcagctgctggagcggagcttcgaagaagagaacaagctggagccggagcgcaagaccgagctggctcgccgcctggggatggcgccccgccaggtagctgtttggttccagaaccgccgcgcgcgctggaagaccaagcaactcgagaccgactatgaccgcctcaaggctgcttacgacgcactcgccgccgaccaccagggcctcctggccgacaacgataacctccgggcacaggtcatcgtctgaagttcgatgtcatggtgcgatgaaaagactgcaagtgcaagcatatccgtaggaaactaggaactagagttaaaactggggaataatgtaaatgagttcatgatcatcgttgtttggatgttttgaaatgccatgtatgtcaaattagtgtcatcaatgttatcaacattactgaaacgtgggctttaagatgagca

SEQ ID NO: 43548 - DNA, 1180 bp, Zea Mays
agaaaatcatctaatccatgataaaaactcaaggatattttatttggtatgataaatatcggtatatttttatataaatttagatagatctaaaattgtttgacttagctggcacaatatcaccgtcgcatcctttctgaaattaaaattgatggagtatttgctagccacgtcacatgaacgccccaacaacgtacatgtcatatggatcagctgaatgagaagataccaaatcgttccagatatatagctacatcgaccaacaacatctgacacggttccagggagacggaggcttcgccgtgggcgtaagctgcagcctgatgctgtccgacccgctgtcactggcgaggttcctggcgtcgtgggcgcgcacgcacgccaggatgaaggctcagaacgacgccgccgcccacccgctgatgcagtacgcgagctacttccggcgcccggacgccagggccgcgcgcgcgctcgtcaagtccgtccccctcgacgccttcgcctccgccgacgccgccgagaccgtcctcttcagagccagacctaccatgctgcccgccggcgcgggcgcaccaccggcgcccgaccaccgcgcgctcgccgtcgcctgtgtcgcccaggcgcgggaacggctcggcgatggcaaggtggtgccgccgcagttcccgctcgtcgtcttcgactgcgaaggcggtgtgagcgtcgagacgtgcgcggcggcggcttacgggcagccgccgtcgccgagcggcggcgggcggtacaagattgacgttgccctgtgggaggagctcgggctggaggagctggtgctcagggacagcaagccactgcacgtgtcgtacagcatcctcggcgctggctgcgatgggctcgccgtcgcgatgcctgccggcgctgccggtgagctccttgtcgcggcgacggtccccaaacccaagtgaagatacatcggcaggcaggctctggcagctagccggggcgcgaaagttcccgtgccgtccgatatctgtggtactgatttctacggtgtttataaattaaaattacagcaaaacaaaaaaaaattatagtatttgtgtgtgaaaatacagagaataagacaatactgtaaaccaatcacagttgtggattttcaacaatattgcccatcaaataaatgcaacgtttgtgaacc

SEQ ID NO: 43549 - DNA, 520 bp, Zea Mays
ctcgattcttcttgatgactccttctctcttagtgactcttttcacctccgcgctacagttcttccttctcgctctcactgcctcttcatcgtgacaattttctttggcctgcgaagcaccgctcccacacattcctcctggaagcatcgcgagagtgcgagacacaaatctttgaaaagaaaataaaagtgttgttggcgctggtgtttatgagttctgtttttgttgcctggaagaggtgaggcgacactcgacagagagccatgctcgacggatatgagataaccttgaggaggtgaggcgacgccgcgatggagatgaggtcgcgttgaggaggtgaggcgacaaagacgtagtgaaagcacaaaagagttgaagaacatctttaggacatccgtgtgacgctttgaagaataactgatttttataaaaaaaggtgtatttcccactccttttttaagaaaaggtttgctgcttatattactattttatttgctggaatcaaatgaaaaaataaag

SEQ ID NO: 43550 - DNA, 1897 bp, Zea Mays
ggaaccaagactgtgtcgaatggccgccgcgcaggagaaacgcttggcgatcatcggagccggatcgagcgggcttacggcgtgcaagcacgcgctggccaagggcttccgcccagtggtcttcgaagccgctgatgccgtcggcggcgtgtgggcgcgtacgctggcctgcacgaggctccagagtccagcagaagcgtaccggttctccgacttcccgtggccgccggaagtaaggcccgaggagttcccgcgcagcgaccaggtggcggcgtacatggccgcgtacgcccggcagttcggcgtcgtcgactgcgtcaggttcggcagcaaggtgctcggcgccgagtacgtcggagcgtcggaggcagaggtggcggcgtgggagcagtggtcagggaacggcgaggcgtttggcgacggcaccggtgtgtggcacctcaccgtccagcacggcgaaacggaggagactcagaaatacgagttcgatttcttgatcatctgcctggggaggtacggcattgcaaaggttcctacattcccacaaggcagaggcccagaagtgttccaggggcaagtgctccattccatggactactcgcgcatgccacacgcggatgcccatgagctgatcagaggcaagcgcgtcgtcgtggtcggctccggcaagtccggcatggatacagtcgcgcagtgtgccagagccaacggtagcaagtacccatgcaccatggtgtacagaagcgccaactggatggtggatcccaaccttgcctggggcgctttcttcaagaagatgataggcagtagactggcagagctgatggtgcacaagcccggagaagggttcgcgctgagcctcctcgccacggtgctgacgccgatgagatggctgatggccaagctggccgagacgtactacagggagctgatgccgatgcgcaagcacgggatggcgccgggctacaacctctcggagtcgatgctgctgggctggcgaattggcctgctcccggacaggttctacgacatggtggagcaaggcggcatcgtgctccggaggtgcgactccttcggcttctgcgccgacggcctggagctggacgacggcacaggggagcgcgtcggcgccgacgtcgttatcctcgccaccggcttcgacgacgaacggctcctcaccagcgtgttcgtgtcgccgtggttccgcgagatcatcgtgccaaagccctcccacaccatgcttcctctctacagggcactgcgtgcaccctaggataccgcagatggcggtggtctgctacgtggagagcgcggcgagcatctacccctacgagatgatggccaagtgggtggcgcacctgctcgacggtgtggtgcgcctgcccagcgtcgcggccatggaagagaacgtggcggagtgggagcgctgggggcggtgggccaagcgccgcagcggcgctttcttcgtcaagtcatgcatcgccgccgtcacgacgtggtacagcgaccagctgtgccgggacatgggacgcaatcccaggaggaagcggagagggctcctcgccgactggctgcagccgtacgggccctcggactatgccggcatccagtgaactgatgaggcgagccacaagtgatcatcagcgtccagcgcgcgcatgcatgtactattttatttatttaagagaaatggaatttggcaatttcagcgccgtttagtatggatcggtgtaacaattgtcttttggtttccatctttggcagacatttcgaacatgataacgaagttgccatccagacttataattcaaaaattgctatttatgttttgtatcgggacaatatacacaacttgttgctctcggttagagcatctctaagtaactcctcatttttg

SEQ ID NO: 43551 - DNA, 1967 bp, Zea Mays
atctcttataggcaatgcatagtggctgcatatatatcaaattagactagctaccactcctcccaacgcaaggaaccaagactgtgtcgaatggccgccgcgcaggagaaacgcttggcgatcatcggagccggatcgagcgggcttacggcgtgcaagcacgcgctggccaagggcttccgcccagtggtcttcgaagccgctgatgccgtcggcggcgtgtgggcgcgtacgctggcctgcacgaggctccagagtccagcagaagcgtaccggttctccgacttcccgtggccgccggaagtaaggcccgaggagttcccgcgcagcgaccaggtggcggcgtacatggccgcgtacgcccggcagttcggcgtcgtcgactgcgtcaggttcggcagcaaggtgctcggcgccgagtacgtcggagcgtcggaggcagaggtggcggcgtgggagcagtggtcagggaacggcgaggcgtttggcgacggcaccggtgtgtggcacctcaccgtccagcacggcgaaacggaggagactcagaaatacgagttcgatttcttgatcatctgcctggggaggtacggcattgcaaaggttcctacattcccacaaggcagaggcccagaagtgttccaggggcaagtgctccattccatggactactcgcgcatgccacacgcggatgcccatgagctgatcagaggcaagcgcgtcgtcgtggtcggctccggcaagtccggcatggatacagtcgcgcagtgtgccagagccaacggtagcaagtacccatgcaccatggtgtacagaagcgccaactggatggtggatcccaaccttgcctggggcgctttcttcaagaagatgataggcagtagactggcagagctgatggtgcacaagcccggagaagggttcgcgctgagcctcctcgccacggtgctgacgccgatgagatggctgatggccaagctggccgagacgtactacagggagctgatgccgatgcgcaagcacgggatggcgccgggctacaacctctcggagtcgatgctgctgggctggcgaattggcctgctcccggacaggttctacgacatggtggagcaaggcggcatcgtgctccggaggtgcgactccttcggcttctgcgccgacggcctggagctggacgacggcacaggggagcgcgtcggcgccgacgtcgttatcctcgccaccggcttcgacgacgaacggctcctcaccagcgtgttcgtgtcgccgtggttccgcgagatcatcgtgccaaagccctcccacaccatgcttcctctctacaggcactgcgtgcaccctaggataccgcagatggcggtggtctgctacgtggagagcgcggcgagcatctacccctacgagatgatggccaagtgggtggcgcacctgctcgacggtgtggtgcgcctgcccagcgtcgcggccatggaagagaacgtggcggagtgggagcgctgggggcggtgggccaagcgccgcagcggcgctttcttcgtcaagtcatgcatcgccgccgtcacgacgtggtacagcgaccagctgtgccgggacatgggacgcaatcccaggaggaagcggagagggctcctcgccgactggctgcagccgtacgggccctcggactatgccggcatccagtgaactgatgaggcgagccacaagtgatcatcagcgtccagcgcgcgcatgcatgtactattttatttatttaagagaaatggaatttggcaatttcagcgccgtttagtatggatcggtgtaacaattgtcttttggtttccatctttggcagacatttcgaacatgataacgaagttgccatccagacttataattcaaaaattgctatttatgttttgtatcgggacaatatacacaacttgttgctctcggttagagcatctctaagtaactcctcatttttg

SEQ ID NO: 43552 - DNA, 1538 bp, Zea Mays
aaactaaaccctatttctcaaaccctagattcggatccgccatcaacaggctccgccatcaacaggctcgaacgccctctcctcaaaccctaccagatcttgtcgttcggcgcctcaaaccccagattcggatccgccatcaccatagaggtgggggctgacggcatagcgctcatcaccatcgccaacctgcccgtggtggatgcgccatcgcctgaggtgagccgcggggaaatgagggatccttggaggcagagctggcgtcgcgtcgctggtggacgctggtgctggtgaacatggcgtcggtgctggaaaagatagacgagatgttgctgctcgccgtgtacaataaggtgtgcacgtcgctgggcgcttctcgacggcgctgggctcccaaaccctttgtcgcgcgctcgttcaagccgcctactacctactcaaagcctacgcctccgcgcgccatgatcgggcccgtgtcgtcgctgtcggagccttcacctgggccatctggtatttcgaaggaatctatgcgtactcccctcagataccaggtgttcgtttcccatgattaacccatcctggtatagtgggaactgcaccgtcagccaaacttcttaatgtatggaatgagagggagaaaagattggccgagacaagcccacagacccttaaactgtttgaagtgctacaccagaggccccttgccaatttaccgacccctgagaactgcttacttggaaagattcaggaggggactgctggatggcacaaagtggcgaatgaagcagccaggactattccgggaagggagaatggtggtaattgtgacataaaaaacctaagcagaggttccaaagtttatctgccagtatttgtcgaaggagcgaatcttagcaccggtgatatgcacttctctcagggcgatggtgaagtttcgttttgtggagcaattgaaatgagtggattccttgagctcaacttcttccagggattcatccctttgatccatccatcaaaaacaaagttcagtgcagcggtggttttgttgtaatgggtcagaggtggcagcaggaccattggcaccttcatcaatttaagttcagtgcagcggtgaggttcgacatgccccgtgcctactatcactctcgatttgaagaagagtctcaagattctgcaggtgttgtgttactcctaattcagttaccttactggcaataggatgccattgcaacttctgaaagtgcaaccatctgattgaagcggatttaattatacaagatagatctagaattgctttacttgagattcaagcaatgttggatgcttttgtgactgatcatctctggagcttttgtgaatgatctagctagctatctgtaaatgatcttgttgtgaatgatattataattgtgatgttttttgtgaatatataattgtggtgcttttgtgtttatgtgatggatctatgactgtggtatactgattaattgtgtatgtctttatgatttgtgtataaaaatctatgatttgtggtgctt

SEQ ID NO: 43553 - DNA, 2198 bp, Zea Mays
ccaaacccaagtcctcaccccaagattttcaaaattcccgagccacagcggcacagcgcagagaagcgacgaatctcctacgaatccccaatcctccagtcgatctgatcccccaaacccacagctctcatcgtcgccgacggcgggcacaccatgcggagcgacgatgcaggcggcggcgggttccacgagctgttcgactccgtgcgccgctccatctccttccgcacgggcgccgccgcccttgacgagcccgccgcctccctctcctcctcctctgcctccgcgggcggtgctgggggcttcagggagcggatcagcaaccgcctccgcaggtcccgggggatggggttgctcggcatggcggccaagggcccctcgcccacgcgccgcctcctgccgcagccgcccccgcccttggccggggtcttggcctccgacggatgtggtagggtaggggggcaaggaactggcggaggcgaagagaacccgccgatccggtggcggaaaggcgacctcatcgggagtggggcgttcgggcaggtgtacctcggcatggacctcgactccggcgagctcctcgctgtcaagcaggttctgattggaagcagcaacgcgacaagagagaaggcccaggcacatgtaacggagctcgaggacgaagtgaagatgcttaagaacctctcccaccctaatattgttaggtatattgggacggcgcgggaggaaaacacgctaaatattctgctggaatttgttcctggaggctcgatccagtcactacttgggaggcttggatcgttcccagaggctgtcatcaggaaatatactaaacagcttttacatggactggaatatttgcatcgcaatggaatcatacacagggatataaagggcgcaaatatacttgttgataacaaaggttgcattaagctagcagattttggggcatctaagcaagtagaaaagttggcaactgcaactgctgccaagacgatgaaaggtaccccatattggatggcaccagaagtcattgttggaagcggtcacaattgttctgctgatatctggagtgttggttgcacggtaattgaaatggcaataggcaaacccccatggagccacgaatatcaagaggtttctctactttattatgttgggacgacaaaatcacacccacctataccagaacatctctccacagaagccaaggattttctgttaaaatgcttacagaaggaaccagaaatgagatctgttgcatcagacttgttgcagcacccatttgttacacgagtattggaagatttttgtcagcttaatcatgctggacccaaggaaacctccaaaaatgagcttccttcctatgtagtgcctactgttgactcggacttgagtcgccctggcaagctacgcaatctgaattcttacaagttatcagacaccagaccattatgggatcagcgatgtaatgatgatgatatttgtgagtttgctgacgaagataatgtcccaatggttggatctcttgagcttttcggaaatacagaggaagtggaaggaagagttggaccaggaacttaaaagagagcgagaaatgaggtcgggtggctatggtaaagcaccatcaccgtcctcaacgagccggagattgactggaaaacgagatcgcagtcctgtgtattgagtagagaatcagaatacaacacagcaggactcgtatatttgactaaccgcacagtgtcatcgattggtggccattgctagtacagtgcagtgccaaccttcgtatgacctgacagaacctacttgacgaccaaatccttttggtccttgtaaggtaaattaggttgagcgagccacttgtaagcgcactgtgcatcggaggctatcatgatctgcgatgcctgccttcgcagccctttattgccagcatgaaatcattggggtggcgatttttatgcaatgttcaagcttcatgcaattttggatgacaataggtgcatgttgtacaattgtcttctctttatttttcaaatgtttgtaagtttacctgatgaccgagaatccataattcgttgaaccaaaagtatggaagtgttcgtctcgacggataatgctgattctcgacgcacgctggctaagagaatgctcttttgttggatccacgagagctgttggcttccttttgtgatact

SEQ ID NO: 43554 - DNA, 3011 bp, Zea Mays
ccaaacccaagtcctcaccccaagattttcaaaattcccgagccacagcggcacagcgcagagaagcgacgaatctcctacgaatccccaatcctccagtcgatctgatcccccaaacccacagctctcatcgtcgccgacggcgggcacaccatgcggagcgacgatgcaggcggcggcgggttccacgagctgttcgactccgtgcgccgctccatctccttccgcacgggcgccgccgcccttgacgagcccgccgcctccctctcctcctcctctgcctccgcgggcggtgctgggggcttcagggagcggatcagcaaccgcctccgcaggtcccgggggatggggttgctcggcatggcggccaagggcccctcgcccacgcgccgcctcctgccgcagccgcccccgcccttggccggggtcttggcctccgacggatgtggtagggtaggggggcaaggaactggcggaggcgaagagaacccgccgatccggtggcggaaaggcgacctcatcgggagtggggcgttcgggcaggtgtacctcggcatggacctcgactccggcgagctcctcgctgtcaagcaggttctgattggaagcagcaacgcgacaagagagaaggcccaggcacatgtaacggagctcgaggacgaagtgaagatgcttaagaacctctcccaccctaatattgttaggtatattgggacggcgcgggaggaaaacacgctaaatattctgctggaatttgttcctggaggctcgatccagtcactacttgggaggcttggatcgttcccagaggctgtcatcaggaaatatactaaacagcttttacatggactggaatatttgcatcgcaatggaatcatacacagggatataaagggcgcaaatatacttgttgataacaaaggttgcattaagctagcagattttggggcatctaagcaagtagaaaagttggcaactgcaactgctgccaagacgatgaaaggtaccccatattggatggcaccagaagtcattgttggaagcggtcacaattgttctgctgatatctggagtgttggttgcacggtaattgaaatggcaataggcaaacccccatggagccacgaatatcaagaggtttctctactttattatgttgggacgacaaaatcacacccacctataccagaacatctctccacagaagccaaggattttctgttaaaatgcttacagaaggaaccagaaatgagatctgttgcatcagacttgttgcagcacccatttgttacacgagtattggaagatttttgtcagcttaatcatgctggacccaaggaaacctccaaaaatgagcttccttcctatgtagtgcctactgttgactcggacttgagtcgccctggcaagctacgcaatctgaattcttacaagttatcagacaccagaccattatgggatcagcgatgtaatgatgatgatatttgtgagtttgctgacgaagataatgtcccaatggttggatctagcttcaatcctatgtctgaaccatctgatgaatgggaaaacaaacttgacataagcccagaacaacaatttagtcagtcaagggagtttggtggattagccaaacttgcagaaagtcagatgtctgaaaacgattttactttcccttgtgagggaagctgtgaagaggatgatgaatttacagaatcaaaaataaaggaatttctggatgaaaaggccacagatctaaagaaactacaaacacctttatatgagttttacaacacagtgaatgctggagtttctcaaggagttagtgatgtttgccgagcaaacaatgtaactaatccccagttaccccctcgagcaactaagatggtgggaggtgcagctttagagcccatttgtgttaatctgaaaaatgtcaatcccaagagttgcacaaggcgcttctcaagaggcagcgtggagagcaatcatgtcttgagagaaatagcttcacctgaactcaacatactcgaggacaaggtccatgatgatagtgaagatagtccaaggtttgagcaaagcacattgtttgtagtgtgaaagattaaatactcgtgccattcaatataattagggtgtttagtcatgcgattaagcctacatatttgctttgtgtgaaatgtacataagaaatagtaatcaacgtactgtttcatacttctgcagaaaatataggtaaaactcagcaattcattgtttattgcaaaaagttttcatactaatttaacagagtattttgctccggaggtagcatatgttctaacagttgaaaactaattttgacagcttgagcttttcggaaatacagaggaagtggaaggaagagttggaccaggaacttaaaagagagcgagaaatgaggtcgggtggctatggtaaagcaccatcaccgtcctcaacgagccggagattgactggaaaacgagatcgcagtcctgtgtattgagtagagaatcagaatacaacacagcaggactcgtatatttgactaaccgcacagtgtcatcgattggtggccattgctagtacagtgcagtgccaaccttcgtatgacctgacagaacctacttgacgaccaaatccttttggtccttgtaaggtaaattaggttgagcgagccacttgtaagcgcactgtgcatcggaggctatcatgatctgcgatgcctgccttcgcagccctttattgccagcatgaaatcattggggtggcgatttttatgcaatgttcaagcttcatgcaattttggatgacaataggtgcatgttgtacaattgtcttctctttatttttcaaatgtttgtaagtttacctgatgaccgagaatccataattcgttgaaccaaaagtatggaagtgttcgtctcgacggataatgctgattctcgacgcacgctggctaagagaatgctcttttgttggatccacgagagctgttggcttccttttgtgatact

SEQ ID NO: 43555 - DNA, 285 bp, Zea Mays
gcgcgacgtcacaaactccgctcgttgtcgatgtcgtgcttcgtgcatcgcgtgttcgacgaaaatcccaagtccatggacagcacatgcacaactcaaatccgatcggccaggttgtttgatgtgtattttactcatttgatttagttgatgatgtgtttgtatgtgtggggtgatgagaaaaataaaggagatgtgtcgttcggtagtaaggattaagttaaaatgtagtttatggtgtgaagagtgcgtcgataaatatgtatgccattgagtggttaaatg

SEQ ID NO: 43556 - DNA, 1950 bp, Zea Mays
ggcgtctagtcatcagatcattatccgcaccgacttgcgtgcacgagcttcgcggcgagggcagcaccggggctgggaatgggaagacactgcagcccagctccagcagcactacagcagtagcgccaccgaacctgaaaactccgaccccccacgaaatcgcggaacctacccacgagccgagccatgctcagccgactcgccgcggcgaggcgacagctactgctatccccggccgtcgcgtaccgctcctcctcggcagcggcgacggcgtcggcggtccacgagagagcagcgcccgcctcggcctccgtgctcccggacaccctcgaaaggggctccgacgcgtaccagcgcaacacggccgccgtcggcgggttgctctccgacctgcgcgcccgcgtctcccaggtgctgcgcgggggaggcgccgaggcggtgaggcggaacgcggcgcgggggaagctgctcccgcgggaccgcatcgaccgactgctcgaccccggcgcgtccttcctcgagctctcgcagcttgcaggctcagatgtttatgatgaagcattaccatcagcaggaaatagcttcggagtgcaaactgccttgcatatatctcgttgacagcggaggtgctaatctccccagattgcagtagtcttgggttcttgcactgctggtggggcatatattcctgcaatggcggatgagagtgtaatagttaagggaaatgggactatatttctagcgggtccaccacttgtaaaggctgctacaggagaggagatatctgctgaggaccttggtggagcatcagtacattgcaaggtatcaggagtctcagatcattttgcacaagatgaaattcatggacttgagttggggcgaaacattgtgaagaacctgcacttagctgctaaaggaacaaatattcagagttctgcttgtggttaccaagagccattgtacgatgtagaggaacttcgctccattgcaccagctgatgtgaaacagtccttcgacattcgttcaataatagcccgtattgttgatggaagtgaatttgatgagttcaaaaaattacactagtgactggttttgcaaggatatgtgggcaaccagttggaattattggaaacaatggcattttgtttacagagtcagcgttgaagggctcccacttcattgaattgtgcgctcagcggcatattcctttgattttccttcaaaacattactgggttcatggtatgggcaaatcaaaattattatctacatagacttattgatgatgcaaaggtcggatcaaagtctgaagctagtggaattgccaaagctggagcaaagatggtcatggcagtttcctgtgctaaggttcctaaaattacaataattgttggtggaagttttggggctgggaattatggaatgtgcggacgtgcatatagcccaaactttttatttctttggccaactgctaggatatctgttatgggtggcatccaggcagctggagttctcgctcaaatagaaaagaacaacaaaaggagacaaggagtggagtggagcaaggacgaggaagaagccttcaaagccaaagtcgtggaggcttacgacagagaaggaagcccgtactactccactgctaggctatgggacgacggggtcatcgaccctgctgacaccaggcgggttctgagcctctgcctctccgcttcggccaagccggttccggaagacacaagatacggtgtattccggatgtgaataaatgtgtgtgagtaataacgcagacgtgtttaataaaaagctgcctgcacgcacccaatgtgtgtgcacaaataaaaatttcgccctggtttctgtcgtcgaaatatgttgaagagtgttgttcatttcatatattactatctgatgaatgggaagtgttcttcatttgatacgtcaataaaaaaaa

SEQ ID NO: 43557 - DNA, 1960 bp, Zea Mays
ggcgtctagtcatcagatcattatccgcaccgacttgcgtgcacgagcttcgcggcgagggcagcaccggggctgggaatgggaagacactgcagcccagctccagcagcactacagcagtagcgccaccgaacctgaaaactccgaccccccacgaaatcgcggaacctacccacgagccgagccatgctcagccgactcgccgcggcgaggcgacagctactgctatccccggccgtcgcgtaccgctcctcctcggcagcggcgacggcgtcggcggtccacgagagagcagcgcccgcctcggcctccgtgctcccggacaccctcgaaaggggctccgacgcgtaccagcgcaacacggccgccgtcggcgggttgctctccgacctgcgcgcccgcgtctcccaggtgctgcgcgggggaggcgccgaggcggtgaggcggaacgcggcgcgggggaagctgctcccgcgggaccgcatcgaccgactgctcgaccccggcgcgtccttcctcgagctctcgcagcttgcaggctcagatgtttatgatgaagcattaccatcagcaggaaatagcttcggagtgcaaactgccttgcatatatctcgttgacagcggaggtgctaatctccccagattgcagtagtcttgggttcttgcactgctggtggggcatatattcctgcaatggcggatgagagtgtaatagttaagggaaatgggactatatttctagcgggtccaccacttgtaaaggctgctacaggagaggagatatctgctgaggaccttggtggagcatcagtacattgcaaggtatcaggagtctcagatcattttgcacaagatgaaattcatggacttgagttggggcgaaacattgtgaagaacctgcacttagctgctaaaggaacaaatattcagagttctgcttgtggttaccaagagccattgtacgatgtagaggaacttcgctccattgcaccagctgatgtgaaacagtccttcgacattcgttcaataatagcccgtattgttgatggaagtgaatttgatgagttcaaaaaattgtatggaacaacactagtgactggttttgcaaggatatgtgggcaaccagttggaattattggaaacaatggcattttgtttacagagtcagcgttgaagggctcccacttcattgaattgtgcgctcagcggcatattcctttgattttccttcaaaacattactgggttcatggtatgggcaaatcaaaattattatctacatagacttattgatgatgcaaaggtcggatcaaagtctgaagctagtggaattgccaaagctggagcaaagatggtcatggcagtttcctgtgctaaggttcctaaaattacaataattgttggtggaagttttggggctgggaattatggaatgtgcggacgtgcatatagcccaaactttttatttctttggccaactgctaggatatctgttatgggtggcatccaggcagctggagttctcgctcaaatagaaaagaacaacaaaaggagacaaggagtggagtggagcaaggacgaggaagaagccttcaaagccaaagtcgtggaggcttacgacagagaaggaagcccgtactactccactgctaggctatgggacgacggggtcatcgaccctgctgacaccaggcgggttctgagcctctgcctctccgcttcggccaagccggttccggaagacacaagatacggtgtattccggatgtgaataaatgtgtgtgagtaataacgcagacgtgtttaataaaaagctgcctgcacgcacccaatgtgtgtgcacaaataaaaatttcgccctggtttctgtcgtcgaaatatgttgaagagtgttgttcatttcatatattactatctgatgaatgggaagtgttcttcatttgatacgtcaataaaaaaaa

SEQ ID NO: 43558 - DNA, 1971 bp, Zea Mays
ggcgtctagtcatcagatcattatccgcaccgacttgcgtgcacgagcttcgcggcgagggcagcaccggggctgggaatgggaagacactgcagcccagctccagcagcactacagcagtagcgccaccgaacctgaaaactccgaccccccacgaaatcgcggaacctacccacgagccgagccatgctcagccgactcgccgcggcgaggcgacagctactgctatccccggccgtcgcgtaccgctcctcctcggcagcggcgacggcgtcggcggtccacgagagagcagcgcccgcctcggcctccgtgctcccggacaccctcgaaaggggctccgacgcgtaccagcgcaacacggccgccgtcggcgggttgctctccgacctgcgcgcccgcgtctcccaggtgctgcgcgggggaggcgccgaggcggtgaggcggaacgcggcgcgggggaagctgctcccgcgggaccgcatcgaccgactgctcgaccccggcgcgtccttcctcgagctctcgcaggtttcgctcgccgctcccgctcggaccctcgtcttccttgcgttgatctggccgcattgtgaagtgaactctattgcctgctcagatgtttatgatgaagcattaccatcagcaggaaatagcttcggagtgcaaactgccttgcatatatctcgttgacagcggaggtgctaatctccccagattgcagtagtcttgggttcttgcactgctggtggggcatatattcctgcaatggcggatgagagtgtaatagttaagggaaatgggactatatttctagcgggtccaccacttgtaaaggctgctacaggagaggagatatctgctgaggaccttggtggagcatcagtacattgcaaggtatcaggagtctcagatcattttgcacaagatgaaattcatggacttgagttggggcgaaacattgtgaagaacctgcacttagctgctaaaggaacaaatattcagagttctgcttgtggttaccaagagccattgtacgatgtagaggaacttcgctccattgcaccagctgatgtgaaacagtccttcgacattcgttcaataatagcccgtattgttgatggaagtgaatttgatgagttcaaaaaattacactagtgactggttttgcaaggatatgtgggcaaccagttggaattattggaaacaatggcattttgtttacagagtcagcgttgaagggctcccacttcattgaattgtgcgctcagcggcatattcctttgattttccttcaaaacattactgggttcatggtcggatcaaagtctgaagctagtggaattgccaaagctggagcaaagatggtcatggcagtttcctgtgctaaggttcctaaaattacaataattgttggtggaagttttggggctgggaattatggaatgtgcggacgtgcatatagcccaaactttttatttctttggccaactgctaggatatctgttatgggtggcatccaggcagctggagttctcgctcaaatagaaaagaacaacaaaaggagacaaggagtggagtggagcaaggacgaggaagaagccttcaaagccaaagtcgtggaggcttacgacagagaaggaagcccgtactactccactgctaggctatgggacgacggggtcatcgaccctgctgacaccaggcgggttctgagcctctgcctctccgcttcggccaagccggttccggaagacacaagatacggtgtattccggatgtgaataaatgtgtgtgagtaataacgcagacgtgtttaataaaaagctgcctgcacgcacccaatgtgtgtgcacaaataaaaatttcgccctggtttctgtcgtcgaaatatgttgaagagtgttgttcatttcatatattactatctgatgaatgggaagtgttcttcatttgatacgtcaataaaaaaaa

SEQ ID NO: 43559 - DNA, 1981 bp, Zea Mays
ggcgtctagtcatcagatcattatccgcaccgacttgcgtgcacgagcttcgcggcgagggcagcaccggggctgggaatgggaagacactgcagcccagctccagcagcactacagcagtagcgccaccgaacctgaaaactccgaccccccacgaaatcgcggaacctacccacgagccgagccatgctcagccgactcgccgcggcgaggcgacagctactgctatccccggccgtcgcgtaccgctcctcctcggcagcggcgacggcgtcggcggtccacgagagagcagcgcccgcctcggcctccgtgctcccggacaccctcgaaaggggctccgacgcgtaccagcgcaacacggccgccgtcggcgggttgctctccgacctgcgcgcccgcgtctcccaggtgctgcgcgggggaggcgccgaggcggtgaggcggaacgcggcgcgggggaagctgctcccgcgggaccgcatcgaccgactgctcgaccccggcgcgtccttcctcgagctctcgcaggtttcgctcgccgctcccgctcggaccctcgtcttccttgcgttgatctggccgcattgtgaagtgaactctattgcctgctcagatgtttatgatgaagcattaccatcagcaggaaatagcttcggagtgcaaactgccttgcatatatctcgttgacagcggaggtgctaatctccccagattgcagtagtcttgggttcttgcactgctggtggggcatatattcctgcaatggcggatgagagtgtaatagttaagggaaatgggactatatttctagcgggtccaccacttgtaaaggctgctacaggagaggagatatctgctgaggaccttggtggagcatcagtacattgcaaggtatcaggagtctcagatcattttgcacaagatgaaattcatggacttgagttggggcgaaacattgtgaagaacctgcacttagctgctaaaggaacaaatattcagagttctgcttgtggttaccaagagccattgtacgatgtagaggaacttcgctccattgcaccagctgatgtgaaacagtccttcgacattcgttcaataatagcccgtattgttgatggaagtgaatttgatgagttcaaaaaattgtatggaacaacactagtgactggttttgcaaggatatgtgggcaaccagttggaattattggaaacaatggcattttgtttacagagtcagcgttgaagggctcccacttcattgaattgtgcgctcagcggcatattcctttgattttccttcaaaacattactgggttcatggtcggatcaaagtctgaagctagtggaattgccaaagctggagcaaagatggtcatggcagtttcctgtgctaaggttcctaaaattacaataattgttggtggaagttttggggctgggaattatggaatgtgcggacgtgcatatagcccaaactttttatttctttggccaactgctaggatatctgttatgggtggcatccaggcagctggagttctcgctcaaatagaaaagaacaacaaaaggagacaaggagtggagtggagcaaggacgaggaagaagccttcaaagccaaagtcgtggaggcttacgacagagaaggaagcccgtactactccactgctaggctatgggacgacggggtcatcgaccctgctgacaccaggcgggttctgagcctctgcctctccgcttcggccaagccggttccggaagacacaagatacggtgtattccggatgtgaataaatgtgtgtgagtaataacgcagacgtgtttaataaaaagctgcctgcacgcacccaatgtgtgtgcacaaataaaaatttcgccctggtttctgtcgtcgaaatatgttgaagagtgttgttcatttcatatattactatctgatgaatgggaagtgttcttcatttgatacgtcaataaaaaaaa

SEQ ID NO: 43560 - DNA, 2111 bp, Zea Mays
cccagcgcggcgtctagtcatcagatcattatccgcaccgacttgcgtgcacgagcttcgcggcgagggcagcaccggggctgggaatgggaagacactgcagcccagctccagcagcactacagcagtagcgccaccgaacctgaaaactccgaccccccacgaaatcgcggaacctacccacgagccgagccatgctcagccgactcgccgcggcgaggcgacagctactgctatccccggccgtcgcgtaccgctcctcctcggcagcggcgacggcgtcggcggtccacgagagagcagcgcccgcctcggcctccgtgctcccggacaccctcgaaaggggctccgacgcgtaccagcgcaacacggccgccgtcggcgggttgctctccgacctgcgcgcccgcgtctcccaggtgctgcgcgggggaggcgccgaggcggtgaggcggaacgcggcgcgggggaagctgctcccgcgggaccgcatcgaccgactgctcgaccccggcgcgtccttcctcgagctctcgcagcttgcaggctcagatgtttatgatgaagcattaccatcagcaggtataataactggcataggacctgttcatggacggttatgtatgtttgtggccaatgacccaaccactaagggtggcacatactatcctcttactgtcaagaagcatctgcgagcacaggaaatagcttcggagtgcaaactgccttgcatatatctcgttgacagcggaggtgctaatctccccaggcaggctgacgttttccctgaccgtgataattttggccggatattctacaatcaagctaagatgtcttcagatggtatccctcagattgcagtagtcttgggttcttgcactgctggtggggcatatattcctgcaatggcggatgagagtgtaatagttaagggaaatgggactatatttctagcgggtccaccacttgtaaaggctgctacaggagaggagatatctgctgaggaccttggtggagcatcagtacattgcaaggtatcaggagtctcagatcattttgcacaagatgaaattcatggacttgagttggggcgaaacattgtgaagaacctgcacttagctgctaaaggaacaaatattcagagttctgcttgtggttaccaagagccattgtacgatgtagaggaacttcgctccattgcaccagctgatgtgaaacagtccttcgacattcgttcaataatagcccgtattgttgatggaagtgaatttgatgagttcaaaaaattacactagtgactggttttgcaaggatatgtgggcaaccagttggaattattggaaacaatggcattttgtttacagagtcagcgttgaagggctcccacttcattgaattgtgcgctcagcggcatattcctttgattttccttcaaaacattactgggttcatggtcggatcaaagtctgaagctagtggaattgccaaagctggagcaaagatggtcatggcagtttcctgtgctaaggttcctaaaattacaataattgttggtggaagttttggggctgggaattatggaatgtgcggacgtgcatatagcccaaactttttatttctttggccaactgctaggatatctgttatgggtggcatccaggcagctggagttctcgctcaaatagaaaagaacaacaaaaggagacaaggagtggagtggagcaaggacgaggaagaagccttcaaagccaaagtcgtggaggcttacgacagagaaggaagcccgtactactccactgctaggctatgggacgacggggtcatcgaccctgctgacaccaggcgggttctgagcctctgcctctccgcttcggccaagccggttccggaagacacaagatacggtgtattccggatgtgaataaatgtgtgtgagtaataacgcagacgtgtttaataaaaagctgcctgcacgcacccaatgtgtgtgcacaaataaaaatttcgccctggtttctgtcgtcgaaatatgttgaagagtgttgttcatttcatatattactatctgatgaatgggaagtgttcttcatttgatacgtcaataaaaaaaa

SEQ ID NO: 43561 - DNA, 2040 bp, Zea Mays
cacgcatcgtgctgtgtgccgcctgctcccatgctctgccaacaccacatccggttatgataaattgatacagatccatgataataatagcttttgcccatgtctggtggtgacgtcgtgtgccccagcgcggcgtctagtcatcagatcattatccgcaccgacttgcgtgcacgagcttcgcggcgagggcagcaccggggctgggaatgggaagacactgcagcccagctccagcagcactacagcagtagcgccaccgaacctgaaaactccgaccccccacgaaatcgcggaacctacccacgagccgagccatgctcagccgactcgccgcggcgaggcgacagctactgctatccccggccgtcgcgtaccgctcctcctcggcagcggcgacggcgtcggcggtccacgagagagcagcgcccgcctcggcctccgtgctcccggacaccctcgaaaggggctccgacgcgtaccagcgcaacacggccgccgtcggcgggttgctctccgacctgcgcgcccgcgtctcccaggtgctgcgcgggggaggcgccgaggcggtgaggcggaacgcggcgcgggggaagctgctcccgcgggaccgcatcgaccgactgctcgaccccggcgcgtccttcctcgagctctcgcagcttgcaggctcagatgtttatgatgaagcattaccatcagcaggaaatagcttcggagtgcaaactgccttgcatatatctcgttgacagcggaggtgctaatctccccagattgcagtagtcttgggttcttgcactgctggtggggcatatattcctgcaatggcggatgagagtgtaatagttaagggaaatgggactatatttctagcgggtccaccacttgtaaaggctgctacaggagaggagatatctgctgaggaccttggtggagcatcagtacattgcaaggtatcaggagtctcagatcattttgcacaagatgaaattcatggacttgagttggggcgaaacattgtgaagaacctgcacttagctgctaaaggaacaaatattcagagttctgcttgtggttaccaagagccattgtacgatgtagaggaacttcgctccattgcaccagctgatgtgaaacagtccttcgacattcgttcaataatagcccgtattgttgatggaagtgaatttgatgagttcaaaaaattgtatggaacaacactagtgactggttttgcaaggatatgtgggcaaccagttggaattattggaaacaatggcattttgtttacagagtcagcgttgaagggctcccacttcattgaattgtgcgctcagcggcatattcctttgattttccttcaaaacattactgggttcatggtcggatcaaagtctgaagctagtggaattgccaaagctggagcaaagatggtcatggcagtttcctgtgctaaggttcctaaaattacaataattgttggtggaagttttggggctgggaattatggaatgtgcggacgtgcatatagcccaaactttttatttctttggccaactgctaggatatctgttatgggtggcatccaggcagctggagttctcgctcaaatagaaaagaacaacaaaaggagacaaggagtggagtggagcaaggacgaggaagaagccttcaaagccaaagtcgtggaggcttacgacagagaaggaagcccgtactactccactgctaggctatgggacgacggggtcatcgaccctgctgacaccaggcgggttctgagcctctgcctctccgcttcggccaagccggttccggaagacacaagatacggtgtattccggatgtgaataaatgtgtgtgagtaataacgcagacgtgtttaataaaaagctgcctgcacgcacccaatgtgtgtgcacaaataaaaatttcgccctggtttctgtcgtcgaaatatgttgaagagtgttgttcatttcatatattactatctgatgaatgggaagtgttcttcatttgatacgtcaataaaaaaaa

SEQ ID NO: 43562 - DNA, 894 bp, Zea Mays
ctccatatccgcgcggcgcctatctggcatcggtgaagagcgggcgctagagcagagtgagcgtgcggttcttggtcatggagcgcggtgccgtcgtccttccgctccagggcgccggggttgggcgcgtcctcctccccgtgcaagtgcgggtacggtcgttcttgaggagcaggagggcgacggagcggcggcgccggctcgcgagttccgcggcgccggcgaggtgcagcaagatgtacgttcccggctttggggagggttcaccggagcggaaggcggcgatcaacctccagcacttctttaactacatcgctgtcagcattgtcctagcacagcttgagtgtatgaaattactgaggcatgtgtggtttcgtctcttggaaacaaacagccttgaggattctggaggtccgatctgcatatgtgaagaacgagttcgagtgggacaatttgaaggaattatccttcaagatggttgatgaggccaacacaaagctcatgagggattacgtcgtcgaggtcagccacattgaagacgaaaactaaaacatcaagtggtttctctttgaactactatattttataggcgaacgataacatcaaatgctttctcttgaaccttgcctacagcattttataagaggcttgcatgtatatatagaagatgtataggttatgaagcgcactagcttgatcctgaaactttgtatgtagcataggtactaaacatagtaagcgcattagcagtgatacaccgtagatgtttagcattacttgaataaaactcggcacgcatacaccgtgttactttcttgatcatcaataggagtgagaacaaaaacggtaaatttcggttaccgagaaccgttttaaaaattttaccgaaattca

SEQ ID NO: 43563 - DNA, 1066 bp, Zea Mays
ccgcgacatgtgcggtggcgcagacccgttactctacccggtaaatatctcctgcggcatttttgactccatatccgcgcggcgcctatctggcatcggtgaagagcgggcgctagagcagagtgagcgtgcggttcttggtcatggagcgcggtgccgtcgtccttccgctccagggcgccggggttgggcgcgtcctcctccccgtgcaagtgcgggtacggtcgttcttgaggagcaggagggcgacggagcggcggcgccggctcgcgagttccgcggcgccggcgaggtgcagcaagatgtacgttcccggctttggggagggttcaccggagcggaaggcggcgatcaacctccagcacttctttaactacatcgctgtcagcattgtcctagcacagcttgagagttacaatagggaagcgtacttggagctgaaggagttcatcagccgcacctccctgaacgacgccgagattttctgcgaaaagctcatgcgcgagtctccaaggctcaagggactagccttgaggattctggagggattctcactttgtcagatgaattgatgcgactgcaggtccgatctgcatatgtgaagaacgagttcgagtgggacaatttgaaggaattatccttcaagatggttgatgaggccaacacaaagctcatgagggattacgtcgtcgaggtcagccacattgaagacgaaaactaaaacatcaagtggtttctctttgaactactatattttataggcgaacgataacatcaaatgctttctcttgaaccttgcctacagcattttataagaggcttgcatgtatatatagaagatgtataggttatgaagcgcactagcttgatcctgaaactttgtatgtagcataggtactaaacatagtaagcgcattagcagtgatacaccgtagatgtttagcattacttgaataaaactcggcacgcatacaccgtgttactttcttgatcatcaataggagtgagaacaaaaacggtaaatttcggttaccgagaaccgttttaaaaattttaccgaaattca

SEQ ID NO: 43564 - DNA, 1029 bp, Zea Mays
gccgcgacatgtgcggtggcgcagacccgttactctacccggtaaatatctcctgcggcatttttgactccatatccgcgcggcgcctatctggcatcggtgaagagcgggcgctagagcagagtgagcgtgcggttcttggtcatggagcgcggtgccgtcgtccttccgctccagggcgccggggttgggcgcgtcctcctccccgtgcaagtgcgggtacggtcgttcttgaggagcaggagggcgacggagcggcggcgccggctcgcgagttccgcggcgccggcgaggtgcagcaagatgtacgttcccggctttggggagggttcaccggagcggaaggcggcgatcaacctccagcacttctttaactacatcgctgtcagcattgtcctagcacagcttgagagttacaatagggaagcgtacttggagctgaaggagttcatcagccgcacctccctgaacgacgccgagattttctgcgaaaagctcatgcgcgagtctccaaggctcaagggactagccttgaggattctggaggtccgatctgcatatgtgaagaacgagttcgagtgggacaatttgaaggaattatccttcaagatggttgatgaggccaacacaaagctcatgagggattacgtcgtcgaggtcagccacattgaagacgaaaactaaaacatcaagtggtttctctttgaactactatattttataggcgaacgataacatcaaatgctttctcttgaaccttgcctacagcattttataagaggcttgcatgtatatatagaagatgtataggttatgaagcgcactagcttgatcctgaaactttgtatgtagcataggtactaaacatagtaagcgcattagcagtgatacaccgtagatgtttagcattacttgaataaaactcggcacgcatacaccgtgttactttcttgatcatcaataggagtgagaacaaaaacggtaaatttcggttaccgagaaccgttttaaaaattttaccgaaattca

SEQ ID NO: 43565 - DNA, 1018 bp, Zea Mays
gccgcgacatgtgcggtggcgcagacccgttactctacccggtaaatatctcctgcggcatttttgactccatatccgcgcggcgcctatctggcatcggtgaagagcgggcgctagagcagagtgagcgtgcggttcttggtcatggagcgcggtgccgtcgtccttccgctccagggcgccggggttgggcgcgtcctcctccccgtgcaagtgcgggtacggtcgttcttgaggagcaggagggcgacggagcggcggcgccggctcgcgagttccgcggcgccggcgaggtgcagcaagatgtacgttcccggctttggggagggttcaccggagcggaaggcggcgatcaacctccagcacttctttaactacatcgctgtcagcattgtcctagcacagcttgagggaagcgtacttggagctgaaggagttcatcagccgcacctccctgaacgacgccgagattttctgcgaaaagctcatgcgcgagtctccaaggctcaagggactagccttgaggattctggaggtccgatctgcatatgtgaagaacgagttcgagtgggacaatttgaaggaattatccttcaagatggttgatgaggccaacacaaagctcatgagggattacgtcgtcgaggtcagccacattgaagacgaaaactaaaacatcaagtggtttctctttgaactactatattttataggcgaacgataacatcaaatgctttctcttgaaccttgcctacagcattttataagaggcttgcatgtatatatagaagatgtataggttatgaagcgcactagcttgatcctgaaactttgtatgtagcataggtactaaacatagtaagcgcattagcagtgatacaccgtagatgtttagcattacttgaataaaactcggcacgcatacaccgtgttactttcttgatcatcaataggagtgagaacaaaaacggtaaatttcggttaccgagaaccgttttaaaaattttaccgaaattca

SEQ ID NO: 43566 - DNA, 1012 bp, Zea Mays
gccgcgacatgtgcggtggcgcagacccgttactctacccggtaaatatctcctgcggcatttttgactccatatccgcgcggcgcctatctggcatcggtgaagagcgggcgctagagcagagtgagcgtgcggttcttggtcatggagcgcggtgccgtcgtccttccgctccagggcgccggggttgggcgcgtcctcctccccgtgcaagtgcgggtacggtcgttcttgaggagcaggagggcgacggagcggcggcgccggctcgcgagttccgcggcgccggcgaggtgcagcaagatgtacgttcccggctttggggagggttcaccggagcggaaggcggcgatcaacctccagcacttctttaactacatcgctgtcagcattgtcctagcacagcttgagagttacaatagggaagcgtacttggagctgaaggagttcatcagccgcacctccctgaacgacgccgagattttctgcgaaaagctcatgcgcgagtctccaaggctcaagggactaggtccgatctgcatatgtgaagaacgagttcgagtgggacaatttgaaggaattatccttcaagatggttgatgaggccaacacaaagctcatgagggattacgtcgtcgaggtcagccacattgaagacgaaaactaaaacatcaagtggtttctctttgaactactatattttataggcgaacgataacatcaaatgctttctcttgaaccttgcctacagcattttataagaggcttgcatgtatatatagaagatgtataggttatgaagcgcactagcttgatcctgaaactttgtatgtagcataggtactaaacatagtaagcgcattagcagtgatacaccgtagatgtttagcattacttgaataaaactcggcacgcatacaccgtgttactttcttgatcatcaataggagtgagaacaaaaacggtaaatttcggttaccgagaaccgttttaaaaattttaccgaaattca

SEQ ID NO: 43567 - DNA, 2609 bp, Zea Mays
gcgccccctgtgccgcaacctcgccgaatcgtgcccctgctcctctccatccatggctgcgctcgacctccacttcaagccgcgccctgggatttgcacagaacctccatcccctcgacaccagttctcagctcctccgcctccctatgtttggtcgcctctctgttttccccatctggccgtcgttcttcagcccaggccatcatggcgccctctgtccaacacgccgttgtccactgcaagcttgccgactcgcccttctttagggtcgtcgccagcagctgctgctcctcctctcttcgccctgctgcgctctggtggtcgccagttcccagctcctactcaaccggtgtcaggctcggaccaccttgtcgcgttgctttttgttgtggccatctagtcgttgatgctcggtctcccctgttagcatcatcaaccgttcctggaccaaatcgttgccctctgatctctttgtcaatgtcaggcactcttttcctttcttctcatattaccaatacgtgttgtgttttgctctagtgatccttctcatcttgcctgttttgtccatgtgtgtattgtgctgtagggtgaggatgaaaggggggttagtgatgatggagaaaactagtgtatcgtgtgctgtttgtttgatgaaatgtttaagccgggatcttaaatgttgaggaaaggattctccttcctcttttgctttgcgatattatggttgtttttagtattattgaaatatctcgttatatgcaatatagcggttgagttcatatgggtgaagtagccgtggcttgggaaacctaggtctaaggtagaaatgatgcgaggagtgcttaggtaaacatgtatgtctaatgggaatggggttcgtgatggtggagtaaacacgtcgtgtaacagagtttggtttgaggtgtatggtgatatgcctctatggtatgtcatgatttaggcaccgtagtgttcaggatgtagacgttctatttattgtgaattttaggtttaaggcacaagatatgtactgtataattgaatcgattctattttgagacatggtatttaagtgatgtgaatggaaatttagtgttttaagtaattagtcgattagttctgtcaatgttgtttgtgaggaattttgaggtgtgaggtagagcacattaggatcaccttttttgcaaactcacattttatgagaatgccaagggcaccacttgtctgtagcatgatgtccttcaggtaggcaatctagctggcttgaactcccttttttgcatcacttaatgttatccaggttttagcagtagctttcagagcaagcatatttattccaaatcattcttttacattataacactttcttaatagttttaaaattgttttctgcttttgcaccagcgttttaactccatacttcaaagaggaggtgctcttttcaccagaagatcttcataggaaaaatgaggatggtatatcaatactgttctacctacggaaaatatatccagatgaatttaggaacttcctttagcagatagattttaaactgaaggatgaagaagaacttaaagaaatgatggatgagatctgtaattgggcgtcttataggggtcaaattctcaccagaacagtaagaggaatgatgtactacagaaaggcacttgaaatccaatgccttcaagatatgacagatcctgctaaagttgaccaagacagaccaataggatcctaccaagggttgcaatctgatattgaaatggcacaagctattgttgatatcaaattcacctatgttgtctcatgtcaagtttatggcatgcaaaagaaatcaaaggatttaaatgaaaaaaggcgctatcagaatatcctcagtctcatgataatgaacccatcactacgagttgctttcattaatgaggtcgaagctccaaccagaaatggagcaactgagaagacatattattccgttcttgtcaaaggtggtgaaaagtatgatgagatattggagagggaaaacctgaaaaccaaaatcatggacttcatcaagtttgatgtcggcaacgtggtcatggtgaccggcgggaggaacaccgggcgtgtaggagtgatcaagaacagggagaaacacaagggcagctttgagaccatccatgtcgaggactccgtgggccaccagttcgccacccagatgggcaacgtgttcaccatcggcaagggcaacaagccgtgggtgagcctgcccaagggcaggggtatcaagctcagcatcatcgaggagcagaggaggcgcgatttcattgcccaggctgctgccaacgcataagttctctgaacgtgctgcttggagctttttgctatgtctagttttctcctatttgttgtacacgaaaagataggaaaagatagaatggaatttaaatttggtggccgcaaaagtgtggagacttaaattcatgtaaagttaggcttaacattagtgcaaacagttgtattttagtttagatttagagtacacttatgtatgagttgtttgacaatgcttatttatgagatattgaaaggtacttatttatattatattaattataatgttgttcaatata

SEQ ID NO: 43568 - DNA, 1687 bp, Zea Mays
gtcgcgccccctgtgccgcaacctcgccgaatcgtgcccctgctcctctccatccatggctgcgctcgacctccacttcaagccgcgccctgggatttgcacagaacctccatcccctcgacaccagttctcagctcctccgcctccctatgtttggtcgcctctctgttttccccatctggccgtcgttcttcagcccaggccatcatggcgccctctgtccaacacgccgttgtccactgcaagcttgccgactcgcccttctttagggtcgtcgccagcagctgctgctcctcctctcttcgccctgctgcgctctggtggtcgccagttcccagctcctactcaaccggtgtcaggctcggaccaccttgtcgcgttgctttttgttgtggccatctagtcgttgatgctcggtctcccctgttagcatcatcaaccgttcctggaccaaatcgttgccctctgatctctttgtcaatcgttttaactccatacttcaaagaggaggtgctcttttcaccagaagatcttcataggaaaaatgaggatggtatatcaatactgttctacctacggaaaatatatccagatgaatttaggaacttcctttagcagatagattttaaactgaaggatgaagaagaacttaaagaaatgatggatgagatctgtaattgggcgtcttataggggtcaaattctcaccagaacagtaagaggaatgatgtactacagaaaggcacttgaaatccaatgccttcaagatatgacagatcctgctaaagttgaccaagacagaccaataggatcctaccaagggttgcaatctgatattgaaatggcacaagctattgttgatatcaaattcacctatgttgtctcatgtcaagtttatggcatgcaaaagaaatcaaaggatttaaatgaaaaaaggcgctatcagaatatcctcagtctcatgataatgaacccatcactacgagttgctttcattaatgaggtcgaagctccaaccagaaatggagcaactgagaagacatattattccgttcttgtcaaaggtggtgaaaagtatgatgagatattggagagggaaaacctgaaaaccaaaatcatggacttcatcaagtttgatgtcggcaacgtggtcatggtgaccggcgggaggaacaccgggcgtgtaggagtgatcaagaacagggagaaacacaagggcagctttgagaccatccatgtcgaggactccgtgggccaccagttcgccacccagatgggcaacgtgttcaccatcggcaagggcaacaagccgtgggtgagcctgcccaagggcaggggtatcaagctcagcatcatcgaggagcagaggaggcgcgatttcattgcccaggctgctgccaacgcataagttctctgaacgtgctgcttggagctttttgctatgtctagttttctcctatttgttgtacacgaaaagataggaaaagatagaatggaatttaaatttggtggccgcaaaagtgtggagacttaaattcatgtaaagttaggcttaacattagtgcaaacagttgtattttagtttagatttagagtacacttatgtatgagttgtttgacaatgcttatttatgagatattgaaaggtacttatttatattatattaattataatgttgttcaatata

SEQ ID NO: 43569 - DNA, 1008 bp, Zea Mays
gagaaatctcattacgtttcgttcaagaaacaagtgttaactgttaagtagaacttttgagttgaagagattccactgcaaaatggaaatcgttacattatgttcctccttcagtgctaggtcagcatctaagatgtgatgaaaagtatgaacttgcaaaactaaaaaaaattcgaaggtgttatcaggaaaaactatgaatgcaacagctaactttttaaaatatgtaggtgagctccatttactgcacatatcaaattgactttccaattttcaccttgtccttcccaaggaaagagtttcatttcttgtaaatcatttcctccacaggatttcctgaaaggctacatcgaattgacagtctagtacctcctcttgtcagtttcaccttttttactttaggagagtaataagtagtcaccactcaccacagcaccttctccaaaaattagtggagaataagtagacatcaaactagatcgcccgaataaaatggcatagctttaacaaaaaatagctgcagatacgattctcttgagaaaatgaagggatattatgatgcccaatatctagaaaggttgggttgggttcttctggattatctggttcaccgcaaggaagagcatggtcctgacgaagcactccttcggcatgacgagctcggcaatccaatcgtattccgcgtcccggcaagtgaagcagaagcctgtcgactgaggctagttggttgcgtcctgtatgaagcggatatatctatctatgtgaatcacggttttgctgtttgtttgtttgtaagagtgtagaagacagcttgcttgttgcggcagctctgtttctctcggtgactaggtgtataatgctagctctgaactttggcagcatgtacgttcggcatggcggtcaatgctgttatttaaaggatagtgagcagatgttaatgtttatagcaaataaaagcatgttaatgtttattaaatttatcttgaatgaacttattatttctttatt

SEQ ID NO: 43570 - DNA, 941 bp, Zea Mays
gaatttgtatcggaattttatatctttcatttgagaagatataaatttgaggtttaaattttatgaatctttacaagctcatagctaaaaaacgataataccattttgcatagcagattttatatactatttattcgcaatcaaagaaaaaagaaaaaaggttgatatttatccgttccatccctatcagggccatatatgattacgaatctgttggggaaagtgaagaatgtttgcgaatctgttgggggaagtgaagaataggctgaattgtcgggacaatcacgcttatagcattgactggccttctgaccttcatgttcttcctattggttgccactgctaatgcgatcattgtctcagtcttgatgtcactggccgctgccggaggattcttggccatcttctttgcttgcttggttgcagtgtatattggagcagtatcagttgctatctttgtcatttctgcgactgttatctcagcagttgttggaattttggttgctaccggttgggttgggttcttctggattatctggttcaccgcaaggaagagcatggtcctgacgaagcactccttcggcatgacgagctcggcaatccaatcgtattccgcgtcccggcaagtgaagcagaagcctgtcgactgaggctagttggttgcgtcctgtatgaagcggatatatctatctatgtgaatcacggttttgctgtttgtttgtttgtaagagtgtagaagacagcttgcttgttgcggcagctctgtttctctcggtgactaggtgtataatgctagctctgaactttggcagcatgtacgttcggcatggcggtcaatgctgttatttaaaggatagtgagcagatgttaatgtttatagcaaataaaagcatgttaatgtttattaaatttatcttgaatgaacttattatttctttatt

SEQ ID NO: 43571 - DNA, 2186 bp, Zea Mays
aatccagcacagcgcatatccccatccgttcctgttcccctcggcgacgccagtacggcagtacgccacgccagtgcccagttgcattgactcctccccggtccccacatcttgccgccaatggatgtcgacgggcccgcccccgccgacgcctctgccaggcccgccaccaacggcgaggccccctccggcgcccgcgaggtcgacgtcggcgaggaggacacgctcgccggcgtcctccgcagcttcgtcgacggcgtctggtacccggacgagcctctgctccggcggctccgggcggcgtcctgcgacgccgcgccgcgcctgaggggggcgtcccggaactccgcgcgggacctgcttgagtggaccaggcggggcagcggcctccgcgccatcctcgtcatctcggtgggcgcgcgcctccttgatccgtcacatgagcatgggttttcttgccctgtttactaaatctggctctatcttctttagtttattttctgtaggtgattgcgtagcggttaactgtgccatggtcactattgcaatgttggtttagatttgtgctttttagatctcaggggcaaggatgaaagtgggtatccgaattgttagacaaatttaatattttaaaatagataggtatggaattttatgttaatctttttttatgttatcaagcatattattacagataagaataaaattttgtataaattgttttatgtattatttgctcctcacaaccgaaaaggtgaaaaaatatctgaatttgtatcggaattttatatctttcatttgagaagatataaatttgaggtttaaattttatgaatctttacaagctcatagctaaaaaacgataataccattttgcatagcagattttatatactatttattcgcaatcaaagaaaaaagaaaaaaggttgatatttatccgttccatccctatcagggccatatatgattacgaatctgttggggaaagtgaagaatgtttgcgaatctgttgggggaagtgaagaataggctgaattgtaatccctctgtcctgaaacctaatagatttaggttttctctaaaccaaacaaccataagtttaactaaattaacaattacaaaataagtattaacatctacgacctcaaataggtaaactataaaaatagatttcatattccttctaaaaattagatttcatagggtagcagtgtttttaatagtactcatttaataacgttgtttctaaaaaacttatctgacttaggttagtttgactttagacaactcaaaattaactgcatttgaagtcgaagggagcatgttgtaagcagaaacgaaaacatggtgaattacttctgctagcaatagaacatggtagattgcttttgcgtgtagttttgatcccataaactcttacatgatacctcgtttttttatggcatccattttaaaaattcttgaaaattgacagtaaacaatttttctaattttatctttgtttgatctggcaggtcgggacaatcacgcttatagcattgactggccttctgaccttcatgttcttcctattggttgccactgctaatgcgatcattgtctcagtcttgatgtcactggccgctgccggaggattcttggccatcttctttgcttgcttggttgcagtgtatattggagcagtatcagttgctatctttgtcatttctgcgactgttatctcagcagttgttggaattttggttgctaccggttgggttgggttcttctggattatctggttcaccgcaaggaagagcatggtcctgacgaagcactccttcggcatgacgagctcggcaatccaatcgtattccgcgtcccggcaagtgaagcagaagcctgtcgactgaggctagttggttgcgtcctgtatgaagcggatatatctatctatgtgaatcacggttttgctgtttgtttgtttgtaagagtgtagaagacagcttgcttgttgcggcagctctgtttctctcggtgactaggtgtataatgctagctctgaactttggcagcatgtacgttcggcatggcggtcaatgctgttatttaaaggatagtgagcagatgttaatgtttatagcaaataaaagcatgttaatgtttattaaatttatcttgaatgaacttattatttctttatt

SEQ ID NO: 43572 - DNA, 1466 bp, Zea Mays
caagcctccaatgagaccccacaaaatctctcaaacttgcacaagggctgtctggagcggtggctcagcgtgcacgacaatgattcaggaaggcgcattgaatccattttgttttctcaatttggatctattttcattcatttttatgtgatgttttgatccaataacctcttgttacatgataccttacctttggaattgcatctttttaaggaattcttgcaatttctcattcaataaaatgtcacccttttttggatctggcgggtagggacaatcacacttataacattgacaacctttctaatcattatgttcttcctgccggttgccattgctaataccatcatctcattcctgatgtcacttgcagctgctagaggattctttacttgcatagtggagatctatattggagcggtatcagttgctatatttgccatttgtgctactgtcatctcaacagttgtcggagttatgtttgctacctgtaaatcatctctattcccctgtaaaagatagtggtgtcattgatatgttaatatggaaacgatcttcaggctgcataatataaaaccttacagacttcctgaatctctaaccattatagaagatgttcgacacttctacgtcaaagttaattaatagtctaggatctgctgtcattttcgcttttttacttcaggaaagtaagtagtcgtcaaagcacttcccccacaaatttgtggatattaaatagacatcaaagtggatcacctggatggggaatgagtaggaggctagagaagagacaagctctgcttttcaatcgttcagcaaccatgtgtgggtccgagatgtcaagtacatacaacaccttagcaaggggaaggatcttgcatgtgccatggttagtgccatggtcaggaagatcatcgtgttagttctttaatgataacataagtagtatttcttatttacttcttatttattaaataatggtgaaaaactttggttagtctagcaaaaggcgttcatggataaaagtgttctaggacaaatataggtctagacctactttctttatatagtttaagtacttctacttatttgagcataatttaaaccataatccatctgagtagcattgtcttgatcgagaggtcatcttcctttccattggcccttgtttttctcattcaattacttttttctcaacgatcaataataacagcttttaaatgactaaaatgtataatgttgggcccttaataattgcctttgttttatctgtaaagcatccctagcatctgactgttgggccttaataattttattgattgattattttttaatctttatagaatgttttatcctctgcttatattctttgatgttatttttattcacttgcttatggtgatgatttctgttacacaggacgaaacataggtttataggaatcttctacaggaagtaactcaaag

SEQ ID NO: 43573 - DNA, 1521 bp, Zea Mays
ccccctcccctgttttccttcccatctcatcacaagcagaagaaaatcgagataacgagagctagggttttgattccagtactcacgccgcatcctgtctccttctgcccctccctctcggcaccgcctccgccccctcattctctctcgcgtcatccggcggaggctcgaggaaactgaggccgggagcgccccgaagaatattctccacccagtcgccgacacccctgcgcgcgcgagagtaagtcgcctcccccgccgccagtgctcttcgtgatgatatatttccagatccggtttgtccgacgcagatggtagggctggagaggctgccgatgtggtattgaagagggatttagatgcatgaattttgtgttcgtaacgtggattggtgtggggtgggagaggctcctttgccggattggccaggttaccattgtactgttgtagcttggcagttggttgactgtgtgacaactttgagctatgtcatattacgaaagaaggggtggagacaggggtagtggccgtattcaaggaagtggtgggcgaggtggacatgtcctgcgtggaagatcaggattggctccccgaggacctcttggggttaactcccgtccatctgcacgcactattgctaagtcatttagcagaaccaaagacatgacatggcgacctgatctatttagtgatagcatggcggctagtggaatagaaactggtacaaaattgtacatttcaaacttggactatggggtctctaatgaggatataaaggagctgttttcggaagttggtcatttgaaacgctttgctgttcactacgatggttatggccgcccaaataggtggtgtttacacggaggagcgatgcaattgctgcactgaagcgttataataatgttctacttgatggaaaagctatgaagatagaagtcatcggaaatgacttaggattgcctatgacacctcgtataaatgttgttggggcttctaatggcagagctacaagaacagttgttatgacgcctgagtttagtcaacgtggcagaggttcaagcagtagacctctaagcaacaggtttaataaccgtggtggtttccaagctggtcgaggccgtggccagttccagagctgggggagaggccgtggtcagttccagagccgggggagaggccgtgcccagttccagggacgagggagaggcaggaagcctgagaagactgcagatgagctggataaagacctggaaagctatcacgcggaggcaatgaaaaccgattgattgcaaggccggtagtgccacaaggttgtggttttatccatcattttctgggagcaacgaacatgctttgtgctttggtttcaggagactagactcttgtagtaaattcgaacaaaagattgccagtttgtagtgtttgcatgaagtttgcaacctgatgtgtttatttttgtatcggttgctttggagattgtgttaatttttaggttcatgcttagaataaccgtaaacaaaa

SEQ ID NO: 43574 - DNA, 1368 bp, Zea Mays
acggccaggatcgctcccggggtcaccgagtacgaacccgcgcgacctctctcccgagtctactactctacccggccagccccctcccctgttttccttcccatctcatcacaagcagaagaaaatcgagataacgagagctagggttttgattccagtactcacgccgcatcctgtctccttctgcccctccctctcggcaccgcctccgccccctcattctctctcgcgtcatccggcggaggctcgaggaaactgaggccgggagcgccccgaagaatattctccacccagtcgccgacacccctgcgcgcgcgagagttaccattgtactgttgtagcttggcagttggttgactgtgtgacaactttgagctatgtcatattacgaaagaaggggtggagacaggggtagtggccgtattcaaggaagtggtgggcgaggtggacatgtcctgcgtggaagatcaggattggctccccgaggacctcttggggttaactcccgtccatctgcacgcactattgctaagtcatttagcagaaccaaagacatgacatggcgacctgatctatttagtgatagcatggcggctagtggaatagaaactggtacaaaattgtacatttcaaacttggactatggggtctctaatgaggatataaaggagctgttttcggaagttggtcatttgaaacgctttgctgttcactacgatggttatggccgcccaaatggcactgcagaggtggtgtttacacggaggagcgatgcaattgctgcactgaagcgttataataatgttctacttgatggaaaagctatgaagatagaagtcatcggaaatgacttaggattgcctatgacacctcgtataaatgttgttggggcttctaatggcagagctacaagaacagttgttatgacgcctgagtttagtcaacgtggcagaggttcaagcagtagacctctaagcaacaggtttaataaccgtggtggtttccaagctggtcgaggccgtggccagttccagagctgggggagaggccgtggtcagttccagagccgggggagaggccgtgcccagttccagggacgagggagaggcaggaagcctgagaagactgcagatgagctggataaagacctggaaagctatcacgcggaggcaatgaaaaccgattgattgcaaggccggtagtgccacaaggttgtggttttatccatcattttctgggagcaacgaacatgctttgtgctttggtttcaggagactagactcttgtagtaaattcgaacaaaagattgccagtttgtagtgtttgcatgaagtttgcaacctgatgtgtttatttttgtaaacaaaa

SEQ ID NO: 43575 - DNA, 1438 bp, Zea Mays
ccccctcccctgttttccttcccatctcatcacaagcagaagaaaatcgagataacgagagctagggttttgattccagtactcacgccgcatcctgtctccttctgcccctccctctcggcaccgcctccgccccctcattctctctcgcgtcatccggcggaggctcgaggaaactgaggccgggagcgccccgaagaatattctccacccagtcgccgacacccctgcgcgcgcgagagttaccattgtactgttgtagcttggcagttggttgactgtgtgacaactttgagctatgtcatattacgaaagaaggggtggagacaggggtagtggccgtattcaaggaagtggtgggcgaggtggacatgtcctgcgtggaagatcaggattggctccccgaggacctcttggggttaactcccgtccatctgcacgcactattgctaagtcatttagcagaaccaaagacatgacatggcgacctgatctatttagtgatagcatggcggctagtggaatagaaactggtacaaaattgtacatttcaaacttggactatggggtctctaatgaggatataaaggagctgttttcggaagttggtcatttgaaacgctttgctgttcactacgatggttatggccgcccaaataggtggtgtttacacggaggagcgatgcaattgctgcactgaagcgttataataatgttctacttgatggaaaagctatgaagatagaagtcatcggaaatgacttaggattgcctatgacacctcgtataaatgttgttggggcttctaatggcagagctacaagaacagttgttatgacgcctgagtttagtcaacgtggcagaggttcaagcagtagacctctaagtaatcccagcaacaggtttaataaccgtggtggtttccaagctggtcgaggccgtggccagttccagagctgggggagaggccgtggtcagttccagagccgggggagaggccgtgcccagttccagggacgagggagaggcaggaagcctgagaagactgcagatgagctggataaagacctggaaagctatcacgcggaggcaatgaaaaccgattgattgcaaggccggtagtgccacaaggttgtggttttatccatcattttctgggagcaacgaacatgctttgtgctttggtttcaggagactagactcttgtagtaaattcgaacaaaagattgccagtttgtagtgtttgcatgaagtttgcaacctgatgtgtttatttttgtatcggttgctttggagattgtgttaatttttaggttcatgcttagaataaccgtaattggccaaaacatgcacccggccctgttccgctctgcgatgtgccttcgcagcattgtgttatttttagcatattgcagtttgtcggaggttagtccggtgc

SEQ ID NO: 43576 - DNA, 2351 bp, Zea Mays
ccccctcccctgttttccttcccatctcatcacaagcagaagaaaatcgagataacgagagctagggttttgattccagtactcacgccgcatcctgtctccttctgcccctccctctcggcaccgcctccgccccctcattctctctcgcgtcatccggcggaggctcgaggaaactgaggccgggagcgccccgaagaatattctccacccagtcgccgacacccctgcgcgcgcgagagtaagtcgcctcccccgccgccagtgctcttcgtgatgatatatttccagatccggtttgtccgacgcagatggtagggctggagaggctgccgatgtggtattgaagagggatttagatgcatgaattttgtgttcgtaacgtggattggtgtggggtgggagaggctcctttgccggattggccaggttaccattgtactgttgtagcttggcagttggttgactgtgtgacaactttgagctatgtcatattacgaaagaaggggtggagacaggggtagtggccgtattcaaggaagtggtgggcgaggtggacatgtcctgcgtggaagatcaggattggctccccgaggacctcttggggttaactcccgtccatctgcacgcactattgctaaggcaaggccaaacctgtcactatgtttttgttcatggtcaggttcctgactaaagtagaaactgaatggggagagcatgcctaagcttacattatatggaggggcaggagtatctgtgatgtctgtgactaatgtgttctctgtcagtattgtttggaggcttggaggggcagatgcaactttggtagaaattttgcagtagatcataaggttgaatttattgaggggcagaagtaaatggtggtcatctctaatgggaattttgttggaacaccaccatttcttcaaacatatggaaggaaatagatgaaaaataaagctggcggactccagtttgatgtgtctaaatcatgatatgctgaagggaagactccatcaatcttcttgccatatatggaaattgcaatgtgccccttattcaacagttctggattccatactcccatggaagttcttctagtctgcttccatagcaagtgcacaagccatttgtctcctggacttttgtgatattggtggagctctttccttctcagctgttaacttaatgcagtacttcatggttttgctatttctcggttataattattgctactcttcctctaaagaccaatgataagtcaatgtggttcgtgatgattggcatgatcatatgaaaagtttgaagagatattcttttataatgacatgttccctcacatgcttggatgtttggcatttttcagtcatttagcagaaccaaagacatgacatggcgacctgatctatttagtgatagcatggcggctagtggaatagaaactggtacaaaattgtacatttcaaacttggactatggggtctctaatgaggatataaaggagctgttttcggaagttggtcatttgaaacgctttgctgttcactacgatggttatggccgcccaaatggcactgcagaggtggtgtttacacggaggagcgatgcaattgctgcactgaagcgttataataatgttctacttgatggaaaagctatgaagatagaagtcatcggaaatgacttaggattgcctatgacacctcgtataaatgttgttggggcttctaatggcagagctacaagaacagttgttatgacgcctgagtttagtcaacgtggcagaggttcaagcagtagacctctaagcaacaggtttaataaccgtggtggtttccaagctggtcgaggccgtggccagttccagagctgggggagaggccgtggtcagttccagagccgggggagaggccgtgcccagttccagggacgagggagaggcaggaagcctgagaagactgcagatgagctggataaagacctggaaagctatcacgcggaggcaatgaaaaccgattgattgcaaggccggtagtgccacaaggttgtggttttatccatcattttctgggagcaacgaacatgctttgtgctttggtttcaggagactagactcttgtagtaaattcgaacaaaagattgccagtttgtagtgtttgcatgaagtttgcaacctgatgtgtttatttttgtatcggttgctttggagattgtgttaatttttaggttcatgcttagaataaccgtaattggccaaaacatgcacccggccctgttccgctctgcgatgtgccttcgcagcattgtgttatttttagcatattgcagtttgtcggaggttagtccggtgc

SEQ ID NO: 43577 - DNA, 1627 bp, Zea Mays
ccccctcccctgttttccttcccatctcatcacaagcagaagaaaatcgagataacgagagctagggttttgattccagtactcacgccgcatcctgtctccttctgcccctccctctcggcaccgcctccgccccctcattctctctcgcgtcatccggcggaggctcgaggaaactgaggccgggagcgccccgaagaatattctccacccagtcgccgacacccctgcgcgcgcgagagtaagtcgcctcccccgccgccagtgctcttcgtgatgatatatttccagatccggtttgtccgacgcagatggtagggctggagaggctgccgatgtggtattgaagagggatttagatgcatgaattttgtgttcgtaacgtggattggtgtggggtgggagaggctcctttgccggattggccaggttaccattgtactgttgtagcttggcagttggttgactgtgtgacaactttgagctatgtcatattacgaaagaaggggtggagacaggggtagtggccgtattcaaggaagtggtgggcgaggtggacatgtcctgcgtggaagatcaggattggctccccgaggacctcttggggttaactcccgtccatctgcacgcactattgctaagtcatttagcagaaccaaagacatgacatggcgacctgatctatttagtgatagcatggcggctagtggaatagaaactggtacaaaattgtacatttcaaacttggactatggggtctctaatgaggatataaaggagctgttttcggaagttggtcatttgaaacgctttgctgttcactacgatggttatggccgcccaaatggcactgcagaggtggtgtttacacggaggagcgatgcaattgctgcactgaagcgttataataatgttctacttgatggaaaagctatgaagatagaagtcatcggaaatgacttaggattgcctatgacacctcgtataaatgttgttggggcttctaatggcagagctacaagaacagttgttatgacgcctgagtttagtcaacgtggcagaggttcaagcagtagacctctaagcaacaggtttaataaccgtggtggtttccaagctggtcgaggccgtggccagttccagagctgggggagaggccgtggtcagttccagagccgggggagaggccgtgcccagttccagggacgagggagaggcaggaagcctgagaagactgcagatgagctggataaagacctggaaagctatcacgcggaggcaatgaaaaccgattgattgcaaggccggtagtgccacaaggttgtggttttatccatcattttctgggagcaacgaacatgctttgtgctttggtttcaggagactagactcttgtagtaaattcgaacaaaagattgccagtttgtagtgtttgcatgaagtttgcaacctgatgtgtttatttttgtatcggttgctttggagattgtgttaatttttaggttcatgcttagaataaccgtaattggccaaaacatgcacccggccctgttccgctctgcgatgtgccttcgcagcattgtgttatttttagcatattgcagtttgtcggaggttagtccggtgc

SEQ ID NO: 43578 - DNA, 1098 bp, Zea Mays
cacatttttgctctcttgggatttttggggtttccagaggcacaaattgttttcattccagtgggccaacgatcggaggcgccaccatcgcacaatccaccgtcgttgcctgctcctggtaatactctcacaagatccgctgctacatccatttcttcttcttccacgttgctgggaggagacgggcgcaaaggatttgtgcgagggagaaagaaagggaaggaaaggggataggacgggaggaggagcacgactgcttaccacgggtcgcagaggtagcaaggaagcttggaatactagtcatcgctgatgaagtgtatggaaacctggtgtttggggacaccccttacgtcccaatgggtgtctttggccacattgccctgtcttgagcataggatcactatcgaagagatggatagtgcctgggtggcgacttggttgggtagttgtatgtgatcccatcaggattctgcaagaaaccaagatcattgcatcaataacaaacttccttaacgtttcaactgatccggcaacttttgttcagggagcacttccccatattcttgggaacacaaaggaagatttttttcaggaggatcattggtctgctagcagaaacctcagagatatgttacagagaaataaaggacatcaagtgcatcacctgccctcacaagccaaaaggtgaaattaaatttgtatcttttggaggggattcatgacgatattgatttttgctgcaagctggcaaaagaagagtctgtgattttgtgtccagggtgttctcgacaaagaaagcttgtaccttaaaacaggaggatacaagaagctggagtggttgtctgaaggcttttgaactgcttgaagcattagtgtagctttggtgcttttgtgactgatcaactctggagcaactagagtgtagttgtgggcttttgaacaatagttggagtgatatgaaacattgtgatgcttttgtgaatatataattgtggtgcttttgtgtttatgtgatggatttataactgtggtatactgattaattatgtatatctttatgatttgtgtataaaaatctgtgatttgtggtgcttaatt

SEQ ID NO: 43579 - DNA, 1218 bp, Zea Mays
atgggtgatagacgtgattggatgtatgaaggtttcaagaagggtgggtgtcacacaagtgaatggtttgccaagacgcagatgtttctggaccatgcaactgctttgtcacaaatagataatattaggtgtccatgcaataaatgtagaaatatgacaagccacaccaagaggcaggtcacactacacctgtgttcgcatggtttcgtgccaggctataaggtctggtatctccatggtgaagatgttgaacgagcaacagaagtagaagttgatgacggtgaagatgatgttgataggatggaccagatgcttgaggatctgcagcctgaactggcaccagatcatcatgattcacctacaccggaggtcgcagaggtagcaaggaagcttggaatactagtcatcgctgatgaagtgtatggaaacctggtgtttggggacaccccttacgtcccaatgggtgtctttggccacattgccctgtcttgagcataggatcactatcgaagagatggatagtgcctgggtggcgacttggttgggtagttgtatgtgatcccatcaggattctgcaagaaaccaagatcattgcatcaataacaaacttccttaacgtttcaactgatccggcaacttttgttcagggagcacttccccatattcttgggaacacaaaggaagatttttttcaggaggatcattggtctgctagcagaaacctcagagatatgttacagagaaataaaggacatcaagtgcatcacctgccctcacaagccaaaaggttccatgtttgtcatggtgaaattaaatttgtatcttttggaggggattcatgacgatattgatttttgctgcaagctggcaaaagaagagtctgtgattttgtgtccagggtgttctcgacaaagaaagcttgtaccttaaaacaggaggatacaagaagctggagtggttgtctgaaggcttttgaactgcttgaagcattagtgtagctttggtgcttttgtgactgatcaactctggagcaactagagtgtagttgtgggcttttgaacaatagttggagtgatatgaaacattgtgatgcttttgtgaatatataattgtggtgcttttgtgtttatgtgatggatttataactgtggtatactgattaattatgtatatctttatgatttgtgtataaaaatctgtgatttgtggtgcttaatt

SEQ ID NO: 43580 - DNA, 1130 bp, Zea Mays
ggatttgtgcgagggagaaagaaagggaaggaaaggggataggacgggaggaggagcacgactgcttaccacgggtcgcagaggtagcaaggaagcttggaatactagtcatcgctgatgaagtgtatggaaacctggtgtttggggacaccccttacgtcccaatgggtgtctttggccacattgccctgtcttgagcataggatcactatcgaagagatggatagtgcctgggtggcgacttggttgggtagttgtatgtgatcccatcaggattctgcaagaaaccaagatcattgcatcaataacaaacttccttaacgtttcaactgatccggcaacttttgttcagggagcacttccccatattcttgggaacacaaaggaagatttttttcaggaggatcattggtctgctagcagaaacctcagagatatgttacagagaaataaaggacatcaagtgcatcacctgccctcacaagccaaaaggttccatgtttgtcatggtgaaattaaatttgtatcttttggaggggattcatgacgatattgatttttgctgcaagctggcaaaagaagagtctgtgattttgtgtccaggtgagatggatttgatttgttggaaaaaatcatatctgacaaaaactcattttggctctagcagttgtctgttttgggttacaggtattccaggcctaaactgtatgtttgcgctcagaaatgctttaagaaaacagtgaattaatgctggaatacaatcatgaatcatcttttgttcatatgagaaaaatgtaatataggagattcactaatatataaatgaggggtgattctcctttatcaacaacttataaatgttactgacgaatagacagagagatatactccttggtaacttgtgagattttgggagtagcttttacaactaggcttaagtgtctaactgtttaggatagacatttggatatttgttactctgaggcactggttaagattctcatcttaaattgatatcagcatttaatcatacatacatgtgttactctgaggcattatttggcgttttttatggatatggagcatgaaaaactaaatgcaaagaatagtactttttacgtctatgattt

SEQ ID NO: 43581 - DNA, 1267 bp, Zea Mays
gtcgttccttgcttccacatttttgctctcttgggatttttggggtttccagaggcacaaattgttttcattccagtgggccaacgatcggaggcgccaccatcgcacaatccaccgtcgttgcctgctcctggtaatactctcacaagatccgctgctacatccatttcttcttcttccacgttgctgggaggagacgggcgcaaaggatttgtgcgagggagaaagaaagggaaggaaaggggataggacgggaggaggagcacgactgcttaccacgggtcgcagaggtagcaaggaagcttggaatactagtcatcgctgatgaagtgtatggaaacctggtgtttggggacaccccttacgtcccaatgggtgtctttggccacattgccctgtcttgagcataggatcactatcgaagagatggatagtgcctgggtggcgacttggttgggtagttgtatgtgatcccatcaggattctgcaagaaaccaagatcattgcatcaataacaaacttccttaacgtttcaactgatccggcaacttttgttcagggagcacttccccatattcttgggaacacaaaggaagatttttttcaggaggatcattggtctgctagcagaaacctcagagatatgttacagagaaataaaggacatcaagtgcatcacctgccctcacaagccaaaaggttccatgtttgtcatggtaatcaatttactaaattatatgttgttatagtggttgaacaggaaaaaaatagtaatacaaatgaaacagttgagcactatgttagaacaatcagcatctgaaatggtattccaggcctaaactgtatgtttgcgctcagaaatgctttaagaaaacagtgaattaatgctggaatacaatcatgaatcatcttttgttcatatgagaaaaatgtaatataggagattcactaatatataaatgaggggtgattctcctttatcaacaacttataaatgttactgacgaatagacagagagatatactccttggtaacttgtgagattttgggagtagcttttacaactaggcttaagtgtctaactgtttaggatagacatttggatatttgttactctgaggcactggttaagattctcatcttaaattgatatcagcatttaatcatacatacatgtgttactctgaggcattatttggcgttttttatggatatggagcatgaaaaactaaatgcaaagaatagtactttttacgtctatgattt

SEQ ID NO: 43582 - DNA, 1854 bp, Zea Mays
ctcgtccgtcttaaatctcgcgaataaataagcaagcaggagaaagtggtttagagagagtgagagagagagggggagagaaaggttaaggaatccgagctaaggcgccgtttcttctcctcctgcttttttcttctcggcaccgtcactggagggagaggattcacgggacgaggcgacgcggaagggatttcgtcgcttgtgtgggcggcgcgtccgctggttgctttgcttccatggagagggatttcctgggtgcgatcgacagggcgtggaagtgcggcgaggcggcgaaggaggagagccgatcggagccagacagcccggcggcgacgcggtggcagtttgcggcgaggtccggcgtcgcgccggcgttcatgtcgttcaggacggaggcgacgggcgagggctctgaggcgttctcggtctccgagctccggccggccggagacgccttcgacggcatcaagaagcagagctccatgctttcgatctaccagcagcagaggcagtttggccacaacagcagccaggccacggcacagcagcagtaccctgcagcggcgcacaggcagcgctcgcaggtggcggattacggcgcggcggcaccgcatcgtctccctggtggtggtggtggtggatgcaggctagtgcagccggtgtcggtgcgccaccctgtgccgttccatcaggccaacctgatggtcaggtcatcagtgtcgcagagcttccacaaccagcagcagcctttcaccatgagcaacaacgggtttggcggctctacggccggcgtgtacggggcgaggaacccacggaaccaggcctcgacgcagctcacgatattctacaacggctcggtgaatgttttcgacaacgtcccggtcgacaaggctaaagagctcatgatgctggccagcagggcgtctgttcctggtgctaccccgtcaagtgagccggactcgccgcctgttcctgcccctgcccctgccaaggtcaacgtggccgaggtcttccctggtgctagacagatcgcagttcagaaaccggagccctgcgtgccgcatctatcaagcgcggcaactgcaagcccagtccgcatcgtcgtgccgcaagccgtggctccctccaggagcacgtctcactgcgctacagaggcctgcggttccaagcctgctgctgctcctaccagccagacagtctcgtcgtcccggcagttggcagctgcaagtgctgctgcagctgttacgccaagagctgtccctcaagctcggaaagcgtcgctcgcccggttcttggagaagcgaaaggaaagagtggctagcgtcgagccatacctgacgtccaactccaagagcccgctagagagcagtgacgccgtcggcagcgctagcgctccaacgaaatcgtcatccacagacgtcgccccggcgagcagccacaacggcggcggcgcagagcttgtgcgccatggcggatatcccaggagcatcagcttcagcacaaatttgcagatctgactctggtgttgctgtccatagactaccactaccactacgactccgtgtccgtgagcgcgcccctccctacccatcgacacgaaagctggatagctgtcttgctttgcatccggatgaggcgggaggtataggaagatacgatgagatgagagtataaagatgctgagtgctagcctagccgcccgctgtatagcttttgcagcgcgctgctgacaagatcgagggccgtgacctactcgtttcaggctcttcttgaatggtccttactgactcggaagtggtacatggagctggggaggggggctacgtttcggacagaacagataacaagttgaag

SEQ ID NO: 43583 - DNA, 1813 bp, Zea Mays
agagagagtgagagagagagggggagagaaaggttaaggaatccgagctaaggcgccgtttcttctcctcctgcttttttcttctcggcaccgtcactggagggagaggattcacgggacgaggcgacgcggaagggatttcgtcgcttgtgtgggcggcgcgtccgctggttgctttgcttccatggagagggatttcctgggtgcgatcgacagggcgtggaagtgcggcgaggcggcgaaggaggagagccgatcggagccagacagcccggcggcgacgcggtggcagtttgcggcgaggtccggcgtcgcgccggcgttcatgtcgttcaggacggaggcgacgggcgagggctctgaggcgttctcggtctccgagctccggccggccggagacgccttcgacggcatcaagaagcagagctccatgctttcgatctaccagcagcagaggcagtttggccacaacagcagccaggccacggcacagcagcagtaccctgcagcggcgcacaggcagcgctcgcaggtggcggattacggcgcggcggcaccgcatcgtctccctggtggtggtggtggtggatgcaggctagtgcagccggtgtcggtgcgccaccctgtgccgttccatcaggccaacctgatggtcaggtcatcagtgtcgcagagcttccacaaccagcagcagcctttcaccatgagcaacaacgggtttggcggctctacggccggcgtgtacggggcgaggaacccacggaaccaggcctcgacgcagctcacgatattctacaacggctcggtgaatgttttcgacaacgtcccggtcgacaagggcgtctgttcctggtgctaccccgtcaagtgagccggactcgccgcctgttcctgcccctgcccctgccaaggtcaacgtggccgaggtcttccctggtgctagacagatcgcagttcagaaaccggagccctgcgtgccgcatctatcaagcgcggcaactgcaagcccagtccgcatcgtcgtgccgcaagccgtggctccctccaggagcacgtctcactgcgctacagaggcctgcggttccaagcctgctgctgctcctaccagccagacagtctcgtcgtcccggcagttggcagctgcaagtgctgctgcagctgttacgccaagagctgtccctcaagctcggaaagcgtcgctcgcccggttcttggagaagcgaaaggaaagagtggctagcgtcgagccatacctgacgtccaactccaagagcccgctagagagcagtgacgccgtcggcagcgctagcgctccaacgaaatcgtcatccacagacgtcgccccggcgagcagccacaacggcggcggcgcagagcttgtgcgccatggcggatatcccaggagcatcagcttcagcacaaatttgcagatctgactctggtgttgctgtccatagactaccactaccactacgactccgtgtccgtgagcgcgcccctccctacccatcgacacgaaagctggatagctgtcttgctttgcatccggatgaggcgggaggtataggaagatacgatgagatgagagtataaagatgctgagtgctagcctagccgcccgctgtatagcttttgcagcgcgctgctgacaagatcgagggccgtgacctactcgtttcaggctcttcttgaatggtttttttgtcgtggtccattgttgtatattattcaacttgagaaacagagagtgctgctctgtctctgataaaagtttatatgaaattgataaaaagtttctgctttttccaaacaa

SEQ ID NO: 43584 - DNA, 280 bp, Zea Mays
ccacagatgacagacccacacacacacactctctctcttcgcagacacaaccaaaagaccaaggtggaaaaatagtaaagaaacggagcgaggctcctccgcatttcttatctatcctgatccaaaccctccgagggggaaacaattcattccgcacggcatccgggaaggtctgcgtcgtcgccatggccaccgaggaagtcgccaagccgtccccgatcccgccctaccccgagtgagctaaccgacggcgcgtcgtgttggttgggcgttccggcag

SEQ ID NO: 43585 - DNA, 1203 bp, Zea Mays
cgtccttcctgtgcatgtcgtctagtctagcagcttgctggagctactagcattggacgacgacgtctcgaggtctcatgcgcagagacgtctatatatatgcaaaaaaaaaggcgatgctgcgtgctccgtaccgggctctttgtcaggtaaacagcccttggattcgggcctcgagttcgttgtctgttcgacctcgcattcacctgaacccactgcagaacccggatacatggttggaagttggaaccacatgaaacatattctgaaaaaaaaaataaaccctccttttgcgatgaactcatgtacaacaatttcacacctacctgttttcaatatataaaataagataatattgtagatctatctaactcgaattttcttgtatgcacagtacagtagggtgtgcagagctttccacttttctgtggttgtagggagtagattctgtggtttaaaccgtttgttagccgtttcgtttaacagggattgggatctgagactattccggctagtcaatgctaatataaataaacctatcattctagctggaactaaccattccaacggaaccgttccggtataaacgaagaacaagcctttattaggaggtagacaacgatttaagacacactaagcttaggtcatgtttgtttgtgctttttcagattctggccacaaaagactgttgcgtcctaacaaatgttcttgattttcagcccgcttctataagaatcgttttggtaaaaattgttcaaaatcaatatgaacatagaatcagtcgagtcgtcatgatagtagaaattcatcactttttagatcttgaattttttagaccacttcattttactccgcacgtaatactcacgatatacatattcttcttacagttagattctctctacagctatattctcagaaaagctaatctgaaaaaagctaatcaataggtcatatatatcttttcctaccgcgcagctcatcttcattattctcatgccgacatcaacgaaaccggctgcgttgatgttcaccaacgaaacgcccaaagcaatacatagatctcagtccaacggtgttcatgtggattttttgtggggtatccatgtggaaaattgatgtggtgttaacgtacttaggtttctcggttctttttaatttttaaacataacttatacatttagaaaagccagaacatcatat

SEQ ID NO: 43586 - DNA, 1409 bp, Zea Mays
gggaggtcctgcaggttgacctgcccaaggaaccgaaaccatagttgtcttgtaaaaacacaatctgccagcagatggtcaattgtttccggttcctggtcacaaagagggcaactatcaggatgctcaagccctcgtttttgtagccgatctgctgtccagcagctttggagggcagcaagccacaagaaaaatttacattgagagtccatgattagaatgaactagttgaaaggaccgaatgacccagaattccagattatcactttgagagttcatggacctagatgagaatgtgggaaaagtttggaccagcagtgcatttctttctagtataaatatgatttgtttggctttggcaaccatgtgcaacgtatgggtttaattggttcagtagtctatgttttgttataatgtttcacaacatggcttatgtagtgaactagtgatgatactaatgtatatgaagacagttatcctgctgattgaaatggccagcgtgatctttgatgtccttagtttagttaagtagatgacgattcaatccagccacaggtcccccctatggcttccctgacccaagtcgaagaccccatcatgttatgcaccaataggaccaccaaatgtcttcgtgtcactaatggtagacagaattcaatgcgtgatcattggtccatgctttgggcgaaaccaattccatggcgtgttcatggcctgggtacatattcattgatgcatgcaaatcctattcacttgggagtagtatgtgagccatttgccctgatgcttcactcctgatccataaatacatgaaagtgaaacagtattttcccccatatgtgctgtggatagtggcgattttctggaacttgggactcttttatgcttcatggcaagatggaggccctagttttgttgtgtgcgtgataacctgaaacttccaagtaagattccatgctgtcgtacacatttgttgctcacattttaaatggatgccatattctgcatctcaattgatccctttgttattatggtagcagtattgtttatgctgaattgcagtggtcaagctaggaaaggtaacaaaatgggttagaaatgaaaaaaagtgcttgtagtagtcattaatccgattcttctatactgctgctgtagtgcatagcaagcttttagaagcttaataattctttagctttggatacattcaccacattctaggctgctgcactagttttagttttaggtgtctggggaccagtacttggattttaactggtgttccctgcaattttcaccaggtgttatcatgaagcacgttggagcatagaaaaaaattcaaggggaacatagatgttccactgcaatcatcgttatctatggatcaaaccagcatccaagctcaggggaac

SEQ ID NO: 43587 - DNA, 5505 bp, Zea Mays
tggtagttcgtcagtactgggttcaactcagacagagggaccttggttttggtttagcttctggctttcattgcacgctgcaggataagattgcttgtttgtatgcgctgggctggaacctggaattcggaacttctttctgaattgtactgggagggttcaagtattgactgatgatgggtgaccagtggtggtggcatggctgcggaggcgttctgtagtttttttacctcttgcttatgtgcatgctatgtggactgatgctattattcttcaaacagtaccataagctttggtggtgtggtgctgaataccaaccttatgttgtttttgttttccagagggatcaattggatccaagggtgcgattgatgtgaatagtttatctgtttccacagaaatagcaggaaggccatctgatttaatgatcaaatcttgtacttgcactggaaggttatcatcttcttcagctcataatcttacagacacatatatttcaatgacctgcaaaagctgtactggtgaatcaacagaagacagaggtgggccatcgtgtagcggcaagcttaacaatatgggtttggagctcccaaggcctatagatcttgaggttaaatggatgactgtaaaaaaaaggcaaagggacaccaggagagcaagggcttcctttggcgaagacacaagcagggatggaattggatctttctgtttatctggctgtgctacaaatcaagagatggcgcaagacgctccagtctctgaatctgagaagtttggagtatccattcttggtagacgctttagtgatcccatggaaaatgttcctataaaaaagagaagatttcatatggatttttctccatcacctccattcactccattgctagtggatccatatgaaaagataccgggaagctcttctaaagctgtcagatcatatgagaaacattataagcttaagacgcaacaaattgagtataaggtgggaaacaaaggtcgttttggtgacgatgatttttctggtattgatatactagcttctgctgcctgtgaaagtgagatgagtggtggaatattagatggggagtgctcaacgttagctcacctcccagaagaaaggaaactggagaatactactggtagcagcaaattgagtctattacataacatggaggatacgttaaatattcctggtacttcacattgcatatatgatatgcctcttgggtcttctagatctgctccagatatgaagtccttatttgttgccacaccaactatcttagaaaatcttgttgaatcggcatctgctcccaaggttaattgttcattatattctgcactgaacaatgcaaacgaaatagagattgtttctgatgctaagtctacaagtgttgcaattgcaaacagttcagacaatccagaaaaaactataggatgtttaaaggatacagttgtgcaaaccaaccatgccaatgcgactaatgccaagtctacaagtgttgcaattgcaaacagttcagacaatccagaaaaaactataggatgttcacaggatacagttgtgcaaaccaaccatgccaatgcgactcgtgattctaggctgcactgggatcttaatgttgccatggaggcatggggcactgattgcggtgctgttgaggatcctttagttgctactgtaagtgatcatgatgatgccagaaatgacatgaacaaaccagggacatctcatcattttgagtcaagagatggtagtgtagttgatcactctgttgacactcatatggatgatgcactgaaacacgtgtctgctaatacaaaggatacatgtgattctcctgctgacagtccgtctcacccttcgcgcaacttgcagctattggaatctggatatgtagggagtgatgcccttgctgaaacaatggatttgcctgaccagaagaatagcaggttcgcttcagctatggattcacatattagatctgatccagaaccagctcttatcatggagcattttgcttcagcttcacatgtggagaaaatcaatggttcgcatcccgaacctgttcaatgtgatggtttgtctaatatgtcttctgtgaatgtccatattggaagtaattcactccaaacaagtgaattgggcaccacattaaagcctttggctagcatattagtttctgaggaaagcaaaaaccttccaacagtaggcacttcccataaaaaggttactgactttggctggagtgataataagcttgaagaagcttctgaacaaagcatatctgaatctaagaaccaggagcttttggatgttgattcagaaactagtaagaagggtgaacatgacactggtatattttatgccaacgaaaggacaaaatatgcagaaaatctcattcatccagaggacaaccatggatcttctaattgtgatatggctcatgtacatgaagaaaatggtgctgttgcaatgattaattctaaagactctttaattacttgtgccaacagtagcactgtagagacatattacatttcagatgcagctcctcaggttcctgttcccagttcagaatgccacaaactggaatgttttactgatgcgggcagcactgtggattcaaaatctgcagcgcacagctaccagaatggttgcgaaaatgagcttgggaaggtcatatcaaatgttcgttcagatcaatgctatgaaactgacacatcacatattagcaaaaatctagctggggttgaaaaagtttatgtcgaggaggacgattctcaatatgaggatggggaacttagagaatctggtgattgttattgggtggatgatggttatgaagatgttaaacatgccaactggcattatcaggtatcagattacaagaatgaagaagctactcctggcctcacgtctctccatactgattctgttgcaaataatgtggttattcctgttgctaatgacaatggaccacaatctagaaaggaggacattgctgtttcacctgtgtcatctaagtgttcatggttaacaaactgcttagatggtggatctatagctgatggaaagtctcaaagtattcatttgagaggtgatactaacatgtatgggtcaaacccaagccgtgtagcagttagatctgctacaacagtaagccagtctgaaaggtgcaacgatgccctaggtgatatgttaaatatcagaatgaagaacacaggttgggatatgatgcctgaagatcaaaagcactctcaacatgatgcaagggatgtgactgattcgtctaatcggtgtgttttgagctcagatgcggctagagacgatgattcactgcaaaaaaagggactattgaatagagatcttcaaggagtggaacggcaaaaatcatttgacagaccccagaggaatgaattgagcagatctgacgatggttatggctcaggctcaaaatctggaagggcaatggactctcatggatcgcatgacatgtatggcacatcccgtcatgttcagacaagcgctcgggtggagtgggtggaaagttcaaaacgtcctcgttctactcggcacaaatcacctgaatattataattatggcacatcaggtccaaggaatgctgcagaagctgctgtggcaaagatgcagagcagtggctttgttgttgcacgtgatggcactttagtaagagctgttgatgctgcaaatgctggtcagatgcccagaaggatgcgaaatcctttaagtagctcatgccacctgatttctggatggggttccccagttgacagggatgaagcctgtgggatgtccagaggccccgtgcatgctaggaaagcatctccagagcgtcactttggtgcaaatagtaaccggtccagtcgatatggttctgaaatggagaaaaatcatactactgatgcaaatttgagttctgtccattgctcgctgtccagtagacaacgaggcaccccgacatctagagcatcacttaacctttcccgtgctcacagcagatctccttctgggtccaggtctcgatccccacatgattgggcacctaggaacagaggcaagatcatggcaaatggaggttcaactttatggaagcatagtagatctccacctaatcacatgactaaaggtgaaattggtagaatggcttcacctcggagacaacctggatatgatgatcgagctatgtgttacagtccactatcaagaaacaacacatactccaagaatgcttcgacatgggttgatggaaggaatggttcagcagtggatatttctgatgatcataataaaaggtattcaaggagaagctcacctctgagaattacctcacggaatgacagatttgatgtcatggactcccaaggacgaccaaggtctggagaattctaccgtccgacacaaggaagacttctttatggttacaatagggaaaataagcatggcagaaatggtgaagatggaagggaatgcactgatagatatgcgaataattctgtcaagcgatatgaccggagtggtgcagtaaagcaatttagaaatgatactggtgataaatttcggactcgtatttctgctcccagatcgccagatctccaaaggggggtgagtcctcggagatttgacagaagctttgagaggtagctgactagctggctgtgaatttgccttatagaactaaaatggaaaataaagacctgtctggatgattgagccaggaaatgttgcaaaaccttgatggagttcaatcataggggttgatggaggactcttggcagcactgtttttttttctgcttctgctgcatatattcaaggcacagaaatgttggaccatgcacttctgtacggggaattcagattaacttcataattttcctgtttcagtctgtaaatatttatgttggtagcagaattacaatcactcctttcagctttattatagctgttcttttttttaatttctgatactttatcatgtttgtcccttttgttttttcaatgggtattgtccctgtacgaggtccattttaacatgatgaatcaattaaattttgagctcaaacacttgtgtgctttttatacttatgtttttcatctggcattttgtatcatcttgttgccagtgtaaaatgttttatttgttgttgaatatacaataatttacagtggcctgtgaccatgttagacaacttttggatcagctgaggtgaataattttcttctttactctacattttctttcaatgccacaaaattgactttgatgtcttcttttcaggagaaaggtcagcttactgcttttgtacatcaaagaggataccacggtattttggccataattagttttgttccatttacgagtatttataataacaactgctttctggagtactggaggaagtctctgaccatctatattcctgccgttgcaaggattagcatgccatttttaaaaaaaatgtatacaagggaataaggaac

SEQ ID NO: 43588 - DNA, 5528 bp, Zea Mays
ctccccccacccgctggcggcgaagtagcacgaggaaggggtccaataaaaaaaaaaatcgccaccggcggcgacggcgaggcggcatcagcggatacagcagcgggagccgcggcaggggacaggcgttgccgatcgatcggcctggcctggcgcggcagaggtcaaaagcgaaaaggaggagccgcaggaatttcttggcaccgaggcgcacgcaaggaatccagcgagtgagggatgggacggcagttttcggattcttcctgctgagtcctaggaactcacgcgcacgagcgtggtcaggagggagaggcttacgcggacgcggcggcgctggttttgatgaggaaagctggagcaaaagagggatcaattggatccaagggtgcgattgatgtgaatagtttatctgtttccacagaaatagcaggaaggccatctgatttaatgatcaaatcttgtacttgcactggaaggttatcatcttcttcagctcataatcttacagacacatatatttcaatgacctgcaaaagctgtactggtgaatcaacagaagacagaggtgggccatcgtgtagcggcaagcttaacaatatgggtttggagctcccaaggcctatagatcttgaggttaaatggatgactgtaaaaaaaaggcaaagggacaccaggagagcaagggcttcctttggcgaagacacaagcagggatggaattggatctttctgtttatctggctgtgctacaaatcaagagatggcgcaagacgctccagtctctgaatctgagaagtttggagtatccattcttggtagacgctttagtgatcccatggaaaatgttcctataaaaaagagaagatttcatatggatttttctccatcacctccattcactccattgctagtggatccatatgaaaagataccgggaagctcttctaaagctgtcagatcatatgagaaacattataagcttaagacgcaacaaattgagtataaggtgggaaacaaaggtcgttttggtgacgatgatttttctggtattgatatactagcttctgctgcctgtgaaagtgagatgagtggtggaatattagatggggagtgctcaacgttagctcacctcccagaagaaaggaaactggagaatactactggtagcagcaaattgagtctattacataacatggaggatacgttaaatattcctggtacttcacattgcatatatgatatgcctcttgggtcttctagatctgctccagatatgaagtccttatttgttgccacaccaactatcttagaaaatcttgttgaatcggcatctgctcccaaggttaattgttcattatattctgcactgaacaatgcaaacgaaatagagattgtttctgatgctaagtctacaagtgttgcaattgcaaacagttcagacaatccagaaaaaactataggatgtttaaaggatacagttgtgcaaaccaaccatgccaatgcgactaatgccaagtctacaagtgttgcaattgcaaacagttcagacaatccagaaaaaactataggatgttcacaggatacagttgtgcaaaccaaccatgccaatgcgactcgtgattctaggctgcactgggatcttaatgttgccatggaggcatggggcactgattgcggtgctgttgaggatcctttagttgctactgtaagtgatcatgatgatgccagaaatgacatgaacaaaccagggacatctcatcattttgagtcaagagatggtagtgtagttgatcactctgttgacactcatatggatgatgcactgaaacacgtgtctgctaatacaaaggatacatgtgattctcctgctgacagtccgtctcacccttcgcgcaacttgcagctattggaatctggatatgtagggagtgatgcccttgctgaaacaatggatttgcctgaccagaagaatagcaggttcgcttcagctatggattcacatattagatctgatccagaaccagctcttatcatggagcattttgcttcagcttcacatgtggagaaaatcaatggttcgcatcccgaacctgttcaatgtgatggtttgtctaatatgtcttctgtgaatgtccatattggaagtaattcactccaaacaagtgaattgggcaccacattaaagcctttggctagcatattagtttctgaggaaagcaaaaaccttccaacagtaggcacttcccataaaaaggttactgactttggctggagtgataataagcttgaagaagcttctgaacaaagcatatctgaatctaagaaccaggagcttttggatgttgattcagaaactagtaagaagggtgaacatgacactggtatattttatgccaacgaaaggacaaaatatgcagaaaatctcattcatccagaggacaaccatggatcttctaattgtgatatggctcatgtacatgaagaaaatggtgctgttgcaatgattaattctaaagactctttaattacttgtgccaacagtagcactgtagagacatattacatttcagatgcagctcctcaggttcctgttcccagttcagaatgccacaaactggaatgttttactgatgcgggcagcactgtggattcaaaatctgcagcgcacagctaccagaatggttgcgaaaatgagcttgggaaggtcatatcaaatgttcgttcagatcaatgctatgaaactgacacatcacatattagcaaaaatctagctggggttgaaaaagtttatgtcgaggaggacgattctcaatatgaggatggggaacttagagaatctggtgattgttattgggtggatgatggttatgaagatgttaaacatgccaactggcattatcaggtatcagattacaagaatgaagaagctactcctggcctcacgtctctccatactgattctgttgcaaataatgtggttattcctgttgctaatgacaatggaccacaatctagaaaggaggacattgctgtttcacctgtgtcatctaagtgttcatggttaacaaactgcttagatggtggatctatagctgatggaaagtctcaaagtattcatttgagaggtgatactaacatgtatgggtcaaacccaagccgtgtagcagttagatctgctacaacagtaagccagtctgaaaggtgcaacgatgccctaggtgatatgttaaatatcagaatgaagaacacaggttgggatatgatgcctgaagatcaaaagcactctcaacatgatgcaagggatgtgactgattcgtctaatcggtgtgttttgagctcagatgcggctagagacgatgattcactgcaaaaaaagggactattgaatagagatcttcaaggagtggaacggcaaaaatcatttgacagaccccagaggaatgaattgagcagatctgacgatggttatggctcaggctcaaaatctggaagggcaatggactctcatggatcgcatgacatgtatggcacatcccgtcatgttcagacaagcgctcgggtggagtgggtggaaagttcaaaacgtcctcgttctactcggcacaaatcacctgaatattataattatggcacatcaggtccaaggaatgctgcagaagctgctgtggcaaagatgcagagcagtggctttgttgttgcacgtgatggcactttagtaagagctgttgatgctgcaaatgctggtcagatgcccagaaggatgcgaaatcctttaagtagctcatgccacctgatttctggatggggttccccagttgacagggatgaagcctgtgggatgtccagaggccccgtgcatgctaggaaagcatctccagagcgtcactttggtgcaaatagtaaccggtccagtcgatatggttctgaaatggagaaaaatcatactactgatgcaaatttgagttctgtccattgctcgctgtccagtagacaacgaggcaccccgacatctagagcatcacttaacctttcccgtgctcacagcagatctccttctgggtccaggtctcgatccccacatgattgggcacctaggaacagaggcaagatcatggcaaatggaggttcaactttatggaagcatagtagatctccacctaatcacatgactaaaggtgaaattggtagaatggcttcacctcggagacaacctggatatgatgatcgagctatgtgttacagtccactatcaagaaacaacacatactccaagaatgcttcgacatgggttgatggaaggaatggttcagcagtggatatttctgatgatcataataaaaggtattcaaggagaagctcacctctgagaattacctcacggaatgacagatttgatgtcatggactcccaaggacgaccaaggtctggagaattctaccgtccgacacaaggaagacttctttatggttacaatagggaaaataagcatggcagaaatggtgaagatggaagggaatgcactgatagatatgcgaataattctgtcaagcgatatgaccggagtggtgcagtaaagcaatttagaaatgatactggtgataaatttcggactcgtatttctgctcccagatcgccagatctccaaaggggggtgagtcctcggagatttgacagaagctttgagaggtagctgactagctggctgtgaatttgccttatagaactaaaatggaaaataaagacctgtctggatgattgagccaggaaatgttgcaaaaccttgatggagttcaatcataggggttgatggaggactcttggcagcactgtttttttttctgcttctgctgcatatattcaaggcacagaaatgttggaccatgcacttctgtacggggaattcagattaacttcataattttcctgtttcagtctgtaaatatttatgttggtagcagaattacaatcactcctttcagctttattatagctgttcttttttttaatttctgatactttatcatgtttgtcccttttgttttttcaatgggtattgtccctgtacgaggtccattttaacatgatgaatcaattaaattttgagctcaaacacttgtgtgctttttatacttatgtttttcatctggcattttgtatcatcttgttgccagtgtaaaatgttttatttgttgttgaatatacaataatttacagtggcctgtgaccatgttagacaacttttggatcagctgaggtgaataattttcttctttactctacattttctttcaatgccacaaaattgactttgatgtcttcttttcaggagaaaggtcagcttactgcttttgtacatcaaagaggataccacggtattttggccataattagttttgttccatttacgagtatttataataacaactgctttctggagtactggaggaagtctctgaccatctatattcctgccgttgcaaggattagcatgccatttttaaaaaaaatgtatacaagggaataaggaac

SEQ ID NO: 43589 - DNA, 1476 bp, Zea Mays
cttgcgtgctgtgctgcttgatctagttgcctgttcctggaagtttgttcttttaacaatatgtcgagggaggagaatgtttacatggccaagttggctgagcaggctgaaaggtatgaggagatggttgagtatatggagaaggtggctaagactgtagatgtggaagagctcactgttgaggagcgtaaccttctgtctgttgcatacaagaatgtgattggggctcgccgcgcttcatggcgcattgtttcttccattgaacaaaaggaggagtcccgtaagaacgaagagcatgtgaaccttatcaaggaatatcgtggcaagatcgaggctgaactgagcaatatctgtgatggaatcttgaagctgcttgactcccacctagtgccttcttctactgctgctgaatcaaaggtcttctacctcaagatgaagggtgactatcacaggtatcttgcggaatttaagactggtgctgagaggaaggaatctgctgagagcacaatggtggcctataaggctgctcaggacattgctctggctgagctggcacctacccatccgataaggctgggacttgctcttaatttttcagtgttctattatgagattctgaactccccagacaaagcttgcaacctggcaaagcaggcgtttgatgaagctatctctgagttagacagccttggtgaggagtcatacaaggatagcactctgatcatgcaactcctgagggataacttgaccctttggacatccgacctcacggaggatggtgctgatgagggcaaagatgccccgaaaggtgatgcaggcgagggacagtaatcttcggagggggtgcaaagttgttcgagccccaatgttttagatgctctatgctgtcgaagctgtgctgtgccattattgtagctgatttcgtctccattcacttcttttttcttgttagtaggctggtagtggtcgaattaatttgctttgtgttgccgctagtccatgtggactggtattgttcccctggatttatttggcaagcgtgtccgtgctcgctctagcgttttattgagcttttaaagtcatcgcattcttttttgattgcaatcagttattggctggatatgcggtggctgtttggatcagaagtacagccggagtttcctcaccggagcgtgtaacatgtggaaattggaaaccacgcaaacgtctctcttatttgtacccctgagtacatagggctttttttaacagcttttctgaaaagctgcgcttgtttggtttgacttttttctgaacagcttttctgaaaagctggctgtggggagaagctggtgattagaatctgggtgttggttcgcctgctgtggagagaagctggtggttaaaatctaggtgtttggatacacagattctgagattgtaagattgtagattctgattaaaaaaggaaacagataaaaacaccgaaccaacaag

SEQ ID NO: 43590 - DNA, 1518 bp, Zea Mays
cgctgcttcgccctgcccaccacagcatccgcagttccccgaccacaccgttcctccgagcccaggagcagccccgcgccaggagtttgttcttttaacaatatgtcgagggaggagaatgtttacatggccaagttggctgagcaggctgaaaggtatgaggagatggttgagtatatggagaaggtggctaagactgtagatgtggaagagctcactgttgaggagcgtaaccttctgtctgttgcatacaagaatgtgattggggctcgccgcgcttcatggcgcattgtttcttccattgaacaaaaggaggagtcccgtaagaacgaagagcatgtgaaccttatcaaggaatatcgtggcaagatcgaggctgaactgagcaatatctgtgatggaatcttgaagctgcttgactcccacctagtgccttcttctactgctgctgaatcaaaggtcttctacctcaagatgaagggtgactatcacaggtatcttgcggaatttaagactggtgctgagaggaaggaatctgctgagagcacaatggtggcctataaggctgctcaggacattgctctggctgagctggcacctacccatccgataaggctgggacttgctcttaatttttcagtgttctattatgagattctgaactccccagacaaagcttgcaacctggcaaagcaggcgtttgatgaagctatctctgagttagacagccttggtgaggagtcatacaaggatagcactctgatcatgcaactcctgagggataacttgaccctttggacatccgacctcacggaggatggtgctgatgagggcaaagatgccccgaaaggtgatgcaggcgagggacagtaatcttcggagggggtgcaaagttgttcgagccccaatgttttagatgctctatgctgtcgaagctgtgctgtgccattattgtagctgatttcgtctccattcacttcttttttcttgttagtaggctggtagtggtcgaattaatttgctttgtgttgccgctagtccatgtggactggtattgttcccctggatttatttggcaagcgtgtccgtgctcgctctagcgttttattgagcttttaaagtcatcgcattcttttttgattgcaatcagttattggctggatatgcggtggctgtttggatcagaagtacagccggagtttcctcaccggagcgtgtaacatgtggaaattggaaaccacgcaaacgtctctcttatttgtacccctgagtacatagggctttttttaacagcttttctgaaaagctgcgcttgtttggtttgacttttttctgaacagcttttctgaaaagctggctgtggggagaagctggtgattagaatctgggtgttggttcgcctgctgtggagagaagctggtggttaaaatctaggtgtttggatacacagattctgagattgtaagattgtagattctgattaaaaaaggaaacagataaaaacaccgaaccaacaag

SEQ ID NO: 43591 - DNA, 1423 bp, Zea Mays
cgctgcttcgccctgcccaccacagcatccgcagttccccgaccacaccgttcctccgagcccaggagcagccccgcgccaggaggaagtttgttcttttaacaatatgtcgagggaggagaatgtttacatggccaagttggctgagcaggctgaaaggaatgtgattggggctcgccgcgcttcatggcgcattgtttcttccattgaacaaaaggaggagtcccgtaagaacgaagagcatgtgaaccttatcaaggaatatcgtggcaagatcgaggctgaactgagcaatatctgtgatggaatcttgaagctgcttgactcccacctagtgccttcttctactgctgctgaatcaaaggtcttctacctcaagatgaagggtgactatcacaggtatcttgcggaatttaagactggtgctgagaggaaggaatctgctgagagcacaatggtggcctataaggctgctcaggacattgctctggctgagctggcacctacccatccgataaggctgggacttgctcttaatttttcagtgttctattatgagattctgaactccccagacaaagcttgcaacctggcaaagcaggcgtttgatgaagctatctctgagttagacagccttggtgaggagtcatacaaggatagcactctgatcatgcaactcctgagggataacttgaccctttggacatccgacctcacggaggatggtgctgatgagggcaaagatgccccgaaaggtgatgcaggcgagggacagtaatcttcggagggggtgcaaagttgttcgagccccaatgttttagatgctctatgctgtcgaagctgtgctgtgccattattgtagctgatttcgtctccattcacttcttttttcttgttagtaggctggtagtggtcgaattaatttgctttgtgttgccgctagtccatgtggactggtattgttcccctggatttatttggcaagcgtgtccgtgctcgctctagcgttttattgagcttttaaagtcatcgcattcttttttgattgcaatcagttattggctggatatgcggtggctgtttggatcagaagtacagccggagtttcctcaccggagcgtgtaacatgtggaaattggaaaccacgcaaacgtctctcttatttgtacccctgagtacatagggctttttttaacagcttttctgaaaagctgcgcttgtttggtttgacttttttctgaacagcttttctgaaaagctggctgtggggagaagctggtgattagaatctgggtgttggttcgcctgctgtggagagaagctggtggttaaaatctaggtgtttggatacacagattctgagattgtaagattgtagattctgattaaaaaaggaaacagataaaaacaccgaaccaacaag

SEQ ID NO: 43592 - DNA, 1454 bp, Zea Mays
ccattggctcactgacaatagcctcgcgctcgcgtcccgctataaaatatccccacgctgcttcgccctgcccaccacagcatccgcagttccccgaccacaccgttcctccgagcccaggagcagccccgcgccaggaggaagtttgttcttttaacaatatgtcgagggaggagaatgtttacatggccaagttggctgagcaggctgaaaggtatgaggagatggttgagtatatggagaaggtggctaagactgtagatgtggaagagctcactgttgaggagcgtaaccttctgtctgttgcatacaagaatgtgattggggctcgccgcgcttcatggcgcattgtttcttccattgaacaaaaggaggagtcccgtaagaacgaagagcatgtgaaccttatcaaggaatatcgtggcaagatcgaggctgaactgagcaatatctgtgatggaatcttgaagctgcttgactcccacctagtgccttcttctactgctgctgaatcaaaggtcttctacctcaagatgaagggtgactatcacaggtatcttgcggaatttaagactggtgctgagaggaaggaatctgctgagagcacaatggtggcctataaggctgctcaggcgtttgatgaagctatctctgagttagacagccttggtgaggagtcatacaaggatagcactctgatcatgcaactcctgagggataacttgaccctttggacatccgacctcacggaggatggtgctgatgagggcaaagatgccccgaaaggtgatgcaggcgagggacagtaatcttcggagggggtgcaaagttgttcgagccccaatgttttagatgctctatgctgtcgaagctgtgctgtgccattattgtagctgatttcgtctccattcacttcttttttcttgttagtaggctggtagtggtcgaattaatttgctttgtgttgccgctagtccatgtggactggtattgttcccctggatttatttggcaagcgtgtccgtgctcgctctagcgttttattgagcttttaaagtcatcgcattcttttttgattgcaatcagttattggctggatatgcggtggctgtttggatcagaagtacagccggagtttcctcaccggagcgtgtaacatgtggaaattggaaaccacgcaaacgtctctcttatttgtacccctgagtacatagggctttttttaacagcttttctgaaaagctgcgcttgtttggtttgacttttttctgaacagcttttctgaaaagctggctgtggggagaagctggtgattagaatctgggtgttggttcgcctgctgtggagagaagctggtggttaaaatctaggtgtttggatacacagattctgagattgtaagattgtagattctgattaaaaaaggaaacagataaaaacaccgaaccaacaag

SEQ ID NO: 43593 - DNA, 741 bp, Zea Mays
cacgaattgacttgatccaatctcgatgcattgtgtatgcttgggggagaggagagcacgggaggcttggatttggagatgataagagtagtcacatggtgcccctaaaggttgagcttctagctggagaggatattgttcaggtatcatgtggaggaacacattcagttgcgctagctcgagatggccgaatgttttcttacgggaggggcgaccatggccgtctaggctacggcaggaaggtgacgacgggccaccccatggaattgcccatcaacctgccgccgctcagcagcagccgcgacggtcggtggcaggcgaaatacgtggcttgtggcgggcggcacaccctcgctattgcggagtggacagaggccactgattgatcaccgtttgtggaataagcacaaggccggtgccaacgggcgtaggtggggctgcagtcgatggcgctgccggccgccgcggtcggtacttaccagaagtagttcagtaccgactgccattgccatgtgtcgtcttttaattagttgatgtccaataaattcataagttttttttaaaaaagtctaagtaatctgaaaaggtatttatgaattatgtaacttttttacttttttggtattatggtattttttatgtttatatgagttaatgtaaaattttatttatgattttataaattacatactgtgtatttatattcatgaactatataccttttttttattttggttactt

SEQ ID NO: 43594 - DNA, 1857 bp, Zea Mays
cgcggcagaagagcccaaatcacggccgcaaaagccacgcacgcggcgcttgtcctgcgcggcgcacggaaacccacctccacggcggcaccccgtgcgtcggctgcttgctgccccagtgccgccccgcgttcccttcgctcccgccgacaccgacgccgccactgccaccgccggcatggcgaccccgctccgcgccaccgcggtcctcgcgtggggttccggggaggacgggcagctgggcatgggcgggaacgaggagaaggactggccccacttcgttgaggcgctggggccctacgccgtcaccgccgtcgtcgccggcagccgcaactccctcgccatctgcgacgacggccgcctgttcacatggggatggaaccaacgcggcacgctcgggcacccgccggagaccaagacggagagctccccgggccccgtcgacgctctcgcgggtttcaagatcgtccaggcggcgattggcgggtggcattgcctcgcagttgacgacaaggggcgcgcctacgcctggggtggaaacgagtacgggcagtgtggtgaggagcctgagaggaaggaggacgggacgagggcgctcaggagggacatcccgatcccgcagcggtgcgcgctcaagctcaaagtccggcaagtagccgctggagggacacattcagtagttttgactcaagaaggtcacgtctggacatggggacagccatggcctccgggtgatatcaagcaaatatctacacctgtacgtgtgcaaggccttgagaaagtgagggtcattgctgtaggtgcattccataatttggcactaacggaggatgtaattttgtgggcatggggtaataatgagtatggtcagctggggactggagatacccaaccaagatcacaaccgatacgtgtcgaagggctatctgatctctcactggtacatttttattttaatttattttattttctgatacattttcaaattagtttgtcatcagtgagtttctcaagccattgcccagtgagcttatgtaaggacggcaaaccaagataaaaaaatccacgcttttagttgtttttctccaaggttgacattgctgctggaggctggcattcaactgcactaactatagatggagaggtgtatgcttgggggagaggagagcacgggaggcttggatttggagatgataagagtagtcacatggtgcccctaaaggttgagcttctagctggagaggatattgttcaggtatcatgtggaggaacacattcagttgcgctagctcgagatggccgaatgttttcttacgggaggggcgaccatggccgtctaggctacggcaggaaggtgacgacgggccaccccatggaattgcccatcaacctgccgccgctcagcagcagccgcgacggtcggtggcaggcgaaatacgtggcttgtggcgggcggcacaccctcgctattgcggagtggacagaggccactgattgatcacgtagcgtttgtggaataagcacaaggccggtgccaacgggcgtaggtggggctgcagtcgatggcgctgccggccgccgcggtcggtacttaccagaagtagttcagtaccgactgccattgccatgtgtcgtcttttaattagttgatgtccaataaattcataagttttttttaaaaaagtctaagtaatctgaaaaggtatttatgaattatgtaacttttttacttttttggtattatggtattttttatgtttatatgagttaatgtaaaattttatttatgattttataaattacatactgtgtatttatattcatgaactatataccttttttttattttggttactt

SEQ ID NO: 43595 - DNA, 1793 bp, Zea Mays
cgcggcagaagagcccaaatcacggccgcaaaagccacgcacgcggcgcttgtcctgcgcggcgcacggaaacccacctccacggcggcaccccgtgcgtcggctgcttgctgccccagtgccgccccgcgttcccttcgctcccgccgacaccgacgccgccactgccaccgccggcatggcgaccccgctccgcgccaccgcggtcctcgcgtggggttccggggaggacgggcagctgggcatgggcgggaacgaggagaaggactggccccacttcgttgaggcgctggggccctacgccgtcaccgccgtcgtcgccggcagccgcaactccctcgccatctgcgacgacggccgcctgttcacatggggatggaaccaacgcggcacgctcgggcacccgccggagaccaagacggagagctccccgggccccgtcgacgctctcgcgggtttcaagatcgtccaggcggcgattggcgggtggcattgcctcgcagttgacgacaaggggcgcgcctacgcctggggtggaaacgagtacgggcagtgtggtgaggagcctgagaggaaggaggacgggacgagggcgctcaggagggacatcccgatcccgcagcggtgcgcgctcaagctcaaagtccggcaaccgctggagggacacattcagtagttttgactcaagaaggtcacgtctggacatggggacagccatggcctccgggtgatatgtatggtgccttatgctgaaaacattatttattttttgtttgctcttgtattttctccttgttcggttgttgaccatggccttctttcagcaagcaaatatctacacctgtacgtgtgcaaggccttgagaaagtgagggtcattgctgtaggtgcattccataatttggcactaacggaggatgtaattttgtgggcatggggtaataatgagtatggtcagctggggactggagatacccaaccaagatcacaaccgatacgtgtcgaagggctatctgatctctcactggttgacattgctgctggaggctggcattcaactgcactaactatagatggagaggtgtatgcttgggggagaggagagcacgggaggcttggatttggagatgataagagtagtcacatggtgcccctaaaggttgagcttctagctggagaggatattgttcaggtatcatgtggaggaacacattcagttgcgctagctcgagatggccgaatgttttcttacgggaggggcgaccatggccgtctaggctacggcaggaaggtgacgacgggccaccccatggaattgcccatcaacctgccgccgctcagcagcagccgcgacggtcggtggcaggcgaaatacgtggcttgtggcgggcggcacaccctcgctattgcggagtggacagaggccactgattgatcacgtagcgtttgtggaataagcacaaggccggtgccaacgggcgtaggtggggctgcagtcgatggcgctgccggccgccgcggtcggtacttaccagaagtagttcagtaccgactgccattgccatgtgtcgtcttttaattagttgatgtccaataaattcataagttttttttaaaaaagtctaagtaatctgaaaaggtatttatgaattatgtaacttttttacttttttggtattatggtattttttatgtttatatgagttaatgtaaaattttatttatgattttataaattacatactgtgtatttatattcatgaactatataccttttttttattttggttactt

SEQ ID NO: 43596 - DNA, 1415 bp, Zea Mays
cgcggcagaagagcccaaatcacggccgcaaaagccacgcacgcggcgcttgtcctgcgcggcgcacggaaacccacctccacggcggcaccccgtgcgtcggctgcttgctgccccagtgccgccccgcgttcccttcgctcccgccgacaccgacgccgccactgccaccgccggcatggcgaccccgctccgcgccaccgcggtcctcgcgtggggttccggggaggacgggcagctgggcatgggcgggaacgaggagaaggactggccccacttcgttgaggcgctggggccctacgccgtcaccgccgtcgtcgccggcagccgcaactccctcgccatctgcgacgacggccgcctgttcacatggggatggaaccaacgcggcacgctcgggcacccgccggagaccaagacggagagctccccgggccccgtcgacgctctcgcgggtttcaagatcgtccaggcggcgattggcgggtggcattgcctcgcagttgacgacaaggggcgcgcctacgcctggggtggaaacgagtacgggcagtgtggtgaggagcctgagaggaaggaggacgggacgagggcgctcaggagggacatcccgatcccgcagcggtgcgcgctcaagctcaaagtccggcaagttgacattgctgctggaggctggcattcaactgcactaactatagatggagaggtgtatgcttgggggagaggagagcacgggaggcttggatttggagatgataagagtagtcacatggtgcccctaaaggttgagcttctagctggagaggatattgttcaggtatcatgtggaggaacacattcagttgcgctagctcgagatggccgaatgttttcttacgggaggggcgaccatggccgtctaggctacggcaggaaggtgacgacgggccaccccatggaattgcccatcaacctgccgccgctcagcagcagccgcgacggtcggtggcaggcgaaatacgtggcttgtggcgggcggcacaccctcgctattgcggagtggacagaggccactgattgatcaccgtttgtggaataagcacaaggccggtgccaacgggcgtaggtggggctgcagtcgatggcgctgccggccgccgcggtcggtacttaccagaagtagttcagtaccgactgccattgccatgtgtcgtcttttaattagttgatgtccaataaattcataagttttttttaaaaaagtctaagtaatctgaaaaggtatttatgaattatgtaacttttttacttttttggtattatggtattttttatgtttatatgagttaatgtaaaattttatttatgattttataaattacatactgtgtatttatattcatgaactatataccttttttttattttggttactt

SEQ ID NO: 43597 - DNA, 2109 bp, Zea Mays
cgcggcagaagagcccaaatcacggccgcaaaagccacgcacgcggcgcttgtcctgcgcggcgcacggaaacccacctccacggcggcaccccgtgcgtcggctgcttgctgccccagtgccgccccgcgttcccttcgctcccgccgacaccgacgccgccactgccaccgccggcatggcgaccccgctccgcgccaccgcggtcctcgcgtggggttccggggaggacgggcagctgggcatgggcgggaacgaggagaaggactggccccacttcgttgaggcgctggggccctacgccgtcaccgccgtcgtcgccggcagccgcaactccctcgccatctgcgacgacggccgcctgttcacatggggatggaaccaacgcggcacgctcgggcacccgccggagaccaagacggagagctccccgggccccgtcgacgctctcgcgggtttcaagatcgtccaggcggcgattggcgggtggcattgcctcgcagttgacgacaaggggcgcgcctacgcctggggtggaaacgagtacgggcagtgtggtgaggagcctgagaggaaggaggacgggacgagggcgctcaggagggacatcccgatcccgcagcggtgcgcgctcaagctcaaagtccggcaagtagccgctggagggacacattcagtagttttgactcaagaaggtcacgtctggacatggggacagccatggcctccgggtgatatcaagcaaatatctacacctgtacgtgtgcaaggccttgagaaagtgagggtcattgctgtaggtgcattccataatttggcactaacggaggatgtaattttgtgggcatggggtaataatgagtatggtcagctggggactggagatacccaaccaagatcacaaccgatacgtgtcgaagggctatctgatctctcactggtacatttttattttaatttattttattttctgatacattttcaaattagtttgtcatcagtgagtttctcaagccattgcccagtgagcttatgtaaggacggcaaaccaagataaaaaaatccacgcttttagttgtttttctccaaggtagatgtctcattggtttagcttccactcagctaacaagcttcaccttttcaggacttccagttataatcattgcaaactaggaagcaggaacgctatgtttgaatgttgttattgcttatgcaaagaatggcaccctgaatctttatttcagccttcaggacacctctgcatgtgcataaatcgataattcatctgcacattgctttcctgatttctcacttgttgcatatactccaacatcttacatttgcaggttgacattgctgctggaggctggcattcaactgcactaactatagatggagaggtgtatgcttgggggagaggagagcacgggaggcttggatttggagatgataagagtagtcacatggtgcccctaaaggttgagcttctagctggagaggatattgttcaggtatcatgtggaggaacacattcagttgcgctagctcgagatggccgaatgttttcttacgggaggggcgaccatggccgtctaggctacggcaggaaggtgacgacgggccaccccatggaattgcccatcaacctgccgccgctcagcagcagccgcgacggtcggtggcaggcgaaatacgtggcttgtggcgggcggcacaccctcgctattgcggagtggacagaggccactgattgatcaccgtttgtggaataagcacaaggccggtgccaacgggcgtaggtggggctgcagtcgatggcgctgccggccgccgcggtcggtacttaccagaagtagttcagtaccgactgccattgccatgtgtcgtcttttaattagttgatgtccaataaattcataagttttttttaaaaaagtctaagtaatctgaaaaggtatttatgaattatgtaacttttttacttttttggtattatggtattttttatgtttatatgagttaatgtaaaattttatttatgattttataaattacatactgtgtatttatattcatgaactatataccttttttttattttggttactt

SEQ ID NO: 43598 - DNA, 1419 bp, Zea Mays
cgcggcagaagagcccaaatcacggccgcaaaagccacgcacgcggcgcttgtcctgcgcggcgcacggaaacccacctccacggcggcaccccgtgcgtcggctgcttgctgccccagtgccgccccgcgttcccttcgctcccgccgacaccgacgccgccactgccaccgccggcatggcgaccccgctccgcgccaccgcggtcctcgcgtggggttccggggaggacgggcagctgggcatgggcgggaacgaggagaaggactggccccacttcgttgaggcgctggggccctacgccgtcaccgccgtcgtcgccggcagccgcaactccctcgccatctgcgacgacggccgcctgttcacatggggatggaaccaacgcggcacgctcgggcacccgccggagaccaagacggagagctccccgggccccgtcgacgctctcgcgggtttcaagatcgtccaggcggcgattggcgggtggcattgcctcgcagttgacgacaaggggcgcgcctacgcctggggtggaaacgagtacgggcagtgtggtgaggagcctgagaggaaggaggacgggacgagggcgctcaggagggacatcccgatcccgcagcggtgcgcgctcaagctcaaagtccggcaagttgacattgctgctggaggctggcattcaactgcactaactatagatggagaggtgtatgcttgggggagaggagagcacgggaggcttggatttggagatgataagagtagtcacatggtgcccctaaaggttgagcttctagctggagaggatattgttcaggtatcatgtggaggaacacattcagttgcgctagctcgagatggccgaatgttttcttacgggaggggcgaccatggccgtctaggctacggcaggaaggtgacgacgggccaccccatggaattgcccatcaacctgccgccgctcagcagcagccgcgacggtcggtggcaggcgaaatacgtggcttgtggcgggcggcacaccctcgctattgcggagtggacagaggccactgattgatcacgtagcgtttgtggaataagcacaaggccggtgccaacgggcgtaggtggggctgcagtcgatggcgctgccggccgccgcggtcggtacttaccagaagtagttcagtaccgactgccattgccatgtgtcgtcttttaattagttgatgtccaataaattcataagttttttttaaaaaagtctaagtaatctgaaaaggtatttatgaattatgtaacttttttacttttttggtattatggtattttttatgtttatatgagttaatgtaaaattttatttatgattttataaattacatactgtgtatttatattcatgaactatataccttttttttattttggttactt

SEQ ID NO: 43599 - DNA, 2113 bp, Zea Mays
cgcggcagaagagcccaaatcacggccgcaaaagccacgcacgcggcgcttgtcctgcgcggcgcacggaaacccacctccacggcggcaccccgtgcgtcggctgcttgctgccccagtgccgccccgcgttcccttcgctcccgccgacaccgacgccgccactgccaccgccggcatggcgaccccgctccgcgccaccgcggtcctcgcgtggggttccggggaggacgggcagctgggcatgggcgggaacgaggagaaggactggccccacttcgttgaggcgctggggccctacgccgtcaccgccgtcgtcgccggcagccgcaactccctcgccatctgcgacgacggccgcctgttcacatggggatggaaccaacgcggcacgctcgggcacccgccggagaccaagacggagagctccccgggccccgtcgacgctctcgcgggtttcaagatcgtccaggcggcgattggcgggtggcattgcctcgcagttgacgacaaggggcgcgcctacgcctggggtggaaacgagtacgggcagtgtggtgaggagcctgagaggaaggaggacgggacgagggcgctcaggagggacatcccgatcccgcagcggtgcgcgctcaagctcaaagtccggcaagtagccgctggagggacacattcagtagttttgactcaagaaggtcacgtctggacatggggacagccatggcctccgggtgatatcaagcaaatatctacacctgtacgtgtgcaaggccttgagaaagtgagggtcattgctgtaggtgcattccataatttggcactaacggaggatgtaattttgtgggcatggggtaataatgagtatggtcagctggggactggagatacccaaccaagatcacaaccgatacgtgtcgaagggctatctgatctctcactggtacatttttattttaatttattttattttctgatacattttcaaattagtttgtcatcagtgagtttctcaagccattgcccagtgagcttatgtaaggacggcaaaccaagataaaaaaatccacgcttttagttgtttttctccaaggtagatgtctcattggtttagcttccactcagctaacaagcttcaccttttcaggacttccagttataatcattgcaaactaggaagcaggaacgctatgtttgaatgttgttattgcttatgcaaagaatggcaccctgaatctttatttcagccttcaggacacctctgcatgtgcataaatcgataattcatctgcacattgctttcctgatttctcacttgttgcatatactccaacatcttacatttgcaggttgacattgctgctggaggctggcattcaactgcactaactatagatggagaggtgtatgcttgggggagaggagagcacgggaggcttggatttggagatgataagagtagtcacatggtgcccctaaaggttgagcttctagctggagaggatattgttcaggtatcatgtggaggaacacattcagttgcgctagctcgagatggccgaatgttttcttacgggaggggcgaccatggccgtctaggctacggcaggaaggtgacgacgggccaccccatggaattgcccatcaacctgccgccgctcagcagcagccgcgacggtcggtggcaggcgaaatacgtggcttgtggcgggcggcacaccctcgctattgcggagtggacagaggccactgattgatcacgtagcgtttgtggaataagcacaaggccggtgccaacgggcgtaggtggggctgcagtcgatggcgctgccggccgccgcggtcggtacttaccagaagtagttcagtaccgactgccattgccatgtgtcgtcttttaattagttgatgtccaataaattcataagttttttttaaaaaagtctaagtaatctgaaaaggtatttatgaattatgtaacttttttacttttttggtattatggtattttttatgtttatatgagttaatgtaaaattttatttatgattttataaattacatactgtgtatttatattcatgaactatataccttttttttattttggttactt

SEQ ID NO: 43600 - DNA, 1741 bp, Zea Mays
gaaagccctgcagcagaactgcagaagacacggccgcggcagaagagcccaaatcacggccgcaaaagccacgcacgcggcgcttgtcctgcgcggcgcacggaaacccacctccacggcggcaccccgtgcgtcggctgcttgctgccccagtgccgccccgcgttcccttcgctcccgccgacaccgacgccgccactgccaccgccggcatggcgaccccgctccgcgccaccgcggtcctcgcgtggggttccggggaggacgggcagctgggcatgggcgggaacgaggagaaggactggccccacttcgttgaggcgctggggccctacgccgtcaccgccgtcgtcgccggcagccgcaactccctcgccatctgcgacgacggccgcctgttcacatggggatggaaccaacgcggcacgctcgggcacccgccggagaccaagacggagagctccccgggccccgtcgacgctctcgcgggtttcaagatcgtccaggcggcgattggcgggtggcattgcctcgcagttgacgacaaggggcgcgcctacgcctggggtggaaacgagtacgggcagtgtggtgaggagcctgagaggaaggaggacgggacgagggcgctcaggagggacatcccgatcccgcagcggtgcgcgctcaagctcaaagtccggcaagtagccgctggagggacacattcagtagttttgactcaagaaggtcacgtctggacatggggacagccatggcctccgggtgatatcaagcaaatatctacacctgtacgtgtgcaaggccttgagaaagtgagggtcattgctgtaggtgcattccataatttggcactaacggaggatgtaattttgtgggcatggggtaataatgagtatggtcagctggggactggagatacccaaccaagatcacaaccgatacgtgtcgaagggctatctgatctctcactggttgacattgctgctggaggctggcattcaactgcactaactatagatggagaggtgtatgcttgggggagaggagagcacgggaggcttggatttggagatgataagagtagtcacatggtgcccctaaaggttgagcttctagctggagaggatattgttcaggtatcatgtggaggaacacattcagttgcgctagctcgagatggccgaatgttttcttacgggaggggcgaccatggccgtctaggctacggcaggaaggtgacgacgggccaccccatggaattgcccatcaacctgccgccgctcagcagcagccgcgacggtcggtggcaggcgaaatacgtggcttgtggcgggcggcacaccctcgctattgcggagtggacagaggccactgattgatcacgtagcgtttgtggaataagcacaaggccggtgccaacgggcgtaggtggggctgcagtcgatggcgctgccggccgccgcggtcggtacttaccagaagtagttcagtaccgactgccattgccatgtgtcgtcttttaattagttgatgtccaataaattcataagttttttttaaaaaagtctaagtaatctgaaaaggtatttatgaattatgtaacttttttacttttttggtattatggtattttttatgtttatatgagttaatgtaaaattttatttatgattttataaattacatactgtgtatttatattcatgaactatataccttttttttattttggttactt

SEQ ID NO: 43601 - DNA, 1236 bp, Zea Mays
cagaactgcagaagacacggccgcggcagaagagcccaaatcacggccgcaaaagccacgcacgcggcgcttgtcctgcgcggcgcacggaaacccacctccacggcggcaccccgtgcgtcggctgcttgctgccccagtgccgccccgcgttcccttcgctcccgccgacaccgacgccgccactgccaccgccggcatggcgaccccgctccgcgccaccgcggtcctcgcgtggggttccggggaggacgggcagctgggcatgggcgggaacgaggagaaggactggccccacttcgttgaggcgctggggccctacgccgtcaccgccgtcgtcgccggcagccgcaactccctcgccatctgcgacgacggccgcctgttcacatggggatggaaccaacgcggcacgctcgggcacccgccggagaccaagacggagagctccccgggccccgtcgacgctctcgcgggtttcaagatcgtccaggcggcgattggcgggtggcattgcctcgcagttgacgacaaggggcgcgcctacgcctggggtggaaacgagtacgggcagtgtggtgaggagcctgagaggaaggaggacgggacgagggcgctcaggagggacatcccgatcccgcagcggtgcgcgctcaagctcaaagtccggcaagtagccgctggagggacacattcagtagttttgactcaagaaggtcacgtctggacatggggacagccatggcctccgggtgatatcaagcaaatatctacacctgtacgtgtgcaaggccttgagaaagtgagggtcattgctgtaggtgcattccataatttggcactaacggaggatgtaattttgtgggcatggggtaataatgagtatggtcagctggggactggagatacccaaccaagatcacaaccgatacgtgtcgaagggctatctgatctctcactggttgacattgctgctggaggctggcattcaactgcactaactatagatggagaggtgtatgcttgggggagaggagagcacgggaggcttggatttggagatgataagagtagtcacatggtgcccctaaaggttgagcttctagctggagaggatattgttcaggtatcatgtggaggaacacattcagttgcgctagctcgagatggccgaatgttttctagctcgacgtataaaatgaagatcctggccacttgaccattttacggcctttg

SEQ ID NO: 43602 - DNA, 1128 bp, Zea Mays
cgcggcagaagagcccaaatcacggccgcaaaagccacgcacgcggcgcttgtcctgcgcggcgcacggaaacccacctccacggcggcaccccgtgcgtcggctgcttgctgccccagtgccgccccgcgttcccttcgctcccgccgacaccgacgccgccactgccaccgccggcatggcgaccccgctccgcgccaccgcggtcctcgcgtggggttccggggaggacgggcagctgggcatgggcgggaacgaggagaaggactggccccacttcgttgaggcgctggggccctacgccgtcaccgccgtcgtcgccggcagccgcaactccctcgccatctgcgacgacggccgcctgttcacatggggatggaaccaacgcggcacgctcgggcacccgccggagaccaagacggagagctccccgggccccgtcgacgctctcgcgggtttcaagatcgtccaggcggcgattggcgggtggcattgcctcgcagttgacgacaaggggcgcgcctacgcctggggtggaaacgagtacgggcagtgtggtgaggagcctgagaggaaggaggacgggacgagggcgctcaggagggacatcccgatcccgcagcggtgcgcgctcaagctcaaagtccggcaagtagccgctggagggacacattcagtagttttgactcaagaaggtcacgtctggacatggggacagccatggcctccgggtgatatcaagcaaatatctacacctgtacgtgtgcaaggccttgagaaagtgagggtcattgctgtaggtgcattccataatttggcactaacggaggatgtaattttgtgggcatggggtaataatgagtatggtcagctggggactggagatacccaaccaagatcacaaccgatacgtgtcgaagggctatctgatctctcactggttgacattgctgctggaggctggcattcaactgcactaactatagatggagaggtgtatgcttgggggagaggagagcacgggaggcttggatttggagatgataagagtagtcacatggtgcccctaaaggttgagcttctagctggagaggatattgttcagctgagcagcagagctcattttcc

SEQ ID NO: 43603 - DNA, 1355 bp, Zea Mays
gctgcggcggcggcgcctcctgctccgacggaggatgccgcagcggcgccgccccctcttccggctgcgacgactgctccagcgccggtggccgcggggacgaagggcattaccagcccgcacgctaagaagctggctaagcagcacagggtggaccttgccaagattactggcaccgggccgtacggtcgaattacgccggcagatattgaggcggctgccggaatcaagccgaagtcagagcccactcctgctgctgctgctgcgccaccacctgtggccgcgccttcagttggtgctgtgcctcaggcagcagtgctgccgccggttcctggcgcgactgttgttccattcactaccatgcaggctgcagtgagcaagaacatggtggagagcctggcagtgccagcattccgcgttgggtaccccattgtaaccgataagctcgatgagctgtacgaaaaggttaagccaaagggagtgacaatgacagtgctgttggcgaaggctgcagccatggctcttgcacagcaccctgttgtcaatagtacctgcagggatggaaagagcttcacatacaacagtaatatcaacattgcagtggctgtggcaattgatggtggccttattacacctgtccttcaggatgcagacaagctggatatttatttgctctcgcaaaattggaaggacctagtcaagaaagcacgtgcaaaacagctccaaccaaatgattacaactctgggacttttacactgtccaacttgggtatgtttggtgtagatcggtttgatgcaatccttccacctggccagggagctattatggctgttggagcctcgaaacctacagttgtggctgataaagatggtttctttagcgtcaagagcaaaatgctggtcaatgtcactgctgatcacaggattgtatacggtgctgatttggcagcatttctacaaacttttgcaaagattattgaggatcctgagagcttaactttgtaaggtcacttgaagagttatgatcttatctatatgcccataagtagtcttattgcagttggagttctattgttgatatccaatttttgtatctttgagcattcaatagaattcatccgatctttttgtaccggtttttatgtctcaatgttgtggatcttgttgggggagattatactgttgatattatggaattactggagagcaataagttataaactgtagaatagttctgcagattttatctctgaaatatggtttgtgtccctttaacatttatcttccgggaagtacattttcttcaaatttgaaaactgctagagatccctgttgcacttagactggcatgtaaa

SEQ ID NO: 43604 - DNA, 622 bp, Zea Mays
  misc_feature (622)..(622): n is a, c, g, or t
gtaaacattaatggatatacacaccagaacatataaccaaatgcatcttgcatttcatcatcatgtgctgagaatttgttctgaattcttttttatatttatatatttatgaccttgttcccattgattctatctctgagcatgaaaaataattgcagtagacacatcctttttctcgtaatgatttgaaatatttattgtaggttagttgagggtcataccgatggtgctcttttaagttatgcagttgctgcctcaagctttctgcctccctttgccagagctagtaagattggaaaagctttcaattaattaacataaatgagagtgactggacaaccatatgatctctactttagagtagggactacaactacaacgaaaagaacaaaacctttcgcttcaaaggaagctggtttggctactgtcgagggcgaggaggatcatgatttggatgtctcgttgatgaaaaatcggagctgtctcgagggggtgtctcgaggcttggcaacaaatgcgcatcgcggtcttcctcctgtttgtagtcgtagtcgaatttcctttgatcttgtgatgcccgtcttagagagacggagttactcgtctcttgtgtgagctcggn

SEQ ID NO: 43605 - DNA, 9784 bp, Zea Mays
cttcatcatacccatttaaaaaaacattttcttttgaaaacaccaacaatatcccatagttttccttgagaccaaatgtgaatttaatgcaggattaacctcgtctcacatatgcatgaatccattcccatgatccggcttagatgatggtagaaagcataggtaatttatgcatcaagggtagaatgaacttgccttcttcgaagttctcatgacacgaaggttctatttctaggaggtcgagctcctacccttcttccggagctagggtttctaggacgtcgatcactgcttctagcaaaacaatcaacaaacaatacatcaaccaaagacttgctatgaaatggtgtgttataatattgtgatcattattttatgtgacctctaatgtgcttttactactatttgtgtatttgtgccaaaaatacatatatacatacatatgtatatagagaaaatagaaattagaaaaagaaaaggagtttcttggctaatgggcctggcgagagcaattcgggccagctgggcgaggtgcggtgcgggcacaaggcctagctagcccacggggaagggaacaatgggcaatagcgtgaaggggctaggcccacgtgtcagagggagggggagggaaacggcgcttagcggctattgatggggggagggcgaaccggccgccggtgaggttcgcggcggttctccgtcgttgctctggttcccgggcaatggggaggtgtgctagcacaaggagaggtgggtgttcatggggccagactcaatttggccggaggcaagctagggagggccagccacggtggggtggagggtcaccgtgatggtaatgccgctgacgaggtggtggtggttgattgggggcgtggagaggttcattgtggtcatgaggaagcagtgaagcttgtgcgctagcttgattgagctttggacgactggaggaggatatggagatctcaccgaagttgggggagggtggccgcgtgggcacagattgagcttagagaggagggatggtgagtggtgcgaggtgaataggggctttgggcggtctttttataggcggtcagggagggagcttggtggccagctggatgccggcaggcagtgaaaaagggtggcgcacatgggtggcgatgtgatgccacgacggtgaaggacgatggtggcgtgtaggtacatgcgcacagcgggagagggaaaaacggtgcccagctcaactgtgtctatcagcaagggggaggaggatggcgatcgatggcgagggtgcgagcactttgagtttgttaggagggagacgatggtgctgacaagcagggccgggttagcggagagggagagggcgaggggtgtgtcagagatgggccagggggaggacgcgggcacgaggagggggcataggtgtgggcctccgggtagaattctatttccttttttctatttcctttcttctctctctctctcttgtgtatattttcctaggtgtaaaataaatccctaccatttgctagtaacgtgaaaatagttatgtgcaatgtttctaacaatcatcatccatgcatgaatataggttttccaaagatagatgtgatgatgttggggttttgggattatgcgattagggtttcttctactaacctctgttttgagaatcgggatgttataaacttacccacttaaaagaatctttcccacgagatttaggatgggtctgagaaaagataagagtattccttcctcattgagccctcactttcccaggttgcttcttcttcaccttctcagccccactaaacattatagacccttacctctgagttccgggttttgtgaacggctaggtccaagattttcagtcgtttttctcgagactgcagatcttcctagacttggattggctattctacgatatgggtttctagcacttataggcatttttggagctggaatacatggaacacattgtggatgtctgacattgattccagtaattggaggtgaattgtgtccttctatctaacgcttttctttgcagaatgccatgcagtctaaattacagaaatggaggagcattacttgtttttgcttatatatacatcacaggaacgagtttcatactacaatcagagtgaaatgtctaaaaaaggctgaatttagcttttcttgacaatcatagtcacttagtaacaaaaaatagtgtgtgatcaagatctaaccatttccttgcatttgaagcgtttgctaggcataagaaacaatttcttcatgaactttgacaaaaaagccaaatggaaacaaccattacgagtgtaataaaaaatatccataaaaatctcataagcaggacctatagagctactcacttttgtaatatatagtttatcaaggttaggattggctgcacgctgagctgcaatttgtgaacagacctgtgggaagaataaaacatacagtcagtcctggagtatagtaaaaataaagacgagtacttgcaattttgatatgggtgtagcaattttgagctgcaatgttttctgggcacagttgggcatcctcccgtgtgcggataattataaaagctttcaggttgatggcttcacatagtactccgcaacacgatactcatacattattcatgtcaaatgagggaggtgagcacctaaacctaagaaactatcagcacagcaaatgtaccctaatccagaaaacattctctgcgtgctgacaaagctaagtattcatgagattgtacaaaaacataaatcacaccacaaataccaacatgatcacatgaccgttgtccaatgatgctcaaattgcggcactagcagcaacataccatatgagcaatgatgttcaaaaacataaatcaccacacaaatatcaccataacaatgacgttaagaaacataaatcacatcacaaataccaccataatcagtcacatgaccattgtccaacgatactcaaattgcggccctagcagcaaaaatgtcatatgagtaatgatgttcagaaacataatctttcaacaactagagaaattgaactattacaatagacgaactgataattaaacagacagtggtaacagtagcacaaaagttcacatctctatagcttagctccctccaaacgatcagacatttgaaaacctaaaaataatatttcataataatttcagtatgtctgcctaaactgtaaagcacatactgcaactctgacaagataaaaggaaaacgaacatgagttacaagttctgaaccccgtgcattatagctctagttctgattcagattcgaattctgattttgaatctggttcgtattccagatctgatttaattgattttgaatctaatttaggttctagtttgggttctaattaaagttttgatttgaattcttatgaccgacaaaccatgccaaaggttttaacctatgtgcaccccaatttctcaagaattcgagaaatttcagacatttaatcatcattatctgctctgcggtaagaaccacctgaccagctactggatcaaatctcaaaccctaaagtgttttttctgacttttattgaagcatgtgtgtttacttaggtcttctttgggatgatcataggttgtggtgtgattataaaagagtgttctttcaatcagtacatttgtcctaactgattcatccatctgcaaagtggtaactgtggcaacataagcaattgcataaagatggttctcatttcattctttttaatcgaccaccttagatgatcatatatctccttaaaaaactatgatacttggttgctaacagcaaaaatgcatgaatgtgaaacaattctctaccatcatcagtaagaattttgttaaaaaaataatgtatctcagctggaggtgcaccagaaaaggtatcatctttaataacagcatgagcagacacataattactccaaataccctcaggaagctgttcaggggtaagatttttaataattgtcacatctctaaacctcacatctccaagatagcttactttgatattgtttgacactgaaattagataagcaaacatcacactccttatttcctcttatcccccaagcattgtcctgacagtctgcttactaatatttgttgcaattttatatgaagttacaacatcagtcttaccgagtaaaacaataaaactacatccacatttgttatcccaaattcattaatcatcactcctcctgattctatgaaatcagcaagaaaaattgatacatcacaacattcttcaacaagagtatcgtcagggagtagcagcatgtagcgagtgtaagagatctagaacataataggattgggtattcctattttgaagaggatctgagcctttgttcgggatctgagcctttcttttgggtattcctattttacagctggtgctgcaacggattcagaacctgctgctgatggatccgggacctagttccccgatggacgtggatccgactcatggtgcggtaacgcattctgctcctgctgctcttaatggtaagtatatgaggccctgtttagtagccacgtttttcatagtttttaggtaataccatggtattagaaaaaactatggcattcatagccacaaggtgtttggcgggcttctttgaaaaactttgtattaaaattgtggtattctcaaattgtagtattcaaaactttgatttggagtatttttggagtttatataactatagtattgaatgagtttattcctggtcaataagttcaatgatgttcaactagttttgtacaaatgctcatcctttgatcattgaagctatttatactaatcaacagtagcattcttgtgcatgtacttttactgattctgtgaattggtaagattagaagggattgtttctgttttgtcttgttgtgcatacatttgttgagttttttgtggcgtagggtgactgtgtgagattcaggctgctcctgtccccatcccctcaatataaaataatctttgtatcttataacttttttgggtatacatttgtctgacgtacagtttcttttgttaacagtcccgcaaccagttttaccttagatctcctacactcgctacatgctgctgctccctgacggcactctagttgaagaaggttataatgattcaatttttcttaataatttcataaaatcaggaggagagatggttcgttaatttgggatgacagatgtggatggagtttttatagttttatctggtgagactgatattgtatcttcatatgaaattgcaacaaatattagtaagcaaacttttaggacaatgcttgagaggataagataaaataaggagcgtggtgttttctaatctgatttcagtgccaacaatatcaaagtaagctctcttggtgagatgagatttacggatgtgaccttagaaatcttatctctgaacagcttactgagggcattaagagtaattatgtgtctgtccatactattattaaagatgatatctactctagtgtaccttcagctgagatacaatatcttcttaacaaaattatttctaatgatggtatagaattgtttcacattcatgtatcttgttgttaacaaacaagtatcatatttttttaagatgtatgatcatctgaggtggttcattaaaaaggatgaaatgataaccatcttgatgcaattgcctgaagcttatgttgccacagttatcactttgcagctaaatggatcagttgttgagaacatttactgaaaacacaaagttagtacaaatgtgttgctttaaagaacattcatctataaccacaccacagtttatggtcatgacaaagaatacccaaataaacaaacatcctttaataaaagtcagaaaaggaacttcaggatttggaattgcatccagtagctggtcaggtggttcttaccgcacatcagatgaggatgattaaatgcataaaattccccgagttcttgagaaattagggtgcacataggtttgagtctttggcatggtttatcggtcatcagaatccaaatcataactctaatcagaactcaaaccagaacccaaatcagattaaaaatcaccaaatcagatctaaaatccgaatcagattcaaaatcagaacctgaatctgaatcagaatcatcagaaccagagctacaatgcacgaggtttagaatttgtaactcatatttgttttcctcttatcttgtcagagttgcagtatatgttttacattttatgtatgtatactgaagttcttatgaaagattatttttaaatttccaaatatctgattatttaaagggagctaagctatagagctgtgaacttttgtgctactgttaccactgtttgtttaatcatcaactcgtctattgtaatagttaaattttttagttgttgaaagattatgttgctcatatgacattttgatgttaaagccgcaatttgagcatcattggacgatggtcatgtgactgattatggtgttatttgtctattgtaatagttcaatttttttagttgttgaaagattatgatattttgctgttagagctgtaatttgagcatcattgaacgatggtcatgtgactgattatagtgttatttgtagtgtgatttatgtttcttatcatcattgctatggtggtatttgtgttgtgatttatgtttctgaacattattgctcatatagcattttgttgctagtttgtcatcagcgagttcggatacgtgagaaagatgtggctggtcaccattgacatgagcaccaggagagtggagtcattttctcagtataccaatgggagggatgatgccattggaaccgagggcgcttacttgaccaaagtagggtccggctgtcccatgcccttcctgtacctctgttaggtaatattgttgcaggcttttatctatcacctaactaattttctgtcccatgcccttcctgtacctctgttaggtaatattgttgcaggcttttatctatcacctaactaattttttgctggttgcacacgtattgctgcatgtatgcaagttcttcactttaatcttgttagcattagaatttcactacggggagagcatcttatttacccaaccagaacagtaatgtatcatgcaggctacttagtgaaagataagcaataggcttatgaacgatagagttaggccctgtttgtagtcgctttttaggaactcgattctctgggtagcaggcttgtctgataattttgctgtccagagaatctgctgcctcaataagctgagttttttgctatcctgattatagctgtaaaacgacctgaatgcccctgagctgataatagctcataggcaataattgtaatgtcttttgagtttgttaaatagaaattgctgtacaataaagatagataggtctaaaatatgattacagtattatacaattaattataaatctaccgtgtgtatcgatcatggacaagtgctgtcaatctatccattgcagagcagcagcaaaaacaatgaacggagagctgcattagaaatacatagatgtagggaggccggcaccttggaggagctcggtgtggccttcgggttaccataaataaagtagttgtatgttttgtatgctgagattttttctgtatccaatcttcttctacgtttgaacttctaattttggaagacaattttcctcatggccttgtcaccagacaccagtaacatttttttccgttgtaacacttgtactgtcctaagccaattaagtaacttgacatcgaattataatcttgtacaggttggtgcacaagttgtgtactcaaaatatgcaggcacagaattgaaattcaatgacgccgaccatctcattttgaaagatgacataattggtattcttgacagtgatgatgtgaaggatatgaaaccactgaatgatcgcattctgattaagaacagaataggaaagccacacatcggacagaagccaaaaagttttattatgtctttggcagatgttctgtttattcacgatatgtctaaatgtcttctgtcaagtctggatactagagcaaagcatgtccaggaagctccaatttgtgcgttccttagccgatgtgaactctttgacttggctcagctcaccactgacccattctgagtgaaatcttgtttggcacttgtcttacatttgcaccagatcgattatgcaccgaggaacgagttatcacccattctatagtagggatattcaattacagtgaaatgtcatatacaaaaaccttgtgattgtacatgtacaacattaggtcttgtttaaattaaatgtcacgatcctgcttgccccacgtccaccaaaggtcgaccgggtttatgatcgaggtctagtttggttttctctctaacagtgacctatttggtaggatttaatgattatgagagaaattttaaattaatctaattcacccttctttcttggacatcttagtcctttcagtcgtgttcctatcacttctcttaaggttaaggatgaagatagatatttatttggatatcattttgtggtcttttttcttcgattgacgaataaataagagatataatataatctgctaagtaaaattttattcttgtttttagcattgagtttataaagattcataaaagttaaaccacaaatttatcaaatatcttattaaatgatatatataaaattcagatattgtttcacctttttgttgtagggagcaaataatgtataaaacaatttatgtagataacataagaaaagatcaatataatacaataaacttagttattataatgtgcttgacaatataaaaaaagatcaacatcaaattttatatatctctattttaaaatattaaattgatcctaaaaattgtgatatccacttacatctctccttcacttttatagttttatgtaatttacattgatgtttttacatttctagaattgacacgatacaatatggttggaacctagggtataagacattgtgcatagaatagaaatcacactaggggtaaaatgggctaaatgatagcctttaattgttatgattagcccaattaactttctcttgggcatcttaatctttttagaggtatattaataacttatgtcacaagctatgatacttaattgttatgattttgctcccactaattttgatgttctttaagaacataatcccttgtacttattaattcgtaatgtagataactcatttacttagaatccaaattcctatccttagctagattgtacttttgtcttgatgaggttatagtcaaatattcatcaatcggtatgagccagaatgataaaaaatgaggcatacgagtttctaataacaagctttgttaaactaatttaataaaatatgcgttggccaaaataaaatgtacagcaactttcgccaaaattagtgaaaacaagtcatactttaattagataaaaaaaataggctacaagatagaattatgatctacttatttcgtaagtcttatttcctttataataaagccggtccaaaactcagcctttcagcctatccatgtcggcccgaaaacattcagtcgtccgatcgcgcatctacggttccacacaagacctcgcaaccttctcgtgtcgtgccgcgaagcttctaggagccccacccccgcgcggaggtacacttcctctctcgcctgggcgcgccgtcgcgcgcacgccccacccctcgtagcttcaac

SEQ ID NO: 43606 - DNA, 8883 bp, Zea Mays
cttcatcatacccatttaaaaaaacattttcttttgaaaacaccaacaatatcccatagttttccttgagaccaaatgtgaatttaatgcaggattaacctcgtctcacatatgcatgaatccattcccatgatccggcttagatgatggtagaaagcataggtaatttatgcatcaagggtagaatgaacttgccttcttcgaagttctcatgacacgaaggttctatttctaggaggtcgagctcctacccttcttccggagctagggtttctaggacgtcgatcactgcttctagcaaaacaatcaacaaacaatacatcaaccaaagacttgctatgaaatggtgtgttataatattgtgatcattattttatgtgacctctaatgtgcttttactactatttgtgtatttgtgccaaaaatacatatatacatacatatgtatatagagaaaatagaaattagaaaaagaaaaggagtttcttggctaatgggcctggcgagagcaattcgggccagctgggcgaggtgcggtgcgggcacaaggcctagctagcccacggggaagggaacaatgggcaatagcgtgaaggggctaggcccacgtgtcagagggagggggagggaaacggcgcttagcggctattgatggggggagggcgaaccggccgccggtgaggttcgcggcggttctccgtcgttgctctggttcccgggcaatggggaggtgtgctagcacaaggagaggtgggtgttcatggggccagactcaatttggccggaggcaagctagggagggccagccacggtggggtggagggtcaccgtgatggtaatgccgctgacgaggtggtggtggttgattgggggcgtggagaggttcattgtggtcatgaggaagcagtgaagcttgtgcgctagcttgattgagctttggacgactggaggaggatatggagatctcaccgaagttgggggagggtggccgcgtgggcacagattgagcttagagaggagggatggtgagtggtgcgaggtgaataggggctttgggcggtctttttataggcggtcagggagggagcttggtggccagctggatgccggcaggcagtgaaaaagggtggcgcacatgggtggcgatgtgatgccacgacggtgaaggacgatggtggcgtgtaggtacatgcgcacagcgggagagggaaaaacggtgcccagctcaactgtgtctatcagcaagggggaggaggatggcgatcgatggcgagggtgcgagcactttgagtttgttaggagggagacgatggtgctgacaagcagggccgggttagcggagagggagagggcgaggggtgtgtcagagatgggccagggggaggacgcgggcacgaggagggggcataggtgtgggcctccgggtagaattctatttccttttttctatttcctttcttctctctctctctcttgtgtatattttcctaggtgtaaaataaatccctaccatttgctagtaacgtgaaaatagttatgtgcaatgtttctaacaatcatcatccatgcatgaatataggttttccaaagatagatgtgatgatgttggggttttgggattatgcgattagggtttcttctactaacctctgttttgagaatcgggatgttataaacttacccacttaaaagaatctttcccacgagatttaggatgggtctgagaaaagataagagtattccttcctcattgagccctcactttcccaggttgcttcttcttcaccttctcagccccactaaacattatagacccttacctctgagttccgggttttgtgaacggctaggtccaagattttcagtcgtttttctcgagactgcagatcttcctagacttggattggctattctacgatatgggtttctagcacttataggcatttttggagctggaatacatggaacacattgtggatgtctgacattgattccagtaattggaggtgaattgtgtccttctatctaacgcttttctttgcagaatgccatgcagtctaaattacagaaatggaggagcattacttgtttttgcttatatatacatcacaggaacgagtttcatactacaatcagagtgaaatgtctaaaaaaggctgaatttagcttttcttgacaatcatagtcacttagtaacaaaaaatagtgtgtgatcaagatctaaccatttccttgcatttgaagcgtttgctaggcataagaaacaatttcttcatgaactttgacaaaaaagccaaatggaaacaaccattacgagtgtaataaaaaatatccataaaaatctcataagcaggacctatagagctactcacttttgtaatatatagtttatcaaggttaggattggctgcacgctgagctgcaatttgtgaacagacctgtgggaagaataaaacatacagtcagtcctggagtatagtaaaaataaagacgagtacttgcaattttgatatgggtgtagcaattttgagctgcaatgttttctgggcacagttgggcatcctcccgtgtgcggataattataaaagctttcaggttgatggcttcacatagtactccgcaacacgatactcatacattattcatgtcaaatgagggaggtgagcacctaaacctaagaaactatcagcacagcaaatgtaccctaatccagaaaacattctctgcgtgctgacaaagctaagtattcatgagattgtacaaaaacataaatcacaccacaaataccaacatgatcacatgaccgttgtccaatgatgctcaaattgcggcactagcagcaacataccatatgagcaatgatgttcaaaaacataaatcaccacacaaatatcaccataacaatgacgttaagaaacataaatcacatcacaaataccaccataatcagtcacatgaccattgtccaacgatactcaaattgcggccctagcagcaaaaatgtcatatgagtaatgatgttcagaaacataatctttcaacaactagagaaattgaactattacaatagacgaactgataattaaacagacagtggtaacagtagcacaaaagttcacatctctatagcttagctccctccaaacgatcagacatttgaaaacctaaaaataatatttcataataatttcagtatgtctgcctaaactgtaaagcacatactgcaactctgacaagataaaaggaaaacgaacatgagttacaagttctgaaccccgtgcattatagctctagttctgattcagattcgaattctgattttgaatctggttcgtattccagatctgatttaattgattttgaatctaatttaggttctagtttgggttctaattaaagttttgatttgaattcttatgaccgacaaaccatgccaaaggttttaacctatgtgcaccccaatttctcaagaattcgagaaatttcagacatttaatcatcattatctgctctgcggtaagaaccacctgaccagctactggatcaaatctcaaaccctaaagtgttttttctgacttttattgaagcatgtgtgtttacttaggtcttctttgggatgatcataggttgtggtgtgattataaaagagtgttctttcaatcagtacatttgtcctaactgattcatccatctgcaaagtggtaactgtggcaacataagcaattgcataaagatggttctcatttcattctttttaatcgaccaccttagatgatcatatatctccttaaaaaactatgatacttggttgctaacagcaaaaatgcatgaatgtgaaacaattctctaccatcatcagtaagaattttgttaaaaaaataatgtatctcagctggaggtgcaccagaaaaggtatcatctttaataacagcatgagcagacacataattactccaaataccctcaggaagctgttcaggggtaagatttttaataattgtcacatctctaaacctcacatctccaagatagcttactttgatattgtttgacactgaaattagataagcaaacatcacactccttatttcctcttatcccccaagcattgtcctgacagtctgcttactaatatttgttgcaattttatatgaagttacaacatcagtcttaccgagtaaaacaataaaactacatccacatttgttatcccaaattcattaatcatcactcctcctgattctatgaaatcagcaagaaaaattgatacatcacaacattcttcaacaagagtatcgtcagggagtagcagcatgtagcgagtgtaagagatctagaacataataggattgggtattcctattttgaagaggatctgagcctttgttcgggatctgagcctttcttttgggtattcctattttacagctggtgctgcaacggattcagaacctgctgctgatggatccgggacctagttccccgatggacgtggatccgactcatggtgcggtaacgcattctgctcctgctgctcttaatggtaagtatatgaggccctgtttagtagccacgtttttcatagtttttaggtaataccatggtattagaaaaaactatggcattcatagccacaaggtgtttggcgggcttctttgaaaaactttgtattaaaattgtggtattctcaaattgtagtattcaaaactttgatttggagtatttttggagtttatataactatagtattgaatgagtttattcctggtcaataagttcaatgatgttcaactagttttgtacaaatgctcatcctttgatcattgaagctatttatactaatcaacagtagcattcttgtgcatgtacttttactgattctgtgaattggtaagattagaagggattgtttctgttttgtcttgttgtgcatacatttgttgagttttttgtggcgtagggtgactgtgtgagattcaggctgctcctgtccccatcccctcaatataaaataatctttgtatcttataacttttttgggtatacatttgtctgacgtacagtttcttttgttaacagtcccgcaaccagttttaccttagatctcctacactcgctacatgctgctgctccctgacggcactctagttgaagaaggttataatgattcaatttttcttaataatttcataaaatcaggaggagagatggttcgttaatttgggatgacagatgtggatggagtttttatagttttatctggtgagactgatattgtatcttcatatgaaattgcaacaaatattagtaagcaaacttttaggacaatgcttgagaggataagataaaataaggagcgtggtgttttctaatctgatttcagtgccaacaatatcaaagtaagctctcttggtgagatgagatttacggatgtgaccttagaaatcttatctctgaacagcttactgagggcattaagagtaattatgtgtctgtccatactattattaaagatgatatctactctagtgtaccttcagctgagatacaatatcttcttaacaaaattatttctaatgatggtatagaattgtttcacattcatgtatcttgttgttaacaaacaagtatcatatttttttaagatgtatgatcatctgaggtggttcattaaaaaggatgaaatgataaccatcttgatgcaattgcctgaagcttatgttgccacagttatcactttgcagctaaatggatcagttgttgagaacatttactgaaaacacaaagttagtacaaatgtgttgctttaaagaacattcatctataaccacaccacagtttatggtcatgacaaagaatacccaaataaacaaacatcctttaataaaagtcagaaaaggaacttcaggatttggaattgcatccagtagctggtcaggtggttcttaccgcacatcagatgaggatgattaaatgcataaaattccccgagttcttgagaaattagggtgcacataggtttgagtctttggcatggtttatcggtcatcagaatccaaatcataactctaatcagaactcaaaccagaacccaaatcagattaaaaatcaccaaatcagatctaaaatccgaatcagattcaaaatcagaacctgaatctgaatcagaatcatcagaaccagagctacaatgcacgaggtttagaatttgtaactcatatttgttttcctcttatcttgtcagagttgcagtatatgttttacattttatgtatgtatactgaagttcttatgaaagattatttttaaatttccaaatatctgattatttaaagggagctaagctatagagctgtgaacttttgtgctactgttaccactgtttgtttaatcatcaactcgtctattgtaatagttaaattttttagttgttgaaagattatgttgctcatatgacattttgatgttaaagccgcaatttgagcatcattggacgatggtcatgtgactgattatggtgttatttgtctattgtaatagttcaatttttttagttgttgaaagattatgatattttgctgttagagctgtaatttgagcatcattgaacgatggtcatgtgactgattatagtgttatttgtagtgtgatttatgtttcttatcatcattgctatggtggtatttgtgttgtgatttatgtttctgaacattattgctcatatagcattttgttgctagtttgtcatcagcgagttcggatacgtgagaaagatgtggctggtcaccattgacatgagcaccaggagagtggagtcattttctcagtataccaatgggagggatgatgccattggaaccgagggcgcttacttgaccaaagtagggtccggctgtcccatgcccttcctgtacctctgttaggttggtgcacaagttgtgtactcaaaatatgcaggcacagaattgaaattcaatgacgccgaccatctcattttgaaagatgacataattggtattcttgacagtgatgatgtgaaggatatgaaaccactgaatgatcgcattctgattaagaacagaataggaaagccacacatcggacagaagccaaaaagttttattatgtctttggcagatgttctgtttattcacgatatgtctaaatgtcttctgtcaagtctggatactagagcaaagcatgtccaggaagctccaatttgtgcgttccttagccgatgtgaactctttgacttggctcagctcaccactgacccattctgagtgaaatcttgtttggcacttgtcttacatttgcaccagatcgattatgcaccgaggaacgagttatcacccattctatagtagggatattcaattacagtgaaatgtcatatacaaaaaccttgtgattgtacatgtacaacattaggtcttgtttaaattaaatgtcacgatcctgcttgccccacgtccaccaaaggtcgaccgggtttatgatcgaggtctagtttggttttctctctaacagtgacctatttggtaggatttaatgattatgagagaaattttaaattaatctaattcacccttctttcttggacatcttagtcctttcagtcgtgttcctatcacttctcttaaggttaaggatgaagatagatatttatttggatatcattttgtggtcttttttcttcgattgacgaataaataagagatataatataatctgctaagtaaaattttattcttgtttttagcattgagtttataaagattcataaaagttaaaccacaaatttatcaaatatcttattaaatgatatatataaaattcagatattgtttcacctttttgttgtagggagcaaataatgtataaaacaatttatgtagataacataagaaaagatcaatataatacaataaacttagttattataatgtgcttgacaatataaaaaaagatcaacatcaaattttatatatctctattttaaaatattaaattgatcctaaaaattgtgatatccacttacatctctccttcacttttatagttttatgtaatttacattgatgtttttacatttctagaattgacacgatacaatatggttggaacctagggtataagacattgtgcatagaatagaaatcacactaggggtaaaatgggctaaatgatagcctttaattgttatgattagcccaattaactttctcttgggcatcttaatctttttagaggtatattaataacttatgtcacaagctatgatacttaattgttatgattttgctcccactaattttgatgttctttaagaacataatcccttgtacttattaattcgtaatgtagataactcatttacttagaatccaaattcctatccttagctagattgtacttttgtcttgatgaggttatagtcaaatattcatcaatcggtatgagccagaatgataaaaaatgaggcatacgagtttctaataacaagctttgttaaactaatttaataaaatatgcgttggccaaaataaaatgtacagcaactttcgccaaaattagtgaaaacaagtcatactttaattagataaaaaaaataggctacaagatagaattatgatctacttatttcgtaagtcttatttcctttataataaagccggtccaaaactcagcctttcagcctatccatgtcggcccgaaaacattcagtcgtccgatcgcgcatctacggttccacacaagacctcgcaaccttctcgtgtcgtgccgcgaagcttctaggagccccacccccgcgcggaggtacacttcctctctcgcctgggcgcgccgtcgcgcgcacgccccacccctcgtagcttcaac

SEQ ID NO: 43607 - DNA, 9087 bp, Zea Mays
cttcatcatacccatttaaaaaaacattttcttttgaaaacaccaacaatatcccatagttttccttgagaccaaatgtgaatttaatgcaggattaacctcgtctcacatatgcatgaatccattcccatgatccggcttagatgatggtagaaagcataggtaatttatgcatcaagggtagaatgaacttgccttcttcgaagttctcatgacacgaaggttctatttctaggaggtcgagctcctacccttcttccggagctagggtttctaggacgtcgatcactgcttctagcaaaacaatcaacaaacaatacatcaaccaaagacttgctatgaaatggtgtgttataatattgtgatcattattttatgtgacctctaatgtgcttttactactatttgtgtatttgtgccaaaaatacatatatacatacatatgtatatagagaaaatagaaattagaaaaagaaaaggagtttcttggctaatgggcctggcgagagcaattcgggccagctgggcgaggtgcggtgcgggcacaaggcctagctagcccacggggaagggaacaatgggcaatagcgtgaaggggctaggcccacgtgtcagagggagggggagggaaacggcgcttagcggctattgatggggggagggcgaaccggccgccggtgaggttcgcggcggttctccgtcgttgctctggttcccgggcaatggggaggtgtgctagcacaaggagaggtgggtgttcatggggccagactcaatttggccggaggcaagctagggagggccagccacggtggggtggagggtcaccgtgatggtaatgccgctgacgaggtggtggtggttgattgggggcgtggagaggttcattgtggtcatgaggaagcagtgaagcttgtgcgctagcttgattgagctttggacgactggaggaggatatggagatctcaccgaagttgggggagggtggccgcgtgggcacagattgagcttagagaggagggatggtgagtggtgcgaggtgaataggggctttgggcggtctttttataggcggtcagggagggagcttggtggccagctggatgccggcaggcagtgaaaaagggtggcgcacatgggtggcgatgtgatgccacgacggtgaaggacgatggtggcgtgtaggtacatgcgcacagcgggagagggaaaaacggtgcccagctcaactgtgtctatcagcaagggggaggaggatggcgatcgatggcgagggtgcgagcactttgagtttgttaggagggagacgatggtgctgacaagcagggccgggttagcggagagggagagggcgaggggtgtgtcagagatgggccagggggaggacgcgggcacgaggagggggcataggtgtgggcctccgggtagaattctatttccttttttctatttcctttcttctctctctctctcttgtgtatattttcctaggtgtaaaataaatccctaccatttgctagtaacgtgaaaatagttatgtgcaatgtttctaacaatcatcatccatgcatgaatataggttttccaaagatagatgtgatgatgttggggttttgggattatgcgattagggtttcttctactaacctctgttttgagaatcgggatgttataaacttacccacttaaaagaatctttcccacgagatttaggatgggtctgagaaaagataagagtattccttcctcattgagccctcactttcccaggttgcttcttcttcaccttctcagccccactaaacattatagacccttacctctgagttccgggttttgtgaacggctaggtccaagattttcagtcgtttttctcgagactgcagatcttcctagacttggattggctattctacgatatgggtttctagcacttataggcatttttggagctggaatacatggaacacattgtggatgtctgacattgattccagtaattggaggtgaattgtgtccttctatctaacgcttttctttgcagaatgccatgcagtctaaattacagaaatggaggagcattacttgtttttgcttatatatacatcacaggaacgagtttcatactacaatcagagtgaaatgtctaaaaaaggctgaatttagcttttcttgacaatcatagtcacttagtaacaaaaaatagtgtgtgatcaagatctaaccatttccttgcatttgaagcgtttgctaggcataagaaacaatttcttcatgaactttgacaaaaaagccaaatggaaacaaccattacgagtgtaataaaaaatatccataaaaatctcataagcaggacctatagagctactcacttttgtaatatatagtttatcaaggttaggattggctgcacgctgagctgcaatttgtgaacagacctgtgggaagaataaaacatacagtcagtcctggagtatagtaaaaataaagacgagtacttgcaattttgatatgggtgtagcaattttgagctgcaatgttttctgggcacagttgggcatcctcccgtgtgcggataattataaaagctttcaggttgatggcttcacatagtactccgcaacacgatactcatacattattcatgtcaaatgagggaggtgagcacctaaacctaagaaactatcagcacagcaaatgtaccctaatccagaaaacattctctgcgtgctgacaaagctaagtattcatgagattgtacaaaaacataaatcacaccacaaataccaacatgatcacatgaccgttgtccaatgatgctcaaattgcggcactagcagcaacataccatatgagcaatgatgttcaaaaacataaatcaccacacaaatatcaccataacaatgacgttaagaaacataaatcacatcacaaataccaccataatcagtcacatgaccattgtccaacgatactcaaattgcggccctagcagcaaaaatgtcatatgagtaatgatgttcagaaacataatctttcaacaactagagaaattgaactattacaatagacgaactgataattaaacagacagtggtaacagtagcacaaaagttcacatctctatagcttagctccctccaaacgatcagacatttgaaaacctaaaaataatatttcataataatttcagtatgtctgcctaaactgtaaagcacatactgcaactctgacaagataaaaggaaaacgaacatgagttacaagttctgaaccccgtgcattatagctctagttctgattcagattcgaattctgattttgaatctggttcgtattccagatctgatttaattgattttgaatctaatttaggttctagtttgggttctaattaaagttttgatttgaattcttatgaccgacaaaccatgccaaaggttttaacctatgtgcaccccaatttctcaagaattcgagaaatttcagacatttaatcatcattatctgctctgcggtaagaaccacctgaccagctactggatcaaatctcaaaccctaaagtgttttttctgacttttattgaagcatgtgtgtttacttaggtcttctttgggatgatcataggttgtggtgtgattataaaagagtgttctttcaatcagtacatttgtcctaactgattcatccatctgcaaagtggtaactgtggcaacataagcaattgcataaagatggttctcatttcattctttttaatcgaccaccttagatgatcatatatctccttaaaaaactatgatacttggttgctaacagcaaaaatgcatgaatgtgaaacaattctctaccatcatcagtaagaattttgttaaaaaaataatgtatctcagctggaggtgcaccagaaaaggtatcatctttaataacagcatgagcagacacataattactccaaataccctcaggaagctgttcaggggtaagatttttaataattgtcacatctctaaacctcacatctccaagatagcttactttgatattgtttgacactgaaattagataagcaaacatcacactccttatttcctcttatcccccaagcattgtcctgacagtctgcttactaatatttgttgcaattttatatgaagttacaacatcagtcttaccgagtaaaacaataaaactacatccacatttgttatcccaaattcattaatcatcactcctcctgattctatgaaatcagcaagaaaaattgatacatcacaacattcttcaacaagagtatcgtcagggagtagcagcatgtagcgagtgtaagagatctagaacataataggattgggtattcctattttgaagaggatctgagcctttgttcgggatctgagcctttcttttgggtattcctattttacagctggtgctgcaacggattcagaacctgctgctgatggatccgggacctagttccccgatggacgtggatccgactcatggtgcggtaacgcattctgctcctgctgctcttaatggtaagtatatgaggccctgtttagtagccacgtttttcatagtttttaggtaataccatggtattagaaaaaactatggcattcatagccacaaggtgtttggcgggcttctttgaaaaactttgtattaaaattgtggtattctcaaattgtagtattcaaaactttgatttggagtatttttggagtttatataactatagtattgaatgagtttattcctggtcaataagttcaatgatgttcaactagttttgtacaaatgctcatcctttgatcattgaagctatttatactaatcaacagtagcattcttgtgcatgtacttttactgattctgtgaattggtaagattagaagggattgtttctgttttgtcttgttgtgcatacatttgttgagttttttgtggcgtagggtgactgtgtgagattcaggctgctcctgtccccatcccctcaatataaaataatctttgtatcttataacttttttgggtatacatttgtctgacgtacagtttcttttgttaacagtcccgcaaccagttttaccttagatctcctacactcgctacatgctgctgctccctgacggcactctagttgaagaaggttataatgattcaatttttcttaataatttcataaaatcaggaggagagatggttcgttaatttgggatgacagatgtggatggagtttttatagttttatctggtgagactgatattgtatcttcatatgaaattgcaacaaatattagtaagcaaacttttaggacaatgcttgagaggataagataaaataaggagcgtggtgttttctaatctgatttcagtgccaacaatatcaaagtaagctctcttggtgagatgagatttacggatgtgaccttagaaatcttatctctgaacagcttactgagggcattaagagtaattatgtgtctgtccatactattattaaagatgatatctactctagtgtaccttcagctgagatacaatatcttcttaacaaaattatttctaatgatggtatagaattgtttcacattcatgtatcttgttgttaacaaacaagtatcatatttttttaagatgtatgatcatctgaggtggttcattaaaaaggatgaaatgataaccatcttgatgcaattgcctgaagcttatgttgccacagttatcactttgcagctaaatggatcagttgttgagaacatttactgaaaacacaaagttagtacaaatgtgttgctttaaagaacattcatctataaccacaccacagtttatggtcatgacaaagaatacccaaataaacaaacatcctttaataaaagtcagaaaaggaacttcaggatttggaattgcatccagtagctggtcaggtggttcttaccgcacatcagatgaggatgattaaatgcataaaattccccgagttcttgagaaattagggtgcacataggtttgagtctttggcatggtttatcggtcatcagaatccaaatcataactctaatcagaactcaaaccagaacccaaatcagattaaaaatcaccaaatcagatctaaaatccgaatcagattcaaaatcagaacctgaatctgaatcagaatcatcagaaccagagctacaatgcacgaggtttagaatttgtaactcatatttgttttcctcttatcttgtcagagttgcagtatatgttttacattttatgtatgtatactgaagttcttatgaaagattatttttaaatttccaaatatctgattatttaaagggagctaagctatagagctgtgaacttttgtgctactgttaccactgtttgtttaatcatcaactcgtctattgtaatagttaaattttttagttgttgaaagattatgttgctcatatgacattttgatgttaaagccgcaatttgagcatcattggacgatggtcatgtgactgattatggtgttatttgtctattgtaatagttcaatttttttagttgttgaaagattatgatattttgctgttagagctgtaatttgagcatcattgaacgatggtcatgtgactgattatagtgttatttgtagtgtgatttatgtttcttatcatcattgctatggtggtatttgtgttgtgatttatgtttctgaacattattgctcatatagcattttgttgctagtttgtcatcagcgagttcggatacgtgagaaagatgtggctggtcaccattgacatgagcaccaggagagtggagtcattttctcagtataccaatgggagggatgatgccattggaaccgagggcgcttacttgaccaaagttggtgcacaagttgtgtactcaaaatatgcaggcacagaattgaaattcaatgacgccgaccatctcattttgaaagatgacataattggtattcttgacagtgatgatgtgaaggatatgaaaccactgaatgatcgcattctgattaaggtatgcttatcaagaaacaagaatattactatcgtgacactatccagattaattggctactgtactgctctgttcatgttattttaagcaagccttttccgacgccacaatttgtctagaaaattcacacacaagttgcatattccatatacggaaggcttcatctctagtgacaacttatatcaagtttagaaaattgtgtttggaccagaataaaccatataatacgacatatgcatccactagaacagaataggaaagccacacatcggacagaagccaaaaagttttattatgtctttggcagatgttctgtttattcacgatatgtctaaatgtcttctgtcaagtctggatactagagcaaagcatgtccaggaagctccaatttgtgcgttccttagccgatgtgaactctttgacttggctcagctcaccactgacccattctgagtgaaatcttgtttggcacttgtcttacatttgcaccagatcgattatgcaccgaggaacgagttatcacccattctatagtagggatattcaattacagtgaaatgtcatatacaaaaaccttgtgattgtacatgtacaacattaggtcttgtttaaattaaatgtcacgatcctgcttgccccacgtccaccaaaggtcgaccgggtttatgatcgaggtctagtttggttttctctctaacagtgacctatttggtaggatttaatgattatgagagaaattttaaattaatctaattcacccttctttcttggacatcttagtcctttcagtcgtgttcctatcacttctcttaaggttaaggatgaagatagatatttatttggatatcattttgtggtcttttttcttcgattgacgaataaataagagatataatataatctgctaagtaaaattttattcttgtttttagcattgagtttataaagattcataaaagttaaaccacaaatttatcaaatatcttattaaatgatatatataaaattcagatattgtttcacctttttgttgtagggagcaaataatgtataaaacaatttatgtagataacataagaaaagatcaatataatacaataaacttagttattataatgtgcttgacaatataaaaaaagatcaacatcaaattttatatatctctattttaaaatattaaattgatcctaaaaattgtgatatccacttacatctctccttcacttttatagttttatgtaatttacattgatgtttttacatttctagaattgacacgatacaatatggttggaacctagggtataagacattgtgcatagaatagaaatcacactaggggtaaaatgggctaaatgatagcctttaattgttatgattagcccaattaactttctcttgggcatcttaatctttttagaggtatattaataacttatgtcacaagctatgatacttaattgttatgattttgctcccactaattttgatgttctttaagaacataatcccttgtacttattaattcgtaatgtagataactcatttacttagaatccaaattcctatccttagctagattgtacttttgtcttgatgaggttatagtcaaatattcatcaatcggtatgagccagaatgataaaaaatgaggcatacgagtttctaataacaagctttgttaaactaatttaataaaatatgcgttggccaaaataaaatgtacagcaactttcgccaaaattagtgaaaacaagtcatactttaattagataaaaaaaataggctacaagatagaattatgatctacttatttcgtaagtcttatttcctttataataaagccggtccaaaactcagcctttcagcctatccatgtcggcccgaaaacattcagtcgtccgatcgcgcatctacggttccacacaagacctcgcaaccttctcgtgtcgtgccgcgaagcttctaggagccccacccccgcgcggaggtacacttcctctctcgcctgggcgcgccgtcgcgcgcacgccccacccctcgtagcttcaac

SEQ ID NO: 43608 - DNA, 8841 bp, Zea Mays
cttcatcatacccatttaaaaaaacattttcttttgaaaacaccaacaatatcccatagttttccttgagaccaaatgtgaatttaatgcaggattaacctcgtctcacatatgcatgaatccattcccatgatccggcttagatgatggtagaaagcataggtaatttatgcatcaagggtagaatgaacttgccttcttcgaagttctcatgacacgaaggttctatttctaggaggtcgagctcctacccttcttccggagctagggtttctaggacgtcgatcactgcttctagcaaaacaatcaacaaacaatacatcaaccaaagacttgctatgaaatggtgtgttataatattgtgatcattattttatgtgacctctaatgtgcttttactactatttgtgtatttgtgccaaaaatacatatatacatacatatgtatatagagaaaatagaaattagaaaaagaaaaggagtttcttggctaatgggcctggcgagagcaattcgggccagctgggcgaggtgcggtgcgggcacaaggcctagctagcccacggggaagggaacaatgggcaatagcgtgaaggggctaggcccacgtgtcagagggagggggagggaaacggcgcttagcggctattgatggggggagggcgaaccggccgccggtgaggttcgcggcggttctccgtcgttgctctggttcccgggcaatggggaggtgtgctagcacaaggagaggtgggtgttcatggggccagactcaatttggccggaggcaagctagggagggccagccacggtggggtggagggtcaccgtgatggtaatgccgctgacgaggtggtggtggttgattgggggcgtggagaggttcattgtggtcatgaggaagcagtgaagcttgtgcgctagcttgattgagctttggacgactggaggaggatatggagatctcaccgaagttgggggagggtggccgcgtgggcacagattgagcttagagaggagggatggtgagtggtgcgaggtgaataggggctttgggcggtctttttataggcggtcagggagggagcttggtggccagctggatgccggcaggcagtgaaaaagggtggcgcacatgggtggcgatgtgatgccacgacggtgaaggacgatggtggcgtgtaggtacatgcgcacagcgggagagggaaaaacggtgcccagctcaactgtgtctatcagcaagggggaggaggatggcgatcgatggcgagggtgcgagcactttgagtttgttaggagggagacgatggtgctgacaagcagggccgggttagcggagagggagagggcgaggggtgtgtcagagatgggccagggggaggacgcgggcacgaggagggggcataggtgtgggcctccgggtagaattctatttccttttttctatttcctttcttctctctctctctcttgtgtatattttcctaggtgtaaaataaatccctaccatttgctagtaacgtgaaaatagttatgtgcaatgtttctaacaatcatcatccatgcatgaatataggttttccaaagatagatgtgatgatgttggggttttgggattatgcgattagggtttcttctactaacctctgttttgagaatcgggatgttataaacttacccacttaaaagaatctttcccacgagatttaggatgggtctgagaaaagataagagtattccttcctcattgagccctcactttcccaggttgcttcttcttcaccttctcagccccactaaacattatagacccttacctctgagttccgggttttgtgaacggctaggtccaagattttcagtcgtttttctcgagactgcagatcttcctagacttggattggctattctacgatatgggtttctagcacttataggcatttttggagctggaatacatggaacacattgtggatgtctgacattgattccagtaattggaggtgaattgtgtccttctatctaacgcttttctttgcagaatgccatgcagtctaaattacagaaatggaggagcattacttgtttttgcttatatatacatcacaggaacgagtttcatactacaatcagagtgaaatgtctaaaaaaggctgaatttagcttttcttgacaatcatagtcacttagtaacaaaaaatagtgtgtgatcaagatctaaccatttccttgcatttgaagcgtttgctaggcataagaaacaatttcttcatgaactttgacaaaaaagccaaatggaaacaaccattacgagtgtaataaaaaatatccataaaaatctcataagcaggacctatagagctactcacttttgtaatatatagtttatcaaggttaggattggctgcacgctgagctgcaatttgtgaacagacctgtgggaagaataaaacatacagtcagtcctggagtatagtaaaaataaagacgagtacttgcaattttgatatgggtgtagcaattttgagctgcaatgttttctgggcacagttgggcatcctcccgtgtgcggataattataaaagctttcaggttgatggcttcacatagtactccgcaacacgatactcatacattattcatgtcaaatgagggaggtgagcacctaaacctaagaaactatcagcacagcaaatgtaccctaatccagaaaacattctctgcgtgctgacaaagctaagtattcatgagattgtacaaaaacataaatcacaccacaaataccaacatgatcacatgaccgttgtccaatgatgctcaaattgcggcactagcagcaacataccatatgagcaatgatgttcaaaaacataaatcaccacacaaatatcaccataacaatgacgttaagaaacataaatcacatcacaaataccaccataatcagtcacatgaccattgtccaacgatactcaaattgcggccctagcagcaaaaatgtcatatgagtaatgatgttcagaaacataatctttcaacaactagagaaattgaactattacaatagacgaactgataattaaacagacagtggtaacagtagcacaaaagttcacatctctatagcttagctccctccaaacgatcagacatttgaaaacctaaaaataatatttcataataatttcagtatgtctgcctaaactgtaaagcacatactgcaactctgacaagataaaaggaaaacgaacatgagttacaagttctgaaccccgtgcattatagctctagttctgattcagattcgaattctgattttgaatctggttcgtattccagatctgatttaattgattttgaatctaatttaggttctagtttgggttctaattaaagttttgatttgaattcttatgaccgacaaaccatgccaaaggttttaacctatgtgcaccccaatttctcaagaattcgagaaatttcagacatttaatcatcattatctgctctgcggtaagaaccacctgaccagctactggatcaaatctcaaaccctaaagtgttttttctgacttttattgaagcatgtgtgtttacttaggtcttctttgggatgatcataggttgtggtgtgattataaaagagtgttctttcaatcagtacatttgtcctaactgattcatccatctgcaaagtggtaactgtggcaacataagcaattgcataaagatggttctcatttcattctttttaatcgaccaccttagatgatcatatatctccttaaaaaactatgatacttggttgctaacagcaaaaatgcatgaatgtgaaacaattctctaccatcatcagtaagaattttgttaaaaaaataatgtatctcagctggaggtgcaccagaaaaggtatcatctttaataacagcatgagcagacacataattactccaaataccctcaggaagctgttcaggggtaagatttttaataattgtcacatctctaaacctcacatctccaagatagcttactttgatattgtttgacactgaaattagataagcaaacatcacactccttatttcctcttatcccccaagcattgtcctgacagtctgcttactaatatttgttgcaattttatatgaagttacaacatcagtcttaccgagtaaaacaataaaactacatccacatttgttatcccaaattcattaatcatcactcctcctgattctatgaaatcagcaagaaaaattgatacatcacaacattcttcaacaagagtatcgtcagggagtagcagcatgtagcgagtgtaagagatctagaacataataggattgggtattcctattttgaagaggatctgagcctttgttcgggatctgagcctttcttttgggtattcctattttacagctggtgctgcaacggattcagaacctgctgctgatggatccgggacctagttccccgatggacgtggatccgactcatggtgcggtaacgcattctgctcctgctgctcttaatggtaagtatatgaggccctgtttagtagccacgtttttcatagtttttaggtaataccatggtattagaaaaaactatggcattcatagccacaaggtgtttggcgggcttctttgaaaaactttgtattaaaattgtggtattctcaaattgtagtattcaaaactttgatttggagtatttttggagtttatataactatagtattgaatgagtttattcctggtcaataagttcaatgatgttcaactagttttgtacaaatgctcatcctttgatcattgaagctatttatactaatcaacagtagcattcttgtgcatgtacttttactgattctgtgaattggtaagattagaagggattgtttctgttttgtcttgttgtgcatacatttgttgagttttttgtggcgtagggtgactgtgtgagattcaggctgctcctgtccccatcccctcaatataaaataatctttgtatcttataacttttttgggtatacatttgtctgacgtacagtttcttttgttaacagtcccgcaaccagttttaccttagatctcctacactcgctacatgctgctgctccctgacggcactctagttgaagaaggttataatgattcaatttttcttaataatttcataaaatcaggaggagagatggttcgttaatttgggatgacagatgtggatggagtttttatagttttatctggtgagactgatattgtatcttcatatgaaattgcaacaaatattagtaagcaaacttttaggacaatgcttgagaggataagataaaataaggagcgtggtgttttctaatctgatttcagtgccaacaatatcaaagtaagctctcttggtgagatgagatttacggatgtgaccttagaaatcttatctctgaacagcttactgagggcattaagagtaattatgtgtctgtccatactattattaaagatgatatctactctagtgtaccttcagctgagatacaatatcttcttaacaaaattatttctaatgatggtatagaattgtttcacattcatgtatcttgttgttaacaaacaagtatcatatttttttaagatgtatgatcatctgaggtggttcattaaaaaggatgaaatgataaccatcttgatgcaattgcctgaagcttatgttgccacagttatcactttgcagctaaatggatcagttgttgagaacatttactgaaaacacaaagttagtacaaatgtgttgctttaaagaacattcatctataaccacaccacagtttatggtcatgacaaagaatacccaaataaacaaacatcctttaataaaagtcagaaaaggaacttcaggatttggaattgcatccagtagctggtcaggtggttcttaccgcacatcagatgaggatgattaaatgcataaaattccccgagttcttgagaaattagggtgcacataggtttgagtctttggcatggtttatcggtcatcagaatccaaatcataactctaatcagaactcaaaccagaacccaaatcagattaaaaatcaccaaatcagatctaaaatccgaatcagattcaaaatcagaacctgaatctgaatcagaatcatcagaaccagagctacaatgcacgaggtttagaatttgtaactcatatttgttttcctcttatcttgtcagagttgcagtatatgttttacattttatgtatgtatactgaagttcttatgaaagattatttttaaatttccaaatatctgattatttaaagggagctaagctatagagctgtgaacttttgtgctactgttaccactgtttgtttaatcatcaactcgtctattgtaatagttaaattttttagttgttgaaagattatgttgctcatatgacattttgatgttaaagccgcaatttgagcatcattggacgatggtcatgtgactgattatggtgttatttgtctattgtaatagttcaatttttttagttgttgaaagattatgatattttgctgttagagctgtaatttgagcatcattgaacgatggtcatgtgactgattatagtgttatttgtagtgtgatttatgtttcttatcatcattgctatggtggtatttgtgttgtgatttatgtttctgaacattattgctcatatagcattttgttgctagtttgtcatcagcgagttcggatacgtgagaaagatgtggctggtcaccattgacatgagcaccaggagagtggagtcattttctcagtataccaatgggagggatgatgccattggaaccgagggcgcttacttgaccaaagttggtgcacaagttgtgtactcaaaatatgcaggcacagaattgaaattcaatgacgccgaccatctcattttgaaagatgacataattggtattcttgacagtgatgatgtgaaggatatgaaaccactgaatgatcgcattctgattaagaacagaataggaaagccacacatcggacagaagccaaaaagttttattatgtctttggcagatgttctgtttattcacgatatgtctaaatgtcttctgtcaagtctggatactagagcaaagcatgtccaggaagctccaatttgtgcgttccttagccgatgtgaactctttgacttggctcagctcaccactgacccattctgagtgaaatcttgtttggcacttgtcttacatttgcaccagatcgattatgcaccgaggaacgagttatcacccattctatagtagggatattcaattacagtgaaatgtcatatacaaaaaccttgtgattgtacatgtacaacattaggtcttgtttaaattaaatgtcacgatcctgcttgccccacgtccaccaaaggtcgaccgggtttatgatcgaggtctagtttggttttctctctaacagtgacctatttggtaggatttaatgattatgagagaaattttaaattaatctaattcacccttctttcttggacatcttagtcctttcagtcgtgttcctatcacttctcttaaggttaaggatgaagatagatatttatttggatatcattttgtggtcttttttcttcgattgacgaataaataagagatataatataatctgctaagtaaaattttattcttgtttttagcattgagtttataaagattcataaaagttaaaccacaaatttatcaaatatcttattaaatgatatatataaaattcagatattgtttcacctttttgttgtagggagcaaataatgtataaaacaatttatgtagataacataagaaaagatcaatataatacaataaacttagttattataatgtgcttgacaatataaaaaaagatcaacatcaaattttatatatctctattttaaaatattaaattgatcctaaaaattgtgatatccacttacatctctccttcacttttatagttttatgtaatttacattgatgtttttacatttctagaattgacacgatacaatatggttggaacctagggtataagacattgtgcatagaatagaaatcacactaggggtaaaatgggctaaatgatagcctttaattgttatgattagcccaattaactttctcttgggcatcttaatctttttagaggtatattaataacttatgtcacaagctatgatacttaattgttatgattttgctcccactaattttgatgttctttaagaacataatcccttgtacttattaattcgtaatgtagataactcatttacttagaatccaaattcctatccttagctagattgtacttttgtcttgatgaggttatagtcaaatattcatcaatcggtatgagccagaatgataaaaaatgaggcatacgagtttctaataacaagctttgttaaactaatttaataaaatatgcgttggccaaaataaaatgtacagcaactttcgccaaaattagtgaaaacaagtcatactttaattagataaaaaaaataggctacaagatagaattatgatctacttatttcgtaagtcttatttcctttataataaagccggtccaaaactcagcctttcagcctatccatgtcggcccgaaaacattcagtcgtccgatcgcgcatctacggttccacacaagacctcgcaaccttctcgtgtcgtgccgcgaagcttctaggagccccacccccgcgcggaggtacacttcctctctcgcctgggcgcgccgtcgcgcgcacgccccacccctcgtagcttcaac

SEQ ID NO: 43609 - DNA, 1998 bp, Zea Mays
ggtccggctgtcctatgcccttcctgtacctctgctaggttggtgcacaagttgtgtactcaaaatatgcaggcacagaattgaaattcaatgacgccgaccatctcattttgaaagatgacataattggtattcttgacagtgatgatgtgaaggatatgaaaccactgaatgatcgcattctgattaagaacagaataggaaagccacacatcggacagaagccaaaaagttttattatgtctttggcagatgttctgtttattcacgatatgtctaaatgtcttctgtcaagtctggatactagagcaaagcatgtccaggaagctccaatttgtgcgttccttagccgatgtgaactctttgacttggctcagctcaccactgacccattctgagtgaaatcttgtttggcacttgtcttacatttgcaccagatcgattatgcaccgaggaacgagttatcacccattctatagtagggatattcaattacagtgaaatgtcatatacaaaaaccttgtgattgtacatgtacaacattaggtcttgtttaaattaaatgtcacgatcctgcttgccccacgtccaccaaaggtcgaccgggtttatgatcgaggtctagtttggttttctctctaacagtgacctatttggtaggatttaatgattatgagagaaattttaaattaatctaattcacccttctttcttggacatcttagtcctttcagtcgtgttcctatcacttctcttaaggttaaggatgaagatagatatttatttggatatcattttgtggtcttttttcttcgattgacgaataaataagagatataatataatctgctaagtaaaattttattcttgtttttagcattgagtttataaagattcataaaagttaaaccacaaatttatcaaatatcttattaaatgatatatataaaattcagatattgtttcacctttttgttgtagggagcaaataatgtataaaacaatttatgtagataacataagaaaagatcaatataatacaataaacttagttattataatgtgcttgacaatataaaaaaagatcaacatcaaattttatatatctctattttaaaatattaaattgatcctaaaaattgtgatatccacttacatctctccttcacttttatagttttatgtaatttacattgatgtttttacatttctagaattgacacgatacaatatggttggaacctagggtataagacattgtgcatagaatagaaatcacactaggggtaaaatgggctaaatgatagcctttaattgttatgattagcccaattaactttctcttgggcatcttaatctttttagaggtatattaataacttatgtcacaagctatgatacttaattgttatgattttgctcccactaattttgatgttctttaagaacataatcccttgtacttattaattcgtaatgtagataactcatttacttagaatccaaattcctatccttagctagattgtacttttgtcttgatgaggttatagtcaaatattcatcaatcggtatgagccagaatgataaaaaatgaggcatacgagtttctaataacaagctttgttaaactaatttaataaaatatgcgttggccaaaataaaatgtacagcaactttcgccaaaattagtgaaaacaagtcatactttaattagataaaaaaaataggctacaagatagaattatgatctacttatttcgtaagtcttatttcctttataataaagccggtccaaaactcagcctttcagcctatccatgtcggcccgaaaacattcagtcgtccgatcgcgcatctacggttccacacaagacctcgcaaccttctcgtgtcgtgccgcgaagcttctaggagccccacccccgcgcggaggtacacttcctctctcgcctgggcgcgccgtcgcgcgcacgccccacccctcgtagcttcaac

SEQ ID NO: 43610 - DNA, 3824 bp, Zea Mays
cccgcgcacaccaccaccaccactaccacgacggacgacgaggccctttgagcagttcccagaagaagagatctcaaatggagactgaagaagcttgcgtctggcgctcaaatggagaacgaagaagagatctcggatggaaggaagagaggagaatggggaggagaaaaccatagtagcgtctccagtgccggcggcgagagagagaagggaaggagacgggagaagacaacggcgcgcggacggaggatgattattcgttctctcaacggctaatatcgattgtcagtctattttagagtgaagtctttcccctggtttttcatatcggcgaaaccctcgccaacgcctccgtttcgtcgaagccacatccgcggcgttttataatcccaaaagtctcttcttcacgagttcatgtggcgtggtactgtcgtactggtgtgcccgtgttcacggcttcacgcgttgcagttgcagctgcctgtgttcacgtgggaaaagggaatatgggctgagctggtgggccaaaatagttggcaagtcaagtgggccaccgggccaaaattccaattttcaaagcagacgcgggcctgatcgtccatgtgttgatctgacgattagtcgcgattaatcgcactatcacttatttgatcacgccgttagccctaatcgcctccgaagttatgatcaggcgattaatcgtcgattaatcacgattcgtgattgatcgggcgttctgaaaacgtggtaccggaggagggcgagggcggcagtagtttgcacgttggggcgccacttcggtcggagcaggagacggaaatttatatggcgagccgtcccgcaccccaccgaacgagagttcggatgcgcgctctggtgtgctgctcggccgaagagcgccaaggtcggatgcacgctctggtgtggatccattccaacgatgtatgaagctttcctcgtcgcttgagcatgtggggccaactacaaaaaataagatggacacatgggaaaaaagagcgtctaatcaaatggggaaaatagattcatgcccaccgacgtcttagatgaacaagcaaaaaagaccatggaagaaaaataagatgaacacatgggaaaaaaagagggtctaatcaggagtactctctaatcatatcgacataaaaaccaattactacctccttccccaaatcttcccttcatgaagatgagggaagatatatccatggccatggtcatcaatcaattctatacaaacaaaaaaacatcaattaaaacaaacgatcttactggcgtcttggatcatctctgaaagtcgcctagagggggtgaataggcgaaacttgaaatttataactttaaacgcgcactaaggtcgggggatagcgttacaattaaattcaagtcggaaagagagggaaaacaaatcaaccaagaaataaagtgagtgaacacggtgatttgttttaccgaggttcggttccaaagaacctagtccctattgaggaggtcacaaagactggatccatttcaaccctttccctctctcaaacggtcacttagaccgagtgagccttcttccttaatctcacgggtcactaagacctcgcaaggactaccacacacttggtgtctcttgcctcgcttgcaaatcacttgagaataagaatgggaaaaaaagaaaggcaatccaaacgacaagaactcaaatgaacacaaaaatctctctctcacaagccactaagtgtttggaatgaatttggggcttagaggtgatttgatcttttgtattgtgtcttggagtgaatgctagagctctttgtattgaatgtgatcttcagaaaacttggatgctcaatgttgtggtggttgggggtatttatagcccccaaccacttaggtagcagttggggaggctgctggcgatgggcgcaccggacagtccggtgcgccaccggacaggcactgtgcactgtccggttccccgccatgtcacccaatcgttagggttcagagcgaagtcgatcgttggagctttttcctcttgcggcatcggatagtctggtgccacaccggacagtccggtgccctctgacttcgcggctctgacttctgccgcagcactgtggctcactgtagcactttgcagagtcgaacgttggcgctggatagtcgttgcccgctggctcatcggacagtctagtggcacaccggacagtccggtgaattatagcggagcgcgccttcgttttcccgagagtggttggttgacacctgtacggccctggtgcaccggacacagtccggtggcacaccggacagtccggtgcgccatttttcagcccactcgattccttttgctctttttaaattgagtccctaactcgaatcttttattggtttgtgttgaaccttatgcacctgtaatacatgaattctaggaaaaggttaaccctatttccctttcaatctccccctttttggtgattgatgataacacaaaccaaagcaaatataaagtgtagaaatgtaactagtttgcatttagaatgtgcataggttacttgggagttaaaccaattgaatatctcactaaatatgaatggattgctttttcttttatttaacattttggaccacatttgcaccacttgttttgtttttgcaaatacttttggaaaatcttttcaaagtctttttgcaaatagtcaaaggtatatgaataagattgcaagaagcatttttcaagatttgaaaactctccccctgtttcaaatgcttttcctttgactaaataaaactccccctgaatgaacttctcctcttagagggttttgaaatagataccaaattaaggtttgatttttaaagataccaattgaaggattaattgtaaattagataccaatcgaaaataccaagtaaaacttcattttgaaattttttgaaatggtagttgtgcggtccttttgctttgggcttaatattttatccccctttcgcattaatcgcaaaaaacagagacttcgagagcccttataatactttctcccaaatggtaatataaatatgagtgaagggttataccaattgagagtggagaaacaacgacaaagagtagatgataccgttagagatggagtggaagccttgtctttgccgaagattccatttccctttcaatctacgacttagtatagaaatacacttcaaagcatattagtcgtagccttggtacaagaataataagaaatatgcatttgtaccaaaatgaaagagacatgatcaaaggtatataaatgagctatgtgcgcaatgtttcaatcaaaattctgagaatcaagtatatttagctcattcctaagtttgctaatggtgttctcatctagtggcttgataaagatatcagctaattggttttgggtattaacataagcaatttcgatatctcccttttgttggtgatccctcagaaagtgatatcgaatgtctatgtgcttagtgcggctgtgttcaacgggattattcgccatgcggattgcactctcattatcatataggagagggactttgctcaatttgtagccatagtccccaaggatttgcctcatccaaagtaattgcgcacaacaatggcctgcggcaatgtactcagcttcggcggtggaaagagctactgagttttgtttctttgaagcccatgacaccagggatctccccagaaactgacaagtctctaatgtgctcttcctatcaattttacaccctgcccaatcggcatcggaatatcctattaaatcaaacgaggatcccttggggtaccaaag

SEQ ID NO: 43611 - DNA, 2501 bp, Zea Mays
atttgatttgcgcgcagcaggtttccgtcagatcagactgacggccggtgaagaatatgaaaccgcgtttcaaagttcgcacttgtttcatttgatgatattctcgtttgatgctagtttggaaactcaaatcctctagagaaactcaaatcctacatttgatttcggaagttttgtggattgtcttactgttgtcttcagccaattccctctggacaagtttcctgacaacaacactcgcagcaaggactgatgctggttgtaccgcaccgtgtcgaccacccgtgacgggggtgcactcctgttcaccaatgtcgcccacaacgacaaggttggctatggggcactcaaggctggtgttggcttcactatcaggtgccactacctcatgttatgcaacatcacggagccgaacatggtcgggggtgtgtgggaagaggactacacggtcacctccaatgagctttggtctgccaaccccgggcgcctaccgcaagcttcctaggagcgagtcagcaatttcgctcgttttcctggtatccagactttcatagtaggtctcgtagccaatatccctaccaaacaatccaaaatggatgacattctcatgttcccccaagtcgacatggacaggccacatgtagtgcactttgtcatcagcgagttcggttacgtgagaaagaagatgtggctggtcaccattgacatgagcaccaggagagtggagtcattttctcagtataccaatgggagggaggatgtcattggaaccgagggcgcttacttgaccaatgtaaggtccagctatcccatgcccttcctcccctctcagtcttccaagtacctctgttaggtaatattgctgctggattttatctatcacctaactaaatttttgctggttgcacacgtatttgcggcatgtatgcaagttcttcactttaatcttgttagcattagcatttcactactgggagagcagcctatttatccaaccagaacagtaatgtatccttcaggctacttagtgaaagataagcaataggcttatgaacgatagagtagtgaaggtaagcagtaggcccatgaacaatggattgtcaatactttttttcatatgcatttggaatttggagattattaccggtgcctgcttttggcaattctttcctgagtaaatatagcacaagtactttctcttatttgtagaagcaagcttgatttgaacatcatttgtctagatcatttttgtcacactatttgcctattgcaggaagaggaaagattctgagctgccaacttcatcggacttgttaattatgtttatgtcttcctggccaaccattttgctttcttctaaatatcagatatttccacaagaaatgcttcggtcaggaaaactggatgagctatttactaagttgtggcttctgttcttattaatatgctgtatgaactctggataagttgtgcagatacttaccattaagagcagcaggagctgaatgcgttacagcaaccaggtcccggatccatcgcagcagcaggttccgaatccgttgcagcaccagctacaaaataggaatacccaaaagaaaggctcagatccagaacagaataggaatacccaatcccatatagactgtgtagcgaaagagtacacatgcagaggagcgtaccagagcaaagttttcagatcggcgattagcctctgatcgccagaagggtgatcagccgactaattacgattagtcgacgatcagcccgattaatcgctctgcgctcccgaggcggcctccgtgcgcactgcgcaggttcttcgcggccgccaggacatggcttcaggctttgaactgccggtggacaaacaggcaacaaccacacgcccatggacatggcttcaggctttgaacactagcactagcagcctagcactcgactccaatccaagtatcctaacacctgtagagatgaacgggactggggacgggggataagagatggactggtgccctggtggagccgtggagactgagaagggaatcgtacttgcatgctggcgccgccgcgtcggggatggaggggccgagttggacgatgtcaccggtagcgcgccgccgtcgctagggttcctcagtggcggctctattcttcacggagacttttgggattatgaaacgccacggatgtggcttcgacgaaacggaggcgttggcgagggtttcgacaacatgaaaaaccaggagaaagactccactctaaaatagactgacaatcaatattagccgttgagagaacgaataaccatcctccgtccgcgcgctcccatctccttcccttctcccgtctccttcccttctctctcgccggcgtgggacgtgaagctcccgtctccttcccttctctctcgccggcgtgggacgtaaagggtcccagcagcgacttcagcagggccacgccgccggcctcggcgatggccttggtgacggactagtgggcgg

SEQ ID NO: 43612 - DNA, 1971 bp, Zea Mays
ggtccggctgtcctatgcccttcctgtacctctgctaggttggtgcacaagttgtgtactcaaaatatgcaggcacagaattgaaattcaatgacgccgaccatctcattttgaaagatgacataattggtattcttgacagtgatgatgtgaaggatatgaaaccactgaatgatcgcattctgattaagaacagaataggaaagccacacatcggacaggagtcaaaaagttttattatgtctttggcagatgttctgtttattcacgatatgtctaaatgtcttctgtcaagtctggatactagagcaaagcatgtccaggaagctccaatttgtgcgttccttagccgatgtgaactctttgacttggctcagctcaccactgacccattctgagtgaaatcttgtttggcacttgtcttacatttgcaccagatcgattatgcaccgaggaacgagttatcacccattctatagtagggatattcaattacagtgaaatgtcatatacaaaaaccttgtgattgtacatgtacaacattaggtcttgtttaaattaaatgtcacgatcctgcttgccccacgtccaccaaaggtcgaccgggtttatgatcgaggtctagtttggttttctctctaacagtgacctatttggtaggatttaatgattctgagagaaattttaaattaatctaattcacccttctttcttggacatcttagtcctttcagtcgtgttcctatctcttctcttaaggttaaggatgaagatagatatttattaggatatcattttgtggtcttttttcttcgattgacgaataaataagagatataatctgctaagtaaaattttattcttgtttttagcattgagtttataaagattcataaaagttaaaccacaaatttatcaaatatcttattaaatgatatatataaaattcagatatggtttcacctttttgttgtagggagcaaataatgtataaaacaatttatgtagataacataagaaaagatcaatataatacaataaacttagttattataatgtgcttgacaatataaaaaagatcaacatcaaattttatatatatctattttaaaatattaaattgatcctaaaaattgtgatatccacttacatctctccttcacttttatagttttatgtaatttacattgatgtttttacatttctagaattgacacgatacaatatggttggaacctagggtataagacattgtgcatagaatagaaatcacactgggggtaaaatgggctaaatgataggctttaattgttatgacttatgattagcccagttaactttctcttgggcatcttaatctttttagaggtatattaataacttatgtcacaagctatgatacttaactgttatgattttgctcccactaattttgatgttctttaagaacataatcccctgtacttattacggtgtaatgtagataactcatttacttagaatccaaattcctatccttagctagattgtacttttgtcttgaggttatagtcaaatattcatcaatcggtattagccagaatgataaaaaatgaggcatacgagtttctaataacaagctttgttaaactaatttaataaaatatgcgttggccaaaataaaatgtacaacaactttcgccaaaattagtgaaaacaagtcatactttaattagataaaaaataggctaaaagatagaattatgatctacttatttcttaagtcttatttcctttatattaaagccggtccaaaactcagcctttcagcctatccatgtcggcccgaaaacattcagtcgtccgatcgcgcatctacggttccacacaagacctcgcagccttctcgcgtcgtgccgcgaagcttctaggagccccacccccgcgcggaggtccacttcctctctcgcctgggcgcgccgtcgcgcgcac

SEQ ID NO: 43613 - DNA, 5100 bp, Zea Mays
gtgagcttatcgatccgtggatgcggtcctatataagacgctagacaaccatcaccagaaaccatccccaacacaagtttggttttgcctatgcttattactgcaccgccgtggtagtcctcttcatcccgagcgctgacgtgcatctgcgattggaagagtaggtcttcagaacccatcgccttcaaaatcctgcaccgagagaaggtgaataaggtttttgggaagcgtctacacgtgactgctcgcgctcttctccatagctactgtcgacgtcgtcgaccctctcgcttccacgctgtcaatcacatgaaatgtgtgattgaaagatacagcgaggcaagagaggaacaccgtcagactatgagcgcaagtgctgaggccaagctctggcaaagcgaggcagaaagcttgaggcagcaactgcataacttagaagagcaccatcggcagttgttgggtcagcagctttctggcctgaacgtgggagatttgcagaatttagagaataagctggagacgagcctaagaaatattcgtctgaaaaaggaccaacttattttttatcagattcaagaattaaacaggaagggaagcctcatgcaccaggaaagcatggaactatacaacaaagttaaccttcttcatcaacataacactgaattacggagaaaggtgtatggacaaggagtaaataatgagcaaacaagtactactgttagacacagtactcggaatacagagaatcttccgatcaatcttgagctaagtgtgcaaagggacaaatcagaaacaccaagtgtaggctggtgctgcaacagattcagaacctgctgctgatggatccgggacctagttccccgatggacgtggatccgactcatggtgttgtaacgcattctgctcctgctactcttaatggtaagtatatgatgccctgtttagtagccaagtttttcatagtttttaggtaatactgtggtattagaaaaaactatggcattcatagccacaaggtgtttggcaagctccttgaaaaactttgtattaaaattttggtattctcaaattgtagtattcaaaactttgatttggagtttatataactatagtattgaatgagtttattcctggtcaataagttcaatgatgttcaactagttttgtacaaatgctcatcctttgatcattgaagctatttatattgatcaaaagtagcattcttgtgcatgtacttttactgattctgtgaattagagagggtaagattagaagggattgtttctgttttgtcttgttgtgcatacatttgttgagtttttttgtggcgtagggtgactgtgtgagattcaggctgctcctgtccccttcccctcaatataaaataatctttgtatcttataacttttttgtgtatgcatctgtctgacgtacaatttcttttgttaacggtctcgcaaccagttttaccttggatctcctacactcgctacatgctgctgctccctgacggcactctagttgaaaaagattatgatgattcaatttttcttaataatttcatagaatcaggagggttggttcgttaatttaggatgacagatgtggatggagtttttatagttttgtccggtgagactgatattgtatcttcatatgaaattgcaaaaaatattagtaaacaaactgttaggacaatgcttgagaggataagaggaaataaagagcgtggtgtttgctaatatgatttcagtgccaacaatatcaaagtaagctctcggtgaggtgaggtgagatttatgaatgtgacaattcttagaaattttactcctgaacaacttgctgagggcattaagagtaattatgtgtctggtcatactattattaaaaatgatatctactctggtgcacctccagctaagatatagtatattcttaacaaaattattgttaatgatggtagaacacagttatcattttgcagatgaatggatcagttgttgagaacatttcctgaaaacacaaagttagtaaaatgtgttgcttgaaagaacgctcatctataaccacaccacagtctatggtcatcacaaagaagactcaaataaacagacatgcttcaataaaagtcagaaaaggcacttcaggatttggaattgcatccagtagctggtcaggtggttcttaccgcagatcaaatgaggatgattaaatgcctgaaactcctcgagttcttgagaaattgggatgcacataggtttgagcctttagcatggtttattggtcatcagaatcaaaatcagaaccctaatcagaactcaaacctaaacccaaatcagattcaaaatcaaccaaattagatctgaaatccgaatcagattcaaaatcagaactcgaatctgaatcagaatcatcagaaccagagctaaatgcacggggttaagaacttgtaactcatatttgttttcctcttatcttgtcagagttacagcatatgctttacagtttagttatacatactgaagttcatatgaaagattatttttaagtttccaaatgtctgatcatttaaagaaagctaagctatagagctgtgaacttttatgctactgttaccattgtctgtttaatcatcaactcgtttattgtaatagtttaatttctctagttgttgaaagattatgtttctgaacatcattactcatatgacattttgctgctagagccgcaatttgagcattattagacaatggtcatgtgactgattatggtggtatttgtggtgtgatttatgtttcttaacatcattgctatggtggtatttttgttgtgatttatgtttctaaacattattgctcatatggcattttgctgctagtttgtcatcagcgagttcggatacgtgagaaagatgtggctggtcaccattgacatgagcaccaggagagtggagttttgctatggtggtatttttgttgtgatttatgtttctaaacattattgctcatatggcattttgctgctagtttgtcatcagcgagttcggatacgtgagaaagatgtggctggtcaccattgacatgagcaccaggagagtggagtcattttctctgtataccaatgagagggaggatgccattggaaccgagggcgcttacttgaccaaagttggtgcacaagttgtgtactcaaaatatgcaggcacagaattgaaattcaatgacgccgaccatctcattttgaaagatgacataattggtattcttgacagtgatgatgtgaaggatatgaaaccactgaatgatcgcattctgattaagaacagaataggaaagccacacatcggacaggagtcaaaaagttttattatgtctttggcagatgttctgtttattcacgatatgtctaaatgtcttctgtcaagtctggatactagagcaaagcatgtccaggaagctccaatttgtgcgttccttagccgatgtgaactctttgacttggctcagctcaccactgacccattctgagtgaaatcttgtttggcacttgtcttacatttgcaccagatcgattatgcaccgaggaacgagttatcacccattctatagtagggatattcaattacagtgaaatgtcatatacaaaaaccttgtgattgtacatgtacaacattaggtcttgtttaaattaaatgtcacgatcctgcttgccccacgtccaccaaaggtcgaccgggtttatgatcgaggtctagtttggttttctctctaacagtgacctatttggtaggatttaatgattctgagagaaattttaaattaatctaattcacccttctttcttggacatcttagtcctttcagtcgtgttcctatctcttctcttaaggttaaggatgaagatagatatttattaggatatcattttgtggtcttttttcttcgattgacgaataaataagagatataatctgctaagtaaaattttattcttgtttttagcattgagtttataaagattcataaaagttaaaccacaaatttatcaaatatcttattaaatgatatatataaaattcagatatggtttcacctttttgttgtagggagcaaataatgtataaaacaatttatgtagataacataagaaaagatcaatataatacaataaacttagttattataatgtgcttgacaatataaaaaagatcaacatcaaattttatatatatctattttaaaatattaaattgatcctaaaaattgtgatatccacttacatctctccttcacttttatagttttatgtaatttacattgatgtttttacatttctagaattgacacgatacaatatggttggaacctagggtataagacattgtgcatagaatagaaatcacactgggggtaaaatgggctaaatgataggctttaattgttatgacttatgattagcccagttaactttctcttgggcatcttaatctttttagaggtatattaataacttatgtcacaagctatgatacttaactgttatgattttgctcccactaattttgatgttctttaagaacataatcccctgtacttattacggtgtaatgtagataactcatttacttagaatccaaattcctatccttagctagattgtacttttgtcttgaggttatagtcaaatattcatcaatcggtattagccagaatgataaaaaatgaggcatacgagtttctaataacaagctttgttaaactaatttaataaaatatgcgttggccaaaataaaatgtacaacaactttcgccaaaattagtgaaaacaagtcatactttaattagataaaaaataggctaaaagatagaattatgatctacttatttcttaagtcttatttcctttatattaaagccggtccaaaactcagcctttcagcctatccatgtcggcccgaaaacattcagtcgtccgatcgcgcatctacggttccacacaagacctcgcagccttctcgcgtcgtgccgcgaagcttctaggagccccacccccgcgcggaggtccacttcctctctcgcctgggcgcgccgtcgcgcgcac

SEQ ID NO: 43614 - DNA, 813 bp, Zea Mays
gtgagcttatcgatccgtggatgcggtcctatataagacgctagacaaccatcaccagaaaccatccccaacacaagtttggttttgcctatgcttattactgcaccgccgtggtagtcctcttcatcccgagcgctgacgtgcatctgcgattggaagagtaggtcttcagaacccatcgccttcaaaatcctgcaccgagagaaggtgaataaggtttttgggaagcgtctacacgtgactgctcgcgctcttctccatagctactgtcgacgtcgtcgaccctctcgcttccacgctgtcaatcacatgaaatgtgtgattgaaagatacagcgaggcaagagaggaacaccgtcagactatgagcgcaagtgctgaggccaagctctggcaaagcgaggcagaaagcttgaggcagcaactgcataacttagaagagcaccatcggcagttgttgggtcagcagctttctggcctgaacgtgggagatttgcagaatttagagaataagctggagacgagcctaagaaatattcgtctgaaaaaggaccaacttattttttatcagattcaagaattaaacaggaagggaagcctcatgcaccaggaaagcatggaactatacaacaaagttaaccttcttcatcaacataacactgaattacggagaaaggtgtatggacaaggagtaaataatgagcaaacaagtactactgttagacacagtactcggaatacagagaatcttccgatcaatcttgagctaagtgtgcaaagggacaaatcagaaacaccaagtgtaggttccaac

SEQ ID NO: 43615 - DNA, 1164 bp, Zea Mays
cacgattaaatcggatcgtgagcttatcgatccgtggatgcggtcctatataagacgctagacaaccatcaccagaaaccatccccaacacaagtttggttttgcctatgcttattactgcaccgccgtggtagtcctcttcatcccgagcgctgacgtgcatctgcgattggaagagtaggtcttcagaacccatcgccttcaaaatcctgcaccgagagaaggtgaataaggtttttgggaagcgtctacacgtgactgctcgcgctcttctccatagctactgtcgacgtcgtcgaccctctcgcttccacgctgtcaatcacatgaaatgtgtgattgaaagatacagcgaggcaagagaggaacaccgtcagactatgagcgcaagtgctgaggccaagctctggcaaagcgaggcagaaagcttgaggcagcaactgcataacttagaagagcaccatcggcagttgttgggtcagcagctttctggcctgaacgtgggagatttgcagaatttagagaataagctggagacgagcctaagaaatattcgtctgaaaaaggaccaacttattttttatcagattcaagaattaaacaggaagggaagcctcatgcaccaggaaagcatggaactatacaacaaagttaaccttcttcatcaacataacactgaattacggagaaaggtgtatggacaaggagtaaataatgagcaaacaagtactactgttagacacagtactcggaatacagagaatcttccgatcaatcttgagctaagtgtgcaaagggacaaatcagaaacaccaagtgtagggtggtcggttcagaatgaaatcatcgtccaacgcatacgagagggcgaccccaccatggacgaccagccaccctcctcccttcgacgtgtgaactgaccgcaccctcgcacttgtttttgctccttgacaagcatcatctacggttgacatttcacttatttgtagtgtttggcacttgtcttacatggcacaaaccaaatgttttgtcatggagggcaaagaaaaactagaatatcgtatgaagaaatccatgataagacaactaataattttgggtttaagaaaaaatataaaggataattacatttatgcaaagtttaagaatgggactcatctttct

SEQ ID NO: 43616 - DNA, 8237 bp, Zea Mays
gtgagcttatcgatccgtggatgcggtcctatataagacgctagacaaccatcaccagaaaccatccccaacacaagtttggttttgcctatgcttattactgcaccgccgtggtagtcctcttcatcccgagcgctgacgtgcatctgcgattggaagagtaggtcttcagaacccatcgccttcaaaatcctgcaccgagagaaggtgaataaggtttttgggaagcgtctacacgtgactgctcgcgctcttctccatagctactgtcgacgtcgtcgaccctctcgcttccacgctgtcaatcacatgaaatgtgtgattgaaagatacagcgaggcaagagaggaacaccgtcagactatgagcgcaagtgctgaggccaagctctggcaaagcgaggcagaaagcttgaggcagcaactgcataacttagaagagcaccatcggcagttgttgggtcagcagctttctggcctgaacgtgggagatttgcagaatttagagaataagctggagacgagcctaagaaatattcgtctgaaaaaggaccaacttattttttatcagattcaagaattaaacaggaagggaagcctcatgcaccaggaaagcatggaactatacaacaaagttaaccttcttcatcaacataacactgaattacggagaaaggtgtatggacaaggagtaaataatgagcaaacaagtactactgttagacacagtactcggaatacagagaatcttccgatcaatcttgagctaagtgtgcaaagggacaaatcagaaacaccaagtgtaggatatttacaagatatcagaaggagctattgagacataaataacgataaaacaacgagctacatgattttttttcttacaagaaatgctcttacaaaagtctataagacaagcagtacatgaacttgtcaatggcaaccagtacgtgaatttgtcaatggcaaccagtacgtgagtatagcctcactgagctttcttgaaaggtcatatcatgtccagcctcagtatgcaaatggccatgttacaggaatggtctgtagctgctgtgcggataaatgttgtttctttgataagaattgtcaagcttcacatctatggactaactcagcagcatcactcttcgttgttggccaatagaaaccaaatctgaaagccttcccgaccagagttctggacgctgcatgtgcttcgcactgcccgacatggatttcgtctaacagttgcttcccaatagccgagtgaatgcacttcatgaggactcctgtcgcacctcttctgtacagtatgccccctatgagggtgtagtgggctgattgccttgcgatgcgttccgctgccgccttgtcatccggttcttcttcattttctatgtacctgatgataggctctctccagtcattggggtccgactcaggttggctcaatgagaggatacttggttgtgatattttttgtacgaagatcccgggtggagcctgggcccgactggatcatagctttgacaacgcgtctgctgttgcgttgcggtctctttccacgtgatggaactccaatccttcgaacttgtactccgattttcggacggctgcacggtacttactcatggaatcagtcgagcaatcacaatctttgttaatctggcttatgaccactagcgaatctccatataccatcagcttcttgatgctgagtgatacggcgatgtttaatccgtggatcagtgcttcatattctgctgcattatttgatgccggaaacaatagttggagtgcatacttgagttgttcacctccaggagcaataaagagaatccttgcacctgctccttgcaacttcagcgagtcatcaaagtacattctccatacttcggtagtctccaggttgtctaggacctggtgttcagtacactcagatacgaagtcaaccagtgcctgagtcttgatagccgtgcggggccggaactctatgtcgtgagctcccagctcgcacgcccacttggctatccttccgatagcttctttgttgtgaagaatgtcccctattggaaatcctactatgactttgtggtcgtcaaagtagtgacggagcttgcgagcggttagaagtaccacgtatagcagtttctggacttggggatacttcatttttttaagggcccgagaacttcgctgatgaagtagaccagatgctgcaccgggtatgtatgtccttcctccacccgctcgactactaacgcggtgctcaccacgtgagttgtgcaggagatgtataacaacagatcttctgctggctgattcggcgtggtggcttgagtactggtgtagtcaggaactttttcagtgcctctagagcttcatgtgcctctgtggtccactgaaacttgtccacctttttgagcaatttatagaatggcatgcatttctcccctagccttgatatcaacctgctcagggctgccatgcatccagtaagcctatgtacctttttctgtgatcgtggcgcttccattctcatgatggcctcgattttttctaggttagcttcaatttctcggtgactgacaatgaatccgagtaacttccctgccgatactccgaaaacacacttttctggattgagcttccacaggtatcgcctcaagctgttgaagaccagctgcaaatcttcaatgaagttttctgagttttttgttttgatcaccacatcatcaacataggtttccactcgcttgctccagtggtcggctaagcatgtttgaatggctctctggtaggtcgctcctacgttcttaaggccgaacggcatggaggtatagcagaaagctccaaatggggtgatgaatgttgttttctcctcatcttttgccatgctgatctgatgatatccagaataacagtctaggaaggacaacatagaacagccagcggttgaatcaaccacctgatctattctagggagctcgaagggctccttcggacaatgcttgttgagatcagtatagtcgacgcacatgcgtcaatccactttattctttttgagtacaagaataggatttgctagccactcaggatccagcacttctctaatgaatcctgcagccactaagcgagctaactcggcgcgaatagcttctctcttgacaggcgtgaaacgacgcagtttctgttgaatcggcattgcttcaggatagaccttcaatttgtgctcggctagttctctcgggactcccggcatatccgttggttgccatgcgaatacgtctcggttgtcttgcaggaaccgaacgagcacactttcctatttgtcgtcaaggctggaactgatgatggcagtcttacgctcatcggagaatcctaggttgatttttttagtctcctcaatcggccgtatggaggtcacggcttgatcttcgtttgcgggtattgtgaggtcttcctcaggctttgtgtccgcctgcgtggaggaagtcgtcgatggtccagcagtgagggctgtctggatggctccccgaaagcatttcgtggcgcattggaagtcagcacgcacggtgatgattccttgtggtctcggcatctttaatatcatgtacgagtagtgcggaatggccatgaatttcgccagtcccggcctgccgatgatggcgttgtatccgcagtcgaaacgtgccacctcgaacctcaggaactcagttctgaagttctccggagtccgaaaggtgacggacatgtagatgtgtccgagtggataatctccctcggtcggcacgatgacgaagaagggggtatctgactcgatgaggtctttgagtgcaacccccaaggttaggagtgtccgggggaaggtaacgttaatgctacttcccccgtccactagtactttctttaccctgttctcacggatcaccggatcgacgaggagcgggtacttgccggggtggtcgaagttgagccactgatttgcccggctgaaggttatcgcgtgctctgaccaccgataaggagctggggcactaatggttgccaccaggacctgccggtcattgagcttttgttgccttctgttctcttgcgatccgtggcctccgaaaatgacgttaacctctctgtcaatgcgtgggaatgctccaccccctccccttctggttgctgaggctacctgggctcaccaggccctccttgtggtgggggaggtggtagaggctggaacggtcggccattcccaacggagtgcttgaagtccctgcagttccgtaaggtgtggcacatgtccttgtggtacgggcactgggcgtcgaggatgtcgtccagtgttcgctcgcctccacgaggcgcccctcgggcacgagcgacgggtggtccggcggcgtgaacctcctcacgaggcctcttctcccaacgtctgtcaggttgctggttcgcgtcgcgccgggtgccggtggtgcaggtttcgttcctccgatgaggtcctaggcccgctcgtcagcggtgatgtagaggtccgcatctcgaaacagatgttcggaggtggtcagcgctttctgcagtatggctcggacgaaggctgagtcattagatccccggtagaagtcctcaatcattgttgcctcagtgacctcgaggatacgatttctcatggtctgaaaccttttgaggtacgaccgaagtgtttcatcgccccggcgcctgatggatttgaggtctcatggctgcgccggcttgtcggagggggactagaagttggcgatgaaacaccgactgaagtcactccaatcgtcgatgcagtgtcgtggcagatgtcgtagcccactgcaatgcatcttgctcgaggacgatgggcaaatatgcggtcatcacgtcttcggttgccccagcagcccgggcagtggtcgtatagaacgcccaacccagtctcccgggtcctgcttaggcttgtacttgtcgacgttggagaccttgaagtttggggtggatggccctgagacggggagtaagcgcggatactccacatgtgtcttcctgtcgacgttcatggtgtcggtcccggggaggggagtcggtgatgtgtcgtctcgaccgtccccggatcgggccactggttgaggttgtagccgactcaactagggtggcgtgacttcgagccagaacaccatggtcccgatcattctcctcctggcgccttatctcgttttcgtgtcgtcggtcgcgcgaagcattgatggagctccgcacgtctcttgatggtgtgtcgcaggtcgctcgggggatgagcgatgggtagaagatgattagctgcccgagtaagcagccgccgatagccttcagcatccggagtctgcaggaggccatcagctatctgagccagcactcctctgacttcgctcggcgtgttcattgcgcgagcaaagtcagggttcaggtttcgagcgaagagagggttctctcggcgtaaccttgcgccttgttcagcttgttctcgatctcggtcttgagcttgccggcggtcacgtcggcgagaattcttcctttctctaaatacccgctcgtcgggagtttcccccacttccgagacttcatcccgagatacgggctgcgctgggtcccgctcaccagcttcgtgatgtcgccgaatattccggcgtatgttccttcgtcgtcgagcttctcgctggggaggttcttcccctgggacggttggctcgtcgtcggagatgggagatgattccaatcttcccctaataaagaggacgtcggggtagaaaggagttactgtggtggcgagttccttttcgtccttctttgagggcgaaggtgccggaaagatagctcgacggagctccgttccttttttagggacatttgcttctctcttccttgtaatccgcgtccacttctttgtgggcgaagtgggcagcggagttcttcgggcaagtaaattcccagttctcggcttgcaaaaagtagtcttcgtctggggcgcacgaggttgcgctgtccgttgtcttgttccggctttcctggggatttccaagaaaagtttcttctccggtggatctgctatgcggtgcagaattcccttctcatctgccacggataagatagtcccgaagcagaatacggatccagggcgaagagcgatcttgcactgggaggtaacggccattgagctagcttggatcaacgacacaccccctacctgacgtgccagctgtcggtgtttggagcccaaccgcacacccagggttacccctcgcggtgcgtttgggtaggacagtgttgttaactgtaactcaatggttcttgcgagatgcacgagagacgacaggcgactttctacaggttcgggccgcttggagaggcgtaataccctacttcctggtgaggatctttatgtggtgggttacaagaggaatctccggaatggagagaaactagtgagatgggttggtgattgacctggaaatgatggggtaccccctaggccttatatattcaaccgtggggcactacgtgcgtatgtgatgatggtatgttcctaaacaatagtgaaccgactgaactgatcttcctataatcttgccaacttatccctaattcgctctgacattcaaggtcgccgcacgtgggaaagtcgggtgggcgctgtggatagcgcttaagtcccgcgagtcgcttgggcctaagtctgcttctttctcgtgtcggcccattccgccagcagttttctcctggcccacgaagagatggtctagcgaggcctaaagcctctcgcgaggccttcttaccttctagtggacccgggggatatctgtccaccatagggtgccccccaagcggggtactgtggcatcccaaatggatatggtggcataccccacatttgattcgggacatatggcggtggcatgtatgtatactgatatggcacaggtggatatgggggtggaggtgtccatgcaggtatgttgggtcgtaattggacattatgacccgtcattctttccgattggtgaggtggtccaatcggtctaacctgctgtcgctcttgagtgggtgagcgaggtcgctttgctggccggtcatttgggccaaccttcttttttacatatttagacaataattggttaaaggtcgggccaaatcttaccaatcggccagctgcctttaccatgttagttttccacgtacctatttctggtcgtcgcggttgaagatacgtggtcgtcgtggttcttgggcgttgccgaaccgtccactggaatggtctggagtttccggcggtgtgccggaccatccgcgtctatgtgtcggaccgtccgcgatgcgcaaaataggtgcacacgcctggtcccttgcttgcgcgtgtccctatcgttggaggtggtgatggtaactttcaaagtctcccctccattaggagtcttttccgccaccactttcctgcaggagattttattattttcaacgacttttcgtgcgtcgccgatgatgacttatttgcctttgcccttatcggctgtgctgggccgaatcaggaattttttgccttcgaagtcgatcacattcattgggaagggctccatatccacttgcatttcctaaaatttcaaccgtctttcattaatggccgattggatctgtcgtcgaaatacattacaatcattagtggcatgagaaaacgagttgtgccacttgcagtatgcacgacactttagttcgtcggcggatggaacaatatgatttattttaatgttcccattttttagtaattcatcgaatatcttgtcacatttgacaacattaaatgtaaatttaacctcctcttgtcgtttcttttgaatcggctgtaagaaggaacaagccgaagatttggcctgatttggcacttgacaagcatcaaatgtagaccttgctttagtctagcaagttgctattttattgtatatatactccctcaatcctaatgcattttttagttgtcctgagtcaaaaaccattgtaaaaatagtacgaacacacctgccacatcaagaggtaactatacaaaaaattacatttcataatctcttattgacctgttattttcatccacacttgttactgtgtggggctaacatggaccataagaatacagttggtttcgctctaaaagcgaagcttgtgttcaactgcatgtattgatatgggtttttttaatatttaatatttatgagtgct

SEQ ID NO: 43617 - DNA, 1073 bp, Zea Mays
gtttggttttgcctatgcttattactgcaccgccgtggtagtcctcttcatcccgagcgctgacgtgcatctgcgattggaagagtaggtcttcagaacccatcgccttcaaaatcctgcaccgagagaaggtgaataaggtttttgggaagcgtctacacgtgactgctcgcgctcttctccatagctactgtcgacgtcgtcgaccctctcgcttccacgctgtcaatcacatgaaatgtgtgattgaaagatacagcgaggcaagagaggaacaccgtcagactatgagcgcaagtgctgaggccaaggcagttgttgggtcagcagctttctggcctgaacgtgggagatttgcagaatttagagaataagctggagacgagcctaagaaatattcgtctgaaaaaggaccaacttattttttatcagattcaagaattaaacaggaagggaagcctcatgcaccaggaaagcatggaactatacaacaaagttaaccttcttcatcaacataacactgaattacggagaaaggtgtatggacaaggagtaaataatgagcaaacaagtactactgttagacacagtactcggaatacagagaatcttccgatcaatcttgagctaagtgtgcaaagggacaaatcagaaacaccaagtgtagggtgagatttttgtccaaacttcaggataactcagagtcagtaaaccagatgatttaataaagaacactgaaagtgccataagactttaaatacagtgaggataactaaaccgagtgataagaaatggatatcgttggttgaattgcaagacctaacagctaaactttaagctgctagatgcgattgtttatgtattaagaagaatgttgattttaattttgcttttcatataagcttgccatgtatgctattgtaaattgtactctgaattataagtcctcttggttttctaggtacatagttttttctatacacctagatatactatgtctcttgagctaaaaccgcttataatttagaatggagtaacttcaaaagatagttataagttaaatattggatgac

SEQ ID NO: 43618 - DNA, 1211 bp, Zea Mays
gtgagcttatcgatccgtggatgcggtcctatataagacgctagacaaccatcaccagaaaccatccccaacacaagtttggttttgcctatgcttattactgcaccgccgtggtagtcctcttcatcccgagcgctgacgtgcatctgcgattggaagagtaggtcttcagaacccatcgccttcaaaatcctgcaccgagagaaggtgaataaggtttttgggaagcgtctacacgtgactgctcgcgctcttctccatagctactgtcgacgtcgtcgaccctctcgcttccacgctgtcaatcacatgaaatgtgtgattgaaagatacagcgaggcaagagaggaacaccgtcagactatgagcgcaagtgctgaggccaagctctggcaaagcgaggcagaaagcttgaggcagcaactgcataacttagaagagcaccatcggcagttgttgggtcagcagctttctggcctgaacgtgggagatttgcagaatttagagaataagctggagacgagcctaagaaatattcgtctgaaaaaggaccaacttattttttatcagattcaagaattaaacaggaagggaagcctcatgcaccaggaaagcatggaactatacaacaaagttaaccttcttcatcaacataacactgaattacggagaaaggtgtatggacaaggagtaaataatgagcaaacaagtactactgttagacacagtactcggaatacagagaatcttccgatcaatcttgagctaagtgtgcaaagggacaaatcagaaacaccaagtgtagggtgagatttttgtccaaacttcaggataactcagagtcagtaaaccagatgatttaataaagaacactgaaagtgccataagactttaaatacagtgaggataactaaaccgagtgataagaaatggatatcgttggttgaattgcaagacctaacagctaaactttaagctgctagatgcgattgtttatgtattaagaagaatgttgattttaattttgcttttcatataagcttgccatgtatgctattgtaaattgtactctgaattataagtcctcttggttttctaggtacatagttttttctatacacctagatatactatgtctcttgagctaaaaccgcttataatttagaatggagtaacttcaaaagatagttataagttaaatattggatgac

SEQ ID NO: 43619 - DNA, 475 bp, Zea Mays
tctactgcaattattttttcatgctcagagatagaatcaaagggaacaaggtcctaaatatataaatataaaaaagaattcagaacaaattctcagcacatgatgatgaaatgcaagatgcatttggttatatgttctggtgtatatccattaatgtttacgcacaggaaatttgaagtctccaaatcaaagttaaaccttatacagtatgagtctaaaactttcagaaacagcaataagcaacgatctgcttcattattattctatttgattaagagtgtgtccttactccacacacaaaggaagttatgttattcgttgattaattcaactgtacacttgatggctacaaaaaatggtactttattttaatgttctctcttacatgtgaaattggtttgtacattgtacaataacatttgcattctcagaaatgcataagctaatgttctatgcaattttccactgcaggcag

SEQ ID NO: 43620 - DNA, 2283 bp, Zea Mays
gtagagatcagtggcccagaggccgggactgggaacaggtggcgctcccgcaatcccgcagcgcctaccaaactactgggccacaaataatagggtccctacaaaccgcacgtcgaccggcccacggagcatcaccaccgcggcagctaatctcggccccaagattcagaatcaccgaggcgcggcgaggcgacggcggttggcgacatgatggcctcggtgcccagccgtgttgcgctctccgcggcgagccgcctcccgaatctccacgccgtggcaggttgttcgtctccctcgctcccggttctggctcccgtttgccaatttgttggaatttggatgcgattttgtgagtacgtagttactagtactctttagtacctttcagtggataaggtcgatggggcaagtaggatgcgtgctgtccacggtgtttctgtggaggtagaattgtgggggatcccacggagtatgagagcagacaagtactcttccgcttttgcaatggttttacggttactgccaccgcacatctcatcttggagttgattttatttgagattatgtttggttgcttgtatgtgagagtcacaatctgcataggtgtatacaaaataagctattttgatgttattaatctgcatctacatatacgctcaaaattatcgtatgtagctagacaaggcggtgccatccaatcaaactgattgtgaacagagaatccttctgtttcctgctatgaaatggccgccttgtgttggctagagggcgaggacctgatgtgtggtgaaattgttgcgtctgttctagttagttgcaagaactagtgtgcatggtgaaggttaggtggttcacttcattggcattttcaatcagctatctgttagtttcttgttttattgcttcagtatgccttattcatggactgtgttttgcactacagctcttcccattcttttagtccagataaatacatattaacaaccgattccaactactcgtctgcaacggtagtacactagcaattgggatattgcccagttggtccatttacaggaaaataaatagtctgcaacgaaagctgaaatttaagacacactttatactactattaaagtaatatatgtgttgcagctgcctgccattctccacggatgcattattccttgctggccgttactagttgctgattattcttgatgttcttgaaaatcccaaatgactaagatgatgattgaatccaccatatcataccctgacttgaaatgcttaggaaatcttgctctatcaccaactaatcctcaaccttatagtcctgttcagcatgatcatgaggctattactccactttttttcatattgttttcagcctggaggcacaaatgtgctatctagaactgtgctaactatacggtgacttcaaatttacatggaaatactgtttgtcatgtcataggtccatgattactcttgcagacttgctggtataacctttcgtgtcgattttcttcatattgtgcaggagatagatctttcatttacaagagaagatgtccaagtctttcaattcctatggctctgtcagcagctgcgccaggcaaaggtggcggtgtgcttgatcggccagtagagaaaattactcctggtcgtcagtccgaatttgatgtgaagaaatcccgcaaaatgacgcctccattccgcgtcatcctgcacaatgacaaccacaacaggcgtgagtatgttgtccaggtcctgatgaaagtgatccctgggatgaccgtcgacaacgcgttgaacatcatgcaggaggcgcatgtgaatgggttgtcagtggtgattgtctgttcccagtccgaggctgaggagcactgcacgtcactcaggggcaacggcctccgaagctcgatcgagcctgcgagtggtggctgctaaggttctagaaatgggtgtatcttgttttgccaagtatagtttgtaaatacccagcatatcaatctaagctgaaactgaaacgggttggttacatgcagttatcgatacaacgaagctaagtacttcttgggtaggtgtaaatcttgtaagggtaacctgtagaagaagaaacatagtatttttggttatgatttatgaaacatttagttacacttggtctacaccctcttttcacatagtatattttttctagcactttgcattttacttttggctttcagctttcggtttttcaaaatgtgtaaaattagtgaagagctaaatcagtcgaccaaatagatggggatgaat

SEQ ID NO: 43621 - DNA, 1086 bp, Zea Mays
ctcgatcccgtcacgagatcgtgcggtagctgcagattcgccgatagagcgagcggatattggctatgcgccatcccaggaaactggtcctggcaggctgtttgactgcactaatagtgatgacagctctatcagcttctctaggttgggttgcaccaaatctgatttcacgtaaatggactcatcatgtgaccactctattgttctttgtatttggtatttggtcattgtgggaaggcttcaaggaagatggagattcagaagaattggctgaagttgaagcagagctggatgctgtctttaagagtaataaaggcgaatctaaaactaaaactaaggcaaacgatgatacgaagaaacagcaaagaccatttctcatgcaattcttctcaccaattttcataaaggcattttctattacattctttggtgagtggggtgacaagagccagattgctactattggcttggctgctgatgaaaacccatttggtgttgtcctgggcggaatcatagcgcaagcactctgcactactgctgctgttcttggtggaaagagcctagcttcccagatatccgagaagatggtcgaactgtcaagcggagttctcttcctgctgtttggtatcatgtcattgctctctggaccaggagaattatgaatgatggcgacaaaagccatccatccatatggcgaaccggatggtgattcgatagtttagccgacacatcggaaacatttcactcgtccttcataaataactacatgttacagaagtctagcgatttcattctgttgtgctcagcatgtgaaagtcagtctactccctccgtttttttatatttgtcgcgttttagttaaaaataaactagaagacgacaaatattcgagaacggaggtagtagaagctgtctacagtatcatgaatatgatgtaagattcttgttactaaatttttgttgtcgcaattacatgcgttaacaaagcttagtttgtgaatcaactacgcaggcaaataatacggggctttgtcttttcgttgtgttactccattaatattaaatggttaatagttttttttggaa

SEQ ID NO: 43622 - DNA, 839 bp, Zea Mays
cacggtcacctccaaagcaagacccaggctgcttctacaaggagttgtacaaagatgatacatggattcacttgttctcatttcttgttaatggtttgtgccttcgtagtcttctccgatatattgaagcgggtgccagataagctacatgtaactaagaaggcagtacttcatgtcttccctgctgctctcccgcaatcgctccgactctcatgcctgtgcccgcgccgtcaactctccgggctcgatgtgcctttccacgcagcacccacctccactcacactcccaccgtggtgaccccctgttcgtcgacgcgtcgatccatggtcagccaaccagtgaaaaccttcttcgcaatcactatgtatggtactgccaattcacattttacaagtgttgtttggaaggcatctaccaactccaatgctctcttcttgatagcggctgcacataacctattgtgtttgaagttaggaaaggagattggtgttagtatcggaaacccatgattacttggttcgaggttgctagcgtgccagcactttttgggattttagtgactccttatttaatttactcctgtagcccaacattagctgttgagaagctaaagaacatgggtccagtaacaagaaatgaatgcatcatgattggaacgatgctttttgcactctcactacagatttttgggtaagatttttctttttaaagagtgtttttaaccatgagttgccttgcaatctgaagctaaacttttggtagctgaacttatgtatttagtcgtttacacttttcttggcatcatgcaagtaagtacatatacacatagcacaagtat

SEQ ID NO: 43623 - DNA, 928 bp, Zea Mays
cgatgtcagcagattggcatgaaatgctatcgagaagggagaaggccacaaacttcaaaccagactatgatattgatatccatatgaaggtcttagctatgagtgggcaagtatccagtattcttacaggctacaaactgaagatgatacatggattcacttgttctcatttcttgttaatggtttgtgccttcgtagtcttctccgatatattgaagcgggtgccagataagctacatgtaactaagaaggcagtacttcatgtcttccctgctgctctcccgcaatcgctccgactctcatgcctgtgcccgcgccgtcaactctccgggctcgatgtgcctttccacgcagcacccacctccactcacactcccaccgtggtgaccccctgttcgtcgacgcgtcgatccatggtcagccaaccagtgaaaaccttcttcgcaatcactatgtatggtactgccaattcacattttacaagtgttgtttggaaggcatctaccaactccaatgctctcttcttgatagcggctgcacataacctattgtgtttgaagttaggaaaggagattggtgttagtatcggaaacccatgattacttggttcgaggttgctagcgtgccagcactttttgggattttagtgactccttatttaatttactcctgtagcccaacattagctgttgagaagctaaagaacatgggtccagtaacaagaaatgaatgcatcatgattggaacgatgctttttgcactctcactacagatttttgggtaagatttttctttttaaagagtgtttttaaccatgagttgccttgcaatctgaagctaaacttttggtagctgaacttatgtatttagtcgtttacacttttcttggcatcatgcaagtaagtacatatacacatagcacaagtat

SEQ ID NO: 43624 - DNA, 1273 bp, Zea Mays
cgcgggcgtcggtcgaggagctcgccaccgccgtccaggcggagtcgtcgtcgttcgtggaccctcatcgcgccggaccgccgccagaccacgcgtgcctaggctgccgcctcaggccggccttcgtggtgctcctcccctgcaggcacctgtccctctacggcgccgccatgccgtgccccgcgtgtggacggggggcgtggaggccatcctctgctgagctttccccgcctctcatcatcgatcatccggccgtccacctcatgagccgagagcaggttttccatgacatgatggtggcgtctaattttgctggccgtgtgtgccggatatcacgatgtcagcagattggcatggtgaagagtcaaaaacaaaatgctatcgagaagggagaaggccacaaacttcaaaccagactatgatattgatatccatatgaagctatgagtgggcaagtatccagtattcttacaggctacaaactgaagatgatacatggattcacttgttctcatttcttgttaatggtttgtgccttcgtagtcttctccgatatattgaagcgggtgccagataagctacatgtaactaagaaggcagtacttcatgtcttccctgctgctctcccgcaatcgctccgactctcatgcctgtgcccgcgccgtcaactctccgggctcgatgtgcctttccacgcagcacccacctccactcacactcccaccgtggtgaccccctgttcgtcgacgcgtcgatccatggtcagccaaccagtgaaaaccttcttcgcaatcactatgtatggtactgccaattcacattttacaagtgttgtttggaaggcatctaccaactccaatgctctcttcttgatagcggctgcacataacctattgtgtttgaagttaggaaaggagattggtgttagtatcggaaacccatgattacttggttcgaggttgctagcgtgccagcactttttgggattttagtgactccttatttaatttactcctgtagcccaacattagctgttgagaagctaaagaacatgggtccagtaacaagaaatgaatgcatcatgattggaacgatgctttttgcactctcactacagatttttgggtaagatttttctttttaaagagtgtttttaaccatgagttgccttgcaatctgaagctaaacttttggtagctgaacttatgtatttagtcgtttacacttttcttggcatcatgcaagtaagtacatatacacatagcacaagtat

SEQ ID NO: 43625 - DNA, 1315 bp, Zea Mays
ctaccttatattcgtcgaacttacctgcgttggagaagacattgatgatttgcagtacacacctaaacccgaatttgaggggtattttagagttaagaatgttcaaactgagttggatctacttaaagcatggttttctcacatgcaagaggttaagcctggcatttatgttacatacaacgatgacttttttgactggccatttttagagaagagggctgcacaccatggaataaaaatgaatgaggagattggtttccaatgtgacaataaccagggcgagtgtcgggctaaattttcttgccatcttgactgttttgcttgggtgaagcgagacagttaccttccacaaggaagccaaggtctaaaggctgttacaaaagccaagctacgttacgatcctctggaggttaatccagaagatatggttcgctttgcaatggagcagccacagacaatggcttcgtattctgtatcagacgatgttgcaacatactatctatacatgacttatgtccatcctttcatcttttctcttgcaaccataatacctatgttacctgatgaggtactgtggaaaggaagtgggacactttgtgaaattctgctaatggttcagctagctcttctcactaaatcagccagctcttctgcttgtcccattgtcatccagatacttatttgggatgttgaagtacaaccaaatagacatgctgtcctaggagcaagcgagtctcgccctgatctgcacgattactgggggtctaggaatatttgcaacattgtttccaagctggatagccacatgtcagtacttagctgaagatatgctgatggaatgggtttacaagccccatataataaatcataacagtgcgggagcattttttggatgtccttcacacagatgcaggcaatgaaagaaacagaaaatagacaatgttagcgcggagtgagacagataggaattgggatagaatcatccttgttctcagatcagctgtacattctttattaaggtagtatatcatacatgtacgagtagactgacggttgcttccaaatactccatgtgtttgaaatatgtattgtatgtgatattctgtgttgcatgtgattttatgtttgtctaattttttatttctgtattttttatttttttttctgaaaaagggataagaacgtgggtaccgtcaaacataatgtgcagtccacgtagacccacgcaggccagataagttcgacggccacgtggccccgtcgaacttaacaataagaacgtgggtaccgtcgaacttatgagaacaaattcgac

SEQ ID NO: 43626 - DNA, 1317 bp, Zea Mays
catcttgtcaatatatccgtgctactctaccttatattcgtcgaacttacctgcgttggagaagacattgatgatttgcagtacacacctaaacccgaatttgaggggtattttagagttaagaatgttcaaactgagttggatctacttaaagcatggttttctcacatgcaagaggttaagcctggcatttatgttacatacaacgatgacttttttgactggccatttttagagaagagggctgcacaccatggaataaaaatgaatgaggagattggtttccaatgtgacaataaccagggcgagtgtcgggctaaattttcttgccatcttgactgttttgcttgggtgaagcgagacagttaccttccacaaggaagccaaggtctaaaggctgttacaaaagccaagctacgttacgatcctctggaggttaatccagaagatatggttcgctttgcaatggagcagccacagacaatggcttcgtattctgtatcagacgatgttgcaacatactatctatacatgacttatgtccatcctttcatcttttctcttgcaaccataatacctatgttacctgatgaggtactgtggaaaggaagtgggacactttgtgaaattctgctaatggttcaggcattcaaggctggaggcacacaactatgaatagtgcatcttctaaaatctctcactaaatcagctagctcttctcactaaatcagccagctcttctgcttgtcccattgtcatccagatacttatttgggatgttgaagtacaaccaaatagacatgctgtcctaggagcaagcgagtctcgccctgatctggaatgggtttacaagccccatataataaatcataacagtgcgggagcattttttggatgtccttcacacagatgcaggcaatgaaagaaacagaaaatagacaatgttagcgcggagtgagacagataggaattgggatagaatcatccttgttctcagatcagctgtacattctttattaaggtagtatatcatacatgtacgagtagactgacggttgcttccaaatactccatgtgtttgaaatatgtattgtatgtgatattctgtgttgcatgtgattttatgtttgtctaattttttatttctgtattttttatttttttttctgaaaaagggataagaacgtgggtaccgtcaaacataatgtgcagtccacgtagacccacgcaggccagataagttcgacggccacgtggccccgtcgaacttaacaataagaacgtgggtaccgtcgaacttatgagaacaaattcgac

SEQ ID NO: 43627 - DNA, 2523 bp, Zea Mays
cctgtctcattcccacccacgcgcttctctctctcaccagcagaccgcgccgccgccgcgccaccgctctccggatcatcggccgtccacctcctcctcctcctcgcccgctcaccggccgtccctgctgaggtgccgtccacttcctctccctgccgccgtagctcgcacaacccccatctcgccctcttccttcttgccacaccgtcgctaccaccgccccgcgctgagagggaccgacgccatggacctcctcgagaagatgatggcgcttggtatgacgtggtgtctcggtagcatttgccggctcatcactttgccatctgtacacctgcttgattagatgtccacctagggttttgggtctagtgcggaaacaggtgcccacggggggtacgacgcggaggaggacgacgaggtggggtacggtggcgggggcggggaagagatggatgaggatgcggacggggacgctgagcagtaggaggatatcactcaggacgacgcctgggccgtcatatccgcctacttcgaggagaagggcctcgtgcgccagcagctcgattccttcgacgagttcatccagaacaccatgcaggagattgttgatgagtccgccgacatcgagatccgccccgagtcgcagcacaaccctggccgccaggccgaatttgccgagactctgcacaggatcagctttggtcaaatctatctcagcaagccaatgatgactgaagccgatggagagacagctactttatttccaaaatcagcaaggctcaggaacttgacatactctgcaccactgtatgttgatgtgtcatacagagtaatgaagaaaggacatgactgtgaggaagttacagagactgcagagtatccaaaagtgtttattgggaaggttccaatcatgttgcgctctagttactgcacactgtatcaataatctgagaaggatctcactgaacttggggagtgtccttatgaccaaggtggttatttcattatcaatggaagcgaaaaggttcttattgcccaggagaagatgagcactaaccatgtctatgtttttaagaagaggcagcctaataaatttgcatatgtggctgaagtccgttccatggctgagaaccagaacagaccagccagcggcatgtttgtacggatgctttcacgagcaggagcaaaagggtgcgttggagaagacattgatgatttgcagtacacacctaaacccgaatttgaggggtattttagagttaagaatgttcaaactgaggagattggtttccaatgtgacaataaccagggcgagtgtcgggctaaattttcttgccatcttgactgttttgcttgggtgaagcgagacagttaccttccacaaggaagccaaggtctaaaggctgttacaaaagccaagctacgttacgatcctctggaggttaatccagaagatatggttcgctttgcaatggagcagccacagacaatggcttcgtattctgtatcagacgatgttgcaacatactatctatacatgacttatgtccatcctttcatcttttctcttgcaaccataatacctatgttacctgatgaggtactgtggaaaggaagtgggacactttgtgaaattctgctaatggttcaggcattcaaggctggaggcacacaactatgaatagtgcatcttctaaaatctctcactaaatcagctagctcttctcactaaatcagccagctcttctgcttgtcccattgtcatccagatacttatttgggatgttgaagtacaaccaaatagacatgctgtcctaggagcaagcgagtctcgccctgatctggtatgattcattgttttgttcagtgtgccagatttatggcttcaatgagatgttggtgctagctcatctgttaagtgatgatagataacagtatgtctacatgttgctctagcacgattactgggggtctaggaatatttgcaacattgtttccaagctggatagccacatgtcagtacttagctgaagatatgctgatggaatgggtttacaagccccatataataaatcataacagtgcgggagcattttttggatgtccttcacacagatgcaggcaatgaaagaaacagaaaatagacaatgttagcgcggagtgagacagataggaattgggatagaatcatccttgttctcagatcagctgtacattctttattaaggtagtatatcatacatgtacgagtagactgacggttgcttccaaatactccatgtgtttgaaatatgtattgtatgtgatattctgtgttgcatgtgattttatgtttgtctaattttttatttctgtattttttatttttttttctgaaaaagggataagaacgtgggtaccgtcaaacataatgtgcagtccacgtagacccacgcaggccagataagttcgacggccacgtggccccgtcgaacttaacaataagaacgtgggtaccgtcgaacttatgagaacaaattcgac

SEQ ID NO: 43628 - DNA, 2629 bp, Zea Mays
cctgtctcattcccacccacgcgcttctctctctcaccagcagaccgcgccgccgccgcgccaccgctctccggatcatcggccgtccacctcctcctcctcctcgcccgctcaccggccgtccctgctgaggtgccgtccacttcctctccctgccgccgtagctcgcacaacccccatctcgccctcttccttcttgccacaccgtcgctaccaccgccccgcgctgagagggaccgacgccatggacctcctcgagaagatgatggcgcttggtatgacgtggtgtctcggtagcatttgccggctcatcactttgccatctgtacacctgcttgattagatgtccacctagggttttgggtctagtgcggaaacaggtgcccacggggggtacgacgcggaggaggacgacgaggtggggtacggtggcgggggcggggaagagatggatgaggatgcggacggggacgctgagcagtaggaggatatcactcaggacgacgcctgggccgtcatatccgcctacttcgaggagaagggcctcgtgcgccagcagctcgattccttcgacgagttcatccagaacaccatgcaggagattgttgatgagtccgccgacatcgagatccgccccgagtcgcagcacaaccctggccgccaggccgaatttgccgagactctgcacaggatcagctttggtcaaatctatctcagcaagccaatgatgactgaagccgatggagagacagctactttatttccaaaatcagcaaggctcaggaacttgacatactctgcaccactgtatgttgatgtgtcatacagagtaatgaagaaaggacatgactgtgaggaagttacagagactgcagagtatccaaaagtgtttattgggaaggttccaatcatgttgcgctctagttactgcacactgtatcaataatctgagaaggatctcactgaacttggggagtgtccttatgaccaaggtggttatttcattatcaatggaagcgaaaaggttcttattgcccaggagaagatgagcactaaccatgtctatgtttttaagaagaggcagcctaataaatttgcatatgtggctgaagtccgttccatggctgagaaccagaacagaccagccagcggcatgtttgtacggatgctttcacgagcaggagcaaaagggtgcgttggagaagacattgatgatttgcagtacacacctaaacccgaatttgaggggtattttagagttaagaatgttcaaactgagttggatctacttaaagcatggttttctcacatgcaagaggttaagcctggcatttatgttacatacaacgatgacttttttgactggccatttttagagaagagggctgcacaccatggaataaaaatgaatgaggagattggtttccaatgtgacaataaccagggcgagtgtcgggctaaattttcttgccatcttgactgttttgcttgggtgaagcgagacagttaccttccacaaggaagccaaggtctaaaggctgttacaaaagccaagctacgttacgatcctctggaggttaatccagaagatatggttcgctttgcaatggagcagccacagacaatggcttcgtattctgtatcagacgatgttgcaacatactatctatacatgacttatgtccatcctttcatcttttctcttgcaaccataatacctatgttacctgatgaggtactgtggaaaggaagtgggacactttgtgaaattctgctaatggttcaggcattcaaggctggaggcacacaactatgaatagtgcatcttctaaaatctctcactaaatcagctagctcttctcactaaatcagccagctcttctgcttgtcccattgtcatccagatacttatttgggatgttgaagtacaaccaaatagacatgctgtcctaggagcaagcgagtctcgccctgatctggtatgattcattgttttgttcagtgtgccagatttatggcttcaatgagatgttggtgctagctcatctgttaagtgatgatagataacagtatgtctacatgttgctctagcacgattactgggggtctaggaatatttgcaacattgtttccaagctggatagccacatgaatgggtttacaagccccatataataaatcataacagtgcgggagcattttttggatgtccttcacacagatgcaggcaatgaaagaaacagaaaatagacaatgttagcgcggagtgagacagataggaattgggatagaatcatccttgttctcagatcagctgtacattctttattaaggtagtatatcatacatgtacgagtagactgacggttgcttccaaatactccatgtgtttgaaatatgtattgtatgtgatattctgtgttgcatgtgattttatgtttgtctaattttttatttctgtattttttatttttttttctgaaaaagggataagaacgtgggtaccgtcaaacataatgtgcagtccacgtagacccacgcaggccagataagttcgacggccacgtggccccgtcgaacttaacaataagaacgtgggtaccgtcgaacttatgagaacaaattcgac

SEQ ID NO: 43629 - DNA, 2009 bp, Zea Mays
ctctctctcacctgtctcattcccacccacgcgcttctctctctcaccagcagaccgcgccgccgccgcgccaccgctctccggatcatcggccgtccacctcctcctcctcctcgcccgctcaccggccgtccctgctgagactctgcacaggatcagctttggtcaaatctatctcagcaagccaatgatgactgaagccgatggagagacagctactttatttccaaaatcagcaaggctcaggaacttgacatactctgcaccactgtatgttgatgtgtcatacagagtaatgaagaaaggacatgactgtgaggaagttacagagactgcagagtatccaaaagtgtttattgggaaggttccaatcatgttgcgctctagttactgcacactgtatcaataatctgagaaggatctcactgaacttggggagtgtccttatgaccaaggtggttatttcattatcaatggaagcgaaaaggttcttattgcccaggagaagatgagcactaaccatgtctatgtttttaagaagaggcagcctaataaatttgcatatgtggctgaagtccgttccatggctgagaaccagaacagaccagccagcggcatgtttgtacggatgctttcacgagcaggagcaaaagggtgcgttggagaagacattgatgatttgcagtacacacctaaacccgaatttgaggggtattttagagttaagaatgttcaaactgagttggatctacttaaagcatggttttctcacatgcaagaggttaagcctggcatttatgttacatacaacgatgacttttttgactggccatttttagagaagagggctgcacaccatggaataaaaatgaatgaggagattggtttccaatgtgacaataaccagggcgagtgtcgggctaaattttcttgccatcttgactgttttgcttgggtgaagcgagacagttaccttccacaaggaagccaaggtctaaaggctgttacaaaagccaagctacgttacgatcctctggaggttaatccagaagatatggttcgctttgcaatggagcagccacagacaatggcttcgtattctgtatcagacgatgttgcaacatactatctatacatgacttatgtccatcctttcatcttttctcttgcaaccataatacctatgttacctgatgaggtactgtggaaaggaagtgggacactttgtgaaattctgctaatggttcaggcattcaaggctggaggcacacaactatgaatagtgcatcttctaaaatctctcactaaatcagctagctcttctcactaaatcagccagctcttctgcttgtcccattgtcatccagatacttatttgggatgttgaagtacaaccaaatagacatgctgtcctaggagcaagcgagtctcgccctgatctgcacgattactgggggtctaggaatatttgcaacattgtttccaagctggatagccacatgtcagtacttagctgaagatatgctgatggaatgggtttacaagccccatataataaatcataacagtgcgggagcattttttggatgtccttcacacagatgcaggcaatgaaagaaacagaaaatagacaatgttagcgcggagtgagacagataggaattgggatagaatcatccttgttctcagatcagctgtacattctttattaaggtagtatatcatacatgtacgagtagactgacggttgcttccaaatactccatgtgtttgaaatatgtattgtatgtgatattctgtgttgcatgtgattttatgtttgtctaattttttatttctgtattttttatttttttttctgaaaaagggataagaacgtgggtaccgtcaaacataatgtgcagtccacgtagacccacgcaggccagataagttcgacggccacgtggccccgtcgaacttaacaataagaacgtgggtaccgtcgaacttatgagaacaaattcgac

SEQ ID NO: 43630 - DNA, 2372 bp, Zea Mays
atccactagctgcccggccggccggctagcggagaaacagcccgcccgctcgcctctgcctctgcccctgcacgcccaagatcctcaggccgggccggccgcgtggcagtgccgcgcgcgcgcgagagcgagagggatccatgggcgtctccgaggaggcggcgcgggtgtgggcggagctgcccgtgcgggtggactgggcggccgcggcggcgcaatgcgcgtccctgtgggcgcacgcgcgcgcgctgctggtcgcgccagcggtgcgggtcctggtgctcctgtcgctggcgatgaccgtgatgatactggcggagaagctgttcgtctgcgccgtgtgcctcgccgtgcgggcgctccggctcggcccggaccggcgctaccgctgggagcccatcggcggcggagtcggagacgaggaggaggagtccgggtccggccacggcgccaagtaccccatggtgctcgtgcagatccctatgtacaacgagcgggaggtgtacaagctgtcgatcggggcggcatgcgagctggagtggccgtcggagcgcttcatgatccaggtgctggacgactccacggaccccgttgtaaaggatttggtggagacggaatgccaaagatggaagagcaaaggcgtgaatataaagtacgaggtgagggggaaccggaaggggtacaaggccggcgcgctcaaggaaggactgaagcatgactacgtcgaagactgcgagtacatcgccatgttcgatgctgacttccagcccgagcctgatttcctcctaagggctgtcccattccttgtgcataacccggagatcgccctcgtccaagctcgctggaaattcgttaattctggtgagtgtctgctgacgagattccaagaaatgtccttggactaccatttcaagtatgagcaagaggcaggctcctcactgcattcattctttggcttcaatgggacagccggtgtctggaggattgcagctatcgatgacgccgggggctggaaggaccggacgacggtggaggatatggacctggctgtccgtgcgatgctgcagggctggaagtttgtttacgtcggcgacataaaagtcaagagtgaattgcctagcacgttcaaggcataccggtttcagcagcacaggtggtcttgtggaccggcaaacctgttcaagaaaatgatggtagagattttagaaaacaagaaagtgtcattgtggagcaaaatctacttatggtacaatttcttcttcgttgggaaggtcgctgcccacacggtgacattcatctactactgctgtgcgatccccgtgtctgttttgcttcctgagattcagatacctctctggggagttgtctatatcccgacgctcataaccctcttgaaggctcttggcacaccaagttcgtttcacctggtgatcctctgggttctgtttgagaatgtcatgtcactgcaccggattaaagctgcagcaagtggtcttctggatgctggtggacgagtcaatgagtgggttgtcaccgagaagttgggcgacaccagcaaggcaaagcctggcgccaatggatcagatgatgtaaaggtgatagatgtaaagctaacagaacccctcgttcccaagctagtgaagaggcgagcaagattttgggagaggtacaactgctcagaacttttcgttggaacctgcatacttctgtgtggtttctatgacttgctttttgcaaagaagggatactacatttttctcttccttcaaggcacggctttccttgttgttggctttgggtatgtcggcacactacctcattgcaatgcataagctggcatggacaattcatataccttcttactagaaacagatcaagcaaagttcctctctcctgcccatatggaacttcaatgatagttgagcaatattcccatgatcagtcttggccagacatgattcactgccaagaaggttgttcagatgtcgtcgtcactcttctgtcagtctttattgtcaagaaggccattcaaatagtgtcaccgttccaaatttataataacagtgtttactgaagcatcatgacatacaagaatgattggtgcagcagcatttagtaaacatcccgtagagatgcagttcacagtcgtgaaagaactgcagctgctgtaaatggaatagcaccagttgccaatttctgtagatctccgaacttttttttggaaattttgtgatattactcagagttcagatcaataatggaagattgttggcttcctcagttcataacctgtgtatgcttaaaacttgtaaatgtaaattgttattgacactaataattttgtcgaacccaggcagttcttgaaatgcaaa

SEQ ID NO: 43631 - DNA, 481 bp, Zea Mays
ctgacttccagatctggaagctgctgttcgtacttgcggatctcaacatgcatagccttcctgagcatggttcctgggcacgtgttgccaatatttggacatctggagataaaactctgattgcatgaggtcgtgaatcaggagcgccgatcgccaacgcctttctctggtcccaagattatgaaacttgcatgctctccagagaatagtgatgacacaacagggctgcatcagactgtgtgcacatatagacttgttgcatctgtgcttgaaaaattgaacagtagcctagctagcttgtatatattttggtagcaggttgttagttatccattcggcgaaatctctagttgccccttgaattcgttaatcttatgtagcaggcatctttaaactttttagcaggtctgcagaatattttgtcaatatttattcaattttgtacatttgaaattatcaatacaatgttatatttcagata

SEQ ID NO: 43632 - DNA, 2848 bp, Zea Mays
ggttgcaacttgcaagcagatctcaactggtgcgcgcgcacacacacgcacagatctgagccacgcgcacaggcagtactgccccctttcttctccaagtccggccggctgatcggtcgttatgtatatgaacgtggtggtggggttctttttatggtgagtggtttcgagctaggtggtggcggccggctgggttttcgttccgtggctaactgacagaagagagtgagcacacagcgggcagactgcatcgatcgatctgcatccgagacggcgcacgtacgaatgatgatgcagctgctgctgcgtgctcacttctctctctgtcagtcctctagctgctacggcctctctcccggcctgccaccactataacttcaccttgccatggtggccggccactactctactctactctctctctctttttgctgcatgcgttgttgcaactcgaagttgcaggccggtgaatgaatgaacgaacgggtgggtcagctgacttttactgcgacgggacagcaggggttcgcaggggagggatagaggaatgcaaagataaggccggccaccgatcgatttgggcggggtctcgtccttatcttgtacgactgcggctggacggccagcctctcgccgcccgaggagcggtggtgcagtcggacccgttctttggagcaaggccgtgcgtggtctcgatcggcttcccaaggtcgagggagagggggggacatgcctcgggcgaaggaaggaggtgcccgcgcgcgtgatctcaccgatctcgctgctggcgcggctttccaaagcacgcctgcgtaggagtagtagccgaacctagctcggtgtccggctgccgcttcgagatctgttgataactcgaagaaaaatacccaagatctggacttttaccccgagtccccgacccttccctgtcttgctggctgtttcttttcatcaccctcagtggtgccatcatctcatgtgctggaggtaggtttttgggcgggagccatggtggtgccgccttctgcaggaggtagatctgcctgtccggaagaggaaaggagaatcagtgcgcctgacttccagatctggaagctgctgttcgtacttgcggatctcaacatgtacggtgactgcactgcacatacgtttgcttgctcttctaacagtcgtttccttgcaggcaagggcaaatttccacatactgctgctaaattcttacttttctacatatatatagtttgatacagtaaaccaaatcagcgttaatatggcttttgttgatcctgatctttgaaattgacatttgttgtgcacagataaattcaatttttttaatgtttgaagatgtagtggatcttttcagatcttatatatgcatgtatatattcctgtacttctgttttctcttgaacgaggcgtagatggccagcaacaatctggcatacatgaataaccaatattttcattttatggcactagcataacatggttttctttgtgtagttctccagagattcctaattaattatatgcacatctggacctagcttggcaactgtatactcctaattaattaattaatcgattaagcatcaaattgttctttcgtttgcctgcagggattttctaaattcttatcatccacgcgttttttactgcacaaaaaacattatccaatcgaatgtgtcatcaaatatcctcttataaagtcataattagcttcttcaaaagtgctacttaagttttgtcattcttaattaatgcttttgaacaaaatatgaaatggacgctcattacaatttcatgtggtcctgccagttccaggcctagaagtacatatcttttgcaaagattgagatgttttttttccaaaacaagaaatagttgcaattttatgtggaccttcacataattgctttgttaaactgaataggctagggtatactcctatatatgcaagtcacccttatttcatctgtatttttgttctatataggcatatatttcgtctaacaccttgtctcaaatcaactgcgctctacacagccatgcatatataactattacattttagtttggaatctgaaaaaaacctattttttcactatcattatttgctctcatgattaatatgatcatgttattcatttataccgtatataattatgatagctaagtctttgcatgatttgtataattgtttccagtgctcctatttgtatatatatggtctataaggagagggggttacattaatttgtactataaggtgttttacaaaatggattttctcctaataatgtttggatttctgtccatctgaattcgagataaggcataccaaacatttacactgtggatcacagtttgtgtgtctcctcctaagcttatccacatggccggaactgaacaggcatagccttcctgagcatggttcctgggcacgtgttgccaatatttggacatctggagataaaactctgattgcatgaggtcgtgaatcaggagcgccgatcgccaacgcctttctctggtcccaagattatgaaacttgcatgctctccagagaatagtgatgacacaacagggctgcatcagactgtgtgcacatatagacttgttgcatctgtgcttgaaaaattgaacagtagcctagctagcttgtatatattttggtagcaggttgttagttatccattcggcgaaatctctagttgccccttgaattcgttaatcttatgtagcaggcatctttaaactttttagcaggtctgcagaatattttgtcaatatttattcaattttgtacatttgaaattatcaatacaatgttatatttcagata

SEQ ID NO: 43633 - DNA, 539 bp, Zea Mays
actgatatggataaactcatggtcttctttagcttcagagcccactgtagctatattgttggcaccactatttatgagcccactgacctcttacttcatttcagaggaagcgcccttcgactgcaaatgattcagctttattgtggcgagtttcttcttggaatcaaggacaagggcacaaaagctgccgtttcagacagcactgatgaggaagcagcgcaagcaccattgttggcaaaatggaccagaccatgactccaggaaactgagctataaagctcagctggagtgtgcataaaattgtaggatatgtgaattagagtgccaacaacatagggcttgcctgtagtatggtgtttgtacataccccagaacgagaaagctgatgacttgtatcagtatcagcaagtgccaagtgatagattttgggttggtgctaaaagcctaaagctcggtgttttgtgcgatccagccttcactgtttcaggcaaatggatctttatattatgtgctaaaagccaagtgtaggaaactgtggc

SEQ ID NO: 43634 - DNA, 1601 bp, Zea Mays
acttgtcacccaactcccgcagtcccacccacaccgatcgcggggccgatcgagtctgctgaagcctcgcctcgcctcgcagaagaagcagcgtgagtaaaaaacccgcagggtgcagacgaaaacctcccatggcgctggcggggacgggggtgttcgcggagatcctggacagcgaggtgtacaggtactacgccgacggggagtggcgcagctccgcctccggcaagtccgtcgccatcgtcaaccccaccacccgcaagacgcagtacagggtgcaagataccccttggagtagttttggcaatcccgccgttcaactatcctgtcaacttagcagtttctaagattggcccagcactaattgcaggcaatgctcttgtgctaaagcctccaactcagggcgctgtggctgcacttcatatggtacactgcttccacctggctggtttcccgaaaggtttgatcagttgtgtgactgggaagggttctgaaataggagattttcttacaatgcatcctggagtcaactgcataagttttactggtggcgatactggtatagccatttcaaagaaggctggaatggtccctcttcagatggagcttgggggaaaagatgcttgcattgtgctagaggatgcagatctggatttggtttccgcaaatatagtaaagggtggcttctcatacagtggccagaggtgcactgctgtcaaagtagtgctgatcatggaatcgattgctgatgctgtggtacagaaggttaatgccaagttggcgaaactgaaagttggcccacctgaggacgactctgatatcaccccggttgtaacagaatcctcagccaacttcatcgagggtctggtgatggatgcaaaggagaaaggagcaactttctgccaggagtacaggagagaaggcaaccttatctggccgttgctgctggatcatgtccgccctgacatgaggatcgcatgggaggagccttttgggcctgtcttgcctgtgattaggattaactcagttgaggaaggcatccaccattgcaatgccagtaatttcggcctacagggatgcatttttacaagagacatcaacaaggcaatcctgatcagtgatgcaatggagactggaactgtgcagatcaactctgcaccggctcgtgggcctgatcatttccccttccagggactgaaagacagtggcattgggtcccaggggataacaaacagcattaacatgatgaccaaggtgaagagcactgtcataaacctgccgtcaccatcctacaccatgggctgagatattcttgttaagtgttctatagctccatgagcaatgtagagagttaaatgtttcatagccacgtgagatttggacgctatttacacctcagttcttcctgcagaagatcttttgcagtttaaagaataaagtgcgttgaaagtatggagtcgatgcttttatatccttattactgttggcggtcaaatcctactaggttatatattatgttatgtctagatacatagtgaaagcgatacatctaaacaatcaaaatgtcttataatttaactttgaacaggagtacttagatg

SEQ ID NO: 43635 - DNA, 2413 bp, Zea Mays
aacgcaacgccgatcgtgcgcctcctccctcaccgcgcgccgccgtcgctgccatcggttcctttcaaccggtggatcaccccgctttccataaccgtttatccttggttgtgctcagcgtctggttccgccattggtcccatggctgccccgcgcgccgcggcggcgtcggcgaagcaggtgacgaggcagaactttgcggaggccgtgctggagctgagggcccacctggaggcatgcgactacgtggccgtggcggcgcagaagaccggtgccccgacgggatggcgccgcgcgttgccggtggacactgcggaaacggcgtatctcaaggccaagctcgccgcagagtcctttcagccactccagatcgccgtctgccccttcaggcagcgcaactcttacccgtctaccctcgtcgcctacccgtacaattttcacttatttcctagagatgaactacagctcggaatgccttcatacagtttctcttgtcaaccatgttatttatcaactatagctaatgatggttttgatttcaatatgtgcatatatgatggtatttcttatctatcaagggttcaagaatccttagcaagggaaaagatctttactcctcgtcctcaccaattgttgtcatcaccaaacacatcagttgctgactcagttttcatgaatagaataaagtctaggatagtgaactggcgaaaaagatatgctgacccaagtaaaaaacatgatggctctttggttagttcccttagcagattaatattgggtgctgaaacgtatggttccaggcccagtatgagtattgatgtctgcagtgatcggcaagttcaattggtcttggaggcagtaaacccatatctctgatgaccttgtatctctcgttccacacaaagctggagttggtagggctgtgcgtgtgatctttactaattcgaaagaggataagaatcttctcctgatggatatccagaaattagaagatgaacaaaactttaaattccgtgggtttcgagaagttattgatctactatcatcttcacagaagccaatcatatcatacagttgcttgaatgatctgacaatgctgcacaccaaattcattgcacctcttccgccaaacatgcatgaatttatgtgttctctaaaaatggtcttccctaatgttgttgatatcagccacctgtggaggcaaattggccctttgagaaaagcgaagaatatacaagccgctctcagttacttacaaagacagtactttgtgccaattgaaatagaaataccacagcaagatggtacaagcagtataacaaaaaatgagcaaaatgttctgagaataacaaagttatttgctaaactaagcaatttactgaaaatcagtcctgagtgccaactgcaatctcgtgaacagtgcactgcagttgaagagtattgtaacatcttctatccaagttgtgtggtcggaggttctgacgatgctaactttgcttttgagtcagacaccacagaaactgtgagcactgataacatcatcttcttgtggggctttagggaaaaatctgtgaaggagttaaaatcgtaccttattggcttacatcaagccttttcagaggattttgaggtcaagttgttggataagacatgctcagcttttgatattccgtgattctaatactgcaatgcagttactaaaagaaataggctcagaaggcccctcactaaacagattcttctcagaaggtctgaaagctgcaggttttgaagtgtacaaaaaggtctgcaggttaggactttgggattcagatttagctgaggtcctcgaggatgtttcatctgagctaggtgttccgacacttcctgagtgcagcacctctcagatatactggaatagtgaattaatgctggatctgaaggagtatctggaatgatagaacattatatagcccttaatatatttttaccaggttctaagattaatgagagctcccctcaagaagcagtagcaggccacagcaggcacctccatgttcaaagatgattattgctttattatgatgttacatgactggcttgaatgtcatcattttggagtgtctgacctatatgcttctcgtgctttgtgcagcccgaatagtagcaatgatattctggcatcagtccggcttaaatgaacagtatgtatgtacgagggcagtgaggtacccttgtgacgaccacggagatatagagagtttgtattgtattcttcatctgtgttgggctttggttagctaagtcattagcagtaatctcgtgtatttgggcctaggtttagcccggcccaaacgttttcgtataaagagtctgtaatagggaggatttgaacagaatagaaaatacagaaagaaaaggcagttgaacctcc

SEQ ID NO: 43636 - DNA, 2699 bp, Zea Mays
cggctcggcgactccgaacgcaacgccgatcgtgcgcctcctccctcaccgcgcgccgccgtcgctgccatcggttcctttcaaccggtggatcaccccgctttccataaccgtttatccttggttgtgctcagcgtctggttccgccattggtcccatggctgccccgcgcgccgcggcggcgtcggcgaagcaggtgacgaggcagaactttgcggaggccgtgctggagctgagggcccacctggaggcatgcgactacgtggccgtggcggcgcagaagaccggtgccccgacgggatggcgccgcgcgttgccggtggacactgcggaaacggcgtatctcaaggccaagctcgccgcagagtcctttcagccactccagatcgccgtctgccccttcaggcagcgcaactcttacccgtctaccctcgtcgcctacccgtacaattttcacttatttcctagagatgaactacagctcggaatgccttcatacagtttctcttgtcaaccatgttatttatcaactatagctaatgatggttttgatttcaatatgtgcatatatgatggtatttcttatctatcaagggttcaagaatccttagcaagggaaaagatctttactcctcgtcctcaccaattgttgtcatcaccaaacacatcagttgctgactcagttttcatgaatagaataaagtctaggatagtgaactggcgaaaaagatatgctgacccaagtaaaaaacatgatggtagtaatactttgagttttgacaaatgcttacagctcaccgcccttgcatttcactttgatggctcttagtcttcttattgtgcaggctctttggttagttcccttagcagattaatattgggtgctgaaacgtatggttccaggcccagtatgagtattgatgtctgcagtgatcggcaagttcaattggtcttggaggtgtgattgtacaacacaagtttgatgttttctctagttaaggaagaaatggttttgtacttaaggaagcaaaatatgagtccctagctcaggttctttggtgcggttatcaatcctgcaaagagttgaatgatcaaaatttcatgtcatgcttttaatatgaagatgtagttgaaataagctgcattgctgaaaaattgtttgctccaaatgtcgcttttgaattacctcttctttacagatgaaatggtaatcccactctactggtttaaccatttgagttattctgcaggcagtaaacccatatctctgatgaccttgtatctctcgttccacacaaagctggagttggtagggctgtgcgtgtgatctttactaattcgaaagaggataagaatcttctcctgatggatatccagaaattagaagatgaacaaaactttaaattccgtgggtttcgagaagttattgatctactatcatcttcacagaagccaatcatatcatacagttgcttgaatgatctgacaatgctgcacaccaaattcattgcacctcttccgccaaacatgcatgaatttatgtgttctctaaaaatggtcttccctaatgttgttgatatcagccacctgtggaggcaaattggccctttgagaaaagcgaagaatatacaagccgctctcagttacttacaaagacagtactttgtgccaattgaaatagaaataccacagcaagatggtacaagcagtataacaaaaaatgagcaaaatgttctgagaataacaaagttatttgctaaactaagcaatttactgaaaatcagtcctgagtgccaactgcaatctcgtgaacagtgcactgcagttgaagagtattgtaacatcttctatccaagttgtgtggtcggaggttctgacgatgctaactttgcttttgagtcagacaccacagaaactgtgagcactgataacatcatcttcttgtggggctttagggaaaaatctgtgaaggagttaaaatcgtaccttattggcttacatcaagccttttcagaggattttgaggtcaagttgttggataagacatgctcagcttttgatattccgtgattctaatactgcaatgcagttactaaaagaaataggctcagaaggcccctcactaaacagattcttctcagaaggtctgaaagctgcaggttttgaagtgtacaaaaaggtctgcaggttaggactttgggattcagatttagctgaggtcctcgaggatgtttcatctgagctaggtgttccgacacttcctgagtgcagcacctctcagatatactggaatagtgaattaatgctggatctgaaggagtatctggaatgatagaacattatatagcccttaatatatttttaccaggttctaagattaatgagagctcccctcaagaagcagtagcaggccacagcagcccgaatagtagcaatgatattctggcatcagtccggcttaaatgaacagtatgtatgtacgagggcagtgaggtacccttgtgacgaccacggagatatagagagtttgtattgtattcttcatctgtgttgggctttggttagctaagtcattagcagtaatctcgtgtatttgggcctaggtttagcccggcccaaacgttttcgtataaagagtctgtaatagggaggatttgaacagaatagaaaatacagaaagaaaaggcagttgaacctcc

SEQ ID NO: 43637 - DNA, 1811 bp, Zea Mays
gaaccgtcccgcggcaagccagcaaacccagccgcaccacttgcggaacgcagcaagccagcaaccccttgacgccttggattcgcactgcaagtctgcgccacagcgcgcacgcattccaatcgactagcgtagacgcagtggcgtctcgcagtggcgtctcgcgctaccgatgcccagccggatcgccgcctgcttccgctgcgccgcggcgccgtcctcgggcgcgggcgcgggcgcggcggggcccagcctggcgacctccatctacgagacccacctcggcttggtcgcgctctcctggtcccggacctcgctcggcctctccctccgcgccgtgctccgcctgtcggccacgcccccgcccggctcctcctcctcggcgtccggagcgggctacctcgacgatgacgcggacgaagagattctcgccttccgcgtcagcccatggctattctggcgccgccgcgggtccagacggttccgcgctggcgaccgcctcgtcgacctggcgtgggatctctctcgcgcgcgcttcccggtctccgggtcccccgagccctcatcgggcttcttcgtcgccgtcgtcgtctgcggcgagatggtcctcgcggccggggacctgaccgatttggcctaccggaggacccgggcccggcgcccatcaggcccgcgtccggtcctcctctcccggcgggagcacgtctcgctacgcgacgcgggcgccggccgaggccgcagccacaccacctgggtgaacgtccagggcaaggagcgggagatctccgtggatctcgtggctcgcggccgtggcagggacaaggccaccgccggcaaggggaaggagaaggaccgggctgatgtcggcatgtcggtctctgtcgacggcgagcgagtgctgcacgtccggcgcctgcgctggaagttccgcggcagcgagcgggtcgacctcgggggcggcgacggcgtccaggtctcttgggatctccacaactggctcttccccccacgcgagccgccccccacggaggcctcgacgcacgcccacgcggtgttcgttttccggttcgaactcgccagcggcggcgaggagagcgaggcggatttggggaagaatccctcccccagcaaggacgcaaggaggaacacgggcgtttggggaggctacctcgcgcggtgggggcaacgggactggagcgagacgggcagcaacggtgagaggaggaagggcagggggcggaggctggccaaggagagctcgtcgtcgtcggcgtccgtggcatcctccacggcgtcgtgggccagtggctccacggtgatggactgggccagccccgaggaggtcgagatgcagcgcggcgacggcttctcgctgctgatctacgcctggaagagctaacaccggcgacgacggcggcagcatagttctgatcaactagcggtgatggaacgagcttgtgtttgaatgcactatatgccggatgccccggaatgattgactgaagtcactgaatttccatggtgtgttaaaaagttggatggatatctgtgtataggagatgactatccatacaaaggttgtctttgcatattcatagatgagagatgatcatctatatcaatcaattgattgtgttgggtttggtggattggttgccatagtaggaaatattgctactatatgctggatgcaacggaaaaaataagtttcttcatgttttctaatctttactattagtaaataaaatcaggactattagtatgttacattattaattattaattatgataaggtaaattttgataagtgc

SEQ ID NO: 43638 - DNA, 2822 bp, Zea Mays
gtttgccgaggcgaaccgtcccgcggcaagccagcaaacccagccgcaccacttgcggaacgcagcaagccagcaaccccttgacgccttggattcgcactgcaagtctgcgccacagcgcgcacgcattccaatcgactagcgtagacgcagtggcgtctcgcagtggcgtctcgcgctaccgatgcccagccggatcgccgcctgcttccgctgcgccgcggcgccgtcctcgggcgcgggcgcgggcgcggcggggcccagcctggcgacctccatctacgagacccacctcggcttggtcgcgctctcctggtcccggacctcgctcggcctctccctccgcgccgtgctccgcctgtcggccacgcccccgcccggctcctcctcctcggcgtccggagcgggctacctcgacgatgacgcggacgaagagattctcgccttccgcgtcagcccatggctattctggcgccgccgcgggtccagacggttccgcgctggcgaccgcctcgtcgacctggcgtgggatctctctcgcgcgcgcttcccggtctccgggtcccccgagccctcatcgggcttcttcgtcgccgtcgtcgtctgcggcgagatggtcctcgcggccggggacctgaccgatttggcctaccggaggacccgggcccggcgcccatcaggcccgcgtccggtcctcctctcccggcgggagcacgtctcgctacgcgacgcgggcgccggccgaggccgcagccacaccacctgggtgaacgtccagggcaaggagcgggagatctccgtggatctcgtggctcgcggccgtggcagggacaaggccaccgccggcaaggggaaggagaaggaccgggctgatgtcggcatgtcggtctctgtcgacggcgagcgagtgctgcacgtccggcgcctgcgctggaagttccgcggcagcgagcgggtcgacctcgggggcggcgacggcgtccaggtctcttgggatctccacaactggctcttccccccacgcgagccgccccccacggaggcctcgacgcacgcccacgcggtgttcgttttccggttcgaactcgccagcggcggcgaggagagcgaggcggatttggggaagaatccctcccccagcaaggacgcaaggaggaacacgggcgtttggggaggctacctcgcgcggtgggggcaacgggactggagcgagacgggcagcaacggtgagaggaggaagggcagggggcggaggctggccaaggagagctcgtcgtcgtcggcgtccgtggcatcctccacggcgtcgtgggccagtggctccacggtgatggactgggccagccccgaggaggtcgagatgcagcgcggcgacggcttctcgctgctgatctacgcctggaagagctaacaccggcgacgacggcggcagcatagttctgatcaactagcggtgatggtaaattttctctggactgttgtagtttgcagtgttcttgtgcagttaaagcctggagagattgaattgagcttgaattacagtagtgccattgctaagtggaacgagcgattagtgtgattttttttcattactagaacaattttcttccctggattagcattaattactgaaatgaacccaacaccaaatctatttgcctacaatctagggcaatggctcaggatattttgagcagcttggaatcagtccaccgtagcgatcaacgtcaacaactccagtatagtatcttattctgtgtttctcttgtgtcacctgctcaaaagagaatctatccatcaatcaattagctgttgctgcagtggtcgttctcctaattgtctttgacattaatcatagatgttagatcttaaggatcggtggttacgatcgcgacgttcacattcacaggaagacgctcttcagttcagtttgtgatcaatggcttgtttttttttggttgctgagtgccactcaaaacaataatctgctattcggaaattcggatggcagggctgcaacctggacaattgctcacttgtttgagggagtccgtcaagtgaatggcagatctacgtagtacattacactatgtagaggaaaacttgtgtttccccactcagactctgtttgtttaccctctagattatataatctagcttaaataagttgaaagataaacaaacaatatggtttattaggtggaatatataatttagatacctagattatgataatctataaacaactcattagatgcttatataattcataagctagattatctaaattagatgcttatataattcataagctagattatctaatcctataggcaaacaaacagggcctcagtttcacttcagttttgactgtaactggttgcgactaattctggtcatgccccattgatttactgagcgatcaaatatgcgtctgccttgatatcttgttttacaggaacgagcttgtgtttgaatgcactatatgccggatgccccggaatgattgactgaagtcactgaatttccatggtgtgttaaaaagttggatggatatctgtgtataggagatgactatccatacaaaggttgtctttgcatattcatagatgagagatgatcatctatatcaatcaattgattgtgttgggtttggtggattggttgccatagtaggaaatattgctactatatgctggatgcaacggaaaaaataagtttcttcatgttttctaatctttactattagtaaataaaatcaggactattagtatgttacattattaattattaattatgataaggtaaattttgataagtgc

SEQ ID NO: 43639 - DNA, 8360 bp, Zea Mays
ttgaaaatagaattagggctctaacaaatgaagaaccaggtgagcaagacatagatccagaaatagtgagagggctaaaaaaatgctcgacgaatataatccattagtaaaaatattccgccaagctcgtgattttctcgaagaacacaaaggcatagatgtaagcattagaatagtaggcgctgacgaaactgatagaattcaatatgagatgccacatcaggaagaattagctatgctgattgtaggtgatttatcacttgagaactacaaacgggacatcattgttagcacacaccaaaatagccttcaaaggatatctattttccatccagcatatatgcctctacaatacccgctcctatttccatatggcgaacgaggctttcaactaggtattaaataccatggacaacacattagtcaaaacagagatgactccaaaagagatagagtaactttgcatgaatttttgaaatatcatgtgcactatagacctaatcagcctaatccctggttatgttatggccgattatcaaaacaagtagtagtagacggtcgagcaatggaggatgaagacaggcttgattatattgttagaaatcaatcaaaattacgagctgaatatgtacaaggtatttttgatgcagtagaaaaaggaatatatgacgccagtcgaataggaaaaaaggtgttattaccatctagccatgttggatcaaaacggtatatgatacaaaattaccatgatggcattgctatttgttgtgcctatgggccaccagatctttttattacatgcacttgtaaccctaaatggcctaaaataacaacatgtttattaccaggtgagcatccaaatgatagacctgatattattgtccgtgtttttcatatgaaactacaacaacttttggatgacttacaatcaggaaaggtatttggccttgtactagcactactatattctatagaattccaaaaacgaggtctaccacatgtgcacacattaatttggttagacaagaaaggttgtgaaataactacagaaacaatagattcgtggatatctgctgaaataccagatcccgagttagatcctttgggatatgctcttgttgctgaacatatgatgcatggaccgtgcggagataaaaattggaattgtccatgcatgaaaaaaggcaaatgctccaaaatttaccccaaagattttgaagaaaacactacattctctgaaaatggctttacaatatatcgaaggaggaacaatgggattttcatcagaagagaacaacacaacttagacaacaaatgggttgtgccacataatttaaaactattaaaaagataccaagctcatataaatgttgaatatgtaaacaagagtacagtcttgaaatatttatgcaaatatgtaaacaaaggacctgatagagcaaaggttatattcaaaaaaatccaaaaaggagaagaatcacatgtaaacaaagaagcagaaactatagatgagatacaagaatatctagactgcagatatatatgcgagcaagatgctctttggagattattaggatacgagatacattaccattggccacctatagaaagactgccagttcatctaccattgatgaatataattaagatgaaatcaaatgataaattgatagacatagctaaagatctaaagtatagaaagacaatgctaactgaatggtttaatgcaaataagcaatatgaagatgcaaaagaattaacatactatgagtttcccaaacaatggcgttgggatggagaaaaaagacaatggaagaaaagacaacatggtttcaaatttggaaggctctattatgtaaaccctgctgaaggtgaaagattctatttaagaatgcttctaatgattgttaaaggtgctaaaaactatgaagatatacgaacgtataatggtgttttataccaaacctttaaagaggcttgcgcagctagaggattactagacgatgacaatgagtggtatcgcacatatcaagaagcaactaattgggcaacatcatttgaactacgcaatctatttgtcataatgctaacatattgccaaataaaagatgaaaaagaatttttcaacaccacatggcacacaatggtcgatgacattcacaaacatcttatccaaaaataccaccctatcaaatatacaccctctgaattagaactacaacattatttacttgaagaactagaagagctattctctaagaatgggcaggaaataaataactacaatttacccaggcgacaacacacaaaacatattgataacataaacagactaatccaagaagaaatgagttatgatataaattacttagaagaagaagcaaacaaattatatatacaactaaacaaagatcaaaagaatgcttttcataccatagttagttctgtgcttagcaacaatccaaacttctattttgtctcaggacatggaggaactgggaaaacatttctatggaatgccattgtatcataccttagagctataagaaagattgtccttacagttgcatcatcaggagttgcttctttgctacttccaaatggacgtacagctcactcaagatttcgtatacctatagatttggatcaattgtcaatgtgtgatataaaaagaggaacaaatcttgcaaaacttcttattgacacagatcttattatatgggatgaagctctaatgacaaataaacaatgctttgaagcatttgatagatcccttagagatatagtaggagaaacatatgaaaaagctcttgacattccttttggtggtaaagtggttgtgctaggtggcgatccaaaacaaatattacctgttatagaaaatggaacaaaagaacaaataataaatgcttgtatcattgcttcatacctttggaaccatgtcaacattatattcctttctgaaaacatgcgactacgacaaagtaatatatcaaatgaagagtatgaagacttgttatcattcaataattggatccttgccattggaaatggggtatataacaacaacgataatttttcctcggactcaacactcattgaaataccaaaagaatttttaattgaaacaacagaggataaaattcaagcattagttcaatttacttatcctgacctacaaacaaaatataatgatccagattatatcaaaaaaagagctatattagcaacaactaatgatgttgtagatgaaataaatgattatattatctctcttttgccaacagtagagagagaatactatagtgcagatagcatatctaaatgcacagatgctccaaatgatgccaatattttataccctattgagtatctaaacactttaaacgcaaacaatttcccttctcatagactaaaacttaaaattggcactcctgtaatgcttctacgaaatttaaatcaaagtttaggactatgcaatggaaccagaattattataactcaactaggagacacaattatagaaggaacaataataacaggtacacacgttggcgaaaaaatacatataccccgcattaatctgacaactaagggcaataaatggccttttacattatgtcaacgccaatttccaatcaaggtttgctactctatgactataaataaaagtcaaggacaaacactatcaaatgtagggttatatttaaagaaaaaggtgtttacacacggtcaactatatttagctgtgtcacgagttacagaaaagaaagggctcaaaatattgatagaaaatgacgacggttcatgtggaacaataacagaaaatattgtgtataaagaagtactacaatctattgagagccatggcaacataaattgatactatttttaacaaattgtatttgcagatggacattacaccactatcacaagttcgaccaggggtctaccactatatcatttgtgttcggatatcaagagtttgggaatttcatggcaaaaatgatgatgatccaatcaaacatttggatcttgtgattattgatcaacaggggactgcgatgtacgctgaagttcctcaagaagctatatatacacttcaaccacgactacaggaaagcaagattttaatcatgagaaaaatttatgttgacaacgcaaagctatccttcaaacctgtgcatggaaagtatatgatcaggctacatccaaagactttgcttgaggaagtaaatgaggatccacaagattttccaaaatatacattccatctaacaccgttcccagaactaccccaacttgaaggaaacaatgagtatttcatcgatgtcattggatgcattacagctctttctgatgcaacaccatttcagactagcagtggaatagttcgcatgaaaaggctgatccaccttgtggatctaaggggaaataaaattgaggtatcactatggggacgaagagcagaggaattcccaggacaacaagtctttaaagccagtgaaatgaatcatgtaattgttatctttgttggaacatcagtcaaatcctatcgtggatcaccaccttttcttagtggcacagctgcatgccgctggtatataaatcttccagagatccatgaaatcaatactttctatgcaagtatcggtgaacaataccaatcaatccaaaagcttcatattcagacaatgaacgagatgcagaacaagattgagcaaaagacatttttagaaatgaaattagtcgacccatttgatgacatgagcaaacgtttcgaatgcaccatgattgtaacaagaattgctgacaataagccctggttctatcaaggatgcacaaaatgcaatacatcaacaagatatgaaggaaaaacatacatttgtaaacaaggccacatctcctctcagatggtccacaggtataaaatatctctatatgccactgatggcacctatgagctagaattcgtgctctttgatgagagagcgacatcacttattgggaaaaccgtagagaaattactgagacaaagcaacaaatctgaattgccggaagagattaaagcaattgtgggtgagaaattgactgttgtgaccaagttgtttccaggaaaaagtattaaaaagagaggacctaataaggacaacaaagatccaacatttgatattcttagtatcaaaaagaggcatggaaaagacctactcctttccgtgttcaaaaaagaagagcctgttgttctccacagcgcaagctcatctcaacttccaaagctaccacccctagtaccaatagagccaaagacacaagatatacagacctctggttcagaagcagcatcaccacatgaattacagcttatggagattgatcagactagttgctttgacaacctcagtgtatcatacaagagaaatttcaatgcaattgatgactccgacaaggaagaaacacatggtgctgaccaactttcagtctttgcaaaaagaccaaagatgaagaacaattagttaccttctacatagctactcttttgagacgttgcatctattgttcaatagaaatagatcggttgtggttctacttacgagaacaacaaaatttggcttctcgcaaccaaaactcttttgcagtatgtataaacatatgactgtttgcaagcaacgtagcagcagttctgctaagctcatcttttgtagtgacatatctttaaacatgctgcttttgatcaaaataacactcactatcaactctatataatcatatgatattgtctgatattagcattttatttctgtggtttttattgggcaaacttttgatcaaaaattacactcactatcagctctatataaacatataatattgcctgatgttagtattttatttatatggttcttattgggcaattctctttcagttaattttttctatgtagtttaaactattccagtttgttgtcacaattcaagtgacaggtccagaaaaaaatatctacctatttgtaatttattaattgacttttcctcattgtagaaaatatcagctaatctgctcaaattttgatttgcatatacataatggtgattgtgacacgagtcatgctatctaaagtcctttattcattgttttggacaaataactgtcacattttatttagcaagtaaatataaggtacaattcattatattaatgaacttataagcggttgagcatctcataccttagatatgatctttgcagaccaagtgaagtttgaaattcccttgatttatcatttagttaaatgaaaagttgtctaaaagggatgatagaattatgactttccattcgcatcgcagcactccaaaattctagacaatggtgctcgattttaatgtgcacctaacagttagattcttccttcttaacaatacatgcattattttagaaacttttctgtctataataaatttttgctgggcagttcaaactattccagtttgttgtgacaattcaagtgataggtccaaaaaacatatctcaagctatttgttatttgttaaatgaattttcatcacattgtacagaaaatctcacctaaaccattgcaatcttgaaaacacaacctcaattgctctttacacataaaacaatcagatttaccattcagtcaaatgaaaagatgggtaaaagggataacgaagttctaacctcccacttagatcctagcactccaaaattctatacattggtcatctatctgcctgataaccccatccaaatcatccgtaagactagagatggcaacaaataaactatcagagaaaagtgcctctggactatcagagaaaagtgcctctggactatcagagaaaagtgcctatggacatctatatccgtgacttatttccgatatccgaacccgttacccgctatggataaaaaaacagtatccacatccattactcgcaggtaacggatatccactacacatacataatttttaaatccgccaaattcaaatatttgtccagcaaaattgtccaccaaatttaaatatgataaaaacatacaaccatacaaaatttgtccaacaaatcaaatctaacacatgcattaaggcatacagcgagcaatataaaattagacctgttgggcgagctggcaatgtctaacgtagtgctcaacatggtcacgtggagaagaccgatcctcatgcgcagtgcttgacgtggagaggtcgcgagtagctggcggagaatggagatgcacgaggacagtcgatcgccagtggtgtgtgcgaactatgaagtcggcggcggtgcacgaccgcacagatctgagctacgaccagatcacctacagggaacggtagtggcaccgccgcactggtcgtatgcaagctggaacgcatggggagtgaaggaccgccgagcgcaggaccgtggtcgtggtggccgcctggccgggtggcaggtggtcgtcgaggcggtcgagggtagggatggatactatactggggttgtggactcgtggggagaattggggaatagggaggcaagacaggctagacggggttgccagattggggaggctagacagacagccgagatgggccgcaacgggaaattagactatctatggtctgtgaattggttctaaaccctagtgaccccaccttttaggttacttaaatggatattcaagtattcggatatggatactgatttttcataccagttttataaatataaatgttgctatccgtatccccgtacagactcgtacctgaaaccgtgtccaaaagattttttatccgcgggtacaaatataaatcacatccattgccaccggtacataggactaaccagtgtttctagctgtagacataactatatatcgaaaaagaaatccttttatacacttaacaaatagggggaaaactttgccttaattttttttgtaaaggttcaattaagtatacaagaaatcaatctggtttggcgaaaaaagaagcagataaagaaaaaccttaaatctacctcttgtcgaatctgcatgcgctccagcaacttgatcacatccagaccgaccttgtacgcgtacaccttgcactccacaagacctaccatggtggatgcgatggtgatctggttgcccagcttcgcgagttgccgcacaacgaacttgcccatgtaccacgtgtttccttgaagagcgtcgacaagcgagcaacgatggcagcctcaccgctagcgaagatgctgagggtggaattgcaaactcagtcaccggcacaccaccagggataactgagcagtgcgacaacagtggctatcccggtggcggcggtgagggtgggatctgatttttac

SEQ ID NO: 43640 - DNA, 9586 bp, Zea Mays
atgtggctcaagagtgatatcccttatatatcgtcatcaatatcatccattgaagatctttgcaacatgaaattgtgtcttaatagtgaaagactgaagaaagggcctttaactcttatgaatgacaagataatccttgatgttgtagagcgaggtacctgggctctacatatgctcaaatatgtaccctctcttctatttcaaaacacctctcttagagcagtaacttttttggagaagagagtaaaataagacgcggtgaaaggattagaaagaggaagatgtctaaaaactgtgaaccctccaacaaaaagatctgcatacaaagatttttgaactcccataatggaatggttgatttcccatccgagtatatccagcaactgaaagaatcatacactgacagatcataccttggtaaactagaatacaaatgtagacactgcgatgcaattttctggttcaatgaacgcaataaatccatgacgagacacaataatcaggaaccaatatattcgaactgctgcaaaaatggcaaaatcagaataccaaaatataaagaacccccaacttttcttaatgaattaatacaacgaaaaatggacacaagatgtaaacattttctacaaaaaataagacaatataatagcatgtttgcatttacttccatggggggaaatattgataaaaaaataaatgatggtgagggaccatatgtgtttcgtgtcaatggccaaatacatcatcgaataggatcattactacccttaccagacaattgccccaaatttgcagaactatatatttttgatacaaagaatgaaattgaaaatagaattagggctctaacaaatgaagaaccaggtgagcaagacatagatccagaaatagtgagagggctaaaaaaatgctcgacgaatataatccattagtaaaaatattccgccaagctcgtgattttctcgaagaacacaaaggcatagatgtaagcattagaatagtaggcgctgacgaaactgatagaattcaatatgagatgccacatcaggaagaattagctatgctgattgtaggtgatttatcacttgagaactacaaacgggacatcattgttagcacacaccaaaatagccttcaaaggatatctattttccatccagcatatatgcctctacaatacccgctcctatttccatatggcgaacgaggctttcaactaggtattaaataccatggacaacacattagtcaaaacagagatgactccaaaagagatagagtaactttgcatgaatttttgaaatatcatgtgcactatagacctaatcagcctaatccctggttatgttatggccgattatcaaaacaagtagtagtagacggtcgagcaatggaggatgaagacaggcttgattatattgttagaaatcaatcaaaattacgagctgaatatgtacaaggtatttttgatgcagtagaaaaaggaatatatgacgccagtcgaataggaaaaaaggtgttattaccatctagccatgttggatcaaaacggtatatgatacaaaattaccatgatggcattgctatttgttgtgcctatgggccaccagatctttttattacatgcacttgtaaccctaaatggcctaaaataacaacatgtttattaccaggtgagcatccaaatgatagacctgatattattgtccgtgtttttcatatgaaactacaacaacttttggatgacttacaatcaggaaaggtatttggccttgtactagcactactatattctatagaattccaaaaacgaggtctaccacatgtgcacacattaatttggttagacaagaaaggttgtgaaataactacagaaacaatagattcgtggatatctgctgaaataccagatcccgagttagatcctttgggatatgctcttgttgctgaacatatgatgcatggaccgtgcggagataaaaattggaattgtccatgcatgaaaaaaggcaaatgctccaaaatttaccccaaagattttgaagaaaacactacattctctgaaaatggctttacaatatatcgaaggaggaacaatgggattttcatcagaagagaacaacacaacttagacaacaaatgggttgtgccacataatttaaaactattaaaaagataccaagctcatataaatgttgaatatgtaaacaagagtacagtcttgaaatatttatgcaaatatgtaaacaaaggacctgatagagcaaaggttatattcaaaaaaatccaaaaaggagaagaatcacatgtaaacaaagaagcagaaactatagatgagatacaagaatatctagactgcagatatatatgcgagcaagatgctctttggagattattaggatacgagatacattaccattggccacctatagaaagactgccagttcatctaccattgatgaatataattaagatgaaatcaaatgataaattgatagacatagctaaagatctaaagtatagaaagacaatgctaactgaatggtttaatgcaaataagcaatatgaagatgcaaaagaattaacatactatgagtttcccaaacaatggcgttgggatggagaaaaaagacaatggaagaaaagacaacatggtttcaaatttggaaggctctattatgtaaaccctgctgaaggtgaaagattctatttaagaatgcttctaatgattgttaaaggtgctaaaaactatgaagatatacgaacgtataatggtgttttataccaaacctttaaagaggcttgcgcagctagaggattactagacgatgacaatgagtggtatcgcacatatcaagaagcaactaattgggcaacatcatttgaactacgcaatctatttgtcataatgctaacatattgccaaataaaagatgaaaaagaatttttcaacaccacatggcacacaatggtcgatgacattcacaaacatcttatccaaaaataccaccctatcaaatatacaccctctgaattagaactacaacattatttacttgaagaactagaagagctattctctaagaatgggcaggaaataaataactacaatttacccaggcgacaacacacaaaacatattgataacataaacagactaatccaagaagaaatgagttatgatataaattacttagaagaagaagcaaacaaattatatatacaactaaacaaagatcaaaagaatgcttttcataccatagttagttctgtgcttagcaacaatccaaacttctattttgtctcaggacatggaggaactgggaaaacatttctatggaatgccattgtatcataccttagagctataagaaagattgtccttacagttgcatcatcaggagttgcttctttgctacttccaaatggacgtacagctcactcaagatttcgtatacctatagatttggatcaattgtcaatgtgtgatataaaaagaggaacaaatcttgcaaaacttcttattgacacagatcttattatatgggatgaagctctaatgacaaataaacaatgctttgaagcatttgatagatcccttagagatatagtaggagaaacatatgaaaaagctcttgacattccttttggtggtaaagtggttgtgctaggtggcgatccaaaacaaatattacctgttatagaaaatggaacaaaagaacaaataataaatgcttgtatcattgcttcatacctttggaaccatgtcaacattatattcctttctgaaaacatgcgactacgacaaagtaatatatcaaatgaagagtatgaagacttgttatcattcaataattggatccttgccattggaaatggggtatataacaacaacgataatttttcctcggactcaacactcattgaaataccaaaagaatttttaattgaaacaacagaggataaaattcaagcattagttcaatttacttatcctgacctacaaacaaaatataatgatccagattatatcaaaaaaagagctatattagcaacaactaatgatgttgtagatgaaataaatgattatattatctctcttttgccaacagtagagagagaatactatagtgcagatagcatatctaaatgcacagatgctccaaatgatgccaatattttataccctattgagtatctaaacactttaaacgcaaacaatttcccttctcatagactaaaacttaaaattggcactcctgtaatgcttctacgaaatttaaatcaaagtttaggactatgcaatggaaccagaattattataactcaactaggagacacaattatagaaggaacaataataacaggtacacacgttggcgaaaaaatacatataccccgcattaatctgacaactaagggcaataaatggccttttacattatgtcaacgccaatttccaatcaaggtttgctactctatgactataaataaaagtcaaggacaaacactatcaaatgtagggttatatttaaagaaaaaggtgtttacacacggtcaactatatttagctgtgtcacgagttacagaaaagaaagggctcaaaatattgatagaaaatgacgacggttcatgtggaacaataacagaaaatattgtgtataaagaagtactacaatctattgagagccatggcaacataaattgatactatttttaacaaattgtatttgcagatggacattacaccactatcacaagttcgaccaggggtctaccactatatcatttgtgttcggatatcaagagtttgggaatttcatggcaaaaatgatgatgatccaatcaaacatttggatcttgtgattattgatcaacaggggactgcgatgtacgctgaagttcctcaagaagctatatatacacttcaaccacgactacaggaaagcaagattttaatcatgagaaaaatttatgttgacaacgcaaagctatccttcaaacctgtgcatggaaagtatatgatcaggctacatccaaagactttgcttgaggaagtaaatgaggatccacaagattttccaaaatatacattccatctaacaccgttcccagaactaccccaacttgaaggaaacaatgagtatttcatcgatgtcattggatgcattacagctctttctgatgcaacaccatttcagactagcagtggaatagttcgcatgaaaaggctgatccaccttgtggatctaaggggaaataaaattgaggtatcactatggggacgaagagcagaggaattcccaggacaacaagtctttaaagccagtgaaatgaatcatgtaattgttatctttgttggaacatcagtcaaatcctatcgtggatcaccaccttttcttagtggcacagctgcatgccgctggtatataaatcttccagagatccatgaaatcaatactttctatgcaaggtaaattatattcctttctataacctccctttcatttttttaaaatataatgttttgtgatttccatttattgtaaattagattgacggcaatataaatatttggatagtacatgtacattttttggcctcctttattgcatttccttacaaagtatttaaaatacaaccctacaatgagttagtttgagatttatttatagaataaatatagcagcagcaacaaaagtgtttgatataatgccatggggaagttgagttgtacatactaaggtttaacacgaagatgaaatctaattatacaacattcaatcactgttaagcttgaatatagtacaatgtaaatttgcaattcatttaataaactgatcaagactaattacaatgctttcatatttatagtatcggtgaacaataccaatcaatccaaaagcttcatattcagacaatgaacgagatgcagaacaagattgagcaaaagacatttttagaaatgaaattagtcgacccatttgatgacatgagcaaacgtttcgaatgcaccatgattgtaacaagaattgctgacaataagccctggttctatcaaggatgcacaaaatgcaatacatcaacaagatatgaaggaaaaacatacatttgtaaacaaggccacatctcctctcagatggtccacaggtataaaatatctctatatgccactgatggcacctatgagctagaattcgtgctctttgatgagagagcgacatcacttattgggaaaaccgtagagaaattactgagacaaagcaacaaatctgaattgccggaagagattaaagcaattgtgggtgagaaattgactgttgtgaccaagttgtttccaggaaaaagtattaaaaagagaggacctaataaggacaacaaagatccaacatttgatattcttagtatcaaaaagaggcatggaaaagacctactcctttccgtgttcaaaaaagaagagcctgttgttctccacagcgcaagctcatctcaacttccaaagctaccacccctagtaccaatagagccaaagacacaagatatacagacctctggttcagaagcagcatcaccacatgaattacagcttatggagattgatcagactagttgctttgacaacctcagtgtatcatacaagagaaatttcaatgcaattgatgactccgacaaggaagaaacacatggtgctgaccaactttcagtctttgcaaaaagaccaaagatgaagaacaattagttaccttctacatagctactcttttgagacgttgcatctattgttcaatagaaatagatcggttgtggttctacttacgagaacaacaaaatttggcttctcgcaaccaaaactcttttgcagtatgtataaacatatgactgtttgcaagcaacgtagcagcagttctgctaagctcatcttttgtagtgacatatctttaaacatgctgcttttgatcaaaataacactcactatcaactctatataatcatatgatattgtctgatattagcattttatttctgtggtttttattgggcaaacttttgatcaaaaattacactcactatcagctctatataaacatataatattgcctgatgttagtattttatttatatggttcttattgggcaattctctttcagttaattttttctatgtagtttaaactattccagtttgttgtcacaattcaagtgacaggtccagaaaaaaatatctacctatttgtaatttattaattgacttttcctcattgtagaaaatatcagctaatctgctcaaattttgatttgcatatacataatggtgattgtgacacgagtcatgctatctaaagtcctttattcattgttttggacaaataactgtcacattttatttagcaagtaaatataaggtacaattcattatattaatgaacttataagcggttgagcatctcataccttagatatgatctttgcagaccaagtgaagtttgaaattcccttgatttatcatttagttaaatgaaaagttgtctaaaagggatgatagaattatgactttccattcgcatcgcagcactccaaaattctagacaatggtgctcgattttaatgtgcacctaacagttagattcttccttcttaacaatacatgcattattttagaaacttttctgtctataataaatttttgctgggcagttcaaactattccagtttgttgtgacaattcaagtgataggtccaaaaaacatatctcaagctatttgttatttgttaaatgaattttcatcacattgtacagaaaatctcacctaaaccattgcaatcttgaaaacacaacctcaattgctctttacacataaaacaatcagatttaccattcagtcaaatgaaaagatgggtaaaagggataacgaagttctaacctcccacttagatcctagcactccaaaattctatacattggtcatctatctgcctgataaccccatccaaatcatccgtaagactagagatggcaacaaataaactatcagagaaaagtgcctctggactatcagagaaaagtgcctctggactatcagagaaaagtgcctatggacatctatatccgtgacttatttccgatatccgaacccgttacccgctatggataaaaaaacagtatccacatccattactcgcaggtaacggatatccactacacatacataatttttaaatccgccaaattcaaatatttgtccagcaaaattgtccaccaaatttaaatatgataaaaacatacaaccatacaaaatttgtccaacaaatcaaatctaacacatgcattaaggcatacagcgagcaatataaaattagacctgttgggcgagctggcaatgtctaacgtagtgctcaacatggtcacgtggagaagaccgatcctcatgcgcagtgcttgacgtggagaggtcgcgagtagctggcggagaatggagatgcacgaggacagtcgatcgccagtggtgtgtgcgaactatgaagtcggcggcggtgcacgaccgcacagatctgagctacgaccagatcacctacagggaacggtagtggcaccgccgcactggtcgtatgcaagctggaacgcatggggagtgaaggaccgccgagcgcaggaccgtggtcgtggtggccgcctggccgggtggcaggtggtcgtcgaggcggtcgagggtagggatggatactatactggggttgtggactcgtggggagaattggggaatagggaggcaagacaggctagacggggttgccagattggggaggctagacagacagccgagatgggccgcaacgggaaattagactatctatggtctgtgaattggttctaaaccctagtgaccccaccttttaggttacttaaatggatattcaagtattcggatatggatactgatttttcataccagttttataaatataaatgttgctatccgtatccccgtacagactcgtacctgaaaccgtgtccaaaagattttttatccgcgggtacaaatataaatcacatccattgccaccggtacataggactaaccagtgtttctagctgtagacataactatatatcgaaaaagaaatccttttatacacttaacaaatagggggaaaactttgccttaattttttttgtaaaggttcaattaagtatacaagaaatcaatctggtttggcgaaaaaagaagcagataaagaaaaaccttaaatctacctcttgtcgaatctgcatgcgctccagcaacttgatcacatccagaccgaccttgtacgcgtacaccttgcactccacaagacctaccatggtggatgcgatggtgatctggttgcccagcttcgcgagttgccgcacaacgaacttgcccatgtaccacgtgtttccttgaagagcgtcgacaagcgagcaacgatggcagcctcaccgctagcgaagatgctgagggtggaattgcaaactcagtcaccggcacaccaccagggataactgagcagtgcgacaacagtggctatcccggtggcggcggtgagggtgggatctgatttttac

SEQ ID NO: 43641 - DNA, 9967 bp, Zea Mays
atgtggctcaagagtgatatcccttatatatcgtcatcaatatcatccattgaagatctttgcaacatgaaattgtgtcttaatagtgaaagactgaagaaagggcctttaactcttatgaatgacaagataatccttgatgttgtagagcgaggtacctgggctctacatatgctcaaatatgtaccctctcttctatttcaaaacacctctcttagagcagtaacttttttggagaagagagtaaaataagacgcggtgaaaggattagaaagaggaagatgtctaaaaactgtgaaccctccaacaaaaagatctgcatacaaagatttttgaactcccataatggaatggttgatttcccatccgagtatatccagcaactgaaagaatcatacactgacagatcataccttggtaaactagaatacaaatgtagacactgcgatgcaattttctggttcaatgaacgcaataaatccatgacgagacacaataatcaggaaccaatatattcgaactgctgcaaaaatggcaaaatcagaataccaaaatataaagaacccccaacttttcttaatgaattaatacaacgaaaaatggacacaagatgtaaacattttctacaaaaaataagacaatataatagcatgtttgcatttacttccatggggggaaatattgataaaaaaataaatgatggtgagggaccatatgtgtttcgtgtcaatggccaaatacatcatcgaataggatcattactacccttaccagacaattgccccaaatttgcagaactatatatttttgatacaaagaatgaaattgaaaatagaattagggctctaacaaatgaagaaccaggtgagcaagacatagatccagaaatagtgagagggctaaaaaaatgctcgacgaatataatccattagtaaaaatattccgccaagctcgtgattttctcgaagaacacaaaggcatagatgtaagcattagaatagtaggcgctgacgaaactgatagaattcaatatgagatgccacatcaggaagaattagctatgctgattgtaggtgatttatcacttgagaactacaaacgggacatcattgttagcacacaccaaaatagccttcaaaggatatctattttccatccagcatatatgcctctacaatacccgctcctatttccatatggcgaacgaggctttcaactaggtattaaataccatggacaacacattagtcaaaacagagatgactccaaaagagatagagtaactttgcatgaatttttgaaatatcatgtgcactatagacctaatcagcctaatccctggttatgttatggccgattatcaaaacaagtagtagtagacggtcgagcaatggaggatgaagacaggcttgattatattgttagaaatcaatcaaaattacgagctgaatatgtacaaggtatttttgatgcagtagaaaaaggaatatatgacgccagtcgaataggaaaaaaggtgttattaccatctagccatgttggatcaaaacggtatatgatacaaaattaccatgatggcattgctatttgttgtgcctatgggccaccagatctttttattacatgcacttgtaaccctaaatggcctaaaataacaacatgtttattaccaggtgagcatccaaatgatagacctgatattattgtccgtgtttttcatatgaaactacaacaacttttggatgacttacaatcaggaaaggtatttggccttgtactagcactactatattctatagaattccaaaaacgaggtctaccacatgtgcacacattaatttggttagacaagaaaggttgtgaaataactacagaaacaatagattcgtggatatctgctgaaataccagatcccgagttagatcctttgggatatgctcttgttgctgaacatatgatgcatggaccgtgcggagataaaaattggaattgtccatgcatgaaaaaaggcaaatgctccaaaatttaccccaaagattttgaagaaaacactacattctctgaaaatggctttacaatatatcgaaggaggaacaatgggattttcatcagaagagaacaacacaacttagacaacaaatgggttgtgccacataatttaaaactattaaaaagataccaagctcatataaatgttgaatatgtaaacaagagtacagtcttgaaatatttatgcaaatatgtaaacaaaggacctgatagagcaaaggttatattcaaaaaaatccaaaaaggagaagaatcacatgtaaacaaagaagcagaaactatagatgagatacaagaatatctagactgcagatatatatgcgagcaagatgctctttggagattattaggatacgagatacattaccattggccacctatagaaagactgccagttcatctaccattgatgaatataattaagatgaaatcaaatgataaattgatagacatagctaaagatctaaagtatagaaagacaatgctaactgaatggtttaatgcaaataagcaatatgaagatgcaaaagaattaacatactatgagtttcccaaacaatggcgttgggatggagaaaaaagacaatggaagaaaagacaacatggtttcaaatttggaaggctctattatgtaaaccctgctgaaggtgaaagattctatttaagaatgcttctaatgattgttaaaggtgctaaaaactatgaagatatacgaacgtataatggtgttttataccaaacctttaaagaggcttgcgcagctagaggattactagacgatgacaatgagtggtatcgcacatatcaagaagcaactaattgggcaacatcatttgaactacgcaatctatttgtcataatgctaacatattgccaaataaaagatgaaaaagaatttttcaacaccacatggcacacaatggtcgatgacattcacaaacatcttatccaaaaataccaccctatcaaatatacaccctctgaattagaactacaacattatttacttgaagaactagaagagctattctctaagaatgggcaggaaataaataactacaatttacccaggcgacaacacacaaaacatattgataacataaacagactaatccaagaagaaatgagttatgatataaattacttagaagaagaagcaaacaaattatatatacaactaaacaaagatcaaaagaatgcttttcataccatagttagttctgtgcttagcaacaatccaaacttctattttgtctcaggacatggaggaactgggaaaacatttctatggaatgccattgtatcataccttagagctataagaaagattgtccttacagttgcatcatcaggagttgcttctttgctacttccaaatggacgtacagctcactcaagatttcgtatacctatagatttggatcaattgtcaatgtgtgatataaaaagaggaacaaatcttgcaaaacttcttattgacacagatcttattatatgggatgaagctctaatgacaaataaacaatgctttgaagcatttgatagatcccttagagatatagtaggagaaacatatgaaaaagctcttgacattccttttggtggtaaagtggttgtgctaggtggcgatccaaaacaaatattacctgttatagaaaatggaacaaaagaacaaataataaatgcttgtatcattgcttcatacctttggaaccatgtcaacattatattcctttctgaaaacatgcgactacgacaaagtaatatatcaaatgaagagtatgaagacttgttatcattcaataattggatccttgccattggaaatggggtatataacaacaacgataatttttcctcggactcaacactcattgaaataccaaaagaatttttaattgaaacaacagaggataaaattcaagcattagttcaatttacttatcctgacctacaaacaaaatataatgatccagattatatcaaaaaaagagctatattagcaacaactaatgatgttgtagatgaaataaatgattatattatctctcttttgccaacagtagagagagaatactatagtgcagatagcatatctaaatgcacagatgctccaaatgatgccaatattttataccctattgagtatctaaacactttaaacgcaaacaatttcccttctcatagactaaaacttaaaattggcactcctgtaatgcttctacgaaatttaaatcaaagtttaggactatgcaatggaaccagaattattataactcaactaggagacacaattatagaaggaacaataataacaggtacacacgttggcgaaaaaatacatataccccgcattaatctgacaactaagggcaataaatggccttttacattatgtcaacgccaatttccaatcaaggtttgctactctatgactataaataaaagtcaaggacaaacactatcaaatgtagggttatatttaaagaaaaaggtgtttacacacggtcaactatatttagctgtgtcacgagttacagaaaagaaagggctcaaaatattgatagaaaatgacgacggttcatgtggaacaataacagaaaatattgtgtataaagaagtactacaatctattgagagccatggcaacataaattgatactatttttaacaaattgtatttgcagatggacattacaccactatcacaagttcgaccaggggtctaccactatatcatttgtgttcggatatcaagagtttgggaatttcatggcaaaaatgatgatgatccaatcaaacatttggatcttgtgattattgatcaacaggtatatgtattcttcttggtccttgtcaaattattactataatttgtaattactatctgtaggcttctttccatcctcctacaagaggatatgtatcgaaattctgtcaagcatagcaggtagtgcagtcctatatagcatctaggatcagctactttagtatagttatcaggggctgctacctacggtattcaggatctaatagccaggatgccacaccttccctagtgttgcacccttctggctatacattgtactcccttcttcatctaatgaagcattctattcagccccatttaacttgtctaacagccctaatatatgcataaaaatgtcttatcgtttagcacaacttaaatctataacaatttaactttataggggactgcgatgtacgctgaagttcctcaagaagctatatatacacttcaaccacgactacaggaaagcaagattttaatcatgagaaaaatttatgttgacaacgcaaagctatccttcaaacctgtgcatggaaagtatatgatcaggctacatccaaagactttgcttgaggaagtaaatgaggatccacaagattttccaaaatatacattccatctaacaccgttcccagaactaccccaacttgaaggaaacaatgagtatttcatcgatgtcattggatgcattacagctctttctgatgcaacaccatttcagactagcagtggaatagttcgcatgaaaaggctgatccaccttgtggatctaaggggaaataaaattgaggtatcactatggggacgaagagcagaggaattcccaggacaacaagtctttaaagccagtgaaatgaatcatgtaattgttatctttgttggaacatcagtcaaatcctatcgtggatcaccaccttttcttagtggcacagctgcatgccgctggtatataaatcttccagagatccatgaaatcaatactttctatgcaaggtaaattatattcctttctataacctccctttcatttttttaaaatataatgttttgtgatttccatttattgtaaattagattgacggcaatataaatatttggatagtacatgtacattttttggcctcctttattgcatttccttacaaagtatttaaaatacaaccctacaatgagttagtttgagatttatttatagaataaatatagcagcagcaacaaaagtgtttgatataatgccatggggaagttgagttgtacatactaaggtttaacacgaagatgaaatctaattatacaacattcaatcactgttaagcttgaatatagtacaatgtaaatttgcaattcatttaataaactgatcaagactaattacaatgctttcatatttatagtatcggtgaacaataccaatcaatccaaaagcttcatattcagacaatgaacgagatgcagaacaagattgagcaaaagacatttttagaaatgaaattagtcgacccatttgatgacatgagcaaacgtttcgaatgcaccatgattgtaacaagaattgctgacaataagccctggttctatcaaggatgcacaaaatgcaatacatcaacaagatatgaaggaaaaacatacatttgtaaacaaggccacatctcctctcagatggtccacaggtataaaatatctctatatgccactgatggcacctatgagctagaattcgtgctctttgatgagagagcgacatcacttattgggaaaaccgtagagaaattactgagacaaagcaacaaatctgaattgccggaagagattaaagcaattgtgggtgagaaattgactgttgtgaccaagttgtttccaggaaaaagtattaaaaagagaggacctaataaggacaacaaagatccaacatttgatattcttagtatcaaaaagaggcatggaaaagacctactcctttccgtgttcaaaaaagaagagcctgttgttctccacagcgcaagctcatctcaacttccaaagctaccacccctagtaccaatagagccaaagacacaagatatacagacctctggttcagaagcagcatcaccacatgaattacagcttatggagattgatcagactagttgctttgacaacctcagtgtatcatacaagagaaatttcaatgcaattgatgactccgacaaggaagaaacacatggtgctgaccaactttcagtctttgcaaaaagaccaaagatgaagaacaattagttaccttctacatagctactcttttgagacgttgcatctattgttcaatagaaatagatcggttgtggttctacttacgagaacaacaaaatttggcttctcgcaaccaaaactcttttgcagtatgtataaacatatgactgtttgcaagcaacgtagcagcagttctgctaagctcatcttttgtagtgacatatctttaaacatgctgcttttgatcaaaataacactcactatcaactctatataatcatatgatattgtctgatattagcattttatttctgtggtttttattgggcaaacttttgatcaaaaattacactcactatcagctctatataaacatataatattgcctgatgttagtattttatttatatggttcttattgggcaattctctttcagttaattttttctatgtagtttaaactattccagtttgttgtcacaattcaagtgacaggtccagaaaaaaatatctacctatttgtaatttattaattgacttttcctcattgtagaaaatatcagctaatctgctcaaattttgatttgcatatacataatggtgattgtgacacgagtcatgctatctaaagtcctttattcattgttttggacaaataactgtcacattttatttagcaagtaaatataaggtacaattcattatattaatgaacttataagcggttgagcatctcataccttagatatgatctttgcagaccaagtgaagtttgaaattcccttgatttatcatttagttaaatgaaaagttgtctaaaagggatgatagaattatgactttccattcgcatcgcagcactccaaaattctagacaatggtgctcgattttaatgtgcacctaacagttagattcttccttcttaacaatacatgcattattttagaaacttttctgtctataataaatttttgctgggcagttcaaactattccagtttgttgtgacaattcaagtgataggtccaaaaaacatatctcaagctatttgttatttgttaaatgaattttcatcacattgtacagaaaatctcacctaaaccattgcaatcttgaaaacacaacctcaattgctctttacacataaaacaatcagatttaccattcagtcaaatgaaaagatgggtaaaagggataacgaagttctaacctcccacttagatcctagcactccaaaattctatacattggtcatctatctgcctgataaccccatccaaatcatccgtaagactagagatggcaacaaataaactatcagagaaaagtgcctctggactatcagagaaaagtgcctctggactatcagagaaaagtgcctatggacatctatatccgtgacttatttccgatatccgaacccgttacccgctatggataaaaaaacagtatccacatccattactcgcaggtaacggatatccactacacatacataatttttaaatccgccaaattcaaatatttgtccagcaaaattgtccaccaaatttaaatatgataaaaacatacaaccatacaaaatttgtccaacaaatcaaatctaacacatgcattaaggcatacagcgagcaatataaaattagacctgttgggcgagctggcaatgtctaacgtagtgctcaacatggtcacgtggagaagaccgatcctcatgcgcagtgcttgacgtggagaggtcgcgagtagctggcggagaatggagatgcacgaggacagtcgatcgccagtggtgtgtgcgaactatgaagtcggcggcggtgcacgaccgcacagatctgagctacgaccagatcacctacagggaacggtagtggcaccgccgcactggtcgtatgcaagctggaacgcatggggagtgaaggaccgccgagcgcaggaccgtggtcgtggtggccgcctggccgggtggcaggtggtcgtcgaggcggtcgagggtagggatggatactatactggggttgtggactcgtggggagaattggggaatagggaggcaagacaggctagacggggttgccagattggggaggctagacagacagccgagatgggccgcaacgggaaattagactatctatggtctgtgaattggttctaaaccctagtgaccccaccttttaggttacttaaatggatattcaagtattcggatatggatactgatttttcataccagttttataaatataaatgttgctatccgtatccccgtacagactcgtacctgaaaccgtgtccaaaagattttttatccgcgggtacaaatataaatcacatccattgccaccggtacataggactaaccagtgtttctagctgtagacataactatatatcgaaaaagaaatccttttatacacttaacaaatagggggaaaactttgccttaattttttttgtaaaggttcaattaagtatacaagaaatcaatctggtttggcgaaaaaagaagcagataaagaaaaaccttaaatctacctcttgtcgaatctgcatgcgctccagcaacttgatcacatccagaccgaccttgtacgcgtacaccttgcactccacaagacctaccatggtggatgcgatggtgatctggttgcccagcttcgcgagttgccgcacaacgaacttgcccatgtaccacgtgtttccttgaagagcgtcgacaagcgagcaacgatggcagcctcaccgctagcgaagatgctgagggtggaattgcaaactcagtcaccggcacaccaccagggataactgagcagtgcgacaacagtggctatcccggtggcggcggtgagggtgggatctgatttttac

SEQ ID NO: 43642 - DNA, 5292 bp, Zea Mays
aaaaaagtaaaaaaaaaggaaggagaggaatagtcacaaccggatcatcaaagacaaaaagatggacattacaccactatcacaagttcgaccaggggtctaccactatatcatttgtgttcggatatcaagagtttgggaatttcatggcaaaaatgatgatgatccaatcaaacatttggatcttgtgattattgatcaacaggtatatgtattcttcttggtccttgtcaaattattactataatttgtaattactatctgtaggcttctttccatcctcctacaagaggatatgtatcgaaattctgtcaagcatagcaggtagtgcagtcctatatagcatctaggatcagctactttagtatagttatcaggggctgctacctacggtattcaggatctaatagccaggatgccacaccttccctagtgttgcacccttctggctatacattgtactcccttcttcatctaatgaagcattctattcagccccatttaacttgtctaacagccctaatatatgcataaaaatgtcttatcgtttagcacaacttaaatctataacaatttaactttataggggactgcgatgtacgctgaagttcctcaagaagctatatatacacttcaaccacgactacaggaaagcaagattttaatcatgagaaaaatttatgttgacaacgcaaagctatccttcaaacctgtgcatggaaagtatatgatcaggctacatccaaagactttgcttgaggaagtaaatgaggatccacaagattttccaaaatatacattccatctaacaccgttcccagaactaccccaacttgaaggaaacaatgagtatttcatcgatgtcattggatgcattacagctctttctgatgcaacaccatttcagactagcagtggaatagttcgcatgaaaaggctgatccaccttgtggatctaaggggaaataaaattgaggtatcactatggggacgaagagcagaggaattcccaggacaacaagtctttaaagccagtgaaatgaatcatgtaattgttatctttgttggaacatcagtcaaatcctatcgtggatcaccaccttttcttagtggcacagctgcatgccgctggtatataaatcttccagagatccatgaaatcaatactttctatgcaaggtaaattatattcctttctataacctccctttcatttttttaaaatataatgttttgtgatttccatttattgtaaattagattgacggcaatataaatatttggatagtacatgtacattttttggcctcctttattgcatttccttacaaagtatttaaaatacaaccctacaatgagttagtttgagatttatttatagaataaatatagcagcagcaacaaaagtgtttgatataatgccatggggaagttgagttgtacatactaaggtttaacacgaagatgaaatctaattatacaacattcaatcactgttaagcttgaatatagtacaatgtaaatttgcaattcatttaataaactgatcaagactaattacaatgctttcatatttatagtatcggtgaacaataccaatcaatccaaaagcttcatattcagacaatgaacgagatgcagaacaagattgagcaaaagacatttttagaaatgaaattagtcgacccatttgatgacatgagcaaacgtttcgaatgcaccatgattgtaacaagaattgctgacaataagccctggttctatcaaggatgcacaaaatgcaatacatcaacaagatatgaaggaaaaacatacatttgtaaacaaggccacatctcctctcagatggtccacaggtataaaatatctctatatgccactgatggcacctatgagctagaattcgtgctctttgatgagagagcgacatcacttattgggaaaaccgtagagaaattactgagacaaagcaacaaatctgaattgccggaagagattaaagcaattgtgggtgagaaattgactgttgtgaccaagttgtttccaggaaaaagtattaaaaagagaggacctaataaggacaacaaagatccaacatttgatattcttagtatcaaaaagaggcatggaaaagacctactcctttccgtgttcaaaaaagaagagcctgttgttctccacagcgcaagctcatctcaacttccaaagctaccacccctagtaccaatagagccaaagacacaagatatacagacctctggttcagaagcagcatcaccacatgaattacagcttatggagattgatcagactagttgctttgacaacctcagtgtatcatacaagagaaatttcaatgcaattgatgactccgacaaggaagaaacacatggtgctgaccaactttcagtctttgcaaaaagaccaaagatgaagaacaattagttaccttctacatagctactcttttgagacgttgcatctattgttcaatagaaatagatcggttgtggttctacttacgagaacaacaaaatttggcttctcgcaaccaaaactcttttgcagtatgtataaacatatgactgtttgcaagcaacgtagcagcagttctgctaagctcatcttttgtagtgacatatctttaaacatgctgcttttgatcaaaataacactcactatcaactctatataatcatatgatattgtctgatattagcattttatttctgtggtttttattgggcaaacttttgatcaaaaattacactcactatcagctctatataaacatataatattgcctgatgttagtattttatttatatggttcttattgggcaattctctttcagttaattttttctatgtagtttaaactattccagtttgttgtcacaattcaagtgacaggtccagaaaaaaatatctacctatttgtaatttattaattgacttttcctcattgtagaaaatatcagctaatctgctcaaattttgatttgcatatacataatggtgattgtgacacgagtcatgctatctaaagtcctttattcattgttttggacaaataactgtcacattttatttagcaagtaaatataaggtacaattcattatattaatgaacttataagcggttgagcatctcataccttagatatgatctttgcagaccaagtgaagtttgaaattcccttgatttatcatttagttaaatgaaaagttgtctaaaagggatgatagaattatgactttccattcgcatcgcagcactccaaaattctagacaatggtgctcgattttaatgtgcacctaacagttagattcttccttcttaacaatacatgcattattttagaaacttttctgtctataataaatttttgctgggcagttcaaactattccagtttgttgtgacaattcaagtgataggtccaaaaaacatatctcaagctatttgttatttgttaaatgaattttcatcacattgtacagaaaatctcacctaaaccattgcaatcttgaaaacacaacctcaattgctctttacacataaaacaatcagatttaccattcagtcaaatgaaaagatgggtaaaagggataacgaagttctaacctcccacttagatcctagcactccaaaattctatacattggtcatctatctgcctgataaccccatccaaatcatccgtaagactagagatggcaacaaataaactatcagagaaaagtgcctctggactatcagagaaaagtgcctctggactatcagagaaaagtgcctatggacatctatatccgtgacttatttccgatatccgaacccgttacccgctatggataaaaaaacagtatccacatccattactcgcaggtaacggatatccactacacatacataatttttaaatccgccaaattcaaatatttgtccagcaaaattgtccaccaaatttaaatatgataaaaacatacaaccatacaaaatttgtccaacaaatcaaatctaacacatgcattaaggcatacagcgagcaatataaaattagacctgttgggcgagctggcaatgtctaacgtagtgctcaacatggtcacgtggagaagaccgatcctcatgcgcagtgcttgacgtggagaggtcgcgagtagctggcggagaatggagatgcacgaggacagtcgatcgccagtggtgtgtgcgaactatgaagtcggcggcggtgcacgaccgcacagatctgagctacgaccagatcacctacagggaacggtagtggcaccgccgcactggtcgtatgcaagctggaacgcatggggagtgaaggaccgccgagcgcaggaccgtggtcgtggtggccgcctggccgggtggcaggtggtcgtcgaggcggtcgagggtagggatggatactatactggggttgtggactcgtggggagaattggggaatagggaggcaagacaggctagacggggttgccagattggggaggctagacagacagccgagatgggccgcaacgggaaattagactatctatggtctgtgaattggttctaaaccctagtgaccccaccttttaggttacttaaatggatattcaagtattcggatatggatactgatttttcataccagttttataaatataaatgttgctatccgtatccccgtacagactcgtacctgaaaccgtgtccaaaagattttttatccgcgggtacaaatataaatcacatccattgccaccggtacataggactaaccagtgtttctagctgtagacataactatatatcgaaaaagaaatccttttatacacttaacaaatagggggaaaactttgccttaattttttttgtaaaggttcaattaagtatacaagaaatcaatctggtttggcgaaaaaagaagcagataaagaaaaaccttaaatctacctcttgtcgaatctgcatgcgctccagcaacttgatcacatccagaccgaccttgtacgcgtacaccttgcactccacaagacctaccatggtggatgcgatggtgatctggttgcccagcttcgcgagttgccgcacaacgaacttgcccatgtaccacgtgtttccttgaagagcgtcgacaagcgagcaacgatggcagcctcaccgctagcgaagatgctgagggtggaattgcaaactcagtcaccggcacaccaccagggataactgagcagtgcgacaacagtggctatcccggtggcggcggtgagggtgggatctgatttttac

SEQ ID NO: 43643 - DNA, 4911 bp, Zea Mays
aaaaaagtaaaaaaaaaggaaggagaggaatagtcacaaccggatcatcaaagacaaaaagatggacattacaccactatcacaagttcgaccaggggtctaccactatatcatttgtgttcggatatcaagagtttgggaatttcatggcaaaaatgatgatgatccaatcaaacatttggatcttgtgattattgatcaacaggggactgcgatgtacgctgaagttcctcaagaagctatatatacacttcaaccacgactacaggaaagcaagattttaatcatgagaaaaatttatgttgacaacgcaaagctatccttcaaacctgtgcatggaaagtatatgatcaggctacatccaaagactttgcttgaggaagtaaatgaggatccacaagattttccaaaatatacattccatctaacaccgttcccagaactaccccaacttgaaggaaacaatgagtatttcatcgatgtcattggatgcattacagctctttctgatgcaacaccatttcagactagcagtggaatagttcgcatgaaaaggctgatccaccttgtggatctaaggggaaataaaattgaggtatcactatggggacgaagagcagaggaattcccaggacaacaagtctttaaagccagtgaaatgaatcatgtaattgttatctttgttggaacatcagtcaaatcctatcgtggatcaccaccttttcttagtggcacagctgcatgccgctggtatataaatcttccagagatccatgaaatcaatactttctatgcaaggtaaattatattcctttctataacctccctttcatttttttaaaatataatgttttgtgatttccatttattgtaaattagattgacggcaatataaatatttggatagtacatgtacattttttggcctcctttattgcatttccttacaaagtatttaaaatacaaccctacaatgagttagtttgagatttatttatagaataaatatagcagcagcaacaaaagtgtttgatataatgccatggggaagttgagttgtacatactaaggtttaacacgaagatgaaatctaattatacaacattcaatcactgttaagcttgaatatagtacaatgtaaatttgcaattcatttaataaactgatcaagactaattacaatgctttcatatttatagtatcggtgaacaataccaatcaatccaaaagcttcatattcagacaatgaacgagatgcagaacaagattgagcaaaagacatttttagaaatgaaattagtcgacccatttgatgacatgagcaaacgtttcgaatgcaccatgattgtaacaagaattgctgacaataagccctggttctatcaaggatgcacaaaatgcaatacatcaacaagatatgaaggaaaaacatacatttgtaaacaaggccacatctcctctcagatggtccacaggtataaaatatctctatatgccactgatggcacctatgagctagaattcgtgctctttgatgagagagcgacatcacttattgggaaaaccgtagagaaattactgagacaaagcaacaaatctgaattgccggaagagattaaagcaattgtgggtgagaaattgactgttgtgaccaagttgtttccaggaaaaagtattaaaaagagaggacctaataaggacaacaaagatccaacatttgatattcttagtatcaaaaagaggcatggaaaagacctactcctttccgtgttcaaaaaagaagagcctgttgttctccacagcgcaagctcatctcaacttccaaagctaccacccctagtaccaatagagccaaagacacaagatatacagacctctggttcagaagcagcatcaccacatgaattacagcttatggagattgatcagactagttgctttgacaacctcagtgtatcatacaagagaaatttcaatgcaattgatgactccgacaaggaagaaacacatggtgctgaccaactttcagtctttgcaaaaagaccaaagatgaagaacaattagttaccttctacatagctactcttttgagacgttgcatctattgttcaatagaaatagatcggttgtggttctacttacgagaacaacaaaatttggcttctcgcaaccaaaactcttttgcagtatgtataaacatatgactgtttgcaagcaacgtagcagcagttctgctaagctcatcttttgtagtgacatatctttaaacatgctgcttttgatcaaaataacactcactatcaactctatataatcatatgatattgtctgatattagcattttatttctgtggtttttattgggcaaacttttgatcaaaaattacactcactatcagctctatataaacatataatattgcctgatgttagtattttatttatatggttcttattgggcaattctctttcagttaattttttctatgtagtttaaactattccagtttgttgtcacaattcaagtgacaggtccagaaaaaaatatctacctatttgtaatttattaattgacttttcctcattgtagaaaatatcagctaatctgctcaaattttgatttgcatatacataatggtgattgtgacacgagtcatgctatctaaagtcctttattcattgttttggacaaataactgtcacattttatttagcaagtaaatataaggtacaattcattatattaatgaacttataagcggttgagcatctcataccttagatatgatctttgcagaccaagtgaagtttgaaattcccttgatttatcatttagttaaatgaaaagttgtctaaaagggatgatagaattatgactttccattcgcatcgcagcactccaaaattctagacaatggtgctcgattttaatgtgcacctaacagttagattcttccttcttaacaatacatgcattattttagaaacttttctgtctataataaatttttgctgggcagttcaaactattccagtttgttgtgacaattcaagtgataggtccaaaaaacatatctcaagctatttgttatttgttaaatgaattttcatcacattgtacagaaaatctcacctaaaccattgcaatcttgaaaacacaacctcaattgctctttacacataaaacaatcagatttaccattcagtcaaatgaaaagatgggtaaaagggataacgaagttctaacctcccacttagatcctagcactccaaaattctatacattggtcatctatctgcctgataaccccatccaaatcatccgtaagactagagatggcaacaaataaactatcagagaaaagtgcctctggactatcagagaaaagtgcctctggactatcagagaaaagtgcctatggacatctatatccgtgacttatttccgatatccgaacccgttacccgctatggataaaaaaacagtatccacatccattactcgcaggtaacggatatccactacacatacataatttttaaatccgccaaattcaaatatttgtccagcaaaattgtccaccaaatttaaatatgataaaaacatacaaccatacaaaatttgtccaacaaatcaaatctaacacatgcattaaggcatacagcgagcaatataaaattagacctgttgggcgagctggcaatgtctaacgtagtgctcaacatggtcacgtggagaagaccgatcctcatgcgcagtgcttgacgtggagaggtcgcgagtagctggcggagaatggagatgcacgaggacagtcgatcgccagtggtgtgtgcgaactatgaagtcggcggcggtgcacgaccgcacagatctgagctacgaccagatcacctacagggaacggtagtggcaccgccgcactggtcgtatgcaagctggaacgcatggggagtgaaggaccgccgagcgcaggaccgtggtcgtggtggccgcctggccgggtggcaggtggtcgtcgaggcggtcgagggtagggatggatactatactggggttgtggactcgtggggagaattggggaatagggaggcaagacaggctagacggggttgccagattggggaggctagacagacagccgagatgggccgcaacgggaaattagactatctatggtctgtgaattggttctaaaccctagtgaccccaccttttaggttacttaaatggatattcaagtattcggatatggatactgatttttcataccagttttataaatataaatgttgctatccgtatccccgtacagactcgtacctgaaaccgtgtccaaaagattttttatccgcgggtacaaatataaatcacatccattgccaccggtacataggactaaccagtgtttctagctgtagacataactatatatcgaaaaagaaatccttttatacacttaacaaatagggggaaaactttgccttaattttttttgtaaaggttcaattaagtatacaagaaatcaatctggtttggcgaaaaaagaagcagataaagaaaaaccttaaatctacctcttgtcgaatctgcatgcgctccagcaacttgatcacatccagaccgaccttgtacgcgtacaccttgcactccacaagacctaccatggtggatgcgatggtgatctggttgcccagcttcgcgagttgccgcacaacgaacttgcccatgtaccacgtgtttccttgaagagcgtcgacaagcgagcaacgatggcagcctcaccgctagcgaagatgctgagggtggaattgcaaactcagtcaccggcacaccaccagggataactgagcagtgcgacaacagtggctatcccggtggcggcggtgagggtgggatctgatttttac

SEQ ID NO: 43644 - DNA, 2277 bp, Zea Mays
atctttttgttcttgcataatggattagttcatggatggggtctcgattttgctctgtggaaatgtgtggtggtacacacttcacaacatagttacaacattgaagagaatcgtgactacaatgagtggaactgcactatcactataggtctatagcagtagagttatgaaggaactttatcattcactgactcataattgctgcatgttttgtataatgagtttttggttgatggagctcgggttgtgggtaatagatgcttccagtcagatcgtgttcacttggggaagggtacatggattttgtgctgaacacaaacttacaaaggcgcatgtcttaactcttaatacaagttttgcttaatgacttcatgtgagtaccaatgtttatagcaaactttggtgaatattcacctttcgcatatcaattcttagtttcaacagattaacatgtttcgtggacatggaatggagaagatctaccccctcctgatactaaagctattagggatatctgtgtactgcctggtgggcatgttgttattgcatcactaagcaggaagttcccttttcaggtctataaagaaagtgtgcaagttctattcttcactgtttttttgctacatttactgaaatatgacctttgttcatatgatctactggtaattcttcgacctttcaatttcacaaaacttgcaactatttttatgctctgcatcctaccaaaagtatacattgtctttctactacttagacctgggtatgagcaagtctgttgcatttctattctttctactacttatacatgcactgcattatgtatttaacttttaagaagatcaagcaggtgcttggtaatcaaagcacttgtttttgatagagacatgcattctttttccttaaattgattttaaagtaccgaataactaagggttgcttaagtaggagcaagtgaactagtaaaaatgtgaaattatttatgctgaactgctaactctgtattgtgatgacttgtaggctccttgatgccgtaagagaatgttactgaaatgccttctacttcttcattagatttctgtttgattattttccatacttttatttactaaccactttatgttttttaaatggatcaattaacatggtttttaaatggagcatctaacaacattcattagattctgtttgattatttaattactcactctaatgtatgaaaaggcaaggtagaagatgctaccaaagtacagacgcttctgttcagtgccactctgccagattgggtgaataaggaaaacagttgatcttgtcggtaatgagaaactgaaggccagtgcatctgttaagcaccttgctcttccttgtaacaaggcagcaagggcacaagttattccagacattatccgatgttatagctaggatgtactaccccatagatggttgtttttcagtatgctgtttgatttccaatgacttcgctaaacttttttgtgctttagtggaggtcgaaccatcatcttcactgagacgaaggattctgcatcagagctttctggtaatactggtgttgctgtcatgctttatgagcccagatataagcacagtgtcagcagactagaatgggagtctggggttaaatttgagcatatctctgtgccacaacccactgatgtagcacaatctgctggcagtgaagctgcagatgccattgcgagtgtgtcagacagtgttattcctatcttcaggcagcaagcagagcagttgctaagctcttccagtctatctgcagctgacttgcttgccaaagcacttgcgaaggcagttggttacacggacttaaagaaaagatcattgttatcttccttggaggattacagtacactacatcttcaaactggcagaccgatgtggtcacctggtttgacatcggcaacgtggtcatggtgactggcgggaggaacatcgggcgtgtaggagtgatcaagaactgggagaagcacaagggcatcttcgaggtcatcgacgtgctgcttggagttttttgcatgctatgtctagttttctcctatttgttgtacatgaaaacatagaatggaattcaaatttggtggtcgcaaaagtgtggagacttgaattcatataaagttaggcttaacattagtgcaaacagttgtattttagtttagatttagagtacacttatgtatatatgccttgtttgacaatgcttatttatgatatattgaatggtacttatttatattatatgaattataa

SEQ ID NO: 43645 - DNA, 689 bp, Zea Mays
gggaaatcctaccagtactcctacgcaaaggattctttattgattttcgggtacaggatgtctctatgggtagagcaaataagggggacggtgcactccccccttcgtgtgtgttttaatcaccatttctaaaatttattctattgtgatgatgacagtccatcgccgccaagaggtcacaggagaagaactcgcagcccaagtcctcgtggtagttatggaggccatggcaagcgccccacaactaatcttatggtgacgaatcttggtccggattgtaggagttatcaccttcgtgaaccattttggtttattttgtaggattccgactctcatcaagtgactcctcccctcacgatgactttgcggacagatgtctcaattatagtggtggagctacgaacaacaatccgatgtcctgatcgagagcgatggagctaatgtttgaacttgtgtgtttgaccttgtgaactaaaaatgtgaactatggatgtgaacttatatgaatttgtgaacttatgtatttggacttatgtgaatttgtgaacttatgtatttggacttgtgtgaatttgtgatatgaatattgttggggctatgcttcatagccgaagatcctaaaggaagagaacaccttcgacagatcctatcagaagcagcgccaaagttatcacctatagagcttcgac

SEQ ID NO: 43646 - DNA, 1867 bp, Zea Mays
cgcgcgcgcatctctctctcaccctgtctcatcctgcgcgcccacacgcgctcctctctcactagcgccaggccgagccgccgccgcgccaccgccgggagcccgcgccgccaccgcgccgtcaccgcgacctagacaaaaacataagaggaggacagtgtgcgtgttgaagctgtcggaggtaaggctcggcaacggcgacggctaccagcacggccagtgctggcgcgacgtctacgatgccatatgccaggcccggaggctcatctacatcatcgggtggtccatgttccacaccatccacctggtgcgcgacggccacgatgacatggcactcggcgacctgctcaggaggaagtcgcaggagggcgtgcaggtgctgctgctcgtgtgggacgatcccacgtcccgaagactccttggcatcaagatggaaggttacatgggcacaagggatgaggagacccggagatttttcaagcactcttcagtccagatactgctttgcccacgatctgcagggaagaggcacagctgggtgaagcaacaggaaacaggcactatccttactcatcaccagaagacagtgatcttggatgctgatgctgggaatcatagaaggaagatcgttgctttcatgggaggacttgatctatgtggaggccgatatgatacaccaaagcacactctatttcgaactcttcagacatttcacaaggaagactactacaacccaaattttgcggttgaagatgctcgcggcccaagagaaccatggcatgacttgcattccaagatcgacggtccagaagcatacgatgtcctgaaaaactttgaggagcgctggttaaaggcatcaaagcgcagtgccgctaagaaactgtcaaaattgtcgaggtcgcataatgattcgctgctgtggatcaacaagatacctgatattattgctattgacgacgaaatctattcaaatgacgatgatccagagagatgggacgtgcagattttccgatcaattgattcgaattctgtcaagggttttccaaaagatccacggaaggccactagtaagaatcttgtttgtgggaaaaatgtactgattgatatgagcgtgcatacagcatatgtgaatgccatccgaggtgctcaacatttcatctatattgagaaccagtacttccttggctcttcatttaactgggattcacatagagatgttgattttcgggtacaggatgtctctatgggtagagcaaataagggggacggtgcactccccccttcgtgtgtgttttaatcaccatttctaaaatttattctattgtgatgatgacagtccatcgccgccaagaggtcacaggagaagaactcgcagcccaagtcctcgtggtagttatggaggccatggcaagcgccccacaactaatcttatggtgacgaatcttggtccggattgtaggagttatcaccttcgtgaaccattttggtttattttgtaggattccgactctcatcaagtgactcctcccctcacgatgactttgcggacagatgtctcaattatagtggtggagctacgaacaacaatccgatgtcctgatcgagagcgatggagctaatgtttgaacttgtgtgtttgaccttgtgaactaaaaatgtgaactatggatgtgaacttatatgaatttgtgaacttatgtatttggacttatgtgaatttgtgaacttatgtatttggacttgtgtgaatttgtgatatgaatattgttggggctatgcttcatagccgaagatcctaaaggaagagaacaccttcgacagatcctatcagaagcagcgccaaagttatcacctatagagcttcgac

SEQ ID NO: 43647 - DNA, 1919 bp, Zea Mays
cgcgcgcgcatctctctctcaccctgtctcatcctgcgcgcccacacgcgctcctctctcactagcgccaggccgagccgccgccgcgccaccgccgggagcccgcgccgccaccgcgccgtcaccgcgacctagacaaaaacatgtacgcctcgtctgatttgcgtcagggccctcgtctgatttgctccgccgagaagaggaggacagtgtgcgtgttgaagctgtcggaggtaaggctcggcaacggcgacggctaccagcacggccagtgctggcgcgacgtctacgatgccatatgccaggcccggaggctcatctacatcatcgggtggtccatgttccacaccatccacctggtgcgcgacggccacgatgacatggcactcggcgacctgctcaggaggaagtcgcaggagggcgtgcaggtgctgctgctcgtgtgggacgatcccacgtcccgaagactccttggcatcaagatggaaggttacatgggcacaagggatgaggagacccggagatttttcaagcactcttcagtccagatactgctttgcccacgatctgcagggaagaggcacagctgggtgaagcaacaggaaacaggcactatccttactcatcaccagaagacagtgatcttggatgctgatgctgggaatcatagaaggaagatcgttgctttcatgggaggacttgatctatgtggaggccgatatgatacaccaaagcacactctatttcgaactcttcagacatttcacaaggaagactactacaacccaaattttgcggttgaagatgctcgcggcccaagagaaccatggcatgacttgcattccaagatcgacggtccagaagcatacgatgtcctgaaaaactttgaggagcgctggttaaaggcatcaaagcgcagtgccgctaagaaactgtcaaaattgtcgaggtcgcataatgattcgctgctgtggatcaacaagatacctgatattattgctattgacgacgaaatctattcaaatgacgatgatccagagagatgggacgtgcagattttccgatcaattgattcgaattctgtcaagggttttccaaaagatccacggaaggccactagtaagaatcttgtttgtgggaaaaatgtactgattgatatgagcgtgcatacagcatatgtgaatgccatccgaggtgctcaacatttcatctatattgagaaccagtacttccttggctcttcatttaactgggattcacatagagatgttgattttcgggtacaggatgtctctatgggtagagcaaataagggggacggtgcactccccccttcgtgtgtgttttaatcaccatttctaaaatttattctattgtgatgatgacagtccatcgccgccaagaggtcacaggagaagaactcgcagcccaagtcctcgtggtagttatggaggccatggcaagcgccccacaactaatcttatggtgacgaatcttggtccggattgtaggagttatcaccttcgtgaaccattttggtttattttgtaggattccgactctcatcaagtgactcctcccctcacgatgactttgcggacagatgtctcaattatagtggtggagctacgaacaacaatccgatgtcctgatcgagagcgatggagctaatgtttgaacttgtgtgtttgaccttgtgaactaaaaatgtgaactatggatgtgaacttatatgaatttgtgaacttatgtatttggacttatgtgaatttgtgaacttatgtatttggacttgtgtgaatttgtgatatgaatattgttggggctatgcttcatagccgaagatcctaaaggaagagaacaccttcgacagatcctatcagaagcagcgccaaagttatcacctatagagcttcgac

SEQ ID NO: 43648 - DNA, 1288 bp, Zea Mays
cgcgcgcgcatctctctctcaccctgtctcatcctgcgcgcccacacgcgctcctctctcactagcgccaggccgagccgccgccgcgccaccgccgggagcccgcgccgccaccgcgccgtcaccgcgacctagacaaaaacatgtacgcctcgtctgatttgcgtcagggccctcgtctgatttgctccgccgagaagaggaggacagtgtgcgtgttgaagctgtcggaggtaaggctcggcaacggcgacggctaccagcacggccagtgctggcgcgacgtctacgatgccatatgccaggcccggaggctcatctacatcatcgggtggtccatgttccacaccatccacctggtgcgcgacggccacgatgacatggcactcggcgacctgctcaggaggaagtcgcaggagggcgtgcaggtgctgctgctcgtgtgggacgatcccacgtcccgaagactccttggcatcaagatggaaggttacatgggcacaagggatgaggagacccggagatttttcaagcactcttcagtccagatactgctttgcccacgatctgcagggaagaggcacagctgggtgaagcaacaggaaacaggcactatccttactcatcaccagaagacagtgatcttggatgctgatgctgggaatcatagaaggaagatcgttgctttcatgggaggacttgatctatgtggaggccgatatgatacaccaaagcacactctatttcgaactcttcagacatttcacaaggaagactactacaacccaaattttgcggttgaagatgctcgcggcccaagagaaccatggcatgacttgcattccaagatcgacggtccagaagcatacgatgtcctgaaaaactttgaggagcgctggttaaaggcatcaaagcgcagtgccgctaagaaactgtcaaaattgtcgaggtcgcataatgattcgctgctgtggatcaacaagatacctgatattattgctattgacgacgaaatctattcaaatgacgatgatccagagagatgggacgtgcagattttccgatcaattgattcgaattctgtcaagggttttccaaaagatccacggaaggccactagtaagaatcttgtttgtgggaaaaatgtactgattgatatgagcgtgcatacagcatatgtgaatgccatccgaggtgctcaacatttcatctatattgagaaccagtacttccttggctcttcatttaactgggattcacatagagatgttggtgctaataatctgat

SEQ ID NO: 43649 - DNA, 225 bp, Zea Mays
cagattaccaaacacagaacagagcggctccgttcctaaaatcaggaatggaacggctccgttctacttggctcctcaaccaaacactaccatttcctacatgattactaacttgtgatgcttgtgtaggtctacacatactacaactttctcctcttactgcctacttggcagtgaactatctcgatcgtttcctctcactgtacaagctgccggaaggaaagg

SEQ ID NO: 43650 - DNA, 2478 bp, Zea Mays
gctcagtgatgtgctaggcggggtagcgtgcggatgactgcgggtgacggcactgaggcaggtgatggtggtgggtgagggcgttcacagattaagcagaggcgaagacgatccaagaagtggagccctatctctatcaaacgtggtgtaaggaaacctgtacgtaacccttccaaacgggcagctggacgtgtttttttatcggtggaccgcccgtccggtttcggtgttcccaaaagaagcgcataatttgatcatggataggttctcgtaacaaaatgttttttttctggattccgaaggaaaaaggacgaacagagaacccgtgttttaacttttttgtttacacacccgccgtacagtgatgtatgctgtagtaccaccatcctttcctctagagttcaaaaatctactgatctagaggcgggccggcctcccatgccgccaccgccgcctccaggaccacctcaccagcgccgtcgccgcggcgcttcttcgcagcttcgccctctggccgtgggatatggtccagtcacggcggcgcagcggcaactaccgttgcccgcgccgcgccgcactgccggcggcagcgctcctgctcttcctcctcgccgccgtcgcgctgctctacgtctccccgccgccgctcgcagaccaccccgtgctcgcttcctcccgccgccgccgctcggcccataccttgctgaacagctccggcgccggtagcatggaggagttcgagcgccgcgagatttcccgtgctccgacgaatggttcggccgtcagggatgacctttggggttcaaagcttgctagcaaattttatgggtgcagcaactcaagcagcaggtttcttgactcaaatattactacccaaccagagcgctatttgatgattgttacaagtggaggcctgaatcaacagagaacagggataatcgatgctgttgttgctgcacgcattttaaatgccacacttgttgttcccaaactagaccaagcatccttctggaaagattcaagcaatttttcggatattttttacgccgactggttcatctcatctctatcaaaggatgtaaagattgtgaaagagcttccacatataggaggtaaacttcgggctcctcacagaatgcgtgttccccgaaaatgtactgagcggtgttacttgaaccgtgttttgcctgcacttcttaagaaacatattcgaacctgatatgcttgccttttcggggtgctattacggtggtggagagaaagagaggagagaacttggtgctataaggaagaggtggaaaggcttgcatcctaacccagagaaaggaagaaggcaaggtagatgccctctaactcctgaagaggtgggtttgatgttgagagcgctgggctacagaaaggatgtccacatttatgtagcttctggagagatatatggaggtgcaaggactctggcacctcttaaagctctcttccctaatctccacacaaaagaaacaatatctagcaaagaggagctggctccattctctaaatattcttctcgcatggctgcacttgatttcattgtctgtgatgaaagtgatgcttttgtggctaacaacaacggcaacatggctaaaattttggctggacgaaggagatactttgggcacaagagaacgatccgaccaaatgccaaaaggctctatcccttatttttgaacagaggaaacatgtcgtgggatgcattctcctcaaaagtacacatggttcagaaaggatttatgggagagcccaaagagctgaggccagggaggggagagtttcatgagaacccttctacctgcatttgtgaaaggactgatggcaaagcagtagccagagccaaatctcaagatgatcaagtattgaatagtgttgctgaccaaggcaaaggcattggcgagccagctgttcccaatcatacggatgaagaggcgggcgaacctgatgatgacgaagatgtccctgctgacaaagaggttgttgacgctgaaatggttgacgatgtattggccggggatcctgagttagaacagattctttcagactagtatccatcatcagagatgtttgcacaaaccaatttttggccgagtgattgatgaattttgccacgtccctcgaaattgtacatactttttttttgcgatgtaaatgtacgtatacatccaatctactctagcttagctcgcagcctccttacacagtagctcttttgtaacgtttgtggattgttatagcttgtatcatgggttttgctttttgtgtagcaactctttgacgccctttttgtgtaagcatcttttggcatgtaggatgtgaggtgcttaagcacggataattaaggagagaacgttgttataccattttcataaatgagttacttgcctagatagatttagccatcttgttaacacaaatgaaaaaattggtcttaagtaatatttgagtttt

SEQ ID NO: 43651 - DNA, 1917 bp, Zea Mays
gctcagtgatgtgctaggcggggtagcgtgcggatgactgcgggtgacggcactgaggcaggtgatggtggtgggtgagggcgttcacagattaagcagaggcgaagacgatccaagaagtggagccctatctctatcaaacgtggtgtaaggaaacctctgaacagctccggcgccggtagcatggaggagttcgagcgccgcgagatttcccgtgctccgacgaatggttcggccgtcagggatgacctttggggttcaaagcttgctagcaaattttatgggtgcagcaactcaagcagcaggtttcttgactcaaatattactacccaaccagagcgctatttgatgattgttacaagtggaggcctgaatcaacagagaacagggataatcgatgctgttgttgctgcacgcattttaaatgccacacttgttgttcccaaactagaccaagcatccttctggaaagattcaagcaatttttcggatattttttacgccgactggttcatctcatctctatcaaaggatgtaaagattgtgaaagagcttccacatataggaggtaaacttcgggctcctcacagaatgcgtgttccccgaaaatgtactgagcggtgttacttgaaccgtgttttgcctgcacttcttaagaaacatgttattcggttgacgaagtttgattatagattagcaaataggttgcaaactgacttgcaaaagttgagatgtagagtcaactatcatgcattgagatttactgctccaatacaagagatgggtgaaaagctaatacaaagaatgagggagaggagcatgtattttattgctcttcatttgagattcgaacctgatatgcttgccttttcggggtgctattacggtggtggagagaaagagaggagagaacttggtgctataaggaagaggtggaaaggcttgcatcctaacccagagaaaggaagaaggcaaggtagatgccctctaactcctgaagaggtgggtttgatgttgagagcgctgggctacagaaaggatgtccacatttatgtagcttctggagagatatatggaggagatactttgggcacaagagaacgatccgaccaaatgccaaaaggctctatcccttatttttgaacagaggaaacatgtcgtgggatgcattctcctcaaaagtacacatggttcagaaaggatttatgggagagcccaaagagctgaggccagggaggggagagtttcatgagaacccttctacctgcatttgtgaaaggactgatggcaaagcagtagccagagccaaatctcaagatgatcaagtattgaatagtgttgctgaccaaggcaaaggcattggcgagccagctgttcccaatcatacggatgaagaggcgggcgaacctgatgatgacgaagatgtccctgctgacaaagaggttgttgacgctgaaatggttgacgatgtattggccggggatcctgagttagaacagattctttcagactagtatccatcatcagagatgtttgcacaaaccaatttttggccgagtgattgatgaattttgccacgtccctcgaaattgtacatactttttttttgcgatgtaaatgtacgtatacatccaatctactctagcttagctcgcagcctccttacacagtagctcttttgtaacgtttgtggattgttatagcttgtatcatgggttttgctttttgtgtagcaactctttgacgccctttttgtgtaagcatcttttggcatgtaggatgtgaggtgcttaagcacggataattaaggagagaacgttgttataccattttcataaatgagttacttgcctagatagatttagccatcttgttaacacaaatgaaaaaattggtcttaagtaatatttgagtttt

SEQ ID NO: 43652 - DNA, 2569 bp, Zea Mays
gctcagtgatgtgctaggcggggtagcgtgcggatgactgcgggtgacggcactgaggcaggtgatggtggtgggtgagggcgttcacagattaagcagaggcgaagacgatccaagaagtggagccctatctctatcaaacgtggtgtaaggaaacctgtacgtaacccttccaaacgggcagctggacgtgtttttttatcggtggaccgcccgtccggtttcggtgttcccaaaagaagcgcataatttgatcatggataggttctcgtaacaaaatgttttttttctggattccgaaggaaaaaggacgaacagagaacccgtgttttaacttttttgtttacacacccgccgtacagtgatgtatgctgtagtaccaccatcctttcctctagagttcaaaaatctactgatctagaggcgggccggcctcccatgccgccaccgccgcctccaggaccacctcaccagcgccgtcgccgcggcgcttcttcgcagcttcgccctctggccgtgggatatggtccagtcacggcggcgcagcggcaactaccgttgcccgcgccgcgccgcactgccggcggcagcgctcctgctcttcctcctcgccgccgtcgcgctgctctacgtctccccgccgccgctcgcagaccaccccgtgctcgcttcctcccgccgccgccgctcggcccataccttgctgaacagctccggcgccggtagcatggaggagttcgagcgccgcgagatttcccgtgctccgactcaaatattactacccaaccagagcgctatttgatgattgttacaagtggaggcctgaatcaacagagaacagggataatcgatgctgttgttgctgcacgcattttaaatgccacacttgttgttcccaaactagaccaagcatccttctggaaagattcaagcaatttttcggatattttttacgccgactggttcatctcatctctatcaaaggatgtaaagattgtgaaagagcttccacatataggaggtaaacttcgggctcctcacagaatgcgtgttccccgaaaatgtactgagcggtgttacttgaaccgtgttttgcctgcacttcttaagaaacatgttattcggttgacgaagtttgattatagattagcaaataggttgcaaactgacttgcaaaagttgagatgtagagtcaactatcatgcattgagatttactgctccaatacaagagatgggtgaaaagctaatacaaagaatgagggagaggagcatgtattttattgctcttcatttgagattcgaacctgatatgcttgccttttcggggtgctattacggtggtggagagaaagagaggagagaacttggtgctataaggaagaggtggaaaggcttgcatcctaacccagagaaaggaagaaggcaaggtagatgccctctaactcctgaagaggtgggtttgatgttgagagcgctgggctacagaaaggatgtccacatttatgtagcttctggagagatatatggaggtgcaaggactctggcacctcttaaagctctcttccctaatctccacacaaaagaaacaatatctagcaaagaggagctggctccattctctaaatattcttctcgcatggctgcacttgatttcattgtctgtgatgaaagtgatgcttttgtggctaacaacaacggcaacatggctaaaattttggctggacgaaggagatactttgggcacaagagaacgatccgaccaaatgccaaaaggctctatcccttatttttgaacagaggaaacatgtcgtgggatgcattctcctcaaaagtacacatggttcagaaaggatttatgggagagcccaaagagctgaggccagggaggggagagtttcatgagaacccttctacctgcatttgtgaaaggactgatggcaaagcagtagccagagccaaatctcaagatgatcaagtattgaatagtgttgctgaccaaggcaaaggcattggcgagccagctgttcccaatcatacggatgaagaggcgggcgaacctgatgatgacgaagatgtccctgctgacaaagaggttgttgacgctgaaatggttgacgatgtattggccggggatcctgagttagaacagattctttcagactagtatccatcatcagagatgtttgcacaaaccaatttttggccgagtgattgatgaattttgccacgtccctcgaaattgtacatactttttttttgcgatgtaaatgtacgtatacatccaatctactctagcttagctcgcagcctccttacacagtagctcttttgtaacgtttgtggattgttatagcttgtatcatgggttttgctttttgtgtagcaactctttgacgccctttttgtgtaagcatcttttggcatgtaggatgtgaggtgcttaagcacggataattaaggagagaacgttgttataccattttcataaatgagttacttgcctagatagatttagccatcttgttaacacaaatgaaaaaattggtcttaagtaatatttgagtttt

SEQ ID NO: 43653 - DNA, 2565 bp, Zea Mays
gctcagtgatgtgctaggcggggtagcgtgcggatgactgcgggtgacggcactgaggcaggtgatggtggtgggtgagggcgttcacagattaagcagaggcgaagacgatccaagaagtggagccctatctctatcaaacgtggtgtaaggaaacctgtacgtaacccttccaaacgggcagctggacgtgtttttttatcggtggaccgcccgtccggtttcggtgttcccaaaagaagcgcataatttgatcatggataggttctcgtaacaaaatgttttttttctggattccgaaggaaaaaggacgaacagagaacccgtgttttaacttttttgtttacacacccgccgtacagtgatgtatgctgtagtaccaccatcctttcctctagagttcaaaaatctactgatctagaggcgggccggcctcccatgccgccaccgccgcctccaggaccacctcaccagcgccgtcgccgcggcgcttcttcgcagcttcgccctctggccgtgggatatggtccagtcacggcggcgcagcggcaactaccgttgcccgcgccgcgccgcactgccggcggcagcgctcctgctcttcctcctcgccgccgtcgcgctgctctacgtctccccgccgccgctcgcagaccaccccgtgctcgcttcctcccgccgccgccgctcggcccataccttgctgaacagctccggcgccggtagcatggaggagttcgagcgccgcgagatttcccgtgctccgacgaatggttcggccgtcagggatgacctttggggttcaaagcttgctagcaaattttatgggtgcagcaactcaagcagcaggtttcttgactcaaatattactacccaaccagagcgctatttgatgattgttacaagtggaggcctgaatcaacagagaacagggataatcgatgctgttgttgctgcacgcattttaaatgccacacttgttgttcccaaactagaccaagcatccttctggaaagattcaagcaatttttcggatattttttacgccgactggttcatctcatctctatcaaaggatgtaaagattgtgaaagagcttccacatataggaggttattcggttgacgaagtttgattatagattagcaaataggttgcaaactgacttgcaaaagttgagatgtagagtcaactatcatgcattgagatttactgctccaatacaagagatgggtgaaaagctaatacaaagaatgagggagaggagcatgtattttattgctcttcatttgagattcgaacctgatatgcttgccttttcggggtgctattacggtggtggagagaaagagaggagagaacttggtgctataaggaagaggtggaaaggcttgcatcctaacccagagaaaggaagaaggcaaggtagatgccctctaactcctgaagaggtgggtttgatgttgagagcgctgggctacagaaaggatgtccacatttatgtagcttctggagagatatatggaggtgcaaggactctggcacctcttaaagctctcttccctaatctccacacaaaagaaacaatatctagcaaagaggagctggctccattctctaaatattcttctcgcatggctgcacttgatttcattgtctgtgatgaaagtgatgcttttgtggctaacaacaacggcaacatggctaaaattttggctggacgaaggagatactttgggcacaagagaacgatccgaccaaatgccaaaaggctctatcccttatttttgaacagaggaaacatgtcgtgggatgcattctcctcaaaagtacacatggttcagaaaggatttatgggagagcccaaagagctgaggccagggaggggagagtttcatgagaacccttctacctgcatttgtgaaaggactgatggcaaagcagtagccagagccaaatctcaagatgatcaagtattgaatagtgttgctgaccaaggcaaaggcattggcgagccagctgttcccaatcatacggatgaagaggcgggcgaacctgatgatgacgaagatgtccctgctgacaaagaggttgttgacgctgaaatggttgacgatgtattggccggggatcctgagttagaacagattctttcagactagtatccatcatcagagatgtttgcacaaaccaatttttggccgagtgattgatgaattttgccacgtccctcgaaattgtacatactttttttttgcgatgtaaatgtacgtatacatccaatctactctagcttagctcgcagcctccttacacagtagctcttttgtaacgtttgtggattgttatagcttgtatcatgggttttgctttttgtgtagcaactctttgacgccctttttgtgtaagcatcttttggcatgtaggatgtgaggtgcttaagcacggataattaaggagagaacgttgttataccattttcataaatgagttacttgcctagatagatttagccatcttgttaacacaaatgaaaaaattggtcttaagtaatatttgagtttt

SEQ ID NO: 43654 - DNA, 2197 bp, Zea Mays
cttccccaccccagatacggcgttgagcgtggatctataagattctccaagatgtggcgtgatgcttcgagatgttgtggtgctcagtgatgtgctaggcggggtagcgtgcggatgactgcgggtgacggcactgaggcaggtgatggtggtgggtgagggcgttcacagattaagcagaggcgaagacgatccaagaagtggagccctatctctatcaaacgtggtgtaaggaaacctctgaacagctccggcgccggtagcatggaggagttcgagcgccgcgagatttcccgtgctccgacgaatggttcggccgtcagggatgacctttggggttcaaagcttgctagcaaattttatgggtgcagcaactcaagcagcaggtttcttgactcaaatattactacccaaccagagcgctatttgatgattgttacaagtggaggcctgaatcaacagagaacagggataatcgatgctgttgttgctgcacgcattttaaatgccacacttgttgttcccaaactagaccaagcatccttctggaaagattcaagcaatttttcggatattttttacgccgactggttcatctcatctctatcaaaggatgtaaagattgtgaaagagcttccacatataggaggtaaacttcgggctcctcacagaatgcgtgttccccgaaaatgtactgagcggtgttacttgaaccgtgttttgcctgcacttcttaagaaacatgttattcggttgacgaagtttgattatagattagcaaataggttgcaaactgacttgcaaaagttgagatgtagagtcaactatcatgcattgagatttactgctccaatacaagagatgggtgaaaagctaatacaaagaatgagggagaggagcatgtattttattgctcttcatttgagattcgaacctgatatgcttgccttttcggggtgctattacggtggtggagagaaagagaggagagaacttggtgctataaggaagaggtggaaaggcttgcatcctaacccagagaaaggaagaaggcaaggtagatgccctctaactcctgaagaggtgggtttgatgttgagagcgctgggctacagaaaggatgtccacatttatgtagcttctggagagatatatggaggtgcaaggactctggcacctcttaaagctctcttccctaatctccacacaaaagaaacaatatctagcaaagaggagctggctccattctctaaatattcttctcgcatggctgcacttgatttcattgtctgtgatgaaagtgatgcttttgtggctaacaacaacggcaacatggctaaaattttggctggacgaaggagatactttgggcacaagagaacgatccgaccaaatgccaaaaggctctatcccttatttttgaacagaggaaacatgtcgtgggatgcattctcctcaaaagtacacatggttcagaaaggatttatgggagagcccaaagagctgaggccagggaggggagagtttcatgagaacccttctacctgcatttgtgaaaggactgatggcaaagcagtagccagagccaaatctcaagatgatcaagtattgaatagtgttgctgaccaaggcaaaggcattggcgagccagctgttcccaatcatacggatgaagaggcgggcgaacctgatgatgacgaagatgtccctgctgacaaagaggttgttgacgctgaaatggttgacgatgtattggccggggatcctgagttagaacagattctttcagactagtatccatcatcagagatgtttgcacaaaccaatttttggccgagtgattgatgaattttgccacgtccctcgaaattgtacatactttttttttgcgatgtaaatgtacgtatacatccaatctactctagcttagctcgcagcctccttacacagtagctcttttgtaacgtttgtggattgttatagcttgtatcatgggttttgctttttgtgtagcaactctttgacgccctttttgtgtaagcatcttttggcatgtaggatgtgaggtgcttaagcacggataattaaggagagaacgttgttataccattttcataaatgagttacttgcctagatagatttagccatcttgttaacacaaatgaaaaaattggtcttaagtaatatttgagtttt

SEQ ID NO: 43655 - DNA, 1342 bp, Zea Mays
tattaatctatttctatttttattacttgttcaaacaaagataaattacaaatgtaccttcgacttgaaggaaaggaatacaggcgtgaggcaaaagtgaatgccaagtcagcgtgaacagtacgagaatactgttcacctatttataggcacgggtcgcagcccatgtaagattacattaatgccctttacatttatcaataactctatagtaattcttcgaggtctagtttggcttttcatctttaagtcggtttccccttcccgccgtgataccgaagctcttcagcatatagcttcgtgatcatcttatccttcgtcgtgatcaccatcctagtcaagcttcgtcttgaccatgcttctgtatacccgcaacctgattcctgattccgaagatacctgctcgcatacttagaaaacattgttaaatcacgtttttgaggaccttcggaagccgaaggtccccaacatcgatatacgactaagcgcaatgattatgcttctctagattaaccgaatctaacgcaaacatcccaaaacagcaaagcatacacactaagtgcaacactcatgttcctgctttttgatcggatctaattccgaaatcaagcaagaataaattatttaacccacactatcatccttagtaaaatatatttcagaagtctaataaaacctggactcgctattattaaatgccaacgacttaaaatagttataggaacaatctaattaactctttaaaccatgcgtcttaattaacttaaattacacacttaacacaattggcctagacataacttatccactaattaattaaatgctaaacttacccatcgcattattaattatactcacaaagaattattttaattttatttcgcaccactcatatttattcaatctatctaacgattcggctaacaggaataacgaatcagctcaccatactaaaatccgacttgaacccacgaaatcgacgatgctactctcttttaaacattcagagcaacaattaacatttattcaagacatttaaccggtcactagttataatataacgatcactaaagcagagcatcgacttcatcaaaccatcattatttgatacgagcaatataggaaacgcctaccaccagaacattcaaaacacgaaacctatgatttgacgattaccaaatgatgctatttttaaggcaccgccacgagccatacacaggcaaccagcagggatctgacgatatcacacaacgtactataaccaaacgactaaaatccgcgagaaggacgacggtttcccggttcgcgcatatcaccaaatacgtgacgagcgaagtactag

SEQ ID NO: 43656 - DNA, 1570 bp, Zea Mays
cgaagctctcccggaggcctgcctcctgccatgcagcgcgaatattctgtggagatgaagcaaacattcctcaatatgcacaagtgaatgcaagcaattcttgatgaaaccaaagcacgtatcaacatcaccatgcagcaacatcaacatgcagcagaggtagaaattgggtggcagacggtaatgagccatggattgaacgtatacagcagttctcaaagacaaggaaaattaaccccatatgaagctgacagtagtgtcctatccttatacaactcaagtctgaaccatagtgggcataaatggttcacaagctaaagtacagcttcctgaaaaatcaggaaaaaaaaacagtggaaaatggaggccgcttcagatcagcatactctgcaaggtcgtgcaacttgcctagtcgatcttcacagacgaataaatcaatcttgtgaaccagaagcaagcgcaaaagccgatcgtaccggtgagcacacagaaggcaaacgaggcaagaagcatgtaaccaaagtatagtatccccgacaccaccttggtgatctgcagcttagtgaagaagtagaaccccgcatacaggaagaggtagattgcagatgatcctgatgtgagataggacctccaccaccacatgtagtcctcgctgcacagttggaaatagcacagcacgatcgtgatctccgcacaggtgatgatgaggataatgaacaccaggaagagaaagccaaagatgtagtagaactggtgaagccagattgatgtcaggatgaagaagagctcaatgaaaactgctccgaacggaagaataccaccaataagaatggtgaaggcagggttcatgtaccaagcctgctcggggacctgtctggggatcttgtttgtcttcaccggagcctcgatggcaggttgcttgaaacccagatagctcccaacaaatacaagaggaaccgagataccaaaccaaaggaggaccaaggcaaacattgtggtgaaaggaacagcaccagacgacttctccccccatataagagcattcagaatgaagaaaataccgaaagcaatcccgggaaacaggaaagcggtccttagggtgatgctcttccattctgatcctttgaacatcttatataggcgtgaagaagcatagccagcgaacaaccccatcaagacccaagtgagcagcatggcagtcatcagtcctccccggtttgatggcgaaagaaaacccaaaacagcaaaaatcatggttactagcagcataccaaagaactgaacaccagtcccaacacagacacagagtaaatcagagtttgcaggaggtcggaatacatctccatgaacaagcttccaccctgtctcctcttgggcttcttcttcagtttcaagctgattgtatctagagatatctctatacagggtgcggagcataatcatggccaccatcccagataagaagagtacgatcatgagagagttcacaatagaaaaccagtgaatttgatcatctgtcattaacaggtatgtgtcccagcgagaagcccacttgacatcactctcctcg

SEQ ID NO: 43657 - DNA, 1831 bp, Zea Mays
ttgccatcttcctgccgagctccctgcgcgtgctgccgcaagaccctctgcccggccaccgtcgagctccctggctcgcctggccgcgcccctgcttcccctccctagccgtgcgtcttccctgctcgccgagcttggtttgcgcccaacttccagcgccgcagtcgtcctctctgctctccacgcgcggagctctccccccagctcctccctgccgcgttcctgctcggcgcccatctccatgtgctctgtgcgcgcgcgcccatatcccctgctcctccggcgtcgcggcttcccagcttctgccagccggccgagctctctcgccaagaccccatccgaagctccctggcttgactctgcccagttcgtgccctgctcgcctctgcgtcgcgcgctctccctgctatctcccatggcgctctctccccgctcggcctccggctccggcactgtgccgagctccctggccatcgcgcccatgtcggccagagcttgctcggccgcggtctcgtcccggctccctgctgcgcttgtcctggcagccgcgcccagccgaagcccctttcctgcgagctcctccctgctagccgcaagctaccgagctcctatctcccgtgcgcgcgcccctggccgcatcgctggccctcggacccggccatcgtttgccgcttaaccactggcgaattaatttttagctcctctcgcgcagctctctagagctaagctcctcaccggctgtcgctcccaatcttcagctcaccgactgaccgtcgtgttccttgttttgcctcgtcggccgacctcgccgcgactaagttcgtccatcgtgctatgtgcctcggtctctggtcgagggacatcggtgccctctgccccttgctcacctccctggtcatgctcgccgggacattattctctagccaactgtcgctgtgagctctcctagacatctcacctccccgtcgcatcatgcgctattccccagcaacgtgtgtacgccaagtccgtgtagcccgttgccacaccttgtagctgcttccacgacgttatcgtggggacttctttacgtcacgagtgcttctgctcatcgcgttaaaccaatctgtttccattatgtcgtcatcaaaccgtgaagatgctcttgtgctggccacgcaccaccagctcgacaaaatgcatcccctgagtatctagtaaaaaacgagattatgtgcatcgctcgtcaggtgtgtgcggtcaaagacgtcaagcgaaaaccattgtcgttcttccgactatcgtgtcagatcggtcatggtacggtagttgatcacgtgatgcggaagacaagaactgagtcgaccccaagatgacgtaactagtggactactccgcatagtgaagctgatggacgaacctgaagatggataatctgaacgagtgccaacacaaaaaactagtcgccaagtgatcgacgtctaacaaacacaaacctagtgttatccaggcaagccccggtgcatttgccacctccttgctgttttaaaatcttttatcactttgtttgatgcattaggtgatatgagttgtgtgctaaacaattgatgcatttccttccatagaaaattgattacccttccttgatacccttttatgaaaaggatttttatgatgcttagccttgctttagaaaaacaaaatatttttttaaacaaaaagtgatgcttcacagtggatgggaatgttttcaaaaataaaagttgatggtggatccatcatggccgtgatgggttcaacatcggaaaagatgtacctctgtcaggtaccaaactttgggttgaaaataata

SEQ ID NO: 43658 - DNA, 630 bp, Zea Mays
gaggacttcacggcatacgcagacgtgtgcttcagcaacttcggcgacagggtgaagtactggagcaccatcaacgagcccaacgtcgagacgatcggtgggtacgatcaaggaatcctgccaccacggcgatgctcgtcccccttcagcttcggctgcgaggaaggcaactccaccatggagccatacgtagcggcgcaccaccgcttgcttgtgcacgcgtgtacagtgtccctgtacagagacaagtaccaagctgagcaaggaggacggattggactgaccttgcttggttggtggtacgatcctaggactcagactcccaacgatgtcgcggtagccgcaaggatggacgatttccacatcggatggttcatgcatcctatggtgttcggggactaccctccggtgatgaggaagaacgtcgggtccaggctgccgaccttcacggacgaggaggcggcgcgagtgagggggtctttcaacttcgtcagattcaaccacgctctaacgcgacctccaaggaactggattgaagctgcttgtcgcgttgtcgggcaaaggtttcggctgtggcggtgctggagggggatagggacgagagaagactccgaattcgagatggaatag

SEQ ID NO: 43659 - DNA, 142 bp, Zea Mays
atttaactttgtcttacttttcaataaaagtaagttattgtaattgcttccgcatttccgtatctctgatgaattgtaatgtctgcgtgacggataaaacgctcttgggaaggtaaggaattcagataccgaacatgtcaag

SEQ ID NO: 43660 - DNA, 264 bp, Zea Mays
tttaggtccaatactgttcatacattttctttttctttttctaacagagctaaagaaattctagaaaattgtagaaaatgctaaaaatgcaagaccaattttgttaggcttctaatttcctatagaacataataaaaatagtttcatgatttttagtccaaatagggaattatagagttttcaaaacagccaaaaaccatgcttctggatttttagagaataaataataaatccaaaattcactaaatttttagggtaatctct

SEQ ID NO: 43661 - DNA, 437 bp, Zea Mays
ctaagagtcatttttgctggtatctataggtaatagcatgcttctgtgccaaaaaaacacagaaggttacttagtggttatttagttatgattttctaaagtttaatgctaaaaagatacgtataactaacttgttatttgaaaaatgtcaaacaatagaactcataatttttctatgtttacaataacaaaactttagttatcccaaggtttggggtgttttctcctcagggttatttttctaggatttgtctaaattttccttgtttttctaaattaaaaggtatctcctttttttgtaccaaacaaaggtatattaattttttctagtgaactacactgaataagggagccaacaaaaatgtgggtgctccctggttcttattttaaactacattttatattttctctaactttaggctaaaaatgatttaaat

SEQ ID NO: 43662 - DNA, 2014 bp, Zea Mays
gggttataaccatattacgtggtgtactttatcttgtgctattatgcctcgtatcattttaaaattcttaattagttaccaagtagtttgattacatgatgcatgcatgctcgtcctaaacgacctcacatcaacttagagggaataggaaggaactgccatccccgcctgtagggcttactcaattagccacctagctacccctctatcatcctaaggctccacgtcctaggtctatcctgatcgtcctacgatctatccaacatttgtttctaccaagttttattttgaaaaaggatggtatttatagtttattgattcctttgtggtggtacgagctacgataccagctgtggcggaaccgcccaaattattccaacttaagtgcctaagtcctgccttagaggctagaccacacttaaatgggaataacacgtcagtccctcggatctagtccgacgaggccactaacaggatcaagtaccacgtactcactcgatggtgaggcacagagcaaatacaataaagcataaatccacacattaaagagtattaaatttattacatcatcatcggagttttggcaaaagtagtcatcattgttcggaatgcatcggaataaaactaacgataaataaacagagagatggggaagcctgtcccatcactcctcatgctcctcctcagccgaggtagggtcccactcgactgtccaacccggtggcaagatggacggccaagtcactccagcaaccatgtcctccagagaacctgtaaaattatgccacaagcaaggctgagtatactaatactcagctagacttacccagggtgaggagtctactcctctacctctagacatgcagttgtttggctgaggggtttggttgccaaaagcactagctaagtctataaatcaagttttagctttgtcaagttttagtgcgactctcttaagactaaatgtatacctatctaatcatacatggtatcaaacatttagcaatcaacaacttttgccaagtcatcacatttcctcttgttactcaatgtagcagcatggatcaagcattctcattagctgcgagaagcagacgattcaaatcgagtttttatccttgcaaggtaaacataaacacacgacatggtgaggcactccgtccccacacacatcaaccgtccccatcgattccctggcaacagatcagggctcaccaccttggcgtacaatgcctcactgaccccgactgccgtcgtgcagtgaccgcacatgtacccaccataaccggaatgggagaccatgtctcaggtcgcgtgaggggatatgtctgctggcaggttcaatcaggtactaggcttaccgatttaccatatttctcggcacgtgcttagtacattcaaacgcttgacacacggtaccacaccttaatccttattccaatttccgtctcgtagacaacgcatccccatggaccgttgtccactgaccaccatcattacgatatcaaaaatggatacaaccaattttctgacctcgcgcgagtgctagaaaaatcactcgacttctaccgagatccctaattaataaagtagctactcgacctagcatactagtatccatctcaaaaggtatcctgagttcatgcaactaaggtttcagtcaactactacacttaagtgcacagtacaagcctacaaacattaagtgtagtaaaatagcataataaatatgttatgcataaaaccggtgtttgccttccaaagctggggcaggcagatcctccggggcaggctctggtgctggatccggggctacctcctgagcaactccttgctccggcacgaggatgtattctccgtcagctaggttgcaatatatcgaatgcaatgagtaagaaacatgtatgctatgattatgcagaatttagaaatcatcatgctaagtgaagaaaactaagttagtgaataacttagggtttcctggttataagaggctcttagtggtttatgctta

SEQ ID NO: 43663 - DNA, 243 bp, Zea Mays
cataaatccacacattaaagagtattaaatttattatatcatcatcggagttttggcaaaagtagtcatcattgttcggaatgcagcggaataaaactaacgataaataaacagagagatggggaagcctgtcccatcactcctcatgctcctcctcagccgaggtagggtcccactcaactgtccaacccggtggcaagatggacggccaaatcactccagcaaccatgtcctccagagaac

SEQ ID NO: 43664 - DNA, 3938 bp, Zea Mays
gtccatctttgtagccgcgatttccgtgctcggcttctccctcccgctatctctatctctgcgcgcgagctcgcccctgctcgccctgctctcccatggccgcgcccaactccgtgcgctcgccggatcccctgctcggcttcgactgccgttccccgtgctcgcgttatctccctcctctctgccgcagctcgctgagtccctctgtttcctcccatggcgcggggttccctgcaggctgctcgcggcacccatctcctctgctcgaccgcgagctcgctccctggtcatgccgctccctcgcctaatcgtggtcgcgcgcgcgtgtgccttctcttggtggtgctcgaccccggcctcaggcagccacgtccgtggtcgtcgggcatgctagccgtcgtggctccccttgtgcgctgtccttgctgctcgctctgcgcgcacggtcctctgtcccctgcgcgtagccggtttctcggttcgccgtggagcctgcgcgctcggttctgtccagttcgtgtcctgctcggccgtccgcgcgacacgtcatccatggccgctgtccgtcgtcgagtccctacgtgcgcaccagctccctgtgtcgcgttccattcacctaaaccggagttcgccagtcgtccctgcttgtcgctgtgctgctgctttagtttgaatctcgcccaagtcgctgccatggttgtacggtgtttggcccgcgccgattcgcgttcgctcatatcgccatcatagtgttgtcgctggtgatagcttcgcgtgcgtgtcaaactcctgcgtcgagtctttttcctgctcgccggtgcgccctctcggctcgcttggccttaattctcatcgcgtcatcgattccgctggtcagcgtcgttcgtcatcgtgtcgcgtgtgtagctctatatacgtcaccctcctgtgtcgtcgtcgttccatgcgtcatcaagaaattccaagaatcgagtgaaaacgaagccagcagcgtgatattcaccaagtgcgcgaccaaaaagctcggacatcctgcgcgactcaagttcaattcgtcgaaattattcaatcgaagaaaagatcttcagcaattaattaccgaagaaaagaaggctcctggatgacatcaaccggaacccgtagtcgtgcttgcgactatcgcgtcgaattagtaagggtaagttggttcgtattcccattaactaggtctataaatagattaaatagaattattggtcacaataaatattattaatttagcatgcgtatattgtgatgattgatttagatagctcgctaaatcaactaattaagttacacagtttagagagttaataaaaagcttagaataaaaatagattttctagtgtaatatgtcaatttgattaatggatatagtcgatgtcctgctgtgatatccatggtgcttaatgcttggttttaagtgtttcatgctttttagcgtagattatctatattatactcgttatacatgtgctcatacatgtgcatcatgcatctcatgaggtacgataaataatcgcgtgatgcggaagaagaaccaagccgaccccaagcgtgggctaatctgcaagctgaagctgatgaatcaacctgaagacggttaaatcaagcaagtgctcggtcgaaggatactcgtcaagcggacgtcacctaacaacactaacctagtgttactcaggctctcggtttgcgtgaacctgatctggtcttaagaaccccggtggcgggttgacatatgcaagggttaagtgctacatatgtcatgtgattggagatcctcagctgagtataatcaattcggatcgccgtaccttcgcggttatgaagacttggtcacttccctgcaacctaagtcaggatgtgaacattatgaataaaaaggatgttgtattgatgagatgatgaaattagactagatgcaaacagtgtctattaatattcaatctggcgttaaaatattgaaagtaaggactcactttagtaagctatttctacaaaagtatctaagttgattcttgctaaagcctctccttgattcctatttatccagcataaccttgagagtcttttccttagtcgggtaagacttgctgagtaattccatactcagggttttattccttgttgtttttcaggttctaactttgtgctgttgttgatggtgttaagtgccggtgggctcggccttcttataagtctaagtaacccttctatacttcttattgaggatgatcccttgagctagcatatatttcaaacttatatttttgtaatcactccgataaactaatgtaaaatttttgtaacttgtaaaatttggtagtaagatttccgctgtaacaatattggtgtgtgtgatttgtgttacttaatcacgcggttctggttttaagtggtttatccgatgtccttggggcaatcggacggatcctgttaagttatctggtgcacatgcatagccgtccgaggtctttgagacaaggacaggtgcatgtgggcccaataacttgggaggttctgccacaacctggccaagctccgactgctgccgctgcgcctctgcgcgtgccgccgctgcctctgctcccagatcgacacagagcaaccgaaggtccgccacctcggcgctctgttgggagaggcgctcggtagcccaggcaagcgtggtcctcagggaccgcagcgaaccccagacaatggcctcgcggcggatgaacgacgacttggcggcgctcagatctgtcagatcctgaggaaaggaagcggggcatcacaaagaatgccttgaacacgtgaaaggtatgcttgaactcattacctggaggatcttgggaacgtccctgcgaaggacctccaaggtcgaccgaagcgaccccaccgttgcctcggcacactcacgaagcccgtcccaagactgctcctctcgctcttcgtcaagaacgaagaggggatccgaagccccactggtccagaaccggagcgactgacgccgcccgttgggactgcgccgcgcggggacgaggctgccgctccccaggatgggtcgcggttccgcgccccctcctccgaggcatcaggtagcgacgcctcggccatctcagcatcggcggcaacgggtgactccacggccagaacagcaacgacctcggcagaagccggtgccagcaccggcaacacgtctggtgagcccgaggccacagccgcgccagcagcctcccccagcgcgacggccgcctcgacagaggagtcagcctcgggagctttccccacggcaacttgtgccacctgagccccccgctttggggcgtcttgtgagggggtcagctggccggcgaggcccgacgcggcactagctgcagaagccgacgccgtcttgaggaccttccagggagccagaccgatcgaaccgtgcctccgcttgctaaggagaaagggaaaaccaggatcaggacatacgaaggaggagccagaacgaagatatcctaagatacttacccacttcgggccatgatcaatcgtgtctgtggggaggtctctcgaacctcgatccccgagggtaccaccgaggtccgccccgctgccggcttcagcaccatccatgccttgggcgcccgaggcacccgagggacggactgcctaggcgcagccacgacgacccgaggatcaccctcctgcgcagtcagcacgggcaacggttctcggggaacaagcagctcggcctgactccccggggtcactgttgggtctatgcttcgtcgccgaaggtcttcaagggagaagcagctttcggctgaggctgtttgcatgagacggccgaaggttcctttccatgaagcttcgacagtgtaaaccgacttaaagatagaataactttttagtccatgaaggtctgagtcaatgttgtaagcttttat

SEQ ID NO: 43665 - DNA, 549 bp, Zea Mays
gcccaaacctaatggcgctggcagcctctagccctctacacgccgtccctcctgctcctgctctccacacgccgccggagaaacgcggcggaacgcccagcacgggctgcacggcagggagggaaaatcctttttggaggatctgccattgaatcagaaggaaactttgtgcaaccaacaattgtggaaattacacgttctgcaccagttgtgaaagaagaactctttggtcctgtcctttatgttatgaaatttcagaccttgaaggaagcaattgaaatcaataactctgttcctcaaggattgagcagttttatatttacaaagtggccagatattatttttaagtggctcgggccccatggtagtgattgtggtatagtgaatgtgaacatacctactaatggtgctgaaattggtggagcatttggtggagaaaaagcagctggtggtggacgagaagcagggagtgattcctggaagcagtacatgaggagggcgacttggagggaggtcctagaggtagtaagtcacttgtttactccatga

SEQ ID NO: 43666 - DNA, 778 bp, Zea Mays
gcccaaacctaatggcgctggcagcctctagccctctacacgccgtccctcctgctcctgctctccacacgccgccggagaaacgcggcggaacgcccagcacgggctgcacggcaggtcggcactcggtagcacatccctcccggtggtccggccctccgccgtcccagcacgacagcacttccggcgaccaggtcctaggctcccagcgtccggcggtcccagcagtccagcacgacagtgacagcacttcgggaccacggctccgcgcgttctgctgtgcaggttctagcgttctgctgtccacggctccgcgcgtccaggaggatgtgtattccaagttttgggagggaaaatcctttttggaggatctgccattgaatcagaaggaaactttgtgcaaccaacaattgtggaaattacacgttctgcaccagttgtgaaagaagaactctttggtcctgtcctttatgttatgaaatttcagaccttgaaggaagcaattgaaatcaataactctgttcctcaaggattgagcagttttatatttacaaagtggccagatattatttttaagtggctcgggccccatggtagtgattgtggtatagtgaatgtgaacatacctactaatggtgctgaaattggtggagcatttggtggagaaaaagcagctggtggtggacgagaagcagggagtgattcctggaagcagtacatgaggagggcgacttggagggaggtcctagaggtagtaagtcacttgtttactccatga

SEQ ID NO: 43667 - DNA, 669 bp, Zea Mays
gcccaaacctaatggcgctggcagcctctagccctctacacgccgtccctcctgctcctgctctccacacgccgccggagaaacgcggcggaacgcccagcacgggctgcacggcaggtcacctccgcgcgttctcccaggctcactgcctctgccgtgcaggtgaagcatgtaagttatctatctttgttcgaaataattgcaagcataaatttgaaggatattaagaaattaatgggagggaaaatcctttttggaggatctgccattgaatcagaaggaaactttgtgcaaccaacaattgtggaaattacacgttctgcaccagttgtgaaagaagaactctttggtcctgtcctttatgttatgaaatttcagaccttgaaggaagcaattgaaatcaataactctgttcctcaaggattgagcagttttatatttacaaagtggccagatattatttttaagtggctcgggccccatggtagtgattgtggtatagtgaatgtgaacatacctactaatggtgctgaaattggtggagcatttggtggagaaaaagcagctggtggtggacgagaagcagggagtgattcctggaagcagtacatgaggagggcgacttggagggaggtcctagaggtagtaagtcacttgtttactccatga

SEQ ID NO: 43668 - DNA, 640 bp, Zea Mays
gcccaaacctaatggcgctggcagcctctagccctctacacgccgtccctcctgctcctgctctccacacgccgccggagaaacgcggcggaacgcccagcacgggctgcacggcaggtcctaggctcccagcgtccggcggtcccagcagtccagcacgacagtgacagcacttcgggaccacggctccgcgcgttctgctgtgcagggagggaaaatcctttttggaggatctgccattgaatcagaaggaaactttgtgcaaccaacaattgtggaaattacacgttctgcaccagttgtgaaagaagaactctttggtcctgtcctttatgttatgaaatttcagaccttgaaggaagcaattgaaatcaataactctgttcctcaaggattgagcagttttatatttacaaagtggccagatattatttttaagtggctcgggccccatggtagtgattgtggtatagtgaatgtgaacatacctactaatggtgctgaaattggtggagcatttggtggagaaaaagcagctggtggtggacgagaagcagggagtgattcctggaagcagtacatgaggagggcgacttggagggaggtcctagaggtagtaagtcacttgtttactccatga

SEQ ID NO: 43669 - DNA, 679 bp, Zea Mays
cccatctaagcccaaacctaatggcgctggcagcctctagccctctacacgccgtccctcctgctcctgctctccacacgccgccggagaaacgcggcggaacgcccagcacgggctgcacggcaggttctagcgttctgctgtccacggctccgcgcgtccaggaggatgtgtattccaagttttgggtttggtcaaaaccgtaaaaactacgaacatcagtaactaaattatttaggtgaagcatggagggaaaatcctttttggaggatctgccattgaatcagaaggaaactttgtgcaaccaacaattgtggaaattacacgttctgcaccagttgtgaaagaagaactctttggtcctgtcctttatgttatgaaatttcagaccttgaaggaagcaattgaaatcaataactctgttcctcaaggattgagcagttttatatttacaaagtggccagatattatttttaagtggctcgggccccatggtagtgattgtggtatagtgaatgtgaacatacctactaatggtgctgaaattggtggagcatttggtggagaaaaagcagctggtggtggacgagaagcagggagtgattcctggaagcagtacatgaggagggcgacttggagggaggtcctagaggtagtaagtcacttgtttactccatga

SEQ ID NO: 43670 - DNA, 1844 bp, Zea Mays
ttctaataactaaaggaaacccttgtcaaaatggtgtatctcggtccagccgtaccatctaatcattctctacccatctaatcattctctactgaacatatgtagcccatttaaaaacccattaaccaaacacatatgtttctttaaccctaacattttcacagcaccagcaatcccacacagccgccgccatttctttctctccatcttcctcgcagctacacaacggcatctggagcgatgcgggggtggggctcgctgcgccactctacgccaagatccgcttcgtggggcggcctcggcctccagcgccacgggcacgacgccaccggtgccgccgagatccgcgaatagtgggctcaagcggagcaggtatggctctctatcgggtggtgccatcggagcagaccaccaagctgtcgccgcgggccagcaggcgcgacatcgaggcgccgtcgcgggagcggtcctaggcccgtcgtacagtggcaccgatcgaggagatgaggtcaacacgcggctcaggctgtggccagggaaggctggtggccaaggtggccctgcagagcgatgatgacgagctcgtcgctatgaacgaccccctcatcagcaccaattacatggtatacccctggtctctctatcgcctgatctggtactttaacggactcacaggtccagaaatcgttggacaacatggctccgtcccatgacgatcgaactgatttctggatggctattttccgtcggacgaacgaactgatttctggatggagtggtgtcgcaatccaaacagactgttaatgtctgggtgcttcaggtcatgatcaaccatcaaatttactttgcaaatgaatgtttcaaaatggactggtcaagcctaccaagtccaatggtcctgcctagtttcgaatccttttgagtcctgcatgtttctcaaagcagttgtaattttattttgatcctaaagcttgtgtcaggtcaagatccatcacccttgacataaaaccttcagtagggcacttgagttaatggtgtgataatttggacccacatttttaacctttagggttggattactgattttgatccacatttttaaccttttgttaaaaaatggttcagtactcaaagcaggttgctccaaccatgtttttttgggccaccatttttgactggactgccattggagataggagtgtgcatccaaataggtattctgaatttgaaacacactatctttttattcatactgtgaaactgcaatatctgcatggaaaggagtagtacctcacctgtatgcgtagagcatttccatttccttctatctgttctgtatatatttgtgttgacaaacctgttggagctggtttctgaatccaagaccattaagctattttgttctatatatactgaaggagtttgttctttgtgcaacaaacactgtggttgaatctcgtgggcaattgcttcgctacgttattacacctttgtttcgttgatgcaacaatctagtatccatttcacttcacaagggttctttttatttaagtaaacagattttagtaacaaatacagaatgttcatcaactttttggttgtattatgttccctaacagcagtgttatggtgaaacagagttttctccacgttgggaaagctggaagagtcttttctactcagttttatgctaacagtggtgttcatgttacgtttgcagatatggacctcggtggttatgttttctccacgttgggaaagtcttattaactgtaggtatgatgcattagtatgtcatgtgtgaactgtgtcctttgctaagccgattcagtagttgaattccc

SEQ ID NO: 43671 - DNA, 1856 bp, Zea Mays
ctgccaaagcgtagttctgcgacatctaaaggagtgtggaaggcggctgccttgtccgcccggcctcttccgtctcggagcgagaaatcagcggcatcgccgcgcgcatccgaagcgcacacgacaatgcagggcggatccagcggcatcgtctatggtggcctcaagtaccaggcacggtgtatcgccgacgtgcgcgcggacgccagctcgaccaccttcctcgccgggaccctcagcctcaaggaggagaacgaggtgcacctgatccggctttcgccggcggagagtgagctggtgtgcgatggagtcttctaccaccccaacgagatctgggatctcaaatcatgtcccttcgatcacagggtcttctccacagtctacacatctggtgagggctttggtgcgtcagtttggaagatcccagagcttaatgggcaatcaaactcaccgcagcttgagcagctctttgagcttagtgggcatacgggcaagattagacgtgtgatctggtggccacttggaaagcatgataaactaattagcattgatgaccgaaatatttttctttggaacgtagacatgtcaaataaatcagctaaggtgatctcacagggatcagctgacatgcttccaaatttgagtggtggggcttgggatccacacaatcataattcaattgcttcaatatctgattcatcacttcatttgtgggatctacgttctatggaaaaatcatctgcaattgaacatgcacatatacgggatgtggattataaccccaagaagcaacacattatttaatcggttatacgcttcaggcaacaacagaagatgactttggaatttgcttgtgggatctcagaatgcttaagcttcctctgaaagacctccctgggcactcacattggacatgggctattcagcacaatcctgagtatgatgagctgcttctgagtgctggaacagattcaactgtaaatttatggttggctaaagttagcaacaatgattctgaacctaatagcccttctggttcacccaatagacaagaagaaccattacttaactcatatactgactatgaagacagcatctatggtattgcatggagctcccatgatccatcattattcgcttctttgtcctatgatggaagggttgtcttggaatcagtcaagccctacttgcagagaaaatgaatcttgctggtctaacttttggattgtaaggtgtaggatatgattcctcatttcctttatcttgtccttattgccaaagttatctcatgtcctaataaactgttctctgtccctgcagcctacaggcttgcttgttgtttatatttgatgcgttatagttttgccttatattctgtaccctcttgacaaccatttatgtgatgatgtgttttactgttgtagcaatggcagaaaaaacataataaggatgttgcagaaatcatcctgcttgacatcaggtcttcaaccctcttgattgaagccagcaatggctccaaaacactcagatctagcttcagttgagatattacagcacagttgagattgtcagcagtttcctttcctgtatcttcaaattttgtccactaggatttcatgttcagttgctagaaatttggctgtgaagatctgatctgtatgttaataactgttgcccatctgtctgaaatagttttctatacttgattcttaggatgttgtatatttgaaaagtgttcacaaaaagatattgcggtatatgatgaggtggagttggactgaatttgtaaaaccattcagaatttcaaattcccaggattagcttgttttatgaaatattctgttgcgcattgaaaa

SEQ ID NO: 43672 - DNA, 1722 bp, Zea Mays
ctgccaaagcgtagttctgcgacatctaaaggagtgtggaaggcggctgccttgtccgcccggcctcttccgtctcggagcgagaaatcagcggcatcgccgcgcgcatccgaagcgcacacgacaatgcagggcggatccagcggcatcgtctatggtggcctcaagtaccaggcacggtgtatcgccgacgtgcgcgcggacgccagctcgaccaccttcctcgccgggaccctcagcctcaaggaggagaacgagtaggtgcacctgatccggctttcgccggcggagagtgagctggtgtgcgatggagtcttctaccaccccaacgagatctgggatctcaaatcatgtcccttcgatcacagggtcttctccacagtctacacatctggtgagggctttggtgcgtcagtttggaagatcccagagcttaatgggcaatcaaactcaccgcagcttgagcagctctttgagcttagtgggcatacgggcaagattagacgtgtgatctggtggccacttggaaagcatgataaactaattagcattgatgaccgaaatatttttctttggaacgtagacatgtcaaataaatcagctaaggtgatctcacagggatcagctgacatgcttccaaatttgagtggtggggcttgggatccacacaatcataattcaattgcttcaatatctgattcatcacttcatttgtgggatctacgttctatggaaaaatcatctgcaattgaacatgcacatatacgggatgtggattataaccccaagaagcaacacattattgcaacaacagaagatgactttggaatttgcttgtgggatctcagaatgcttaagcttcctctgaaagacctccctgggcactcacattgcccttctggttcacccaatagacaagaagaaccattacttaactcatatactgactatgaagacagcatctatggtattgcatggagctcccatgatccatcattattcgcttctttgtcctatgatggaagggttgtcttggaatcagtcaagccctacttgcagagaaaatgaatcttgctggtctaacttttggattgtaaggtgtaggatatgattcctcatttcctttatcttgtccttattgccaaagttatctcatgtcctaataaactgttctctgtccctgcagcctacaggcttgcttgttgtttatatttgatgcgttatagttttgccttatattctgtaccctcttgacaaccatttatgtgatgatgtgttttactgttgtagcaatggcagaaaaaacataataaggatgttgcagaaatcatcctgcttgacatcaggtcttcaaccctcttgattgaagccagcaatggctccaaaacactcagatctagcttcagttgagatattacagcacagttgagattgtcagcagtttcctttcctgtatcttcaaattttgtccactaggatttcatgttcagttgctagaaatttggctgtgaagatctgatctgtatgttaataactgttgcccatctgtctgaaatagttttctatacttgattcttaggatgttgtatatttgaaaagtgttcacaaaaagatattgcggtatatgatgaggtggagttggactgaatttgtaaaaccattcagaatttcaaattcccaggattagcttgttttatgaaatattctgttgcgcattgaaaa

SEQ ID NO: 43673 - DNA, 1667 bp, Zea Mays
ctgccaaagcgtagttctgcgacatctaaaggagtgtggaaggcggctgccttgtccgcccggcctcttccgtctcggagcgagaaatcagcggcatcgccgcgcgcatccgaagcgcacacgacaatgcagggcggatccagcggcatcgtctatggtggcctcaagtaccaggcacggtgtatcgccgacgtgcgcgcggacgccagctcgaccaccttcctcgccgggaccctcagcctcaaggaggagaacgagtaggtgcacctgatccggctttcgccggcggagagtgagctggtgtgcgatggagtcttctaccaccccaacgagatctgggatctcaaatcatgtcccttcgatcacagggtcttctccacagtctacacatctggtgagggctttggtgcgtcagtttggaagatcccagagcttaatgggcaatcaaactcaccgcagcttgagcagctctttgagcttagtgggcatacgggcaagattagacgtgtgatctggtggccacttggaaagcatgataaactaattagcattgatgaccgaaatatttttctttggaacgtagacatgtcaaataaatcagctaaggtgatctcacagggatcagctgacatgcttccaaatttgagtggtggggcttgggatccacacaatcataattcaattgcttcaatatctgattcatcacttcatttgtgggatctacgttctatggaaaaatcatctgcaattgaacatgcacatatacgggatgtggattataaccccaagaagcaacacattatttaatcggttatacgcttcaggcaacaacagaagatgactttggaatttgcttgtgggatctcagaatgcttaagcttcctctgaaagacctccctgggcactcacattggacatgggctattcagcacaatcctgagtatgatgagctgcttctgagtgctggaacagattcaactgtaaatttatggttggctaaagttagcaacaatgattctgaacctaatagcccttctggttcacccaatagacaagaagaaccattacttaactcatatactgactatgaagacagcatctatggtattgcatggagctcccatgatccatcattattcgcttctttgtcctatgatggaagggttgtcttggaatcagtcaagccctacttgcagagaaaatgaatcttgctggtctaacttttggattgtaagcaatggcagaaaaaacataataaggatgttgcagaaatcatcctgcttgacatcaggtcttcaaccctcttgattgaagccagcaatggctccaaaacactcagatctagcttcagttgagatattacagcacagttgagattgtcagcagtttcctttcctgtatcttcaaattttgtccactaggatttcatgttcagttgctagaaatttggctgtgaagatctgatctgtatgttaataactgttgcccatctgtctgaaatagttttctatacttgattcttaggatgttgtatatttgaaaagtgttcacaaaaagatattgcggtatatgatgaggtggagttggactgaatttgtaaaaccattcagaatttcaaattcccaggattagcttgttttatgaaatattctgttgcgcattgaaaa

SEQ ID NO: 43674 - DNA, 2261 bp, Zea Mays
ctgccaaagcgtagttctgcgacatctaaaggagtgtggaaggcggctgccttgtccgcccggcctcttccgtctcggagcgagaaatcagcggcatcgccgcgcgcatccgaagcgcacacgacaatgcagggcggatccagcggcatcgtctatggtggcctcaagtaccaggcacggtgtatcgccgacgtgcgcgcggacgccagctcgaccaccttcctcgccgggaccctcagcctcaaggaggagaacgagtaggtgcacctgatccggctttcgccggcggagagtgagctggtgtgcgatggagtcttctaccaccccaacgagatctgggatctcaaatcatgtcccttcgatcacagggtcttctccacagtctacacatctggtgagggctttggtgcgtcagtttggaagatcccagagcttaatgggcaatcaaactcaccgcagcttgagcagctctttgagcttagtgggcatacgggcaagattagacggtggactcctgtttctgttggtttttggctgctctagagatatttgatctacttactgtactaaattctcatatgttttgaatttgagactttgtgtccaacatttgttggatgaaatgcaactctgtggttaatgttccttcctgacccacatggtgtttatttgtagttacttgatgattgtggccgcacttgtgtgactgcattacttgttcttgcatcacttgttcactagtcactacacatgaacattgagataagagtatagttactaagaaagatgcaataaatgttctgtcctgtcttccatgctgcacctgtttcacattacaccagcacgttttaaacaatatacaaggattatgtcccacagtgctcatgaaggacataatggatgagaatattttatttcaacttctgctgttatgtctttctataatcttttaaactagtctcacttgctctatattcttaaaagctgctagcgatgtgtatcatctttattggttcttgacacctctaagctgctcattttgtagtgtgatctggtggccacttggaaagcatgataaactaattagcattgatgaccgaaatatttttctttggaacgtagacatgtcaaataaatcagctaaggtgatctcacagggatcagctgacatgcttccaaatttgagtggtggggcttgggatccacacaatcataattcaattgcttcaatatctgattcatcacttcatttgtgggatctacgttctatggaaaaatcatctgcaattgaacatgcacatatacgggatgtggattataaccccaagaagcaacacattattgcaacaacagaagatgactttggaatttgcttgtgggatctcagaatgcttaagcttcctctgaaagacctccctgggcactcacattgcccttctggttcacccaatagacaagaagaaccattacttaactcatatactgactatgaagacagcatctatggtattgcatggagctcccatgatccatcattattcgcttctttgtcctatgatggaagggttgtcttggaatcagtcaagccctacttgcagagaaaatgaatcttgctggtctaacttttggattgtaaggtgtaggatatgattcctcatttcctttatcttgtccttattgccaaagttatctcatgtcctaataaactgttctctgtccctgcagcctacaggcttgcttgttgtttatatttgatgcgttatagttttgccttatattctgtaccctcttgacaaccatttatgtgatgatgtgttttactgttgtagcaatggcagaaaaaacataataaggatgttgcagaaatcatcctgcttgacatcaggtcttcaaccctcttgattgaagccagcaatggctccaaaacactcagatctagcttcagttgagatattacagcacagttgagattgtcagcagtttcctttcctgtatcttcaaattttgtccactaggatttcatgttcagttgctagaaatttggctgtgaagatctgatctgtatgttaataactgttgcccatctgtctgaaatagttttctatacttgattcttaggatgttgtatatttgaaaagtgttcacaaaaagatattgcggtatatgatgaggtggagttggactgaatttgtaaaaccattcagaatttcaaattcccaggattagcttgttttatgaaatattctgttgcgcattgaaaa

SEQ ID NO: 43675 - DNA, 2304 bp, Zea Mays
ctgccaaagcgtagttctgcgacatctaaaggagtgtggaaggcggctgccttgtccgcccggcctcttccgtctcggagcgagaaatcagcggcatcgccgcgcgcatccgaagcgcacacgacaatgcagggcggatccagcggcatcgtctatggtggcctcaagtaccaggcacggtgtatcgccgacgtgcgcgcggacgccagctcgaccaccttcctcgccgggaccctcagcctcaaggaggagaacgaggtgcacctgatccggctttcgccggcggagagtgagctggtgtgcgatggagtcttctaccaccccaacgagatctgggatctcaaatcatgtcccttcgatcacagggtcttctccacagtctacacatctggtgagggctttggtgcgtcagtttggaagatcccagagcttaatgggcaatcaaactcaccgcagcttgagcagctctttgagcttagtgggcatacgggcaagattagacggtggactcctgtttctgttggtttttggctgctctagagatatttgatctacttactgtactaaattctcatatgttttgaatttgagactttgtgtccaacatttgttggatgaaatgcaactctgtggttaatgttccttcctgacccacatggtgtttatttgtagttacttgatgattgtggccgcacttgtgtgactgcattacttgttcttgcatcacttgttcactagtcactacacatgaacattgagataagagtatagttactaagaaagatgcaataaatgttctgtcctgtcttccatgctgcacctgtttcacattacaccagcacgttttaaacaatatacaaggattatgtcccacagtgctcatgaaggacataatggatgagaatattttatttcaacttctgctgttatgtctttctataatcttttaaactagtctcacttgctctatattcttaaaagctgctagcgatgtgtatcatctttattggttcttgacacctctaagctgctcattttgtagtgtgatctggtggccacttggaaagcatgataaactaattagcattgatgaccgaaatatttttctttggaacgtagacatgtcaaataaatcagctaaggtgatctcacagggatcagctgacatgcttccaaatttgagtggtggggcttgggatccacacaatcataattcaattgcttcaatatctgattcatcacttcatttgtgggatctacgttctatggaaaaatcatctgcaattgaacatgcacatatacgggatgtggattataaccccaagaagcaacacattattgcaacaacagaagatgactttggaatttgcttgtgggatctcagaatgcttaagcttcctctgaaagacctccctgggcactcacattggacatgggctattcagcacaatcctgagtatgatgagctgcttctgcccttctggttcacccaatagacaagaagaaccattacttaactcatatactgactatgaagacagcatctatggtattgcatggagctcccatgatccatcattattcgcttctttgtcctatgatggaagggttgtcttggaatcagtcaagccctacttgcagagaaaatgaatcttgctggtctaacttttggattgtaaggtgtaggatatgattcctcatttcctttatcttgtccttattgccaaagttatctcatgtcctaataaactgttctctgtccctgcagcctacaggcttgcttgttgtttatatttgatgcgttatagttttgccttatattctgtaccctcttgacaaccatttatgtgatgatgtgttttactgttgtagcaatggcagaaaaaacataataaggatgttgcagaaatcatcctgcttgacatcaggtcttcaaccctcttgattgaagccagcaatggctccaaaacactcagatctagcttcagttgagatattacagcacagttgagattgtcagcagtttcctttcctgtatcttcaaattttgtccactaggatttcatgttcagttgctagaaatttggctgtgaagatctgatctgtatgttaataactgttgcccatctgtctgaaatagttttctatacttgattcttaggatgttgtatatttgaaaagtgttcacaaaaagatattgcggtatatgatgaggtggagttggactgaatttgtaaaaccattcagaatttcaaattcccaggattagcttgttttatgaaatattctgttgcgcattgaaaa

SEQ ID NO: 43676 - DNA, 2375 bp, Zea Mays
ctgccaaagcgtagttctgcgacatctaaaggagtgtggaaggcggctgccttgtccgcccggcctcttccgtctcggagcgagaaatcagcggcatcgccgcgcgcatccgaagcgcacacgacaatgcagggcggatccagcggcatcgtctatggtggcctcaagtaccaggcacggtgtatcgccgacgtgcgcgcggacgccagctcgaccaccttcctcgccgggaccctcagcctcaaggaggagaacgaggtgcacctgatccggctttcgccggcggagagtgagctggtgtgcgatggagtcttctaccaccccaacgagatctgggatctcaaatcatgtcccttcgatcacagggtcttctccacagtctacacatctggtgagggctttggtgcgtcagtttggaagatcccagagcttaatgggcaatcaaactcaccgcagcttgagcagctctttgagcttagtgggcatacgggcaagattagacggtggactcctgtttctgttggtttttggctgctctagagatatttgatctacttactgtactaaattctcatatgttttgaatttgagactttgtgtccaacatttgttggatgaaatgcaactctgtggttaatgttccttcctgacccacatggtgtttatttgtagttacttgatgattgtggccgcacttgtgtgactgcattacttgttcttgcatcacttgttcactagtcactacacatgaacattgagataagagtatagttactaagaaagatgcaataaatgttctgtcctgtcttccatgctgcacctgtttcacattacaccagcacgttttaaacaatatacaaggattatgtcccacagtgctcatgaaggacataatggatgagaatattttatttcaacttctgctgttatgtctttctataatcttttaaactagtctcacttgctctatattcttaaaagctgctagcgatgtgtatcatctttattggttcttgacacctctaagctgctcattttgtagtgtgatctggtggccacttggaaagcatgataaactaattagcattgatgaccgaaatatttttctttggaacgtagacatgtcaaataaatcagctaaggtgatctcacagggatcagctgacatgcttccaaatttgagtggtggggcttgggatccacacaatcataattcaattgcttcaatatctgattcatcacttcatttgtgggatctacgttctatggaaaaatcatctgcaattgaacatgcacatatacgggatgtggattataaccccaagaagcaacacattattgcaacaacagaagatgactttggaatttgcttgtgggatctcagaatgcttaagcttcctctgaaagacctccctgggcactcacattggacatgggctattcagcacaatcctgagtatgatgagctgcttctgagtgctggaacagattcaactgtaaatttatggttggctaaagttagcaacaatgattctgaacctaatagcccttctggttcacccaatagacaagaagaaccattacttaactcatatactgactatgaagacagcatctatggtattgcatggagctcccatgatccatcattattcgcttctttgtcctatgatggaagggttgtcttggaatcagtcaagccctacttgcagagaaaatgaatcttgctggtctaacttttggattgtaaggtgtaggatatgattcctcatttcctttatcttgtccttattgccaaagttatctcatgtcctaataaactgttctctgtccctgcagcctacaggcttgcttgttgtttatatttgatgcgttatagttttgccttatattctgtaccctcttgacaaccatttatgtgatgatgtgttttactgttgtagcaatggcagaaaaaacataataaggatgttgcagaaatcatcctgcttgacatcaggtcttcaaccctcttgattgaagccagcaatggctccaaaacactcagatctagcttcagttgagatattacagcacagttgagattgtcagcagtttcctttcctgtatcttcaaattttgtccactaggatttcatgttcagttgctagaaatttggctgtgaagatctgatctgtatgttaataactgttgcccatctgtctgaaatagttttctatacttgattcttaggatgttgtatatttgaaaagtgttcacaaaaagatattgcggtatatgatgaggtggagttggactgaatttgtaaaaccattcagaatttcaaattcccaggattagcttgttttatgaaatattctgttgcgcattgaaaa

SEQ ID NO: 43677 - DNA, 1489 bp, Zea Mays
ctgccaaagcgtagttctgcgacatctaaaggagtgtggaaggcggctgccttgtccgcccggcctcttccgtctcggagcgagaaatcagcggcatcgccgcgcgcatccgaagcgcacacgacaatgcagggcggatccagcggcatcgtctatggtggcctcaagtaccaggcacggtgtatcgccgacgtgcgcgcggacgccagctcgaccaccttcctcgccgggaccctcagcctcaaggaggagaacgaggtgcacctgatccggctttcgccggcggagagtgagctggtgtgcgatggagtcttctaccaccccaacgagatctgggatctcaaatcatgtcccttcgatcacagggtcttctccacagtctacacatctggtgagggctttggtgcgtcagtttggaagatcccagagcttaatgggcaatcaaactcaccgcagcttgagcagctctttgagcttagtgggcatacgggcaagattagacgtgtgatctggtggccacttggaaagcatgataaactaattagcattgatgaccgaaatatttttctttggaacgtagacatgtcaaataaatcagctaaggtgatctcacagggatcagctgacatgcttccaaatttgagtggtggggcttgggatccacacaatcataattcaattgcttcaatatctgattcatcacttcatttgtgggatctacgttctatggaaaaatcatctgcaattgaacatgcacatatacgggatgtggattataaccccaagaagcaacacattattgcaacaacagaagatgactttggaatttgcttgtgggatctcagaatgcttaagcttcctctgaaagacctccctgggcactcacattggacatgggctattcagcacaatcctgagtatgatgagctgcttctgagtgctggaacagattcaactgtaaatttatggttggctaaagttagcaacaatgattctgaacctaatagcccttctggttcacccaatagacaagaagaaccattacttaactcatatactgactatgaagacagcatctatggtattgcatggagctcccatgatccatcattattcgcttctttgtcctatgatggaagggttgtcttggaatcagtcaagccctacttgcagagaaaatgaatcttgctggtctaacttttggattgtaagcaatggcagaaaaaacataataaggatgttgcagaaatcatcctgcttgacatcaggtcttcaaccctcttgattgaagccagcaatggctccaaaacactcagatctagcttcagttgagatattacagcacagatgttgtatatttgaaaagtgttcacaaaaagatattgcggtatatgatgaggtggagttggactgaatttgtaaaaccattcagaatttcaaattcccaggattagcttgttttatgaaatattctgttgcgcattgaaaa

SEQ ID NO: 43678 - DNA, 2378 bp, Zea Mays
ctgccaaagcgtagttctgcgacatctaaaggagtgtggaaggcggctgccttgtccgcccggcctcttccgtctcggagcgagaaatcagcggcatcgccgcgcgcatccgaagcgcacacgacaatgcagggcggatccagcggcatcgtctatggtggcctcaagtaccaggcacggtgtatcgccgacgtgcgcgcggacgccagctcgaccaccttcctcgccgggaccctcagcctcaaggaggagaacgagtaggtgcacctgatccggctttcgccggcggagagtgagctggtgtgcgatggagtcttctaccaccccaacgagatctgggatctcaaatcatgtcccttcgatcacagggtcttctccacagtctacacatctggtgagggctttggtgcgtcagtttggaagatcccagagcttaatgggcaatcaaactcaccgcagcttgagcagctctttgagcttagtgggcatacgggcaagattagacggtggactcctgtttctgttggtttttggctgctctagagatatttgatctacttactgtactaaattctcatatgttttgaatttgagactttgtgtccaacatttgttggatgaaatgcaactctgtggttaatgttccttcctgacccacatggtgtttatttgtagttacttgatgattgtggccgcacttgtgtgactgcattacttgttcttgcatcacttgttcactagtcactacacatgaacattgagataagagtatagttactaagaaagatgcaataaatgttctgtcctgtcttccatgctgcacctgtttcacattacaccagcacgttttaaacaatatacaaggattatgtcccacagtgctcatgaaggacataatggatgagaatattttatttcaacttctgctgttatgtctttctataatcttttaaactagtctcacttgctctatattcttaaaagctgctagcgatgtgtatcatctttattggttcttgacacctctaagctgctcattttgtagtgtgatctggtggccacttggaaagcatgataaactaattagcattgatgaccgaaatatttttctttggaacgtagacatgtcaaataaatcagctaaggtgatctcacagggatcagctgacatgcttccaaatttgagtggtggggcttgggatccacacaatcataattcaattgcttcaatatctgattcatcacttcatttgtgggatctacgttctatggaaaaatcatctgcaattgaacatgcacatatacgggatgtggattataaccccaagaagcaacacattattgcaacaacagaagatgactttggaatttgcttgtgggatctcagaatgcttaagcttcctctgaaagacctccctgggcactcacattggacatgggctattcagcacaatcctgagtatgatgagctgcttctgagtgctggaacagattcaactgtaaatttatggttggctaaagttagcaacaatgattctgaacctaatagcccttctggttcacccaatagacaagaagaaccattacttaactcatatactgactatgaagacagcatctatggtattgcatggagctcccatgatccatcattattcgcttctttgtcctatgatggaagggttgtcttggaatcagtcaagccctacttgcagagaaaatgaatcttgctggtctaacttttggattgtaaggtgtaggatatgattcctcatttcctttatcttgtccttattgccaaagttatctcatgtcctaataaactgttctctgtccctgcagcctacaggcttgcttgttgtttatatttgatgcgttatagttttgccttatattctgtaccctcttgacaaccatttatgtgatgatgtgttttactgttgtagcaatggcagaaaaaacataataaggatgttgcagaaatcatcctgcttgacatcaggtcttcaaccctcttgattgaagccagcaatggctccaaaacactcagatctagcttcagttgagatattacagcacagttgagattgtcagcagtttcctttcctgtatcttcaaattttgtccactaggatttcatgttcagttgctagaaatttggctgtgaagatctgatctgtatgttaataactgttgcccatctgtctgaaatagttttctatacttgattcttaggatgttgtatatttgaaaagtgttcacaaaaagatattgcggtatatgatgaggtggagttggactgaatttgtaaaaccattcagaatttcaaattcccaggattagcttgttttatgaaatattctgttgcgcattgaaaa

SEQ ID NO: 43679 - DNA, 704 bp, Zea Mays
tctatgtaaagctcccaaagaatgttagtactacaatgaactcatattgttaaatgacatcgataccaacaagaaactagaacacgtggatactactttcaagaacaaaaaataggacatagatatatatctcagccacacacgtcataatgaatatctaaatggagttgaatcatgtggatacacgagtgggaagctagcaactaatcagtacatcatacacgatcatacacgagcaagtgagcaacaaattggaatcctaaaattcatagcataaaaaacatttccccccacaaatatatagttattgcaaatactaagtagtaaggaaatgttgctgcctttctacagtcgcgagagacaggaccagttgggctgacatggcatgcatcccatgagagatgatcgggagcttggaacgttctggcttatggtgaagccgttgtctcgctagctggggcactttggctcccgttcatagtcctctcctgagaaggagctcctcggatggagcatggagcgaaacaaagaggcggagtggagacatacctgaggagacgagctggtcggagcatgataggaggatcgagacaaaggtcggtcagttcgtttggtgaatctaggcggcgacgtcttccttcctgtttatgggcggatgggatgtggcctgcgcagaagccagatgccacctgaggttgtagaag

SEQ ID NO: 43680 - DNA, 407 bp, Zea Mays
tctcttgtcatttatttatttgtttaattatggtgttcacatgaaatgagaaacatagataactcatatagttataaagtaatataatttctctttctagacctttcttacaaagtgggtgttacagttgcccaaggtccattggacaaggagaactgtaggtgggcctaatgacttaggaggttccgtcacatccttgctccgtgaaacgctcatttgccttcaagttgtttccagtccttcgacatgcacctgaggagacgagctggtcggagcatgataggaggatcgagacaaaggtcggtcagttcgtttggtgaatctaggcggcgacgtcttccttcctgtttatgggcggatgggatgtggcctgcgcagaagccagatgccacctgaggttgtagaag

SEQ ID NO: 43681 - DNA, 432 bp, Zea Mays
tttaggaaacggcagcggcggcgcttcgcgattgtcatctgcgggaaggggtggatgggaaggccggaaggggcgaagtgtctttgtgactgcataccgatgcgagggcgcccttccctccttccttctttcgtgtgctcattgctgaagcatgggatgcaggaggtctctatcaagttggtcagtttcctcactggaatgtttggtcagagtggaatggaaaggtaagatacttaaaaagacttgaaagtctttttgctacttggtactttctaaataacaaatgaagccttgtcaaatactgaatgtaagtttcaacagatatatttaaatagatgagtgcttctatctacctctgaattgtctatagctgtgtttatacggcggtttaattttggtaatatcgatactatttatcacaggagacaattc

SEQ ID NO: 43682 - DNA, 749 bp, Zea Mays
tttgttttatatgttgccatctgatctctggtgaaaaggagggagatgagctacagaggaaatctgatgttatggaaattctaagaaaagtatagatttccataggtccgtggtgccactgatgtcaagtcaccagaaacaattcttgagcatgagcatgcgtcgatgctcttttttccctgaggcaatactactcctatgcacaatgatgtagtagcaacggagaactggcactaattggatacttcttttcctaattgcagccgtatcaattggcttgggggtttaaattatcggattgccctatcatactgcttagctaaagcccttgtcgaaatgcataagcaactgttagagaaagatcagcttcagatagagtgaagatgtaggtgcattttctagggatggaaagaaggcatgattaatttcctccaatatataaatactcattcaactcggatcgttactctggtgcgatcacattatgtggcctcttgaagtcgtcctacatccgaggagagtctcgcttctctgaccacagaccagtgtacaatattttcatggctaaggttgagagtgcccgccacagaagatcgaacttatccttgatcatgatctccggtgttgagggaacaatgatagattgatatgaggattacaggtgtaatcatgtgtataataacacttttttattttcctctatccctgtggtgtagtacatgaaaagcaaaatgatacatgcatttgtt

SEQ ID NO: 43683 - DNA, 1172 bp, Zea Mays
gcgggcgcacgactgacctgccgagccaagcgcaggcgtgggcgcgggcggcagaacaagaacaacgcgtcttcttcccctttcgtgtcctctcctgcgcgcgcaccgacaagtgaacgagcgagcgagcgagcatcatggacatggaggcggccgcgatctccgggaccgccagcgcgtcgtcgtccacgtcgcggcgcggcaggagcatctcccgcctgccagcgcgcgtcgccggcgcggtgatccgcggcctggtcaccttcgtcttcgcggcagtgggcatggtcctcggggccgtcacgggcgcgctgatcgggctcgccacggagagcggcctggtgcgcggcgccggcatcgggtccatctccggcgccgtcgtgtccatggaagttgtcgattcctccgtcgccatctggcgctccgacgagtccgggatctggagcgtcctatacgtgctcgatgtcctctggagcctgctgaccggccgcctggtgcgagagaaggtggacccggccgtgcaaagcgccgtcgacagtcagatgaacaccgcggactcgcaggacatggcgccgacactggcggacatgttcgagacgggcgccgccgacgccaagggcatgccggccgccgccgtcgcggcgctccccatcatggccttcaccgagcacaccgtcgccgacgcctccggggagcccatcggctgctccgtctgccttcaggacttcgaggcaggcgagacggcgcggagcttgccggagtgcgggcacacgttccacctgccgtgcatcgacgtctggctgctccggcacgcctcgtgcccactgtgtcgtcgcgcggtctaagccggtgcgcacacttttcgttaggatgtctttgggcaaccgtgagccgatgcgcgtgcacacgtgtcccagaccaggagcagagtattgtagggtagtaggagtgcaggacacctggttctttcttgcataccttgattatttttttcttcttttttctacgtcttgggcacgcatgtacagatacagtacgtggctcacattgtctcacacactatgtggatgtaaatatgtatagggtaaatgttgtaaacaatgtaatatacttgtacattgagatttctttccaatgatcgtggcataatacgaataatgtacttgttcaca

SEQ ID NO: 43684 - DNA, 1864 bp, Zea Mays
cttggacttcagaggttgcttactgaagtctagcaagatagcaaatgatgtcagaattgcttaatcagaaatcttcagtccaagggaaagttccttcaggctattttaatgctctctttgaattaagtggagcttggttgactgatgccaaagagaccaagcatctagcattcgacggatatttcatttctttgtacaacttgcatctaaaggcttctccattagttcttcgagatgaagtaaaaaaggctgttccatcgaagtgggatcctattgcattatcatggtttataaagaattatgggacacatataattgttgaaatgggaatcggaggtcaggatgtcatatgtgttaaacaaagtcattcttcaaccatttcaactgtggatcttaagttgcacctggaggaccttggcgatttcttgttttctgatgggaagaaccactctccaatacatcgcaagacaaaggatggcaagagcaaggtgcctgatgtttttgtaaggatagtgcagcaaccaaataacctgcacctttctagctactctgaaacatcaaccaaggatggcctgacagttacatgttcgaagaggggaggagaagcatacctacccaaccactccaagtggctgcaaacagtggcaaagaaacctgatgccattatgtttaaatttgtccccatcacctctcttctaactggtattcctggtagtggttacctcagccatgccatcaatctatatcttcgctataaacctgatcttcaagacttgcaatatttcttggagtttcaagtgcctctacaatgggcacctatgtttaacgagcttgtccttgggccccaaaagaggaaaagctcttatccttcaatgcagttcagatttctcggccccagactccaagtcagcacttctcagttctcagaaaccggtggttggcctacggctatacctggagggcaggaagtgcaaccggttggccatccatgtccagcacctgtccagtgttccaagcatgattggagactccgtggcatcttcaatgtcagaatggcgcgagtcccaagacagcgacccggggtacgtcgaggccatccagtggaagaagtactcgtgcgtctgcacctccgtcgtcaagtacaacccggagtggcacaagagagctcccggcggagtctttatcgtcactggcgcgcagctcgtcacgaagggggcctggtccaagaaggtcctccatctgcgcctcctctacacccacatccccaactgcaccatccagaggaccgaatggacgaacgctccggcggcgtctcagaaggggagcttcctgacgacgatcagcacgacactgagctccccgttcacgcagcgtgacacccaccaggggaagcatgagccggtgcagctgaactcaggtgtctaccccgacggaccgccggtcccgctccggtccaggaagctcctcaagttcgtcgacatttcggaggtggtaaaagggccacacgacgtcccaggccactggctggtgatcgcggcgaagcttgtgaaagagagaaggaagatcgggatccatgttaagtttgcactgctgggctatgaaggcctgtcgcagaatgatagtttcatgggttgagtctgtacataacaacagctggctgatcttcgtagatttcaggattttagaaaaaagcataggatgaggatttgttattagttttttttttgggagggtcgacaggaagtgtatagagggcagtcagactcacagtaaaaccaatcacggctgtgttgagttgttccgtgaattagagaccatacttgtaaattacttcttttttaaatcacttcggttaagttactct

SEQ ID NO: 43685 - DNA, 1308 bp, Zea Mays
cacatactgtatcaaaacataggtgttataaagcaccatatgtgacctctccatttgctaaaatcatcaaatattacagtacgacaaaaacttaccccacaacatttacgaagcaatcgttgtccgagtgatcaccctcataacaccttccattttgactggcctacaagaattgttgaaagcaaacactgcaagattcatttccccttggtgtgcccaacaattgccgctacacgatcattgccaccatggaggagtggaagttgttgtatgggtctcgcgaccgctttaccaccgcgaaccctctgtgcacctgctcctccgtcgttgacaccaccatggttgaggtgatcgacaacaatggagatcgacttggttcggccgacaggtcacggcacaaggaggcaacaaacaagtccctgtcaatggcgccattcacggccagcagtgcgcggctggaggagccttggtcgtcgcctacaggagatgagtagtaggatgaggatgcgacgttggtgctgttgctggtggagcagagcagcgagctcggatggaacatccgggccagccggtgtcctagaggcggctactgcttctcccgccgacgacaagcgaagatgatgtttacagagggcctcaatgagtcggcgtcaactggatctagcaatacacggactcccagcccccgcacccacaccgccatggtcaccgttgtcagagtgcccacccctagggcaggtggcgacggcgtcgaggagccccgtgcggcacgccaggccgggcagggctagcacaggcatcacgggtgaatgggacacaccactcgagcctgctcgcctgcctctgtgctcctctcagccgcatactccaatgagtgagaggatgagagcgtcgcgtcgtggggatgcccgaggacagaggatcgggggaggggcggttgctgtctccccacatcggtgagggagggggaagggagctgcagcgacaggggcgaccgagacagagagccattgtggaagcgacaacggggtggggattcatggtcgcgaggacgcgttgtgacttgtgagatcgtgggggcgagagaggaccggggaggagcggttgctgtgagaagtcagaggaaaagagtagaggacgctggcatggggcccacctgtcagccgagagtgggcagaacggcagaacgacaaactactattgctgccttaataagtagtatagattactagtacattgtccggacgttacaacgacacataaactattctttaaaattaatacataatattgcttaggcaaaaatac

SEQ ID NO: 43686 - DNA, 224 bp, Zea Mays
accttgctggtgcagtgctcgcgcaaggcgaggacgcgaggaggacggaggaacgatcggtgcaagggacaaagtgctgctgggctgggctccccggctgctgacggaggagctgtagctacgtgatgtgattttggtcttcgttccgcttggttccttcggcctcggcctcgtttgctgctgctgccgggtgcgatgtgaggccagggtgatttgctctcagg

SEQ ID NO: 43687 - DNA, 314 bp, Zea Mays
cccaacccctggtgatggcagtgggagaaaattttgtggcggtggtggtatcgatgatggcatctcttagaaatgggattccataaatcaggacataaatataagttcaaagtaattctctgggttttcaagttttctggctcctccaatccaatatgccccagtacacaaatcaaccaacgggagaactaactgcaattgataacaaaatatgttagaaatgtgtaagacaaataaaaaagacaggacagaccttgtcaaataaaaaaaagatgagcagaaaatgctgcttggtccaagttcgattaattaag

SEQ ID NO: 43688 - DNA, 1267 bp, Zea Mays
ccaagaggttatttatctagttttgtaaagctgaggggttaaataaccggttttgaaggtggagtgaagtagactaccctctaaagatcagggggttatatagacttttcccatgaatatagatagcaaagatatggattaaatgttttgtacttgcataacctaacaaaaaggaactgagtgagaaataggtatttaaacaatttatgggctaaatacaattccggaacaattggaacaaatattcacagaacatggcttgtgaaactatattttgtagttttactagtcgtgaaagaaatggagaatgcaccgagaggttgacaggcaaaacataacaagctaactctaaatcaaaatttccatagcatctacatgctcgaaagtcgaaagtacaaatggaacaatttataccacaatagtgcaatagacttacagatcaacttctttttgtattggaagtcctgttctaaatctgttttgcacctagcatcaccatgtttctgtgtacagccttgacttgactcctcactggtgcacataatgacaaattgatgtctttgtataatcaacattctctagaagttatgagatctgaacttattttgatggagcagtcttgatagtgagctgtggatttcaccagaacaggatattgaacaatgttcatcagcatcttccattgcctaataaattatgaacatatataaaccatgcaacataagagagacaccaagctgagaagatttggtgtctgccacatatgagactaagaatgtcaaaacatcctttgagtagcagagattatacaagaagcaacacctcagctgcaataagtgtatggaggcaggcttggacttcgcaaggcaatagagatgaaacaggaagaaacacttcagctgcatatatgtgcagaaccaagtcaggacttggatgtgaacatcaaatttgtgaagtatgctagctagcgaggctcaacacttcatcattgtcgcatttggtactagaacctcagctcgatgcatgtttgagttatgcaaacatccacataccattgcctgatggtgcatgtgacaaagatacaattttgagctttcaattctattgtctgataggcaaagattaaactctgcggaagcattgatccatttgcatccgaattgattagttatatgaatttattttttcaagtaccagtgatgcattgactccaagcagctgaggaattgtctctgatagagccttgaagtcttgcaatgaaaccgag

SEQ ID NO: 43689 - DNA, 1863 bp, Zea Mays
cagttgtttgccttctctcttagatggaactgcagatggaaagacataagcattcataacttgttggattgctagtaaagccaaattattgtactatatacaatgccatcctagtacgtttttcagacgatggcatcaaaatggctgcagtttataacccagaggcagagagagagagagaaagagagacgtaaaagagcatcattattttatgcattttgttaattgttcgcagaagagctcataggcaatggcagcatcaaggagggaccatcagcagaacgctagtctcaaccggggcatccagaatatattcccagggctcaaacccagtgagtctggccaagggctacggcgtgcaaggtccgtcccaacctctcctggtcgcagattatccccccatcccccgcctcaatctcatccaacacctgtcgacccacatcatcattcaacagtcggacgacctcatcccggtccacatctagctcagcctcttcaagtcacagcaagacactgtactctgcttcgtccatggctgctggtgcaaggcagggaaacacagtgagaagaaaagcagaaaggcctggtgccacatctgtgtggcctccagcccttgcagttccaagcacctcgtctaaggatatcaccagagcaacgaaatcaccatccaccatgcagaagagtaataatctctctacaaggcccggcattgagaaggcggcggcagcgtcttctgtaaagctgaaatctcagaaaacagtagtaggacctgaaaaaactcaagctgcagcttcgactcgtgctcctggcgctataacaaagaaaagaatgggagccgagaattatgtctccatccagaggacaacaagtgtgccggtaagacaaacagagacaccgaaaatggtggaacgagacgttgagttgttgatagagtttgatgagacggagagcataagcacctcttccatagaggagcacttgcatgaacgactccctgaccctgttgatatgaaatctgcggatctcaatagcaagacatcctcttgtccggaggaacacaagaatcgagacaacacagggggcattttgggggagaaacagggtggaaaggacaatgaagacctcagcacaggcgacagtgcttctgctggaaacagaaacagtgatacaaacatccctaaagaagcagtcgatgaatctgagttggaggaagctgttgatggacctgggtcgaataaagatgcctgtgcatctgagctaaatgaaactgtaggtcggactgaactaaacgaagctgtcagtgaaaccgaaccaaaggaagctaaagatgaagccaagctaatacaagttgactgtgaaattgtactaaaagaagctgccagtggaactgagttaagagatgattttattgaacatgagttgatagcgcaagaaaataccaaaactaaggagaacataaccatggaattagcacagaagtggaggaaggatgaaaggaggagcaatgaagctacagaggagggcaggggcaaacctatccacgagaggaagaacaaggtaatggccttggtggggagatttgagactgccatgtctggctgaaagtgaggcgctgacggagccacaataacaaaccttcttttcatattgcaaagtaaaaaagactgtataggtcgatagttcatatgtttcatttcattaatgtgactgttactgttctgggagtgaaaaatgctgatgaatattgatgacacttctcctgacactcctgttctcttttttttaataaagtgatacacagctctcctgcatgttcgagaacaaaaaagaaaaaagaaaacacttctacaagttaggaccgta

SEQ ID NO: 43690 - DNA, 398 bp, Zea Mays
cagcagtatacaaatcaaatgtatgacttaaatgctattcaaagccagctaagaaaactcagttaatgctattcaagttacaccgtatacaacaatctcttgtcaaacatgcaacatgtgcagcaaagctggcagttcatacgcaggcacgcaagtaaccgtgcccggctgcctgccgttaataggcttgaaagacacaaaacggcggatccccaagaatagcggagtgccctccacacaccatgaatcatcaatggagggaagtctctgctcactatttatagaccgcccaccgaatacaaaaaaaaaaggaagcacaagggccaaacattctcgaagtcttttcagccagactatttgaacacagcgaccgcctagactctcgaggtgaaggaggc

SEQ ID NO: 43691 - DNA, 714 bp, Zea Mays
tcacgcatgcaagaaaggaaaaacaaacaacgtgggattgtggcgtacaggtggggccaacgcatggtttcgcttttgacttcttctctgttgaacggcacgcgcggcaagcggttctgccggccaggggaagggggcgcggtaggggtttcggcctagggagcggagcgtggagggtgctggagatggccacgcctgctcggctgctcctgcaggggccgcgcagggcccttgccgctgggggctggccggggaggctcggctggggccgaccgccgcgcgcgccgcgctggctgtgcaggcaggctgccgcgccgactggccgccggggcctcgatcatgggaacgcagagaggggcatggaagagagggagaagaaggggattcctcacctgcgcacgacgaacgacggaccaagcgcgcaaggaagacggcgattttggacggatgctccggggagtccggacacaggctcctactgcacggacgtcgatggcgagacgagggtgctgcttgacgcggcaaacggcgagccggtcgctgggcggttataggagagaaatatggggcgccatgtgttttgcgtcgtggccgtgggtggagtcctggggaagaagaataggaggtggggcggttgggcgctggcgtgcgggagggagaggcatggcgcgggagtggctggcgtgtgcggctcgcagagcatcctcgcagccg

SEQ ID NO: 43692 - DNA, 1488 bp, Zea Mays
gtcgaatactgtcacacccggttttagaaggtaaaccgaatgcgaaccatgtacgtgccaggatcagttattcacgtacacagcgattacataaatgactcatgatagcacaatgcttcgaattacaataaagagtaagtaataatattacagactagagccatttacataatataaatcaaagtacacagaatcgaaacgtagccaacgtaaacaacccaccacaggcagcagactgggggaggtcgctagcctaatcctcggactcgtcgaagtcctggaacccctggagatccgcctcgacaccttctttacctgagcatagattgcaccaaaggcaacctggtgttttgtgaaagcaagggtgagtacacatcaacgtactcagcaaatgtcccgtttggccgtagtggactagctttatgtggagttagggtcaagcagttgcttttagttggtcaggtaattattactaatatagagccaggttttagcattaacccaagttgttaacccaaaagtaccctttccaaacggaaagaataccagaaaaccataatcataatcacaatagaaaccagcattatcatcatcatcatcatcatctgtaaacaaagtatccatgatccaatgtgtctctaatcaatggagctcccttggccgctcataaccgcaagcacggctgatatattagtttcaaacactctgtagaggttgtgcactttacccacaagatgtgattccctctctagcccgggcttgcaagacccttatccactcccaaggtgaatggccagggattcactatgaagcctttacaaagattccctagaggtcatagccgcccgttaggtttctccagtttgataaacacagtaccactccccgcagggggtgactaacaaaagcaaaacgaaagaacctcggcacccagcctcggcagagcaagcactgtgcctggaccccattgacggcacgacggcgaagcaactacacctctagttcctctaattaattagctaagggcgtcccattccaccctcgtggttgcactgttttcccgggcggtcatccaacaaacaggtccttacggagaggcactcgagaaaccactcgagccccctaaagtatcaccagtccaacatcataataataatgacaacatcatatcataattgttcacatcatgttcattgattaaagtaaagcaataccatgaggctaaccatagtgacccaaaaggtaatcaaggacaaggtaaatacaaagctagtcaatccttaggttgatcatggtatgcgggttgatgaattataaagtaaatgggacataataggttagaggacacttgccttcaccaaacagatgctcagggtcttcaatctcgtagaactcgaagaacttgatcactcggtcgccaacgcttgaccgtcgattcctcgaagctcgggaacagattgcaatctattcgcgtcacgcaacaaatac

SEQ ID NO: 43693 - DNA, 2292 bp, Zea Mays
ctttgtgcaatccaactactacatctatcactccagtatcatcctgaacatttaaaatatgtaccctatagtagtatggagttgcacatatatattttagatcccagtgcccaaaatcttttagatcccagttcataccaatttaatgttaagtttgcccccgcaactgatctcgatttctattttctcagcattatattggtgatatctcaaagttggatgcattgaaaggctttgctaaaggttttcctggtttttatcatagatccgtgcataggatttgtcttggttttttgtttgttttagagaaagcaatattctaacatggcatggtcctaccttgctttcttatttgtctgtgttgtctcctgcatgttctacacaaaatctttgtatgcccacaatctttgtattctaacatcgataagtgcccaaaatctttgtatgcttctaaacagacctttggtattgttgtacacattggattcaataccacttctgttgtccccgtaagtaattgtccatatttatattattaagggttttcaattatttacagtgtgttcccatgcgtttggtgaacattagccatgctgtttggcatatacatcttttagctgcacttatcgatgtcatttacatttcaccattttgataatatgttttctacaatctttcaaggtagggtaatgtataagaaatgtgttgaaactgtggggcaagatgcccttaaactcactggatttctcaagacgttaatgcagaggagaaattaatccgaaactttgctacatagctgctgattatgaagttgaattacgtaaggatacacacatgtcctgcgaggttgatgttgaagggtggttcacctgctcgaagagagattcaagactccaaaaatcccatttcagcctcatatgggaggaacgtgcgaaatgtttagatattgtttaattctgcatctattacaatttagtcattgttgtaaaatgttgatcttgcccttgaaggcgtgctatgggcttgcataaagtagttctctatgtatggatcactgctattttttcaggaacggttggtgatgatagctggtagctggtacaagacaatcattttagtttgtggttcgtcatgcttgcctggtttaccagttggtacactatgtggacaggttaggaagagataccccaagggtgatgctaaggagataaagatccacaagatcaaggacttccttctcacggcgaggaggaatgatgcccatttcgtgaagatcaagaggagcaaggatgttgtcaagttcaaggtgcgcccattgcaagtccaacctgttccccccaattcagcaccagcctttacgcatcgcaacagcgatatcgggaagaggaaactcgaaagcccggcgagcggtatggcaaccggcgaggagcatgtggcggcgccggcggtcgaggatacgttagagaagaagcaggccagcacaaccgagctgcccgcaccctcgggctggacgaagaagggagttccaatgttctacatgggcgatgaatatggtcacacaaagggagggaacaacaatacgtactgccatgaccattatgtcaattatttctgttgggataagaaggaagaacaatcctctgatttgtacagattctgccgtctcatgaccaaattccgcaaatcctgtgcagtttacgttgccactgtctattcatattcttttggtgtgcaatacacggaatgtgaatctcttggccttgaggacttcccgacttcagaacggttgcaatggcacggtcatcagcccgggaagcctgactggttagaggcaagccgattcgttgccttcaccatgaaggacgaaaccaaaggcgagatctacgtggccttcaacaccagtcacctaccggtggtcgtcgggcttccagagcgctctgggttccgatgggagccggtggtggacaccggcaaggaggcaccatatgacttcctcaccgatggccctgccagatcgtgctgtcatcgtctaccagttctctcatttcctcaactccaatctctatcctatgctcagctactcctccatcatccttgtattgcgccctgatgtctgaaagaagcggatacaatagagtatactgtagcggtagtatatattttttctttgacttccttttgtagatctgccaaacacaaacacaactaagcaatgtagcacatactattggcatgaccctccactcatttacattctaaattggatatatttttatagttcctgaatttgat

SEQ ID NO: 43694 - DNA, 2084 bp, Zea Mays
gaacgcccagggctagctctatctccctcccgagatctcctcccttcccccccttcttctctcccttgccgacgattacgccaggtgcccaggtcttcttcgggccgaggtcgctgccgccatacacttggtgcccaggtcttctccgggcccttcgccagcgtcgagcagcaccaggctgagctccacagtggttcttggagaggtctgtgatagactactaggctgaatacctcatggaatcttggagagaaaaggggatcttggagaggtttgtgacacactactgtggtgaatagacctatgcagaagagaaaaagggaaagagagaatgttctcaatgaattgaagtccctatgtcaaaaacaagagcaaggagctgttgtacaagtggcttgtggaaggagcatatcatatatttgtaggagataactttacacttgattcatgggcgactggattataggggcgttgataaacatcgtggggagtgttggcataaactttggtaccaaccttctgaagttgggccatgatcagtcactacttgcagctcttggatcaatccagtttgtgtccaacattgcttttgcctactttgttttgaacaagactatttcagtgaagtatgtatgattctcactttctggtagctggaatgaaaattacaataactacatggaatcatgtgactatgaagcttctgctattctttccagagtcatggtagccacaacatttatagtctttggcaacatcttcttagtatcctttggcaaccatcaatcacctgtttacacgccggagcagctgatagcaaaatacagcaatttggtgtttgttctttattgcatgtcattggtctttgttgttgcatttaaccactatctctacaggtgatgccttgctcttgctcatataacccagtctcttcagaaacagggccatgctcttccttaccagttctaattttttttgcaggagtggagaaactattatttcaaatagttcaaaaaatgctggcacatattggcgaacaatgttgccattttcttatgctgttgtatctggtgctattgggtcttgctcagtcttgtttgcaaagtcattgtctaacatgatgaggctgactatgaacagcagatacgagtttcatagctggttcacatactcaattgttcttctgtttctgtgtaccgctggattttggatgggaagattgaatgaagggttgtcattatttgatgcaatactgattgttccaatgtttcaaattgcttggaccttcttctctatctgtacaggatttgtttactttcaagaatatcaagtatttgatacgctcaggataattatggttgtattgggcatgacatttgtctttgttgggatctccttgctagcacccgatgacactaaagctgatacgaaagatggttcgagcactgccgaggaatctataattgatatggacagaaatggaaagatgcagatggaggagacagacacagatgatagcaactcgtttgtcacttctgtaaaagcaaaagcaaaacgtgtactgttgaaggcaaaggtcattggctttctttctggatctgattccaccattgatctgtcacaaatctgcctctcacctgatcttgtttgcagtctgcatgctccatgtcccttggccttggggaggacacaataagcgcttcgtccgtgcttgccatgcctatggtctcatcaagaacaaccggcttcagaggaattgaagatgaccgttcaaagtacgttcctttaagaaccacagattggagtaatctttagcggacggtgatatatagatacacagcaaaggtctttacttttgatgttgcatagcgggtggcagtaaagtattttgttgctccagaggctattgtttgttgtaatcatagttagctgtaacacgagtgtatagttcaacgtttctcccttcaaaacactgtccatagccagctgcatagtacatttgtaagttttagaatacagatcaaatgattcaattcgcttcttatttgctcaaccactcctacggttgcatgtgctgtgatcat

SEQ ID NO: 43695 - DNA, 2297 bp, Zea Mays
gaacgcccagggctagctctatctccctcccgagatctcctcccttcccccccttcttctctcccttgccgacgattacgccaggtgcccaggtcttcttcgggccgaggtcgctgccgccatacacttggtgcccaggtcttctccgggcccttcgccagcgtcgagcagcaccaggctgagctccacagtggttcttggagaggtctgtgatagactactaggctgaatacctcatggaatcttggagagaaaaggggatcttggagaggtttgtgacacactactgtggtgaatagacctatgcagaagagaaaaagggaaagagagaatgttctcaatgaattgaagtccctatgtcaaaaacaagagcaaggagctgttgtacaagtggcttgtggaaggagcatatcatatatttgtaggagataactttacacttgattcatgggcgactggattataggggcgttgataaacatcgtggggagtgttggcataaactttggtaccaaccttctgaagttgggccatgatcagagagaaaagctttccttaattaacaacagcgagggaaatgaaaaattcgttccaaagtctgtaatgcatttccagacttggagaataggtatacttttttttgctgctgggaactgcctcaacttcatgtcatttgcttatgctgcacaggttcttttcgttgtcctcgagacctcaaaagaaaaattagtttaacatgtaggatgtaatataatatgggaaactcatgaatggttgtgtaaacatgtaaagaataaaactctcatggagactgtatttgcgccctgtatttgcgccctgtttttttccattagttcttgggggtaaaaagataagagcttatcagtcatacagtttccatctctccttgtttcttagagctaataatgccatccaatcatattttcttttctctttctagcccagtgttttggtttgaacattgattatttacttgctatattacagtcactacttgcagctcttggatcaatccagtttgtgtccaacattgcttttgcctactttgttttgaacaagactatttcagtgaaagtcatggtagccacaacatttatagtctttggcaacatcttcttagtatcctttggcaaccatcaatcacctgtttacacgccggagcagctgatagcaaaatacagcaatttggtgtttgttctttattgcatgtcattggtctttgttgttgcatttaaccactatctctacaggagtggagaaactattatttcaaatagttcaaaaaatgctggcacatattggcgaacaatgttgccattttcttatgctgttgtatctggtgctattgggtcttgctcagtcttgtttgcaaagtcattgtctaacatgatgaggctgactatgaacagcagatacgagtttcatagctggttcacatactcaattgttcttctgtttctgtgtaccgctggattttggatgggaagattgaatgaagggttgtcattatttgatgcaatactgattgttccaatgtttcaaattgcttggaccttcttctctatctgtacaggatttgtttactttcaagaatatcaagtatttgatacgctcaggataattatggttgtattgggcatgacatttgtctttgttgggatctccttgctagcacccgatgacactaaagctgatacgaaagatggttcgagcactgccgaggaatctataattgatatggacagaaatggaaagatgcagatggaggagacagacacagatgatagcaactcgtttgtcacttctgtaaaagcaaaagcaaaacgtgtactgttgaaggcaaagtctgcatgctccatgtcccttggccttggggaggacacaataagcgcttcgtccgtgcttgccatgcctatggtctcatcaagaacaaccggcttcagaggaattgaagatgaccgttcaaagtacgttcctttaagaaccacagattggagtaatctttagcggacggtgatatatagatacacagcaaaggtctttacttttgatgttgcatagcgggtggcagtaaagtattttgttgctccagaggctattgtttgttgtaatcatagttagctgtaacacgagtgtatagttcaacgtttctcccttcaaaacactgtccatagccagctgcatagtacatttgtaagttttagaatacagatcaaatgattcaattcgcttcttatttgctcaaccactcctacggttgcatgtgctgtgatcat

SEQ ID NO: 43696 - DNA, 2293 bp, Zea Mays
gaacgcccagggctagctctatctccctcccgagatctcctcccttcccccccttcttctctcccttgccgacgattacgccaggtgcccaggtcttcttcgggccgaggtcgctgccgccatacacttggtgcccaggtcttctccgggcccttcgccagcgtcgagcagcaccaggctgagctccacagtggttcttggagaggtctgtgatagactactaggctgaatacctcatggaatcttggagagaaaaggggatcttggagaggtttgtgacacactactgtggtgaatagacctatgcagaagagaaaaagggaaagagagaatgttctcaatgaattgaagtccctatgtcaaaaacaagagcaaggagctgttgtacaagtggcttgtggaaggagcatatcatatatttgtaggagataactttacacttgattcatgggcgactggattataggggcgttgataaacatcgtggggagtgttggcataaactttggtaccaaccttctgaagttgggccatgatcagagagaaaagctttccttaattaacaacagcgagggaaatgaaaaattcgttccaaagtctgtaatgcatttccagacttggagaataggtaaccctgtctgctagaatttatttactaattttagagtcttttaatcaagaccaactttaatgctacatctgcattcaggtatacttttttttgctgctgggaactgcctcaacttcatgtcatttgcttatgctgcacagctcttggatcaatccagtttgtgtccaacattgcttttgcctactttgttttgaacaagactatttcagtgaaagtcatggtagccacaacatttatagtctttggcaacatcttcttagtatcctttggcaaccatcaatcacctgtttacacgccggagcagctgatagcaaaatacagcaatttggtgtttgttctttattgcatgtcattggtctttgttgttgcatttaaccactatctctacaggagtggagaaactattatttcaaatagttcaaaaaatgctggcacatattggcgaacaatgttgccattttcttatgctgttgtatctggtgctattgggtcttgctcagtcttgtttgcaaagtcattgtctaacatgatgaggctgactatgaacagcagatacgagtttcatagctggttcacatactcaattgttcttctgtttctgtgtaccgctggattttggatgggaagattgaatgaagggttgtcattatttgatgcaatactgattgttccaatgtttcaaattgcttggaccttcttctctatctgtacaggatttgtttactttcaagaatatcaagtatttgatacgctcaggataattatggttgtattgggcatgacatttgtctttgttgggatctccttgctagcacccgatgacactaaaggtttgtaaaaggttgattttcatgtgctttcacacagaagattttgactcttggacaattgtcaccagctgatacgaaagatggttcgagcactgccgaggaatctataattgatatggacaggttctattccacgaaattgtagaaaatttcatgttttgctctgatgcattctttgttcagtatcacattcagtgttgtgatatgtaacttggacactgcagaaatggaaagatgcagatggaggagacagacacagatgatagcaactcgtttgtcacttctgtaaaagcaaaagcaaaacgtgtactgttgaaggcaaaggtcattggctttctttctggatctgattccaccattgatctgtcacaaatctgcctctcacctgatcttgtttgcagtctgcatgctccatgtcccttggccttggggaggacacaataagcgcttcgtccgtgcttgccatgcctatggtctcatcaagaacaaccggcttcagaggaattgaagatgaccgttcaaagtacgttcctttaagaaccacagattggagtaatctttagcggacggtgatatatagatacacagcaaaggtctttacttttgatgttgcatagcgggtggcagtaaagtattttgttgctccagaggctattgtttgttgtaatcatagttagctgtaacacgagtgtatagttcaacgtttctcccttcaaaacactgtccatagccagctgcatagtacatttgtaagttttagaatacagatcaaatgattcaattcgcttcttatttgctcaaccactcctacggttgcatgtgctgtgatcat

SEQ ID NO: 43697 - DNA, 2303 bp, Zea Mays
gaacgcccagggctagctctatctccctcccgagatctcctcccttcccccccttcttctctcccttgccgacgattacgccaggtgcccaggtcttcttcgggccgaggtcgctgccgccatacacttggtgcccaggtcttctccgggcccttcgccagcgtcgagcagcaccaggctgagctccacagtggttcttggagaggtctgtgatagactactaggctgaatacctcatggaatcttggagagaaaaggggatcttggagaggtttgtgacacactactgtggtgaatagacctatgcagaagagaaaaagggaaagagagaatgttctcaatgaattgaagtccctatgtcaaaaacaagagcaaggagctgttgtacaagtggcttgtggaaggagcatatcatatatttgtaggagataactttacacttgattcatgggcgactggattataggggcgttgataaacatcgtggggagtgttggcataaactttggtaccaaccttctgaagttgggccatgatcagagagaaaagctttccttaattaacaacagcgagggaaatgaaaaattcgttccaaagtctgtaatgcatttccagacttggagaataggttcttttcgttgtcctcgagacctcaaaagaaaaattagtttaacatgtaggatgtaatataatatgggaaactcatgaatggttgtgtaaacatgtaaagaataaaactctcatggagactgtatttgcgccctgtatttgcgccctgtttttttccattagttcttgggggtaaaaagataagagcttatcagtcatacagtttccatctctccttgtttcttagagctaataatgccatccaatcatattttcttttctctttctagcccagtgttttggtttgaacattgattatttacttgctatattacagtcactacttgcagctcttggatcaatccagtttgtgtccaacattgcttttgcctactttgttttgaacaagactatttcagtgaaagtcatggtagccacaacatttatagtctttggcaacatcttcttagtatcctttggcaaccatcaatcacctgtttacacgccggagcagctgatagcaaaatacagcaatttggtgtttgttctttattgcatgtcattggtctttgttgttgcatttaaccactatctctacaggagtggagaaactattatttcaaatagttcaaaaaatgctggcacatattggcgaacaatgttgccattttcttatgctgttgtatctggtgctattgggtcttgctcagtcttgtttgcaaagtcattgtctaacatgatgaggctgactatgaacagcagatacgagtttcatagctggttcacatactcaattgttcttctgtttctgtgtaccgctggattttggatgggaagattgaatgaagggttgtcattatttgatgcaatactgattgttccaatgtttcaaattgcttggaccttcttctctatctgtacaggatttgtttactttcaagaatatcaagtatttgatacgctcaggataattatggttgtattgggcatgacatttgtctttgttgggatctccttgctagcacccgatgacactaaaggtttgtaaaaggttgattttcatgtgctttcacacagaagattttgactcttggacaattgtcaccagctgatacgaaagatggttcgagcactgccgaggaatctataattgatatggacagaaatggaaagatgcagatggaggagacagacacagatgatagcaactcgtttgtcacttctgtaaaagcaaaagcaaaacgtgtactgttgaaggcaaagtctgcatgctccatgtcccttggccttggggaggacacaataagcgcttcgtccgtgcttgccatgcctatggtctcatcaagaacaaccggcttcagaggaattgaagatgaccgttcaaagtacgttcctttaagaaccacagattggagtaatctttagcggacggtgatatatagatacacagcaaaggtctttacttttgatgttgcatagcgggtggcagtaaagtattttgttgctccagaggctattgtttgttgtaatcatagttagctgtaacacgagtgtatagttcaacgtttctcccttcaaaacactgtccatagccagctgcatagtacatttgtaagttttagaatacagatcaaatgattcaattcgcttcttatttgctcaaccactcctacggttgcatgtgctgtgatcat

SEQ ID NO: 43698 - DNA, 966 bp, Zea Mays
gtgcactgtgacgagtcttctatataatccatataccttgaatccttgatggggctgatggcagataaaaacataggttttgtgaaaataaaatggggggaggaacctttccctatgggtacaaacatccgagccaggtctgggagatcccggacttcctctggtgaagaaaatcaccatgatatccagacagtcttgaccaacggtgacacttcttccaatggagctgacacttcaggtcccaccaaggacactgagtagctgaactgcagcttgctgcgttgctgaccacaaaggcccaaactataactttttgcaaacccattttcagttctttcccccctttcccattttggttctgttttgtaaagtctcccgatctgtatttattgacttccacgatgcgggtcaccgaagacttaggttgctgcaaaattttgtccctgacgggaagctatatgcaagagggtggtactggctatgtgcttgttaacctgaaggccgagaaaggtgaaaagcgcagggagagcctccagattttggtcgctgtaagaattaaccccatgttgtacagcaggtcccagtaacttgtagtgatgggagagtggagtcattttcatcagtttttagtggtggttgtgtggagaggaagagtcttgcctgcgttttcttttggaaccttctcttgtgcctttacatttttttagtcgagggttcctcttaaattgtgtgcagagggggctcaattttgttaaccggaacaaggcgcatgtgcgtcttggatcaaccccggtcttgtcttcaggcactgttaccttatttatcaaacatatgtacacctccatctatatatagtatgagttttgatgcctatctattttgtggctgtcgtctcacaaggttatttatctatatatagtgtgagtaattcttgttcaaatcctttctccttactataaatatttg

SEQ ID NO: 43699 - DNA, 4025 bp, Zea Mays
gttgctgttcccctgcgaggcccgcgtctccccttcgtctcaacacccaccgcctcctcgccggagccagtaagcttccggcgaagaaatccggcgggcacatcacaagggggccgagcagggggacctaggcgagcgccggaatgggggccagcgcccgggggctcgccgtcgtcgtggctctagggttagataggtgtccgtagcttttttcttcgctcgccctcccccacgcggccagggtgtgcagccccggcgtcgcattgggtcccgggacgaccgtaaggccgcgtgatccacccgtgctcgagctcggacagggtcccggttgcgtggcatgggggcatctcttccgcctgctcccgctgcctgcgagtttggcaccgtttttgagctctgaagaggaggaggtggtggcagcaggcaccgatctgaggctggtgggtttttggaagcaggagtcgttgcatcacattgggagcaagtcagttgcatcttctccaattgaaaagccccaacccattggtacaaaaacaatgggtcgggtagatccacaaccatacaagccgagaggccagaagtctgcatttagccttgaacacaaaacttttggtcaagagaggcatgttaacatgccaccatctctgtggagagctgatcaagacccttatgttcaatctgattcatctttatttcccgatggaaggagtactaatccatatgaggcctacaacgagaatgggcttttctcaagctccctgtcagaaatttttgacagaaaattgggactgagatcaaatgatgtgcttctacatcaaccacttgaaaaggttgaaccaactcatgtagatgatgagccctttgagttaacagaggaaatcgaggctcaaataataggaaacatacttcctgatgatgatgatctactatcaggtgttgatgttgggtacacagcccatgctagcaatggtgatgatgttgatgatgatatattttacactggaggtgggatggaactggagaccgttgaaaataaaaaaagtacagaacctaacagtggagctaatgatggtcttgggtcgctaaatggcacaatgaatggtcaacatccatatggggaacacccttcaagaactcttttcgtccagaacattaatagcaatgttgaggattctgaattaaaggtcctatttgagcattatggagaaatcagcaacctttacactgcctgcaaacatcgcggttttgtaatgatatcttactatgacataaggtcatcatggaatgccatgagggcacttcaaaacaagccactaagacatagaaaacttgacatacattactccattccgaaggataatccttcggggaaggatattaaccaggggatgcttgttgtatttaatgttgacccgtctgtaacaaacaatgatatccataagatatttagtgactatggtgaaataaaagagattcgtgatgcaccgcaaaagggccatcacaaagttatagaattttacgatgtcagagcagctgaaggtgcagttcgtgctttaaacaggagtgatcttgctggcaagaaaataaatttggggactgttggtctgagtggtgttagacgattaacacagcacatgtccaaagagtcggggcaagaagaatttggtgtatgcaaactgggcagtctaagcacaaatagccctccattgccttcattgggttcatcttatatggtagccatgacatcttctggccgtgaaaatgggagtattcatggtttgcattctggactgctcacatcaatgagcccgttcagagaggcttcttttccgggcctatcatctaccataccacagagcctgtcctctcccattggaattgcatctgctacaactcatagtaatcaggctccccttggtgagctcagccactcacttagtcggatgaatgggcatatgaattatggttttcaaggcttgggtgctcttcatccccattctcttcctgaagttcacgatggagcaaataatggcaccccgtacaatctaaacaccatggtaccaattggtgtgaatagcaactcaagaacagccgaagcagttgactgcagacatcttcataaagtgggttctagcaacctcaatggacattcatttgatcgtgtcggtgaaggagctatgggattttcaagaagtggaagtggtcctgtccatggtcaccagctaatgtggaataattcaaataacttacaacgtcatcccaattcccctgtgctgtggcaaaatccaggatcatttgtaaataatgtaccgtctcgctccccagcacaaatgcatggagttccaagagcaccatcacacatgattgagaatgtccttccaatgcatcatcatcatgtgggctctgcgccagcaatcaatccatcactttgggacaggcggcatggctatgcaggggaattgacagaagcatcaagttttcatcttggcagtgttgggagcttgggatttcctggtagccctcagcttcatggcctggagctaaataacatattttctcacactggtgggaatcgcatggatccaaccgtgtcttcggctcagatcagcgcaccatctcctcaacagagaggtcctatgttccatggaaggaatcctatggttccccttccatcatttgattcacctggtgagcggataagaagcatgagaaatgactcaggtgctaaccagtctgataataaacggcagtacgagcttgatgttgaccgcataatgcgaggggtagactcacgaactacactgatgataaagaatatcccaaataagtatacctccaagatgctcttggctgctattgatgaaagtcataagggcacttatgactttatttacttgccaattgattttaagaataaatgtaatgttggctatgctttcatcaacatgaccaatgctcagcatatcattccattttatcagacttttaatggtaaaaagtgggagaagtttaacagtgagaaggtggcatcacttgcttatgctagaatccaagggaaaacagctctgattgctcatttccagaactctagtttgatgaatgaggacaaacgttgccgccccatactcttccactcagatggtcctaatgcaggagatcaggaacctttccctatgggtacaaacatccgagccaggtctgggagatcccggacttcctctggtgaagaaaatcaccatgatatccagacagtcttgaccaacggtgacacttcttccaatggagctgacacttcaggtcccaccaaggacactgagtagctgaactgcagcttgctgcgttgctgaccacaaaggcccaaactataactttttgcaaacccattttcagttctttcccccctttcccattttggttctgttttgtaaagtctcccgatctgtatttattgacttccacgatgcgggtcaccgaagacttaggttgctgcaaaattttgtccctgacgggaagctatatgcaagagggtggtactggctatgtgcttgttaacctgaaggccgagaaaggtgaaaagcgcagggagagcctccagattttggtcgctgtaagaattaaccccatgttgtacagcaggtcccagtaacttgtagtgatgggagagtggagtcattttcatcagtttttagtggtggttgtgtggagaggaagagtcttgcctgcgttttcttttggaaccttctcttgtgcctttacatttttttagtcgagggttcctcttaaattgtgtgcagagggggctcaattttgttaaccggaacaaggcgcatgtgcgtcttggatcaaccccggtcttgtcttcaggcactgttaccttatttatcaaacatatgtacacctccatctatatatagtatgagttttgatgcctatctattttgtggctgtcgtctcacaaggttatttatctatatatagtgtgagtaattcttgttcaaatcctttctccttactataaatatttg

SEQ ID NO: 43700 - DNA, 4124 bp, Zea Mays
ggtagttgctgttcccctgcgaggcccgcgtctccccttcgtctcaacacccaccgcctcctcgccggagccagtaagcttccggcgaagaaatccggcgggcacatcacaagggggccgagcagggggacctaggcgagcgccggaatgggggccagcgcccgggggctcgccgtcgtcgtggctctagggttagataggtgtccgtagcttttttcttcgctcgccctcccccacgcggccagggtgtgcagccccggcgtcgcattgggtcccgggacgaccgtaaggccgcgtgatccacccgtgctcgagctcggacagggtcccggttgcgtggcatgggggcatctcttccgcctgctcccgctgcctgcgagtttggcaccgtttttgagctctgaagaggaggaggtggtggcagcaggcaccgatctggatgccatttcaagtcatggatccgaggcaccacctctcccagttcaccaatacaaccgtagctgcgtcctccttctctgaggagcagcttcgccttcccacagagaggctggtgggtttttggaagcaggagtcgttgcatcacattgggagcaagtcagttgcatcttctccaattgaaaagccccaacccattggtacaaaaacaatgggtcgggtagatccacaaccatacaagccgagaggccagaagtctgcatttagccttgaacacaaaacttttggtcaagagaggcatgttaacatgccaccatctctgtggagagctgatcaagacccttatgttcaatctgattcatctttatttcccgatggaaggagtactaatccatatgaggcctacaacgagaatgggcttttctcaagctccctgtcagaaatttttgacagaaaattgggactgagatcaaatgatgtgcttctacatcaaccacttgaaaaggttgaaccaactcatgtagatgatgagccctttgagttaacagaggaaatcgaggctcaaataataggaaacatacttcctgatgatgatgatctactatcaggtgttgatgttgggtacacagcccatgctagcaatggtgatgatgttgatgatgatatattttacactggaggtgggatggaactggagaccgttgaaaataaaaaaagtacagaacctaacagtggagctaatgatggtcttgggtcgctaaatggcacaatgaatggtcaacatccatatggggaacacccttcaagaactcttttcgtccagaacattaatagcaatgttgaggattctgaattaaaggtcctatttgagcattatggagaaatcagcaacctttacactgcctgcaaacatcgcggttttgtaatgatatcttactatgacataaggtcatcatggaatgccatgagggcacttcaaaacaagccactaagacatagaaaacttgacatacattactccattccgaaggataatccttcggggaaggatattaaccaggggatgcttgttgtatttaatgttgacccgtctgtaacaaacaatgatatccataagatatttagtgactatggtgaaataaaagagattcgtgatgcaccgcaaaagggccatcacaaagttatagaattttacgatgtcagagcagctgaaggtgcagttcgtgctttaaacaggagtgatcttgctggcaagaaaataaatttggggactgttggtctgagtggtgttagacgattaacacagcacatgtccaaagagtcggggcaagaagaatttggtgtatgcaaactgggcagtctaagcacaaatagccctccattgccttcattggatggtagccatgacatcttctggccgtgaaaatgggagtattcatggtttgcattctggactgctcacatcaatgagcccgttcagagaggcttcttttccgggcctatcatctaccataccacagagcctgtcctctcccattggaattgcatctgctacaactcatagtaatcaggctccccttggtgagctcagccactcacttagtcggatgaatgggcatatgaattatggttttcaaggcttgggtgctcttcatccccattctcttcctgaagttcacgatggagcaaataatggcaccccgtacaatctaaacaccatggtaccaattggtgtgaatagcaactcaagaacagccgaagcagttgactgcagacatcttcataaagtgggttctagcaacctcaatggacattcatttgatcgtgtcggtgaaggagctatgggattttcaagaagtggaagtggtcctgtccatggtcaccagctaatgtggaataattcaaataacttacaacgtcatcccaattcccctgtgctgtggcaaaatccaggatcatttgtaaataatgtaccgtctcgctccccagcacaaatgcatggagttccaagagcaccatcacacatgattgagaatgtccttccaatgcatcatcatcatgtgggctctgcgccagcaatcaatccatcactttgggacaggcggcatggctatgcaggggaattgacagaagcatcaagttttcatcttggcagtgttgggagcttgggatttcctggtagccctcagcttcatggcctggagctaaataacatattttctcacactggtgggaatcgcatggatccaaccgtgtcttcggctcagatcagcgcaccatctcctcaacagagaggtcctatgttccatggaaggaatcctatggttccccttccatcatttgattcacctggtgagcggataagaagcatgagaaatgactcaggtgctaaccagtctgataataaacggcagtacgagcttgatgttgaccgcataatgcgaggggtagactcacgaactacactgatgataaagaatatcccaaataagtatacctccaagatgctcttggctgctattgatgaaagtcataagggcacttatgactttatttacttgccaattgattttaagaataaatgtaatgttggctatgctttcatcaacatgaccaatgctcagcatatcattccattttatcagacttttaatggtaaaaagtgggagaagtttaacagtgagaaggtggcatcacttgcttatgctagaatccaagggaaaacagctctgattgctcatttccagaactctagtttgatgaatgaggacaaacgttgccgccccatactcttccactcagatggtcctaatgcaggagatcaggaacctttccctatgggtacaaacatccgagccaggtctgggagatcccggacttcctctggtgaagaaaatcaccatgatatccagacagtcttgaccaacggtgacacttcttccaatggagctgacacttcaggtcccaccaaggacactgagtagctgaactgcagcttgctgcgttgctgaccacaaaggcccaaactataactttttgcaaacccattttcagttctttcccccctttcccattttggttctgttttgtaaagtctcccgatctgtatttattgacttccacgatgcgggtcaccgaagacttaggttgctgcaaaattttgtccctgacgggaagctatatgcaagagggtggtactggctatgtgcttgttaacctgaaggccgagaaaggtgaaaagcgcagggagagcctccagattttggtcgctgtaagaattaaccccatgttgtacagcaggtcccagtaacttgtagtgatgggagagtggagtcattttcatcagtttttagtggtggttgtgtggagaggaagagtcttgcctgcgttttcttttggaaccttctcttgtgcctttacatttttttagtcgagggttcctcttaaattgtgtgcagagggggctcaattttgttaaccggaacaaggcgcatgtgcgtcttggatcaaccccggtcttgtcttcaggcactgttaccttatttatcaaacatatgtacacctccatctatatatagtatgagttttgatgcctatctattttgtggctgtcgtctcacaaggttatttatctatatatagtgtgagtaattcttgttcaaatcctttctccttactataaatatttg

SEQ ID NO: 43701 - DNA, 4391 bp, Zea Mays
tgaacccaccgcacaccaatgcaccgctctcttccgtcgatcccactgcagtactggtcccacccctgtatcaagtcactgacaagacagcccgcctagagtgggccacatctcgtcagtttcaggtggtatgaacaagccccaggacagccgcgcgcgccgcggtcccgtgctccgcggtggcagtcaccgggcgtaaccgcagggtacggtataaagggcgtgccgcccgtctcttgccgcccgcatttgggtaggtagttgctgttcccctgcgaggcccgcgtctccccttcgtctcaacacccaccgcctcctcgccggagccagtaagcttccggcgaagaaatccggcgggcacatcacaagggggccgagcagggggacctaggcgagcgccggaatgggggccagcgcccgggggctcgccgtcgtcgtggctctagggttagataggtgtccgtagcttttttcttcgctcgccctcccccacgcggccagggtgtgcagccccggcgtcgcattgggtcccgggacgaccgtaaggccgcgtgatccacccgtgctcgagctcggacagggtcccggttgcgtggcatgggggcatctcttccgcctgctcccgctgcctgcgagtttggcaccgtttttgagctctgaagaggaggaggtggtggcagcaggcaccgatctggatgccatttcaagtcatggatccgaggcaccacctctcccagttcaccaatacaaccgtagctgcgtcctccttctctgaggagcagcttcgccttcccacagagaggctggtgggtttttggaagcaggagtcgttgcatcacattgggagcaagtcagttgcatcttctccaattgaaaagccccaacccattggtacaaaaacaatgggtcgggtagatccacaaccatacaagccgagaggccagaagtctgcatttagccttgaacacaaaacttttggtcaagagaggcatgttaacatgccaccatctctgtggagagctgatcaagacccttatgttcaatctgattcatctttatttcccgatggaaggagtactaatccatatgaggcctacaacgagaatgggcttttctcaagctccctgtcagaaatttttgacagaaaattgggactgagatcaaatgatgtgcttctacatcaaccacttgaaaaggttgaaccaactcatgtagatgatgagccctttgagttaacagaggaaatcgaggctcaaataataggaaacatacttcctgatgatgatgatctactatcaggtgttgatgttgggtacacagcccatgctagcaatggtgatgatgttgatgatgatatattttacactggaggtgggatggaactggagaccgttgaaaataaaaaaagtacagaacctaacagtggagctaatgatggtcttgggtcgctaaatggcacaatgaatggtcaacatccatatggggaacacccttcaagaactcttttcgtccagaacattaatagcaatgttgaggattctgaattaaaggtcctatttgagcattatggagaaatcagcaacctttacactgcctgcaaacatcgcggttttgtaatgatatcttactatgacataaggtcatcatggaatgccatgagggcacttcaaaacaagccactaagacatagaaaacttgacatacattactccattccgaaggataatccttcggggaaggatattaaccaggggatgcttgttgtatttaatgttgacccgtctgtaacaaacaatgatatccataagatatttagtgactatggtgaaataaaagagattcgtgatgcaccgcaaaagggccatcacaaagttatagaattttacgatgtcagagcagctgaaggtgcagttcgtgctttaaacaggagtgatcttgctggcaagaaaataaatttggggactgttggtctgagtggtgttagacgattaacacagcacatgtccaaagagtcggggcaagaagaatttggtgtatgcaaactgggcagtctaagcacaaatagccctccattgccttcattgggttcatcttatatggtagccatgacatcttctggccgtgaaaatgggagtattcatggtttgcattctggactgctcacatcaatgagcccgttcagagaggcttcttttccgggcctatcatctaccataccacagagcctgtcctctcccattggaattgcatctgctacaactcatagtaatcaggctccccttggtgagctcagccactcacttagtcggatgaatgggcatatgaattatggttttcaaggcttgggtgctcttcatccccattctcttcctgaagttcacgatggagcaaataatggcaccccgtacaatctaaacaccatggtaccaattggtgtgaatagcaactcaagaacagccgaagcagttgactgcagacatcttcataaagtgggttctagcaacctcaatggacattcatttgatcgtgtcggtgaaggagctatgggattttcaagaagtggaagtggtcctgtccatggtcaccagctaatgtggaataattcaaataacttacaacgtcatcccaattcccctgtgctgtggcaaaatccaggatcatttgtaaataatgtaccgtctcgctccccagcacaaatgcatggagttccaagagcaccatcacacatgattgagaatgtccttccaatgcatcatcatcatgtgggctctgcgccagcaatcaatccatcactttgggacaggcggcatggctatgcaggggaattgacagaagcatcaagttttcatcttggcagtgttgggagcttgggatttcctggtagccctcagcttcatggcctggagctaaataacatattttctcacactggtgggaatcgcatggatccaaccgtgtcttcggctcagatcagcgcaccatctcctcaacagagaggtcctatgttccatggaaggaatcctatggttccccttccatcatttgattcacctggtgagcggataagaagcatgagaaatgactcaggtgctaaccagtctgataataaacggcagtacgagcttgatgttgaccgcataatgcgaggggtagactcacgaactacactgatgataaagaatatcccaaataagtatacctccaagatgctcttggctgctattgatgaaagtcataagggcacttatgactttatttacttgccaattgattttaagaataaatgtaatgttggctatgctttcatcaacatgaccaatgctcagcatatcattccattttatcagacttttaatggtaaaaagtgggagaagtttaacagtgagaaggtggcatcacttgcttatgctagaatccaagggaaaacagctctgattgctcatttccagaactctagtttgatgaatgaggacaaacgttgccgccccatactcttccactcagatggtcctaatgcaggagatcaggaacctttccctatgggtacaaacatccgagccaggtctgggagatcccggacttcctctggtgaagaaaatcaccatgatatccagacagtcttgaccaacggtgacacttcttccaatggagctgacacttcaggtcccaccaaggacactgagtagctgaactgcagcttgctgcgttgctgaccacaaaggcccaaactataactttttgcaaacccattttcagttctttcccccctttcccattttggttctgttttgtaaagtctcccgatctgtatttattgacttccacgatgcgggtcaccgaagacttaggttgctgcaaaattttgtccctgacgggaagctatatgcaagagggtggtactggctatgtgcttgttaacctgaaggccgagaaaggtgaaaagcgcagggagagcctccagattttggtcgctgtaagaattaaccccatgttgtacagcaggtcccagtaacttgtagtgatgggagagtggagtcattttcatcagtttttagtggtggttgtgtggagaggaagagtcttgcctgcgttttcttttggaaccttctcttgtgcctttacatttttttagtcgagggttcctcttaaattgtgtgcagagggggctcaattttgttaaccggaacaaggcgcatgtgcgtcttggatcaaccccggtcttgtcttcaggcactgttaccttatttatcaaacatatgtacacctccatctatatatagtatgagttttgatgcctatctattttgtggctgtcgtctcacaaggttatttatctatatatagtgtgagtaattcttgttcaaatcctttctccttactataaatatttg

SEQ ID NO: 43702 - DNA, 3517 bp, Zea Mays
cccgtctcttgccgcccgcatttgggtaggtagttgctgttcccctgcgaggcccgcgtctccccttcgtctcaacacccaccgcctcctcgccggagccagtaagcttccggcgaagaaatccggcgggcacatcacaagggggccgagcagggggacctaggcgagcgccggaatgggggccagcgcccgggggctcgccgtcgtcgtggctctagggttagataggtgtccgtagcttttttcttcgctcgccctcccccacgcggccagggtgtgcagccccggcgtcgcattgggtcccgggacgaccgtaaggccgcgtgatccacccgtgctcgagctcggacagggtcccggttgcgtggcatgggggcatctcttccgcctgctcccgctgcctgcgagtttggcaccgtttttgagctctgaagaggaggaggtggtggcagcaggcaccgatctggatgccatttcaagtcatggatccgaggcaccacctctcccagttcaccaatacaaccgtagctgcgtcctccttctctgaggagcagcttcgccttcccacagagaggctggtgggtttttggaagcaggagtcgttgcatcacattgggagcaagtcagttgcatcttctccaattgaaaagccccaacccattggtacaaaaacaatgggtcgggtagatccacaaccatacaagccgagaggccagaagtctgcatttagccttgaacacaaaacttttggtcaagagaggcatgttaacatgccaccatctctgtggagagctgatcaagacccttatgttcaatctgattcatctttatttcccgatggaaggagtactaatccatatgaggcctacaacgagaatgggcttttctcaagctccctgtcagaaatttttgacagaaaattgggactgagatcaaatgatgtgcttctacatcaaccacttgaaaaggttgaaccaactcatgtagatgatgagccctttgagttaacagaggaaatcgaggctcaaataataggaaacatacttcctgatgatgatgatctactatcaggtgttgatgttgggtacacagcccatgctagcaatggtgatgatgttgatgatgatatattttacactggaggtgggatggaactggagaccgttgaaaataaaaaaagtacagaacctaacagtggagctaatgatggtcttgggtcgctaaatggcacaatgaatggtcaacatccatatggggaacacccttcaagaactcttttcgtccagaacattaatagcaatgttgaggattctgaattaaaggtcctatttgagcattatggagaaatcagcaacctttacactgcctgcaaacatcgcggttttgtaatgatatcttactatgacataaggtcatcatggaatgccatgagggcacttcaaaacaagccactaagacatagaaaacttgacatacattactccattccgaaggataatccttcggggaaggatattaaccaggggatgcttgttgtatttaatgttgacccgtctgtaacaaacaatgatatccataagatatttagtgactatggtgaaataaaagagattcgtgatgcaccgcaaaagggccatcacaaagttatagaattttacgatgtcagagcagctgaaggtgcagttcgtgctttaaacaggagtgatcttgctggcaagaaaataaatttggggactgttggtctgagtggtgttagacgattaacacagcacatgtccaaagagtcggggcaagaagaatttggtgtatgcaaactgggcagtctaagcacaaatagccctccattgccttcattgggttcatcttatatggtagccatgacatcttctggccgtgaaaatgggagtattcatggtttgcattctggactgctcacatcaatgagcccgttcagagaggcttcttttccgggcctatcatctaccataccacagagcctgtcctctcccattggaattgcatctgctacaactcatagtaatcaggctccccttggtgagctcagccactcacttagtcggatgaatgggcatatgaattatggttttcaaggcttgggtgctcttcatccccattctcttcctgaagttcacgatggagcaaataatggcaccccgtacaatctaaacaccatggtaccaattggtgtgaatagcaactcaagaacagccgaagcagttgactgcagacatcttcataaagtgggttctagcaacctcaatggacattcatttgatcgtgtcggtgaaggagctatgggattttcaagaagtggaagtggtcctgtccatggtcaccagctaatgtggaataattcaaataacttacaacgtcatcccaattcccctgtgctgtggcaaaatccaggatcatttgtaaataatgtaccgtctcgctccccagcacaaatgcatggagttccaagagcaccatcacacatgattgagaatgtccttccaatgcatcatcatcatgtgggctctgcgccagcaatcaatccatcactttgggacaggcggcatggctatgcaggggaattgacagaagcatcaagttttcatcttggcagtgttgggagcttgggatttcctggtagccctcagcttcatggcctggagctaaataacatattttctcacactggtgggaatcgcatggatccaaccgtgtcttcggctcagatcagcgcaccatctcctcaacagagaggtcctatgttccatggaaggaatcctatggttccccttccatcatttgattcacctggtgagcggataagaagcatgagaaatgactcaggtgctaaccagtctgataataaacggcagtacgagcttgatgttgaccgcataatgcgaggggtagactcacgaactacactgatgataaagaatatcccaaataagtatacctccaagatgctcttggctgctattgatgaaagtcataagggcacttatgactttatttacttgccaattgattttaagaataaatgtaatgttggctatgctttcatcaacatgaccaatgctcagcatatcattccattttatcagacttttaatggtaaaaagtgggagaagtttaacagtgagaaggtggcatcacttgcttatgctagaatccaagggaaaacagctctgattgctcatttccagaactctagtttgatgaatgaggacaaacgttgccgccccatactcttccactcagatggtcctaatgcaggagatcagtcatattacaataagtttacaaattacaatatcgaaaagggcgtacccaatgctacggtaggctctaccgctgcactaggcctgcccttcacaaattacaatatcgaaatgagtacaaatttgatatgaaagtaatacaactttgaatgacatgaattacaattttaagttcaaaatacattgctatcttaaatgacaaaactcaggtggaagtacag

SEQ ID NO: 43703 - DNA, 1689 bp, Zea Mays
ctcttctttcattcagctcacatacaaacttagatatttttatattaaaaatagttgcgtatgagaaaccaaaaggcgggaatgacttggcggggagaaatactgaccacttagaattggctactcctatcacaagccacatgagtctgtgcctaattaaacgccattgctcctaatccccttgcttaaagtaagacaacgcaatccttcctcaccctcctctctctctctctctctctctctctctctctcggcctccgtctcgttgctttctctccgccgcctcccccacgcgcccccgcccctcccctccgctctttctttctcctaccgtcgttaactctccgttacatcaccagcctcacgccgtcacgtcaacttccgccacaaaaagcacccgcccctgcccagccccagccatgtccaccgccggcgaccccgccgtcgcagcagcagcagctgcggcagcggccaccccgtcaggtcgcgcgccgaggctgccgcggtggacgcggcaggagatactggtgctcatcgagggcaagcgcatggtggagggacgcggcgggcgcggcgcgcggggccgcgcggcggcggcggcggcttctggagaggcctcggcggtggcggcgctggagcccaagtgggccgcggtggcagagtattgccggcgccacggcctcgagcggggccccgtgcagtgccggaagcgctggagcaacctcgccggagactacaagaaggtgaaggagtgggagcgtgccgctgcggcgtcgcgcgagccgtccttctgggctatgcgcaacgacgcgcgcagggaacgccgcctcccgggcttcttcgaccgcgaggtgtacgacatactcgagggccggggccgcgcgatcgtcgacggccgctccgcccggaatgccgcggcggagcagccggcgccggtgcgcgtcgacgaggacaaggaggcggaggtgccggaggccgtatttgacagtggccgcccggctacggaggaggccttgttctcggaggatgaggaggaggaagaagaggacgcaccgccggtggccccacctccccctccaccaccagtcatcgccgtgcctgtatctgcccgaggcatcaaggcaacaacagagtgctgagcaaggcacatcgaaagacacacagcctgagcaaagctccgagagggatgcaccggctcagcagggaggtcaaaagagaccgcggaccgtcgaaggcgctggagaaggcacggcagaccttgagagcaagctggtcgagatccttgaccggaacagccggttggtggctgcacagttggaggcgcagaaccagaactgcgagcttgacagagagcagaggaaagaccaagctaacagcctagttgtcgtgctcggcaggctggccgatgcccttggcaggatcgccgataagctatagtcagtcacctaggtgtatatgttgacagaaataattacagcgggaaatgtaagtgaatgtacagattggtatagggctattggcattcgattctttttcttttttttggtattgggagcggtgttatatactagcactcaaatgatgtggggactagcagaattcagttgtgggtggattctggggctgtgttatatagggaggcgagtaattattctcagcaatgcaattgtgtatagttgagccttttgt

SEQ ID NO: 43704 - DNA, 1697 bp, Zea Mays
ctcagattcactacattgattaacgaatacgaatccgggtttttcgtcgattacatgttaaataccgtactaatattaaattactcgaaactaataacccaagcaaactacatagaacgtaataactactataaagcaagggatcagcaacatgtacgactaccgatcaaatcaccgtaaacaactcaggtagtctaataaatatcatatctagtcgactgaaataacgaatccacttaccgtccattaaatccgacttaaacccacaaaattgacgacttgttcgagctttttgttgagcacttggtgaatatcacgctgctagcttcgtcttcacccaacacttgagatttcttgacgacgcacggaacgacgacgaccttcgattgaagtctacagcgagcgggcgaggacacgaatacagtaaggactctggcgacgatgaagtcacgagcaagggaggacgggttcaacagctcgacgacaaacgcgagcacacgcgaagcctgatggacgaagagcaagtgcgccgtggggcgagcagcacagatgagttgggctgagaccagaggacgataacgaactttaccgacgaagtccagcaaataccatggcgggttggagactggatctaacagcggcgttgtaccatggcaggctagagatggcatagggggtcatgggcatggtagagcaggatgaggtgccacagtagcttgacacaacgatcctctcacagtctagcatgggccccatatcgaatcaccaagcagagcaccagggcgacagcgaggtgggtcgacagagcgacacgacggaaatgaaagttgtgcactgctcgctgggaattgaacgcgagttggaacctgggcacgtgcgcacacaggagcagcgacgaccgagtgccagagagccgagcagggcgcgcgcagggaagaacggatcgcgcgcgcaggggcgagctgaagcaggagcaccgagcagaggaggaaaaagcacggcgcacagagacttcacagcgcaggggcgagccaggcgcggcaacaggatgggcgcgcgtcaggaactcgacgcggcggccacggcggacacggcccggcaaagcgatggccagggccattgcgagggagctctgagcagagggagaccgacggtcaggccaagcagggagaaagcgcgtggctgggctggagcaggaacgcgacggaatgttgcgcgcggggaaggaggcctcggtacggcggccatggaagcaagctgcacggctgggagcgtgcagggatccggaggaagatggggcaggggcaccatggccagcagggagatggaggaggggccgttggggaagaacctcggctggctgggcgaacgcgccaaggagcctcggatcaagacgcagggagcagggcatagaaactggagagagatgggggagggagagaggaaaccacgaccatggactaggaaataggagggcgccgagcaccagagagatggggcacgccggccatggaacaggggcaagttcaccggcgtccatggccagggcgacgatggagagcaggacggccggcaggagagtgaggtggcggtggcatccaccgtggctgagggcgagctacaggacgggcggaggtggcctggtggaaaagatgacagctagagaggggagctctctgtttgtttccagggagcgc

SEQ ID NO: 43705 - DNA, 1025 bp, Zea Mays
cagcctcttgccatggagggcacacgctactctcgccatctctccactgacattgcgtgttgtcttattctggtattagtctgcccgaggcaaagcttacccatgatgaggcgtgtgaccagttaaaaggtcctcgatcatcaagcctacatcgagacggtccttaatcgactcagacggagacactacaccgagactcccttctcgtgcaagtcaaccgcccggtctcagctttatcatttcaaacccaaagtctggtacctggcagaggtacatcttttctgatgttgaacccatcatggtcgtgatggatccaccatcaagttttattttcgaaaacatcccacccattgaagcatcacttttgttttaaaacaaaatatttttgtttgctaaagcaaggctaagcatcataaaattcttttcaaaatgggtatcaaggaagggtaatcaattttcaaggaaggaaatgcatcaacggtttagcagacaactcctatcacctaactcatcaaacaaggtgataaatattttaaaacatcaagaggtggcaaatgcaccggggcttgcatgaataacactagattagtgtttgttaggcgaagtccacttgacgatcatcctttgtcttggtactcgttcaattatccatcttcagattcatccatcagcatcatcatgcggagtagcccgcgcttggggtcgacttggctctggttctccgtatcacgcaattaattcacgtacctgaatgaaatgcattatgcacatgaatgcatataaacaggaatagcacaaatctaatagtgctatacgatagcgcattaaacacctagtggcgaggcgttgtacaattttatatggaaacactaattaccgacgtacaactaagcgcaataatcgtgtttctctaaattaaacgaacctaacgcaaacatcacgaacaacaaaccatacactttaaacataattagcctaaacacaactcattagctacttaattaaatgctaaatttatccatcgc

SEQ ID NO: 43706 - DNA, 2668 bp, Zea Mays
aattaggtaatctagacagattataacaaacaccctccttgtcccgccccataaaaaatggttaacaaagtgaagtacgtatcccgcaccccagtctgaacacgggcaaaaccgcgtgttggacggctgccttgcccctccccgcgccgcgaatacactcgagggccagccgagcccagtgcccgagtccaccttccctgaattcctgttcgctaccttcgcttccgctccaaaaaccaaataaaaaacgcacctttccttcccttctcctccccttcgctttcccccgtcctcccttccctcgatcccctcgccggaaaagatcccattccatccacctccacgtcccggcgcaatcagagtttccggcggcaaagcaggaaggcggaagcgaaaggaatgttgcacctttaagtagcgcggcgacctggtgtttcttcctggccggcgatgggctgcttcccgtgcttcgactccccggcagatgagcagcttaaccccaaattcggtggcgccggtgggtacggcggcacgtcctctgccgtcgcggcgtacggaaacggcacaggcgccggcgtcagcatcggccggcacggggacagggggtacccggacctgcagcaggcgcccatggcggctccgcgcgtcgagaagctctcagcaggtgcgcgacgtgctccgcgctgagctacgtgttccacggtttggggtgggtgggtggactggatcccggcaaggtggttgatctcccgcgtggtggttcaaccgcaccgggcctgcctgatctgatttagtagtgctccgtgtagcttgtggccatctttgcgtgttgaattagcgtcaggttctcgataggtaaagggaaaagaagtaggaactttctattgttagttattgcaaattaggttcatttactaccttaggcctcggagagatgtaaaggttgtggggtgataaactcgtggactgatgcaaccaggacatgctattttgaatagtgattctcttttgtctgagtcggactgctgatgagcttactgaatctacctcttgtacttgtctatgtgtgcagcggctgagaaagcaagagtaaagagcaatgggctcaccaaagaggctttggtgccaaaggatgccaatggcaatgccatctcagcgcaaactttcaccttccgtgagcttgctaccgccaccaggaacttcaggcccgagtgcttcctgggagagggaggttttggacgtgtttacaagggccgccttgagagcacaggccaggtaacttttgagttcagcaggttgttgctataaagcagcttaacagggatgggcttcaaggaaacagagaatttctagtagaagttctcatgctcagcttactacatcatcaaaacctggttaatttgattggttattgtgctgatggagaccagagacttcttgtttatgaatatatgccttctggatcacttgaagatcatttgcacgatctacctcttgataaagaggccttggactggaacaccaggatgaaaattgcagcaggtgctgccaaaggactggagtaccttcatgacaaagctaatccaccagttatttatagggatttcaagtcatcgaacattctgttggatgaaagtttccacccgaagctgtctgattttggacttgctaagttgggtccagttggcgacaaatcacatgtctcaacacgtgtaatgggtacatatggttattgtgcaccagaatatgctatgacagggcagctgacagtgaagtctgacgtgtatagttttggggttgtcttgctagagttgattactggccgtagggctattgacagcaccagaccacatggagaacaaaatcttgtctcatgggcacgtcctctgtttaacgacagaagaaagctccctaagatggctgacccgaggctggaagggcgataccccatgcgtgggctttaccaagcccttgcagtggcttcgatgtgcattcagtcggaggctgcttcacgcccactgattgcagatgtcgtgactgctctgtcctacttggcatcccagccatatgatcccaacgcagctcttgcttcaaggaagccaggcggcgatcagcgaagcaagcctggcgagaacggcagggcagtttccaggaatgatgaaactggaagctccggccacaaaacacctgccaaggaccgagaggactcacccagggacctcccagcgatcctgaacaaggaccttgaccgggagcgcatggtggccgaggcgaagatgtggggcgaccgggagcgcatggtggccgaggctaagatgtggggcgaccgagagcgcatggtggctgaggcgaagatgtggggtgaaaattggcgtgacaagcggcgtgcagagattgggcaggggagcctggattcggttactgggaacagctagggggcaattaagcgaacagaaacgtgacatccacccatgcatttcgtttgtttatttccaggtccattttcgttctggcggcggtcggcaggccccagggttgtacatttctaggtcagggaagagtgggaaagcggcagcgttgtactggacagtgaatgcatgtggttgtacatgtaaattctcagaaaagttttgtgagaatgaaaggacatatttgagttccacttgta

SEQ ID NO: 43707 - DNA, 869 bp, Zea Mays
acttgcagcggaaataaattctttattacaaaatgattacaagttacatcaagatttcattatacatcatcggagtgattaaaaaatggttcaaaagaattacaatttgaagtattataaaatatttgtaactttgaaaatacatgctagcttaagtgacaatcctcaatacataagctaaggatgggatatacttatataagaaggccgagctcaccggaacttaacaacaatcacaatcaaagtgactcgtaacctgcagcaacaatgggaataaaacctaagtacgcaagtactcagcaagacttacccaactaaagaaaagactctcaagggtatgctggttttaaaaggattcaaggtaaggctaatcaagtttcaaagactcgttttggcagaaaagcttactagtagtagatccttatgccaaacttttactttatcggttaagtagtttttttgaatctagatttgcctaatctagagcattcacttgtcctggtctagctttcttttaccaaactcttattttacttattaactacgatgagtggtcgggtggtagagtctccatgaccgaggagcaacgacgattcgaaccaattatacctagctggggatccctaaccacacgacatatgtagcacttaacccttgcatatgtcaaccgttcccacagatcctccacaacgtgaaccggcccgcgctacccgggagcatggtactcctcggtccagcctctagccaagagggtacacgctactaccaccatctcccacgcccagtgcgcgattgtcttttcacgtatggaatagccaggttcaggcttaccggagaatgtggctagttacaaagtctccaccacaaca

SEQ ID NO: 43708 - DNA, 1970 bp, Zea Mays
gtcccattcccatctgaaccacacatctctgaacaaaagtaggggaggcgccccgcgtagccccctttcccacaatcccactccgtgccaggtgccaccctccccaagccctcgcgccgcctccgagacagccgcccgcaaccatggccaccgccgccaccgcggccgccgcgctcaccggcgccactaccgctacgcccaagtcgaggcgccgagcccaccacttggccacccggcgcgccctcgccgcgcccatcaggtgctcagcgttgtcacgcgccacgccgacggctcccccggccactccgctacgtccgtggggccccaacgagccccgcaagggctccgacatcctcgtcgaggctctcgagcgctgtggcgtccgtgacgtcttcgcctaccccggcggcgcatccatggagatccaccaggcactcacccgctcccccgtcatcgccaaccacctcttccgccacgaacaaggggaggccttcgccgcctccggctacgcgcgctcctcgggccgcgttggcgtctgcatcgccacctccggccccggcgccaccaacctagtctctgcgctcgcagacgcgttgctcgactccgtccccattgtcgccatcacgggacaggtgccgcgacgcatgattggcaccgacgcctttcaggagacgcccatcgtcgaggtcacccgctccatcaccaatcacaactactcttatgggccttggcaacttccccagcgacgacccactgtcactgcgcatgcttggtatgcatggcacagtgtatgcaaattatgcagtggataaggccgatctgttgcttgcatttggtgtgcggtttgatgatcgtgtgacagggaaaattgaggcttttgcaggcagagctaagattgtgcacattgatattgatcctgctgagattggcaagaacaagcagccacatgtgtccatctgtgcagatgttaagcttgctttgcagggcatgaatactcttctggaaggaagcacatcaaagaagagctttgacttcggctcatggcatgatgaattggatcagcaaaagcgggagtttccccttgggtataaaatcttcaatgaggaaatccagccacaatatgctattcaggttcttgatgagttgacgaaggggaaggccatcattgccacaggtgttgggcagcaccagatgtgggcggcacagtattacacttacaagcggccaaggcagtggctgtcttcagctggtcttggggctatgggatttggtttgccggctgctgctggtgctgctgtggccaacccaggtgtcactgttgttgacatcgacggagatggtagcttcctcatgaacattcaggagctagctatgatccgtattgagaacctcccagtcaaggtctttgtgctaaacaaccagcacctcgggatggtggtgcagtgggaggacaggttctataaggccaatagagcacacacattcttgggaaacccagagaacgaaagtgagatatatccagattttgtggcaattgccaaagggttcaacattccagcagtccgtgtgacaaagaagagcgaagtccatgcagcaatcaagaagatgcttgaggctccagggccgtacctcttggatataatcgtcccgcaccaggagcatgtgttgcctatgatccctagtggtggggctttcaaggatatgatcctggatggtgatggcaggactgtgtattgatctaaagttcagcaagcactgcctacctgcctatctttgacatgcatgagctagtacaagtgtgatatgtttttatcaatgtgatggtactctgttatggtaatcttaagtagcatccaaccctgtgtgtagtatgttgttttcgtgttggcatatgtttcagaagccatcatgtaagtgccttttactacatataaataaggtaataagcattgttatgcaccggttctgaa

SEQ ID NO: 43709 - DNA, 2123 bp, Zea Mays
taaacacaaaagcaccacaattatatattcacaaaagtatcacaattataatatcattcacaactagatcaattacagatagctagctagatcattcacaaaagctccagagatgatcagtcacaaaagcaccacagcgacatcactccagcttgaagcagttcttctcgtcttctgttttgtctaacttgtcttccttcttctcttcctgtttaagaagagaaataaagaaaccttcatatttccacatacatgcattactagactagtcaagattcgtgtatttgcatacatgcaccacaattattaaatcttgcaatggtttttttaggtgtgcatagccattacttgcatatactaactgtgtatttgcatgaagatttggtgatagataatatatttattcttatttagtcaaggtgaagctgaacaatgctatagtctagaggcaacatgaatttcattgcatcacaatacagagaccttcactggaacccaaaaaagaacatacctctccctggctgtgcaatgatgccagcaaatcgaattaaggatagatgacacaaacgttctgtcttcaaacaccttactcatatcagtgtcactggacatgtttgcatcctggacagacatttgaagagctacatataaacatcagtgtcactagaaagcagtggttcacataatcctccgatcccatggctgcgcttcaatggacccggaagaaccagtctctcacccgccgctgggcccggaagaaccagtctctcacccggaagaactccaacaaaactaaggagataaaaaaaaggactgctgctacaatggacccggaagaaccagtctctcacccgccgaatcacatcattttacagacaaaatcctccgatcccatggctgcgcttcaaaatccagccactcgaatgatttccggagagaattcgcggcaaatttgcttcgaactcagatctccttcactgctgacctgatgcttcacagtaggttacccagccaaggggctgctgctttaccggatccccatggatgaagatgattcttggcaattatgtagacttctttactgcgcgcaaaaaaactgccccagaatcattacaggtgctctggcctccgcatggaattcgcggctaatctctatccaataaataatatacaatacaaatagtagaaatggaaaatagaatcagcattttaattgaaaagagtcgttggtacttgcaagtttgcaacatttataatcaatactgcaacagaagataatagtataaattaagtaaatcttgtgattggaaactttatcagttataaagttaagcatttgaggcaggtcagggcatttttagtttcaactgatggacagtgataaactaaaaatacctttggttgttcttgcttgtcaccagcagcagccagtgcaagatgtaacgcagcacgaagcaaaaagcagagtcgtgggttaggttgggctttgtctacagcttacatgttgtcaattccaatggttaggagtacttgtttgcagtgaaaaggaaagcttttgtttatcctgggcctaaaattcaagaggaagtgaaacttctacagtctagaggaaataaattatcaagccgcacgcagaacaattggcagcagcgaccaattaatcgctccacattggctcgcgctctcccgtcgccgtgaggagacctaaacccctggggcggccacgggcggtttccttgatctgctggctcgccgcatctggcactagcgcacccctggggcgagagcttgacgacgaaggagtggagcacctcacggcggaggtgatgaggccctggacgagctcagcctcgacggcggaggaaggagtggagcacctcacggcggagcatggggatgggtgccccgggcggtagcgcgcgggagaagtcagcgacgaggttggtaggggagagcacctgcatccgggccctcggcgaggccagcgcctcggcagccgacgcgccgcggggccaccccccactacggccacgcgcagcgtgcacgctgaggatgacgaggaggtggtgagagggaagggagagatagagtcggcggcggctgggagagaagcagggagcgcg

SEQ ID NO: 43710 - DNA, 1935 bp, Zea Mays
taaacacaaaagcaccacaattatatattcacaaaagtatcacaattataatatcattcacaactagatcaattacagatagctagctagatcattcacaaaagctccagagatgatcagtcacaaaagcaccacagcgacatcactccagcttgaagcagttcttctcgtcttctgttttgtctaacttgtcttccttcttctcttcctgtttaagaagagaaataaagaaaccttcatatttccacatacatgcattactagactagtcaagattcgtgtatttgcatacatgcaccacaattattaaatcttgcaatggtttttttaggtgtgcatagccattacttgcatatactaactgtgtatttgcatgaagatttggtgatagataatatatttattcttatttagtcaaggtgaagctgaacaatgctatagtctagaggcaacatgaatttcattgcatcacaatacagagaccttcactggaacccaaaaaagaacatacctctccctggctgtgcaatgatgccagcaaatctttaatagatggatcattgggatcaacaccaggaagctgttattttacacataaaagggccaataaattattgaagctgcagctaaaatgtacctgtatgccattagtttaagaataatacataccgaattaaggatagatgacacaaacgttctgtcttcaaacaccttactcatatcagtgtcactggacatgtttgcatcctggacagacatttgaagagctacatataaacatcagtgtcactagaaagcagtggttcacataatcctccgatcccatggctgcgcttcaatggacccggaagaaccagtctctcacccgccgctgggcccggaagaaccagtctctcacccggaagaactccaacaaaactaaggagataaaaaaaaggactgctgctacaatggacccggaagaaccagtctctcacccgccgaatcacatcattttacagacaaaatcctccgatcccatggctgcgcttcaaaatccagccactcgaatgatttccggagagaattcgcggcaaatttgcttcgaactcagatctccttcactgctgacctgatgcttcacagtaggttacccagccaaggggctgctgctttaccggatccccatggatgaagatgattcttggcaattatgtagacttctttactttggttgttcttgcttgtcaccagcagcagccagtgcaagatgtaacgcagcacgaagcaaaaagcagagtcgtgggttaggttgggctttgtctacagcttacatgttgtcaattccaatggttaggagtacttgtttgcagtgaaaaggaaagcttttgtttatcctgggcctaaaattcaagaggaagtgaaacttctacagtctagaggaaataaattatcaagccgcacgcagaacaattggcagcagcgaccaattaatcgctccacattggctcgcgctctcccgtcgccgtgaggagacctaaacccctggggcggccacgggcggtttccttgatctgctggctcgccgcatctggcactagcgcacccctggggcgagagcttgacgacgaaggagtggagcacctcacggcggaggtgatgaggccctggacgagctcagcctcgacggcggaggaaggagtggagcacctcacggcggagcatggggatgggtgccccgggcggtagcgcgcgggagaagtcagcgacgaggttggtaggggagagcacctgcatccgggccctcggcgaggccagcgcctcggcagccgacgcgccgcggggccaccccccactacggccacgcgcagcgtgcacgctgaggatgacgaggaggtggtgagagggaagggagagatagagtcggcggcggctgggagagaagcagggagcgcg

SEQ ID NO: 43711 - DNA, 2042 bp, Zea Mays
tacatttaattaagcaccacaaatcacagatttttatacacgaatcataaagacatacacaattaatcagtataccacagtcatagatccatcacataaacacaaaagcaccacaattatatattcacaaaagtatcacaattataatatcattcacaactagatcaattacagatagctagctagatcattcacaaaagctccagagatgatcagtcacaaaagcaccacagcgacatcactccagcttgaagcagttcttctcgtcttctgttttgtctaacttgtcttccttcttctcttcctctccctggctgtgcaatgatgccagcaaatctttaatagatggatcattgggatcaacaccaggaagctgttattttacacataaaagggccaataaattattgaagctgcagctaaaatgtacctgtatgccattagtttaagaataatacataccgaattaaggatagatgacacaaacgttctgtcttcaaacaccttactcatatcagtgtcactggacatgtttgcatcctggacagacatttgaagagctacatataaacatcagtgtcactagaaagcagtggttcacataatcctccgatcccatggctgcgcttcaatggacccggaagaaccagtctctcacccgccgctgggcccggaagaaccagtctctcacccggaagaactccaacaaaactaaggagataaaaaaaaggactgctgctacaatggacccggaagaaccagtctctcacccgccgaatcacatcattttacagacaaaatcctccgatcccatggctgcgcttcaaaatccagccactcgaatgatttccggagagaattcgcggcaaatttgcttcgaactcagatctccttcactgctgacctgatgcttcacagtaggttacccagccaaggggctgctgctttaccggatccccatggatgaagatgattcttggcaattatgtagacttctttactgcgcgcaaaaaaactgccccagaatcattacaggtgctctggcctccgcatggaattcgcggctaatctctatccaataaataatatacaatacaaatagtagaaatggaaaatagaatcagcattttaattgaaaagagtcgttggtacttgcaagtttgcaacatttataatcaatactgcaacagaagataatagtataaattaagtaaatcttgtgattggaaactttatcagttataaagttaagcatttgaggcaggtcagggcatttttagtttcaactgatggacagtgataaactaaaaatacctttggttgttcttgcttgtcaccagcagcagccagtgcaagatgtaacgcagcacgaagcaaaaagcagagtcgtgggttaggttgggctttgtctacagcttacatgttgtcaattccaatggttaggagtacttgtttgcagtgaaaaggaaagcttttgtttatcctgggcctaaaattcaagaggaagtgaaacttctacagtctagaggaaataaattatcaagccgcacgcagaacaattggcagcagcgaccaattaatcgctccacattggctcgcgctctcccgtcgccgtgaggagacctaaacccctggggcggccacgggcggtttccttgatctgctggctcgccgcatctggcactagcgcacccctggggcgagagcttgacgacgaaggagtggagcacctcacggcggaggtgatgaggccctggacgagctcagcctcgacggcggaggaaggagtggagcacctcacggcggagcatggggatgggtgccccgggcggtagcgcgcgggagaagtcagcgacgaggttggtaggggagagcacctgcatccgggccctcggcgaggccagcgcctcggcagccgacgcgccgcggggccaccccccactacggccacgcgcagcgtgcacgctgaggatgacgaggaggtggtgagagggaagggagagatagagtcggcggcggctgggagagaagcagggagcgcg

SEQ ID NO: 43712 - DNA, 1756 bp, Zea Mays
cccctgcacgtcatgtgtttaggcttaccttgcaaggttaaaaactcgattcgaatcgtttgcttcacgtagctaatgagactgcttgatccattgtactttattgagtaataagtggaaatgaggttacatgcaaaaatatgttgcttgacttaatgtttgataccatgtgtgaatagctaggtgctcatctagtataaagcattattctagaacctaaaaagctaaaacttgacttagactcagctagtgctattggcaaaccaaacccctcagctaaacagcttcatgatcagatagaggagtaggctcctcacatcgggtaaatctagatgagtattagtatactcagccttgcttgtggcataattttataggtctcttacaagaaatgatttatggtgtgacttggccaaccaccctgccaccaggatggacggtcgagtgggatgctgcctcagcaggagaggaccaggatgagtagcttggttaggcttcgccatgctactcggttatcttcattagctatttctgctgcattaaaactatgatttacttattttaaaacatcgatgatgtattaactattggtacttctaaattattgtattatgatttattatatttctctatgccttaccttcaagtgagcaagtggtactcgatccttgtgagtggttttatcggacaagattcgacgaactgtcggtttattccgatttaagtgtgttgttgcctctgaggcaatacttgggcacttaagatggaacaatctaggcagttccgccaaaattgcattggtcgtttgctgtagtaaatgtgtctggaccgcgaagaatgcttccgacccagtaggtggaggatttgtgggattcatctgtgactctgaacttattcttgctcttttttacatatgtgtgtaggtcgatcaacacctcctcctgtcctactattctaaggtgtgaaatcctttttgtctttagaataggaaaagtaagggtagtctgagtaaagctgcaaaagatgatacaggattaaggaaagtatagaatgaatctgagtagcaaaggctaccctaacaagcaacccagcaacacctactggccagcacaccactccaggcaatgcatgtttcaagggtgctgaggtagaacattacgccaacaactgtactaagaggaatgcaaacaccactccagcacggggcagtaatcctaacaggccaaaccaacttgctactagtgggaatcaggcatcattcagaaaccatgactagcaggactatgttctttactgggttaatcagatcaatgctgaagctagtgttgatggttctgatatcgacattggtacattctttattcattccatactagcatctatattgtttgactcggtagctttgtattcgtttatctctactcattatgttaatttgcatgatctaccccttataattatgcataaacccatggtagttatcacacctaaagtaccaattgaactaacttttatgagccaccagatagacataacaatcttggggagaaactttttgtccacacccatattactagagtaaagtaacatagatttgatccttggtatgacctagttaaaaaatgcaatgcgggttttacgttgtgccagcggggctgtagagctcactagcctgaacgaagatagatttgaggtcacagtcaccttatccccatctactaaacctactatctatcagctaaagggcaaatttgtg

SEQ ID NO: 43713 - DNA, 792 bp, Zea Mays
cccatctcctcattctctctccccgtgccactctccctctccctgtacccttttcttctccaacatagcagcatctgcccccatggccgacgccttcccctgttgccttcttccaattcagcagcccctccccatctcctcccatggaccaagagatggtgatcatacgaaatgaaagacgtgaagtagagctgaccacaagatgaattcgatggacaagcctgaggatgaactgaataagcgccaaaaaaggagatgctcaccaagcgagtaccctctagcaaacactaacttgtgttggattctaggcaagccccggttttaagcataatccttatatatgctattttactgcaattatggttgtaggcttgcattgtgcactaagtgtaggagttgtttgaaaccctagttgcataaactcagcttcctttatgaagtggatactagcatgctaggtcaaatggctgctttactaaatagggatctcgatagaagtctagtgatttttctagcactcgtgcgaggttagggattggttgtacccatttttgataatggaattatgattgtctgtggacatggatccatagggatgccctgtctatgagacgaaattagaataaggattaacatgaggatacctatgtcaagcatttgaacgtactaaacacatgctgagaaatatggtaaatcggtaagcctagtgcctgagtgaatctgcccgtagactttcctcctcactgtctggagaagtggtctctcatgctagcaatggtgggtacaagtgcg

SEQ ID NO: 43714 - DNA, 807 bp, Zea Mays
gccccatctcctcattctctctccccgtgccactctccctctccctgtacccttttcttctccaacatagcagcatctgcccccatggccgacgccttcccctgttgccttcttccaattcagcagcccctccccatctcctcccatggtcaagaacacgtgaccaagagatggtgatcatacgaaatgaaagacgtgaagtagagctgaccacaagatgaattcgatggacaagcctgaggatgaactgaataagcgccaaaaaaggagatgctcaccaagcgagtaccctctagcaaacactaacttgtgttggattctaggcaagccccggttttaagcataatccttatatatgctattttactgcaattatggttgtaggcttgcattgtgcactaagtgtaggagttgtttgaaaccctagttgcataaactcagcttcctttatgaagtggatactagcatgctaggtcaaatggctgctttactaaatagggatctcgatagaagtctagtgatttttctagcactcgtgcgaggttagggattggttgtacccatttttgataatggaattatgattgtctgtggacatggatccatagggatgccctgtctatgagacgaaattagaataaggattaacatgaggatacctatgtcaagcatttgaacgtactaaacacatgctgagaaatatggtaaatcggtaagcctagtgcctgagtgaatctgcccgtagactttcctcctcactgtctggagaagtggtctctcatgctagcaatggtgggtacaagtgcg

SEQ ID NO: 43715 - DNA, 1458 bp, Zea Mays
gaagctttctgtaattgtatatatcatactgaaaacatatggttagtcacgtttttgagaaccttcagaaaaccttcagaaggggaaggcccccaacaggcgcgaaccgagaacccaaaccctgactaagctattcggctatctgtatttagatccgatctaattgcaattgttctatgccgaggagttcaactgtgatataagttaggttgtttaatctttttttttgctgaacttgtaactgtgatgtattttgaaatggaatcattcagtgtttgtaggtttcctattatttctaacaactgttgaaatcaatatgtgttgcgtataattgccctactggaacctgttgtgtttttttgccgggcctcgtgctgggaccaagaaagggagctcggaaggagtaggagatcgaggagagaggacacgggacagagagatgtgcctggtggtggtctgcgacgagccggagcgcgtggtggcgacgtaccaggtgcccgggcggtgcccgtactgcggcggcgtggtggtagcggccgacgtggagagcacgccgcggctctgcttcgttccgctctgcttccgcatccgacgccgcttctactgctccctctgctcacgtcgcctcgtctccgtcgcctgaacggtcgccggaacaggaaggcaggcacgcggacgcgacagagctctgtctggcggcgcgttgtcaagcgctctgtacgtatgcgcttatggagtattttagcaaggtacctcgaattccccatgtgctaaaaccatttgtatgagtactccaaataacatagcagctttatttggacccctaatgaaatcggggcgaatattcgatgaacacgcaggatacacagtgcgctatgaactactgaatatgattcaatgcactctttgggatttgagggattgggcgagaaacgaactaattttcctcactcattcccttcaatagcgaagggaatttgaattttttttctttaaaatatcgacatcgcgaaaatgaatgacaacctgcaatctctctaaacagaaatgacaaacaaactgatgatagagatcaagcgtcgaaataggggagggaagtgttgacttttttttattacggtgcgaatacaagattgggaaagaaacaaagctattgagctagctgattgacttggcaagctaaaggctactcgagacgagagtccacccgatcgacggagggcgcgaaggccagaatgtcagaggagcctgttgcggccgctggcttctcgtccggctgggagacggtaaactcgcgcaggagccttgccgttgtctggttcaaccgaagaagtcggttgttgctcctcctgtcggtttttgtctggactggcctgctgggcgtggggtgagctggtcggcgtcgcgcttgtggccgccgaaggcagagcggggcatgtgcacactgcacagatgctg

SEQ ID NO: 43716 - DNA, 4689 bp, Zea Mays
cttttgtattcctttgcccatataatcaatttgtgagtttctccgaaaaaagaaacaaaaaacaaaaaaaggaaaaaaggggacacaaaccggaggttaccttgtgtgggcgcgtcacgcaggacgcctagggttgcccacccgctactacttgttctcctcttttctattttcctttgccccctactcttggtccaactttgcactttgtttccagcagctttgattacgtgtttggcactataattcaaccttgcattattgtttgattgtgttaatccttgctttgagtgcagcctacccagaactccacatagttctatgacgagcagactttgtttctccaggcaatcgctcctccaatctttcgccggttctacctgttggttgcagctcaatcctgtgtgcttggagatgacgacacgacggatgcacagctgcgggacgtgcggacacaagttgatggacttgacgcggacatgaagacgatgcatgaacaacttgattcatcgatcacttcattgaacgagcggttcgaccagctagacctcgctcagacgaccactacgaccacgctcgacgacatcgtgtcacaactcgatgcgttgactacgacgctcacggagttgcagaaggattatggcggtgacatggagcaggaagatggagatcaccgagggcgtgcccgccatatggacaaagcctgacatccaactcagctcctgctcttcccgcgccatccaccactagcactacaccgcgcgagaggacggccaaacctgcagcgcccccagctacaggcgctgttccttccacaggatgtacacgggatattcagtgccatcgttgcaaaggatttgggaacgtaattcgggactaccccagcaagcgtaccttactcatacgtgacaatggtgagtactcttccgctagtgattctgaagacactcgacatgctatgctttccactgaccatgcagataatgaggaggtacatgtcgctcctggcgatgctgagaggcattgtacaagaacggtcgattcacatcatcatcgacagtggcagctgcaacaatttggcgagtacaactttggtagagaagttatccttgcccactcgtaagcacccgaacccatatcacattcaatggcttaatgatggtggcaaaatcaaagttacacgttcggtacgtgttcccttttccttgggctcttattctgattatgctgattgcgatgttattcctatggaagcatgctctttgttacttggtagaccgtggaaatatgatactgatagtttacatcatggtcgttcgaatcattattctttcatgtttaagggtcagaaaataattatccatcccatgacccctgaccaaattataaaagatgatcttgctcgggctacaaaaactgcaaagcaacatgcacctaagccatccacccctgttaatgctgaaatcaagttgcatgctcctgttttacttgctacacgtgctgattttgatgacctacatgatactcacttgccctgcattgcacttgtatgttctagtatgctcgtttcatttgatgatgccccgcctttggatattccccttgctgtttctaaccttttgcaggagtacgctaatgttttccctatggactagccaccgggtcttcccccgcttcgtggcattgaacaccagatcgacctcatccccggtgcctagcttccaaaccgcgccccgtaccgtacgaatccggatgagacaaaggagatccggcgccaggtgcaggcgtttgcttgataaaggttacatttgtgaatctcttagtccttgctcagttcctgttttacttgttccaaagaaagatgggtcatggtgtatgtgtgtcgactgtcgcgctattaataacatcacaattcgttatcgatatcctataccacgccttgatgatatgctagatgagcttagtggtgccattattttcactaagattgatttgcgtagtggataccatcagattcgaatgaaactgggtgatgaatggaaaatggcttttaaaacgaagtttgggttatatgaatggttggttatgccgtttggattgactaatgctccaagcacctttatgcgtttgatgaacgaagttctaaggcccttcataggattgtttgtcgttgtctattttgatgatattcttatttacagcaagactatggaagagcatttcgaacatttgagtgctgtttttgatgcgttgcgtgctgcctgcttatttggtaacgtggacaaatgcatcttttgcacacaacgtgtctcgtttcttggttatgttgttactccatagggcatagaggtggatagtagcaagattgttgccattcgggactggcctacaccgacgacggtcacacagattcagagttttcttggacttgcatgcttctaccgcaggttcgtccgtgattttagctccattgcagcccctctacatgagcttacaaagaaaggtgtgccgtttgcttggggcgactcgcaggaggtagcgttcaacactttgaaagataagttaacacatgctcccctcttgcaattgcctgattttaataaagtgtttgagcttgaatgtgatgctagcggtattggactaggtgctgttttgttgcaagatggaaagtcggttgcttattttagtgaaaaattaagcggtgctagcctgagatattctacttatgataaggagctttatgctttagtttgcactttgcaaacatggcagcactatatttggcatcgcgagtttataattcattctgatcatgaggctttgaaacatattcgtacccaaacaaatctaaaccgtcgtcatgctaattgggtagaattcatcgagtctttcccttacattattaaacacaagaacagaaaggaaaatgtcattgctgatgcgttgtctcgtagatataccatgctttcacaataagattttaaagtttttggctttcaaactgtgaaggatcaatatgtcagcgatgctgattttaaagatgttttaatacattgcatgcatggcagaccatggggccatttccacatgcaggatgggttcctgtttcgcgctaacaagctgtgtattccagcaagctcggttcatcttttgttgttataggaagcgcatggaggtggtctcatgggacactttgccgtctacaagacgtacgaggtgctggccgcacacttcttttggccccagatgcgccgtgatgtcgagcgccttgttgcacgctgcactacttgtcagaaagccaagtcacgattgagcaaccatggtttgtatatgcctttgcctatccctacgttcccttggcttgatatttctatggacttcgttttgggtttgcctagaactaagaaggggagagatagcatttttgtggttgttgatagattctccaaaatggctcattttataccctgtcataaaactgatgatgctagcaaggttgctgaattgttctttcgagagattattcgtttgcatggtattccgaatacaatagtctctgatcgtgatgctaagtttctcagtcatttttggagatctctttggaataaattgggaactaaattgctgtttagtacaacttgtcaccctcaaactgataggcaaactgatgtggtgaatagaactttatcaaccatgcttagggctgttttagacaaaaatttgagacgtggggaggactgcttgcttcatattgaatttgcttataatcgtgcaacacattcttctacaaagatgtgcccctttcagattgtttatggttacattcctcggacacctattgatttgttttctattgatgctgaggatgccccacatatcgaggctgttgcacatgttgaacaaatgagtgacctccatgaacaaacacaccaaaacattgctgctgctaatgctaagtatcaggttgctggtagtaaaggaagaaaacatgttactttgtgttggagcgaaggcagaaacgccacccttcgctcgaagtctccgctgcttagccgctgctctgacagagacaaagcaggcagggacacccttcgcttgatcggcaccagacgaagaccggcgacgaaggcatcccacagtgcggcctcgtccagctcagaggcccacgtgcgatccggcccattgtaacgggccctgtgtggccgccgcttgttacgggcctaatttgtaaaagcatccctgtaattacagtctgtaaccctgctttatgggaatattctggggataaccaaggtagctgagggcacatgcgtccttaacacaaggcgctgggcgttcaggtacctataaatacccccgcacagtgcccgtgagaggcctggttgatagagctatttgccatctcacgcgtaaccctactgtccacactgttcacccctgttggctttcttgcgactgatagcaagttccaacatttggcgcccaccgttcgtgctacgacaaaaccacccacgatggcacccaagagagctaacccgaaggctgacgaggctgcgaaggcagcactgcttgccgcaagaaagggcaaggccctcgtcctcacccaatccacccaccaagagcccactgaagacaatgttgcccgcacctgcgaagacgacaccttccgcacctgcgggcccgaaggac

SEQ ID NO: 43717 - DNA, 4289 bp, Zea Mays
cttttgtattcctttgcccatataatcaatttgtgagtttctccgaaaaaagaaacaaaaaacaaaaaaaggaaaaaaggggacacaaaccggaggttaccttgtgtgggcgcgtcacgcaggacgcctagggttgcccacccgctactacttgttctcctcttttctattttcctttgccccctactcttggtccaactttgcactttgtttccagcagctttgattacgtgtttggcactataattcaaccttgcattattgtttgattgtgttaatccttgctttgagtgcagcctacccagaactccacatagttctatgacgagcagactttgtttctccaggcaatcgctcctccaatctttcgccggttctacctgttggttgcagctcaatcctgtgtgcttggagatgacgacacgacggatgcacagctgcgggacgtgcggacacaagttgatggacttgacgcggacatgaagacgatgcatgaacaacttgattcatcgatcacttcattgaacgagcggttcgaccagctagacctcgctcagacgaccactacgaccacgctcgacgacatcgtgtcacaactcgatgcgttgactacgacgctcacggagttgcagaaggattatggcggtgacatggagcaggaagatggagatcaccgagggcgtgcccgccatatggacaaagcctgacatccaactcagctcctgctcttcccgcgccatccaccactagcactacaccgcgcgagaggacggccaaacctgcagcgcccccagctacaggcgctgttccttccacaggatgtacacgggatattcagtgccatcgttgcaaaggatttgggaacgtaattcgggactaccccagcaagcgtaccttactcatacgtgacaatggtgagtactcttccgctagtgattctgaagacactcgacatgctatgctttccactgaccatgcagataatgaggaggtacatgtcgctcctggcgatgctgagaggcattgtacaagaacggtcgattcacatcatcatcgacagtggcagctgcaacaatttggcgagtacaactttggtagagaagttatccttgcccactcgtaagcacccgaacccatatcacattcaatggcttaatgatggtggcaaaatcaaagttacacgttcggtacgtgttcccttttccttgggctcttattctgattatgctgattgcgatgttattcctatggaagcatgctctttgttacttggtagaccgtggaaatatgatactgatagtttacatcatggtcgttcgaatcattattctttcatgtttaagggtcagaaaataattatccatcccatgacccctgaccaaattataaaagatgatcttgctcgggctacaaaaactgcaaagcaacatgcacctaagccatccacccctgttaatgctgaaatcaagttgcatgctcctgttttacttgctacacgtgctgattttgatgacctacatgatactcacttgccctgcattgcacttgtatgttctagtatgctcgtttcatttgatgatgccccgcctttggatattccccttgctgtttctaaccttttgcaggagtacgctaatgttttccctatggactagccaccgggtcttcccccgcttcgtggcattgaacaccagatcgacctcatccccggtgcctagcttccaaaccgcgccccgtaccgtacgaatccggatgagacaaaggagatccggcgccaggtgcaggcgtttgcttgataaagcaagactatggaagagcatttcgaacatttgagtgctgtttttgatgcgttgcgtgctgcctgcttatttggtaacgtggacaaatgcatcttttgcacacaacgtgtctcgtttcttggttatgttgttactccatagggcatagaggtggatagtagcaagattgttgccattcgggactggcctacaccgacgacggtcacacagattcagagttttcttggacttgcatgcttctaccgcaggttcgtccgtgattttagctccattgcagcccctctacatgagcttacaaagaaaggtgtgccgtttgcttggggcgactcgcaggaggtagcgttcaacactttgaaagataagttaacacatgctcccctcttgcaattgcctgattttaataaagtgtttgagcttgaatgtgatgctagcggtattggactaggtgctgttttgttgcaagatggaaagtcggttgcttattttagtgaaaaattaagcggtgctagcctgagatattctacttatgataaggagctttatgctttagtttgcactttgcaaacatggcagcactatatttggcatcgcgagtttataattcattctgatcatgaggctttgaaacatattcgtacccaaacaaatctaaaccgtcgtcatgctaattgggtagaattcatcgagtctttcccttacattattaaacacaagaacagaaaggaaaatgtcattgctgatgcgttgtctcgtagatataccatgctttcacaataagattttaaagtttttggctttcaaactgtgaaggatcaatatgtcagcgatgctgattttaaagatgttttaatacattgcatgcatggcagaccatggggccatttccacatgcaggatgggttcctgtttcgcgctaacaagctgtgtattccagcaagctcggttcatcttttgttgttataggaagcgcatggaggtggtctcatgggacactttgccgtctacaagacgtacgaggtgctggccgcacacttcttttggccccagatgcgccgtgatgtcgagcgccttgttgcacgctgcactacttgtcagaaagccaagtcacgattgagcaaccatggtttgtatatgcctttgcctatccctacgttcccttggcttgatatttctatggacttcgttttgggtttgcctagaactaagaaggggagagatagcatttttgtggttgttgatagattctccaaaatggctcattttataccctgtcataaaactgatgatgctagcaaggttgctgaattgttctttcgagagattattcgtttgcatggtattccgaatacaatagtctctgatcgtgatgctaagtttctcagtcatttttggagatctctttggaataaattgggaactaaattgctgtttagtacaacttgtcaccctcaaactgataggcaaactgatgtggtgaatagaactttatcaaccatgcttagggctgttttagacaaaaatttgagacgtggggaggactgcttgcttcatattgaatttgcttataatcgtgcaacacattcttctacaaagatgtgcccctttcagattgtttatggttacattcctcggacacctattgatttgttttctattgatgctgaggatgccccacatatcgaggctgttgcacatgttgaacaaatgagtgacctccatgaacaaacacaccaaaacattgctgctgctaatgctaagtatcaggttgctggtagtaaaggaagaaaacatgttactttgtgttggagcgaaggcagaaacgccacccttcgctcgaagtctccgctgcttagccgctgctctgacagagacaaagcaggcagggacacccttcgcttgatcggcaccagacgaagaccggcgacgaaggcatcccacagtgcggcctcgtccagctcagaggcccacgtgcgatccggcccattgtaacgggccctgtgtggccgccgcttgttacgggcctaatttgtaaaagcatccctgtaattacagtctgtaaccctgctttatgggaatattctggggataaccaaggtagctgagggcacatgcgtccttaacacaaggcgctgggcgttcaggtacctataaatacccccgcacagtgcccgtgagaggcctggttgatagagctatttgccatctcacgcgtaaccctactgtccacactgttcacccctgttggctttcttgcgactgatagcaagttccaacatttggcgcccaccgttcgtgctacgacaaaaccacccacgatggcacccaagagagctaacccgaaggctgacgaggctgcgaaggcagcactgcttgccgcaagaaagggcaaggccctcgtcctcacccaatccacccaccaagagcccactgaagacaatgttgcccgcacctgcgaagacgacaccttccgcacctgcgggcccgaaggac

SEQ ID NO: 43718 - DNA, 2426 bp, Zea Mays
atcttcttttaactggagcagcagagaactgaaaagtgcccgcctctcgctcgcatcaggaaatcaacgactgagtctccacgactgtcggtcacttcggatggcggcaccaccggaggggaatgtccgcttaggcgaggggtgggacgaggacgacgtgctggagccgcagccgctggaggtcatagcgccggatgtcaagtccaagaagcgcaatccggcgcccggagttcgggttgttggtcgccggatctacgatccagagaatggcaagacctgccaccaatgccgccagaagacaacagacttcgcagcggcgtgcaagcaagtcaagaagaagggtccgtgcccagtcaagtattgcctcaagtgcctccttaacaggtatggcgagagtgccgaggaggcggccggcaaggaggactggatctgtcctaagtgcaggggcatctgcaactgcagcttctgtagaaagaagaaaggcgagatgccaactgggataatggcccacatcgccaaggcttccgggtgcacctctgtccatgatctccttaaaaaggggtcagatgtggtttctgctgcacaggcgattctcaaggtgaatggtagtgacaagggcacaaagagatcccgagggacagatgctgctgctgaggtggcgactgaaaaggatgtaaatataggcattgatatcaatacagttatagcagatgaaggagatgaaaatataggtgttgatctcaattcacttccttctgttgataccaagaaaaggcagaagcggcagaagctcaagcacaggacaaagaaggatcctgctgatgcaacgtcacatggagtcaatactgaaccattgcagatggatgggaaccttgattttctcaatagtaaaactgtgcgacccaggggtaccccagtcactaaaattgcaggcgcagagcttgatgacgaggatactggggctgcaattcagtttatagaattctgccgtgcatttacagagatttttcaaataaagaaagggcaaccagaaaaaattcttcaagatttagttggaggccgtgaacttcggtttgtatcctcagttgttgctgggtttcatataaatttgttatctgtcattcaagaaggaaaggggaagaagcctctggcttacacaagagacggagatgcatgggtaattgatattggcaaatatataagtgaatcagcttctatatcaaaagggtttcctctcaaccatatcaatcaggggatatcaggatataaaaacttgagcccttcttgtaagctgcgtgttctgaattttctttgtgatgagaccctctctactgagtgagtagtgtctattacatttagcaaaaaataatatacttctgccactctttttgttcgtatttttatgttttaaccctctattgattgagtagtacttactccatttactaaaattaaattacttcactgccactttctttgttttatttagattttagaagggaaatatgtttttattattcttttttagaacacaaaaaatacgactgtctattatatgttcacaggaaataaattaaattaatttggtagcacaagtctacagcatcacgtatacaataatatggaagtatattgttattctatattaatgatttattaactttgtttagcaagctgaggaactggattgacatgcaaaatgacatagctgctgaaccagtgaatgctgctagagaaaaggcgcgtgctgcaaaagaaatggtaaaggagctaaaggaaaggctaaaggacaacatgaacaaaataattgtttcaccaaatgaagcagcagcctctaacagtgaagcaaataagtatattatttcccaaataaaggaggcacaggaagtcaagcgtgcagccataaatgacatggcaactatggagaagcaaggaggtttttggaccaagcctctgatggtagagaaaggggcagcatattggaagttagatggttactgtgataactcagcaatattgcttcaagagtatggtggcgatgaattaatggcaaataaagacaagtggtttatgtttactgaagacgaggagaaaataattgaaaaacatttagccactaggtaatgagtttgtcttgccacgtttggatgtgtttctacctttccaatgatggtgaacttctcttttgttgcttgtatatcatgaaatttatctgttggaaaccctatctgtattttcttctgttgttgatcctccaactattgctatcaaaaaccattttatgtagtagcatcctaacaaatgtggcatacaattcattccagtatacctgaactattgtgatcaatgaactccaacatgtaacgaatgattagagttgacaatcagtccttctacggataccttgcttccagagaaaaaacaac

SEQ ID NO: 43719 - DNA, 3337 bp, Zea Mays
atcttcttttaactggagcagcagagaactgaaaagtgcccgcctctcgctcgcatcaggaaatcaacgactgagtctccacgactgtcggtcacttcggatggcggcaccaccggaggggaatgtccgcttaggcgaggggtgggacgaggacgacgtgctggagccgcagccgctggaggtcatagcgccggatgtcaagtccaagaagcgcaatccggcgcccggagttcgggttgttggtcgccggatctacgatccagagaatggcaagacctgccaccaatgccgccagaagacaacagacttcgcagcggcgtgcaagcaagtcaagaagaagggtccgtgcccagtcaagtattgcctcaagtgcctccttaacaggtatggcgagagtgccgaggaggcggccggcaaggaggactggatctgtcctaagtgcaggggcatctgcaactgcagcttctgtagaaagaagaaaggcgagatgccaactgggataatggcccacatcgccaaggcttccgggtgcacctctgtccatgatctccttaaaaaggggtcagatgtggtttctgctgcacaggcgattctcaaggtgaatggtagtgacaagggcacaaagagatcccgagggacagatgctgctgctgaggtggcgactgaaaaggatgtaaatataggcattgatatcaatacagttatagcagatgaaggagatgaaaatataggtgttgatctcaattcacttccttctgttgataccaagaaaaggcagaagcggcagaagctcaagcacaggacaaagaaggatcctgctgatgcaacgtcacatggagtcaatactgaaccattgcagatggatgggaaccttgattttctcaatagtaaaactgtgcgacccaggggtaccccagtcactaaaattgcaggcgcagagcttgatgacgaggatactggggctgcaattcagtttatagaattctgccgtgcatttacagagatttttcaaataaagaaagggcaaccagaaaaaattcttcaagatttagttggaggccgtgaacttcggtttgtatcctcagttgttgctgggtttcatataaatttgttatctgtcattcaagaaggaaaggggaagaagcctctggcttacacaagagacggagatgcatgggtaattgatattggcaaatatataagtgaatcagcttctatatcaaaagggtttcctctcaaccatatcaatcaggggatatcaggatataaaaacttgagcccttcttcaagctgaggaactggattgacatgcaaaatgacatagctgctgaaccagtgaatgctgctagagaaaaggcgcgtgctgcaaaagaaatggtaaaggagctaaaggaaaggctaaaggacaacatgaacaaaataattgtttcaccaaatgaagcagcagcctctaacagtgaagcaaataagtatattatttcccaaataaaggaggcacaggaagtcaagcgtgcagccataaatggtttgaacaatatgattcgatatatctagaacttctcactttaaatttgttttagctttatgcatttttcagttctctatttgtttgatcgcttgcatcttttattttaggtgttttaatgccacatttcctttttcttttcctaacacgatggagagctgtgtatcattgatttaaaacaagagagttaaaacacaaacaaacacccctaaaaagatattacatttgtgcttgataaagattagaaggtaaaaaacaacctgacctagagagtctagctatctgagctaagtaagggctgtgataaagcacagccccttggctcctgccacattgcatgtctgtcactcctcactagcaagagtgagggacgtgaagatccttggggcaacgctcctaaaacacactcattcacgtgtttccaaaataccgcacgtgtctaggataataagagagtttaaaccttttttaatagtaccaatcacaactgaactacccctgcaccaccaatcgtcaaaagacatgaccatggtctgaggtgaaaggttagtgaggcccaccctttgaagtaatagaaaccaaatttgtcaggtgaaaacacaagtaaccaagagatgctggatggtctcttgttggtcacaaaccgatctgctgttcagaaggtccctccacactaaccgatctgctgttcagaagcaattatgagccgcaaacgaaaggaacaaatgacattttgtgggagccaattcacttataagtcttcaacacaactgttgggtgctgcagatgtgattattcacaatgtgatagtgccattgagttcccacaaaatgtcatttcatatttcacttctttccttggcttgtggctcataatcacaaatgttttatggcttgcggctcaatcacaattatgaaccacaaatgcttcttgccatacaccaggaatttagtgatactgccatgtgattatttatgttaatcttaagatgtgatttttgagtagtttcatctgcctagtatccattgtttcataaattgttgtaatgctagttgcatttgttagtcttttggccttgctagttggcataagaatgcagcttaactgggaatttctgtttactcaacctctatttactaagtagacttgtgcaatacattgacttgtgacattccaagcaaaatgtttttgagcagtatatcatcattttctgcagtatttgcttgtcttatggtgttatatgtaaacaaatccagctagctgttttgtattcatgttcatcttttgcttcccagacatggcaactatggagaagcaaggaggtttttggaccaagcctctgatggtagagaaaggggcagcatattggaagttagatggttactgtgataactcagcaatattgcttcaagagtatggtggcgatgaattaatggcaaataaagacaagtggtttatgtttactgaagacgaggagaaaataattgaaaaacatttagccactaggtaatgagtttgtcttgccacgtttggatgtgtttctacctttccaatgatggtgaacttctcttttgttgcttgtatatcatgaaatttatctgttggaaaccctatctgtattttcttctgttgttgatcctccaactattgctatcaaaaaccattttatgtagtagcatcctaacaaatgtggcatacaattcattccagtatacctgaactattgtgatcaatgaactccaacatgtaacgaatgattagagttgacaatcagtccttctacggataccttgcttccagagaaaaaacaac

SEQ ID NO: 43720 - DNA, 2052 bp, Zea Mays
atcttcttttaactggagcagcagagaactgaaaagtgcccgcctctcgctcgcatcaggaaatcaacgactgagtctccacgactgtcggtcacttcggatggcggcaccaccggaggggaatgtccgcttaggcgaggggtgggacgaggacgacgtgctggagccgcagccgctggaggtcatagcgccggatgtcaagtccaagaagcgcaatccggcgcccggagttcgggttgttggtcgccggatctacgatccagagaatggcaagacctgccaccaatgccgccagaagacaacagacttcgcagcggcgtgcaagcaagtcaagaagaagggtccgtgcccagtcaagtattgcctcaagtgcctccttaacaggtatggcgagagtgccgaggaggcggccggcaaggaggactggatctgtcctaagtgcaggggcatctgcaactgcagcttctgtagaaagaagaaaggcgagatgccaactgggataatggcccacatcgccaaggcttccgggtgcacctctgtccatgatctccttaaaaaggggtcagatgtggtttctgctgcacaggcgattctcaaggtgaatggtagtgacaagggcacaaagagatcccgagggacagatgctgctgctgaggtggcgactgaaaaggatgtaaatataggcattgatatcaatacagttatagcagatgaaggagatgaaaatataggtgttgatctcaattcacttccttctgttgataccaagaaaaggcagaagcggcagaagctcaagcacaggacaaagaaggatcctgctgatgcaacgtcacatggagtcaatactgaaccattgcagatggatgggaaccttgattttctcaatagtaaaactgtgcgacccaggggtaccccagtcactaaaattgcaggcgcagagcttgatgacgaggatactggggctgcaattcagtttatagaattctgccgtgcatttacagaggtagtcaaagatttttcaaataaagaaagggcaaccagaaaaaattcttcaagatttagttggaggccgtgaacttcggtttgtatcctcagttgttgctgggtttcatataaatttgttatctgtcattcaagaaggaaaggggaagaagcctctggcttacacaagagacggagatgcatgggtaattgatattggcaaatatataagtgaatcagcttctatatcaaaagggtttcctctcaaccatatcaatcaggggatatcaggatataaaaacttgagcccttcttcaagctgaggaactggattgacatgcaaaatgacatagctgctgaaccagtgaatgctgctagagaaaaggcgcgtgctgcaaaagaaatggtaaaggagctaaaggaaaggctaaaggacaacatgaacaaaataattgtttcaccaaatgaagcagcagcctctaacagtgaagcaaataagtatattatttcccaaataaaggaggcacaggaagtcaagcgtgcagccataaatgacatggcaactatggagaagcaaggaggtttttggaccaagcctctgatggtagagaaaggggcagcatattggaagttagatggttactgtgataactcagcaatattgcttcaagagtatggtggcgatgaattaatggcaaataaagacaagtggtttatgtttactgaagacgaggagaaaataattgaaaaacatttagccactaggtaatgagtttgtcttgccacgtttggatgtgtttctacctttccaatgatggtgaacttctcttttgttgcttgtatatcatgaaatttatctgttggaaaccctatctgtattttcttctgttgttgatcctccaactattgctatcaaaaaccattttatgtagtagcatcctaacaaatgtggcatacaattcattccagtatacctgaactattgtgatcaatgaactccaacatgtaacgaatgattagagttgacaatcagtccttctacggataccttgcttccagagaaaaaacaac

SEQ ID NO: 43721 - DNA, 3333 bp, Zea Mays
atcttcttttaactggagcagcagagaactgaaaagtgcccgcctctcgctcgcatcaggaaatcaacgactgagtctccacgactgtcggtcacttcggatggcggcaccaccggaggggaatgtccgcttaggcgaggggtgggacgaggacgacgtgctggagccgcagccgctggaggtcatagcgccggatgtcaagtccaagaagcgcaatccggcgcccggagttcgggttgttggtcgccggatctacgatccagagaatggcaagacctgccaccaatgccgccagaagacaacagacttcgcagcggcgtgcaagcaagtcaagaagaagggtccgtgcccagtcaagtattgcctcaagtgcctccttaacaggtatggcgagagtgccgaggaggcggccggcaaggaggactggatctgtcctaagtgcaggggcatctgcaactgcagcttctgtagaaagaagaaaggcgagatgccaactgggataatggcccacatcgccaaggcttccgggtgcacctctgtccatgatctccttaaaaaggggtcagatgtggtttctgctgcacaggcgattctcaaggtgaatggtagtgacaagggcacaaagagatcccgagggacagatgctgctgctgaggtggcgactgaaaaggatgtaaatataggcattgatatcaatacagttatagcagatgaaggagatgaaaatataggtgttgatctcaattcacttccttctgttgataccaagaaaaggcagaagcggcagaagctcaagcacaggacaaagaaggatcctgctgatgcaacgtcacatggagtcaatactgaaccattgcagatggatgggaaccttgattttctcaatagtaaaactgtgcgacccaggggtaccccagtcactaaaattgcaggcgcagagcttgatgacgaggatactggggctgcaattcagtttatagaattctgccgtgcatttacagagatttttcaaataaagaaagggcaaccagaaaaaattcttcaagatttagttggaggccgtgaacttcggtttgtatcctcagttgttgctgggtttcatataaatttgttatctgtcattcaagaaggaaaggggaagaagcctctggcttacacaagagacggagatgcatgggtaattgatattggcaaatatataagtgaatcagcttctatatcaaaagggtttcctctcaaccatatcaatcaggggatatcaggatataaaaacttgagcccttcttctgaggaactggattgacatgcaaaatgacatagctgctgaaccagtgaatgctgctagagaaaaggcgcgtgctgcaaaagaaatggtaaaggagctaaaggaaaggctaaaggacaacatgaacaaaataattgtttcaccaaatgaagcagcagcctctaacagtgaagcaaataagtatattatttcccaaataaaggaggcacaggaagtcaagcgtgcagccataaatggtttgaacaatatgattcgatatatctagaacttctcactttaaatttgttttagctttatgcatttttcagttctctatttgtttgatcgcttgcatcttttattttaggtgttttaatgccacatttcctttttcttttcctaacacgatggagagctgtgtatcattgatttaaaacaagagagttaaaacacaaacaaacacccctaaaaagatattacatttgtgcttgataaagattagaaggtaaaaaacaacctgacctagagagtctagctatctgagctaagtaagggctgtgataaagcacagccccttggctcctgccacattgcatgtctgtcactcctcactagcaagagtgagggacgtgaagatccttggggcaacgctcctaaaacacactcattcacgtgtttccaaaataccgcacgtgtctaggataataagagagtttaaaccttttttaatagtaccaatcacaactgaactacccctgcaccaccaatcgtcaaaagacatgaccatggtctgaggtgaaaggttagtgaggcccaccctttgaagtaatagaaaccaaatttgtcaggtgaaaacacaagtaaccaagagatgctggatggtctcttgttggtcacaaaccgatctgctgttcagaaggtccctccacactaaccgatctgctgttcagaagcaattatgagccgcaaacgaaaggaacaaatgacattttgtgggagccaattcacttataagtcttcaacacaactgttgggtgctgcagatgtgattattcacaatgtgatagtgccattgagttcccacaaaatgtcatttcatatttcacttctttccttggcttgtggctcataatcacaaatgttttatggcttgcggctcaatcacaattatgaaccacaaatgcttcttgccatacaccaggaatttagtgatactgccatgtgattatttatgttaatcttaagatgtgatttttgagtagtttcatctgcctagtatccattgtttcataaattgttgtaatgctagttgcatttgttagtcttttggccttgctagttggcataagaatgcagcttaactgggaatttctgtttactcaacctctatttactaagtagacttgtgcaatacattgacttgtgacattccaagcaaaatgtttttgagcagtatatcatcattttctgcagtatttgcttgtcttatggtgttatatgtaaacaaatccagctagctgttttgtattcatgttcatcttttgcttcccagacatggcaactatggagaagcaaggaggtttttggaccaagcctctgatggtagagaaaggggcagcatattggaagttagatggttactgtgataactcagcaatattgcttcaagagtatggtggcgatgaattaatggcaaataaagacaagtggtttatgtttactgaagacgaggagaaaataattgaaaaacatttagccactaggtaatgagtttgtcttgccacgtttggatgtgtttctacctttccaatgatggtgaacttctcttttgttgcttgtatatcatgaaatttatctgttggaaaccctatctgtattttcttctgttgttgatcctccaactattgctatcaaaaaccattttatgtagtagcatcctaacaaatgtggcatacaattcattccagtatacctgaactattgtgatcaatgaactccaacatgtaacgaatgattagagttgacaatcagtccttctacggataccttgcttccagagaaaaaacaac

SEQ ID NO: 43722 - DNA, 2101 bp, Zea Mays
atcttcttttaactggagcagcagagaactgaaaagtgcccgcctctcgctcgcatcaggaaatcaacgactgagtctccacgactgtcggtcacttcggatggcggcaccaccggaggggaatgtccgcttaggcgaggggtgggacgaggacgacgtgctggagccgcagccgctggaggtcatagcgccggatgtcaagtccaagaagcgcaatccggcgcccggagttcgggttgttggtcgccggatctacgatccagagaatggcaagacctgccaccaatgccgccagaagacaacagacttcgcagcggcgtgcaagcaagtcaagaagaagggtccgtgcccagtcaagtattgcctcaagtgcctccttaacaggtatggcgagagtgccgaggaggcggccggcaaggaggactggatctgtcctaagtgcaggggcatctgcaactgcagcttctgtagaaagaagaaaggcgagatgccaactgggataatggcccacatcgccaaggcttccgggtgcacctctgtccatgatctccttaaaaaggggtcagatgtggtttctgctgcacaggcgattctcaaggtgaatggtagtgacaagggcacaaagagatcccgagggacagatgctgctgctgaggtggcgactgaaaaggatgtaaatataggcattgatatcaatacagttatagcagatgaaggagatgaaaatataggtgttgatctcaattcacttccttctgttgataccaagaaaaggcagaagcggcagaagctcaagcacaggacaaagaaggatcctgctgatgcaacgtcacatggagtcaatactgaaccattgcagatggatgggaaccttgattttctcaatagtaaaactgtgcgacccaggggtaccccagtcactaaaattgcaggcgcagagcttgatgacgaggatactggggctgcaattcagtttatagaattctgccgtgcatttacagaggtagtcaaagatttttcaaataaagaaagggcaaccagaaaaaattcttcaagatttagttggaggccgtgaacttcggtttgtatcctcagttgttgctgggtttcatataaatttgttatctgtcattcaagaaggaaaggggaagaagcctctggcttacacaagagacggagatgcatgggtaattgatattggcaaatatataagtgaatcagcttctatatcaaaagggtttcctctcaaccatatcaatcaggggatatcaggatataaaaacttgagcccttcttgtaagctgcgtgttctgaattttctttgtgatgagaccctctctactgacaagctgaggaactggattgacatgcaaaatgacatagctgctgaaccagtgaatgctgctagagaaaaggcgcgtgctgcaaaagaaatggtaaaggagctaaaggaaaggctaaaggacaacatgaacaaaataattgtttcaccaaatgaagcagcagcctctaacagtgaagcaaataagtatattatttcccaaataaaggaggcacaggaagtcaagcgtgcagccataaatgacatggcaactatggagaagcaaggaggtttttggaccaagcctctgatggtagagaaaggggcagcatattggaagttagatggttactgtgataactcagcaatattgcttcaagagtatggtggcgatgaattaatggcaaataaagacaagtggtttatgtttactgaagacgaggagaaaataattgaaaaacatttagccactaggtaatgagtttgtcttgccacgtttggatgtgtttctacctttccaatgatggtgaacttctcttttgttgcttgtatatcatgaaatttatctgttggaaaccctatctgtattttcttctgttgttgatcctccaactattgctatcaaaaaccattttatgtagtagcatcctaacaaatgtggcatacaattcattccagtatacctgaactattgtgatcaatgaactccaacatgtaacgaatgattagagttgacaatcagtccttctacggataccttgcttccagagaaaaaacaac

SEQ ID NO: 43723 - DNA, 2047 bp, Zea Mays
tgaacatcttcttttaactggagcagcagagaactgaaaagtgcccgcctctcgctcgcatcaggaaatcaacgactgagtctccacgactgtcggtcacttcggatggcggcaccaccggaggggaatgtccgcttaggcgaggggtgggacgaggacgacgtgctggagccgcagccgctggaggtcatagcgccggatgtcaagtccaagaagcgcaatccggcgcccggagttcgggttgttggtcgccggatctacgatccagagaatggcaagacctgccaccaatgccgccagaagacaacagacttcgcagcggcgtgcaagcaagtcaagaagaagggtccgtgcccagtcaagtattgcctcaagtgcctccttaacaggtatggcgagagtgccgaggaggcggccggcaaggaggactggatctgtcctaagtgcaggggcatctgcaactgcagcttctgtagaaagaagaaaggcgagatgccaactgggataatggcccacatcgccaaggcttccgggtgcacctctgtccatgatctccttaaaaaggggtcagatgtggtttctgctgcacaggcgattctcaaggtgaatggtagtgacaagggcacaaagagatcccgagggacagatgctgctgctgaggtggcgactgaaaaggatgtaaatataggcattgatatcaatacagttatagcagatgaaggagatgaaaatataggtgttgatctcaattcacttccttctgttgataccaagaaaaggcagaagcggcagaagctcaagcacaggacaaagaaggatcctgctgatgcaacgtcacatggagtcaatactgaaccattgcagatggatgggaaccttgattttctcaatagtaaaactgtgcgacccaggggtaccccagtcactaaaattgcaggcgcagagcttgatgacgaggatactggggctgcaattcagtttatagaattctgccgtgcatttacagagatttttcaaataaagaaagggcaaccagaaaaaattcttcaagatttagttggaggccgtgaacttcggtttgtatcctcagttgttgctgggtttcatataaatttgttatctgtcattcaagaaggaaaggggaagaagcctctggcttacacaagagacggagatgcatgggtaattgatattggcaaatatataagtgaatcagcttctatatcaaaagggtttcctctcaaccatatcaatcaggggatatcaggatataaaaacttgagcccttcttcaagctgaggaactggattgacatgcaaaatgacatagctgctgaaccagtgaatgctgctagagaaaaggcgcgtgctgcaaaagaaatggtaaaggagctaaaggaaaggctaaaggacaacatgaacaaaataattgtttcaccaaatgaagcagcagcctctaacagtgaagcaaataagtatattatttcccaaataaaggaggcacaggaagtcaagcgtgcagccataaatgacatggcaactatggagaagcaaggaggtttttggaccaagcctctgatggtagagaaaggggcagcatattggaagttagatggttactgtgataactcagcaatattgcttcaagagtatggtggcgatgaattaatggcaaataaagacaagtggtttatgtttactgaagacgaggagaaaataattgaaaaacatttagccactaggtaatgagtttgtcttgccacgtttggatgtgtttctacctttccaatgatggtgaacttctcttttgttgcttgtatatcatgaaatttatctgttggaaaccctatctgtattttcttctgttgttgatcctccaactattgctatcaaaaaccattttatgtagtagcatcctaacaaatgtggcatacaattcattccagtatacctgaactattgtgatcaatgaactccaacatgtaacgaatgattagagttgacaatcagtccttctacggataccttgcttccagagaaaaaacaac

SEQ ID NO: 43724 - DNA, 4070 bp, Zea Mays
gatcggagtgcaagtcgtagagggaggcacttggggctcgtggggcaagatgagcaccgttgacaagatgctgatcaaggggattcggagcttcgatccggacaataagaacgtcatcaccttcttcaagccgctcaccctcatcgttggccccaacggtgctggcaagaccacgatcatcgagtgcctgaagctttcttgcaccggcgagctgccccccaactcccgctctggccacaccttcgtccacgaccccaaggtagctggcgagacggaaacaaaaggacaaattaagttgcggtttaagactgcagcaggaaaggatgtggtgtgcatccggtccttccagcttacccaaaaggcatcaaagatggagtttaaggcaattgaaagcgtcctccagactataaatccacacacaggggagaaagtctgcctcagctacagatgtgctgacatggatagagagattcctgccttaatgggtgtttcgaaggccgtactggagaatgttatatttgttcaccaagatgaatccaattggccattgcaggacccgtcaacacttaagaagaagttcgatgacatcttctctgccacacgctatacgaaagctcttgaagtcataaagaaacttcacaaggatcaaatgcaagagatcaagacttttaggttaaagctggagaaccttcagactgtaaaagaccaagcacataagctgcgtgaaaatattgctcaagatcaagaaaagtcagatgcctcaaaatctcagatggagcaactgaaggaaaagatctgtggtaccgagagagaaatcctgcaaatggaaacaagtttggatgaactgagaagacttcagggacaaattgacatcaaggcaacagagagaagtacattacttacgcagcagcatgaaaagcttgctgcactttctgaggaaaatgaagataccgatgaggaactaatggaatggcaaacaaaatttgaagaaaggattgcgttactagaaacaaaaatcagtaaacttgtaagagatatggatgatgaagcatcttatagctccgttctgtccaaacaaaattctgaattaacacatgaaattggaaagctccaggcagaagctgatgctcacctgactatgaagcatgaacgagactcagacataaaaaatatatgcactaaacataatcttgggccggttcctgaacatccctttacgaatgatgttgctatgaaccttacaaacaggattaaagcgagactatcaagtcttgagaatgatttgctggataagaagaaatccaatgaagatcagttagatgttttgtggaaacactatcttaaaataaatgctcgctactccgaagttgatggtcagatacaatctaagattgaatccatgtcaggcattttaagacggagaaaagataaagagaaagaacgcgatgctgcagaagtggagctttcaaaatttaatctatcccgtatcgatgagagggagagacatatgcaaattgaagtcgagaggaagacacttgcgcttggagaaagagactatgattcaattataagtcagaaacgaacagaagtatatagtttggaacagaaaataaaagtgcttctgcgggagaaagatataataaatagaaatgctgatgaaagagtaaaactgggtttgaagaaggatgcattggaaagcagcaaggacaagctcaatgagatagttaatgagcataaggataaaatcaaaaaggtacttagggggaggaatccttttgagaaggatatgaagaaggagatcaatcaagccttttggcctgtggacaaggaatacaatgagttaagatcaaaatcccaggaagcagagcaagagcttaaatttactcacagcaaagtaactgatgctagagaacaattgacaaaacttcgaagagatatggatgcaaaaagaagattcctggactcgaaacttcaatctattttacagatatctgctaatgttgacatgtttcccaaagttctacaagacgccatgaacaaaagagatgaacagaaaagattagagaatttcgcaaatggaatgcgggaaatgcttgcaccttttgaacatttggctcggaagaatcatgtatgcccatgctgtgaacgtgctttcacacctgatgaggaggatgagttcgtgaagaaacaaaggatgcaaaactcaagtactgcagagagatctaaagctctggcaatggaatcatcaaatgctgaagctctttttcagcaattggataaacttcggactatctatgatgcttatgtgaagctggtagaagaaaccatacctctagcagagaaaaacttgaatcaacatttggcggatgaaagtcagaaggcgcaggcatttgatgatcttttgggtgttcttgcccatgttcaaatggacagggatgcagtggaagccttattacaacccactgatactattgacaggcatgtacatgaaattcaacagctagtcaaagaagtagaagatcttgaatatgcacttgattctagtggccgaggtgtcaagtctttggaggaaattcaactggagctgaactttctgcagagaacaagggacacattgattgtcgaagtggatgatcttagagatcaacatagaatgctaaatgaagatatgtcaagtgctcaggtgagatggcacaatgctcgggaagagaaagtgaaagcttctagcatattggaaagattccaaaaatctgaagaggaattggtgcttctagctgaggaaaaagaacaactgattgtagaaaagaagcttttagaagagtctcttgatccattgtccaaagagaaagagagcttgttgcaagagtataatgctttgaagcaaaagctggatgaagagtatcatcagcttgcagaaagaaaaagggagttccagcaagaacttgatgctcttggaagacttagtatgaagataaaagggtacttggattccaagaaaaacgaaaagcttaaggaattgcagggaaggcatgttctttgccattctcagttacagagttgcatggcaaaacagcaaagaatatcagctgagttaaacaagagcaaagaactactgcagggccagggccagttgaaaagaaacattgatgacaatctcaagtacaggaaaacaaaggctgatgtggaacaacttactcgtgatatagaatcacttgaagaaaggctgctttcaataggtagcttgtctgctatagaagctgatctgaaacgccattctcaagaaaaagagaggcttaattcagaatttaacaggtggcaaggaacactttctgtttatcaaagtaatatttcaaagcacaaacaagagcttaaactgtcacagtacaaggatatcgagaagcgatatactaatcaatttctccagcttaagacaactgaaatggcaaacaaggacttggacagatattatactgctttagacaaggctcttatgcggttccacagcatgaagatggaggagataaataaaataatcaaggaactgtggcaacagacatacagaggccaggatattgattacataagcataaattctgattctgagggtgctggcactcgatcatacagctaccgcgttgttatgcaaactggtgatgctgagctggaaatgcgagggcgctgcagtgctggtcagaaggttcttgcttctcttataatcagactagcacttgcggaaactttctgcctgaactgcggtatattggctttggatgagccaactacgaatctagatgggccaaatgcagagagtcttgctgctgcgctgttgagaataatggaagccaggaaagggcaggagaacttccagttgattgtaatcactcatgatgagagatttgcccatcttatcggtcaaaggcagcttgctgagaagtactatcgagtctccaaggatgagaagaagctttggctttaagacgaaggtatatgtgatatggagatacaacccgaaggtaggatgaacgaacgtcgaagctgtggatgaaggagctttggcttagtatgatgat

SEQ ID NO: 43725 - DNA, 4321 bp, Zea Mays
atgagcaccgttgacaagatgctgatcaaggggattcggagcttcgatccggacaataagaacgtcatcaccttcttcaagccgctcaccctcatcgttggccccaacggtgctggcaagaccacgatcatcgagtgcctgaagctttcttgcaccggcgagctgccccccaactcccgctctggccacaccttcgtccacgaccccaaggtagctggcgagacggaaacaaaaggacaaattaagttgcggtttaagactgcagcaggaaaggatgtggtgtgcatccggtccttccagcttacccaaaaggcatcaaagatggagtttaaggcaattgaaagcgtcctccagactataaatccacacacaggggagaaagtctgcctcagctacagatgtgctgacatggatagagagattcctgccttaatgggtgtttcgaaggccgtactggagaatgttatatttgttcaccaagatgaatccaattggccattgcaggacccgtcaacacttaagaagaagttcgatgacatcttctctgccacacgctatacgaaagctcttgaagtcataaagaaacttcacaaggatcaaatgcaagagatcaagacttttaggttaaagctggagaaccttcagactgtaaaagaccaagcacataagctgcgtgaaaatattgctcaagatcaagaaaagtcagatgcctcaaaatctcagatggagcaactgaaggaaaagatctgtggtaccgagagagaaatcctgcaaatggaaacaagtttggatgaactgagaagacttcagggacaaattgacatcaaggcaacagagagaagtacattacttacgcagcagcatgaaaagcttgctgcactttctgaggaaaatgaagataccgatgaggaactaatggaatggcaaacaaaatttgaagaaaggattgcgttactagaaacaaaaatcagtaaacttgtaagagatatggatgatgaagcatcttatagctccgttctgtccaaacaaaattctgaattaacacatgaaattggaaagctccaggcagaagctgatgctcacctgactatgaagcatgaacgagactcagacataaaaaatatatgcactaaacataatcttgggccggttcctgaacatccctttacgaatgatgttgctatgaaccttacaaacaggattaaagcgagactatcaagtcttgagaatgatttgctggataagaagaaatccaatgaagatcagttagatgttttgtggaaacactatcttaaaataaatgctcgctactccgaagttgatggtcagatacaatctaagattgaatccatgtcaggcattttaagacggagaaaagataaagagaaagaacgcgatgctgcagaagtggagctttcaaaatttaatctatcccgtatcgatgagagggagagacatatgcaaattgaagtcgagaggaagacacttgcgcttggagaaagagactatgattcaattataagtcagaaacgaacagaagtatatagtttggaacagaaaataaaagtgcttctgcgggagaaagatataataaatagaaatgctgatgaaagagtaaaactgggtttgaagaaggatgcattggaaagcagcaaggacaagctcaatgagatagttaatgagcataaggataaaatcaaaaaggtacttagggggaggaatccttttgagaaggatatgaagaaggagatcaatcaagccttttggcctgtggacaaggaatacaatgagttaagatcaaaatcccaggaagcagagcaagagcttaaatttactcacagcaaagtaactgatgctagagaacaattgacaaaacttcgaagagatatggatgcaaaaagaagattcctggactcgaaacttcaatctattttacagatatctgctaatgttgacatgtttcccaaagttctacaagacgccatgaacaaaagagatgaacagaaaagattagagaatttcgcaaatggaatgcgggaaatgcttgcaccttttgaacatttggctcggaagaatcatgtatgcccatgctgtgaacgtgctttcacacctgatgaggaggatgagttcgtgaagaaacaaaggatgcaaaactcaagtactgcagagagatctaaagctctggcaatggaatcatcaaatgctgaagctctttttcagcaattggataaacttcggactatctatgatgcttatgtgaagctggtagaagaaaccatacctctagcagagaaaaacttgaatcaacatttggcggatgaaagtcagaaggcgcaggcatttgatgatcttttgggtgttcttgcccatgttcaaatggacagggatgcagtggaagccttattacaacccactgatactattgacaggcatgtacatgaaattcaacagctagtcaaagaagtagaagatcttgaatatgcacttgattctagtggccgaggtgtcaagtctttggaggaaattcaactggagctgaactttctgcagagaacaagggacacattgattgtcgaagtggatgatcttagagatcaacatagaatgctaaatgaagatatgtcaagtgctcaggtgagatggcacaatgctcgggaagagaaagtgaaagcttctagcatattggaaagattccaaaaatctgaagaggaattggtgcttctagctgaggaaaaagaacaactgattgtagaaaagaagcttttagaagagtctcttgatccattgtccaaagagaaagagagcttgttgcaagagtataatgctttgaagcaaaagctggatgaagagtatcatcagcttgcagaaagaaaaagggagttccagcaagaacttgatgctcttggaagacttagtatgaagataaaagggtacttggattccaagaaaaacgaaaagcttaaggaattgcagggaaggcatgttctttgccattctcagttacagagttgcatggcaaaacagcaaagaatatcagctgagttaaacaagagcaaagaactactgcagggccagggccagttgaaaagaaacattgatgacaatctcaagtacaggaaaacaaaggctgatgtggaacaacttactcgtgatatagaatcacttgaagaaaggctgctttcaatagtttaacaggtggcaaggaacactttctgtttatcaaagtaatatttcaaagcacaaacaagagcttaaactgtcacagtacaaggatatcgagaagcgatatactaatcaatttctccagcttaagacaactgaaatggcaaacaaggacttggacagatattatactgctttagacaaggctcttatgcggttccacagcatgaagatggaggagataaataaaataatcaaggaactgtggcaacagacatacagaggccaggatattgattacataagcataaattctgattctgagggtgctggcactcgatcatacagctaccgcgttgttatgcaaactggtgatgctgagctggaaatgcgagggcgctgcagtgctggtcagaaggttcttgcttctcttataatcagactagcacttgcggaaactttctgcctgaactgcggtatattggctttggatgagccaactacgaatctagatgggccaaatgcagagagtcttgctgctgcgctgttgagaataatggaagccaggaaagggcaggagaacttccagttgattgtaatcactcatgatgagagatttgcccatcttatcggtcaaaggcagcttgctgagaagtactatcgagtctccaaggatgagaaccagcacagcataattgaatcccaagagatatttgactaagggtgttctaggaggctgtagcacgcactcgtttgctagtcgaatccagttaatttatgccaagtactggtgccagagcaatgttaacaagctttaggaggctctgttacgccgttacgtcagttgcgtgaaacctatccttcgttgttgtatacttatttaatctggccagaggatggaatgtgtgcactgggtgatggatgtttcacgacatcaatgaatgtttcacaatctagcatccgttttttttgcttcacatgatgtcatacaaaatcgctacggtttcatttggttttggaggtacctacgagtacgatggaacacaacggcatgtttctgcgtcgttggagccgttggattcgcttcaacatttgtaaggttgtctcttaacgtatgatgcttgtgcaatgacgaccatatttgagaaagatatttgtt

SEQ ID NO: 43726 - DNA, 4494 bp, Zea Mays
gaagttgatagggagatagcatccgcaatctaggtttggggcaatcgctctggccagactggatcggagtgcaagtcgtagagggaggcacttggggctcgtggggcaagatgagcaccgttgacaagatgctgatcaaggggattcggagcttcgatccggacaataagaacgtcatcaccttcttcaagccgctcaccctcatcgttggccccaacggtgctggcaagaccacgatcatcgagtgcctgaagctttcttgcaccggcgagctgccccccaactcccgctctggccacaccttcgtccacgaccccaaggtagctggcgagacggaaacaaaaggacaaattaagttgcggtttaagactgcagcaggaaaggatgtggtgtgcatccggtccttccagcttacccaaaaggcatcaaagatggagtttaaggcaattgaaagcgtcctccagactataaatccacacacaggggagaaagtctgcctcagctacagatgtgctgacatggatagagagattcctgccttaatgggtgtttcgaaggccgtactggagaatgttatatttgttcaccaagatgaatccaattggccattgcaggacccgtcaacacttaagaagaagttcgatgacatcttctctgccacacgctatacgaaagctcttgaagtcataaagaaacttcacaaggatcaaatgcaagagatcaagacttttaggttaaagctggagaaccttcagactgtaaaagaccaagcacataagctgcgtgaaaatattgctcaagatcaagaaaagtcagatgcctcaaaatctcagatggagcaactgaaggaaaagatctgtggtaccgagagagaaatcctgcaaatggaaacaagtttggatgaactgagaagacttcagggacaaattgacatcaaggcaacagagagaagtacattacttacgcagcagcatgaaaagcttgctgcactttctgaggaaaatgaagataccgatgaggaactaatggaatggcaaacaaaatttgaagaaaggattgcgttactagaaacaaaaatcagtaaacttgtaagagatatggatgatgaagcatcttatagctccgttctgtccaaacaaaattctgaattaacacatgaaattggaaagctccaggcagaagctgatgctcacctgactatgaagcatgaacgagactcagacataaaaaatatatgcactaaacataatcttgggccggttcctgaacatccctttacgaatgatgttgctatgaaccttacaaacaggattaaagcgagactatcaagtcttgagaatgatttgctggataagaagaaatccaatgaagatcagttagatgttttgtggaaacactatcttaaaataaatgctcgctactccgaagttgatggtcagatacaatctaagattgaatccatgtcaggcattttaagacggagaaaagataaagagaaagaacgcgatgctgcagaagtggagctttcaaaatttaatctatcccgtatcgatgagagggagagacatatgcaaattgaagtcgagaggaagacacttgcgcttggagaaagagactatgattcaattataagtcagaaacgaacagaagtatatagtttggaacagaaaataaaagtgcttctgcgggagaaagatataataaatagaaatgctgatgaaagagtaaaactgggtttgaagaaggatgcattggaaagcagcaaggacaagctcaatgagatagttaatgagcataaggataaaatcaaaaaggtacttagggggaggaatccttttgagaaggatatgaagaaggagatcaatcaagccttttggcctgtggacaaggaatacaatgagttaagatcaaaatcccaggaagcagagcaagagcttaaatttactcacagcaaagtaactgatgctagagaacaattgacaaaacttcgaagagatatggatgcaaaaagaagattcctggactcgaaacttcaatctattttacagatatctgctaatgttgacatgtttcccaaagttctacaagacgccatgaacaaaagagatgaacagaaaagattagagaatttcgcaaatggaatgcgggaaatgcttgcaccttttgaacatttggctcggaagaatcatgtatgcccatgctgtgaacgtgctttcacacctgatgaggaggatgagttcgtgaagaaagatgcaaaactcaagtactgcagagagatctaaagctctggcaatggaatcatcaaatgctgaagctctttttcagcaattggataaacttcggactatctatgatgcttatgtgaagctggtagaagaaaccatacctctagcagagaaaaacttgaatcaacatttggcggatgaaagtcagaaggcgcaggcatttgatgatcttttgggtgttcttgcccatgttcaaatggacagggatgcagtggaagccttattacaacccactgatactattgacaggcatgtacatgaaattcaacagctagtcaaagaagtagaagatcttgaatatgcacttgattctagtggccgaggtgtcaagtctttggaggaaattcaactggagctgaactttctgcagagaacaagggacacattgattgtcgaagtggatgatcttagagatcaacatagaatgctaaatgaagatatgtcaagtgctcaggtgagatggcacaatgctcgggaagagaaagtgaaagcttctagcatattggaaagattccaaaaatctgaagaggaattggtgcttctagctgaggaaaaagaacaactgattgtagaaaagaagcttttagaagagtctcttgatccattgtccaaagagaaagagagcttgttgcaagagtataatgctttgaagcaaaagctggatgaagagtatcatcagcttgcagaaagaaaaagggagttccagcaagaacttgatgctcttggaagacttagtatgaagataaaagggtacttggattccaagaaaaacgaaaagcttaaggaattgcagggaaggcatgttctttgccattctcagttacagagttgcatggcaaaacagcaaagaatatcagctgagttaaacaagagcaaagaactactgcagggccagggccagttgaaaagaaacattgatgacaatctcaagtacaggaaaacaaaggctgatgtggaacaacttactcgtgatatagaatcacttgaagaaaggctgctttcaataggtagcttgtctgctatagaagctgatctgaaacgccattctcaagaaaaagagaggcttaattcagaatttaacaggtggcaaggaacactttctgtttatcaaagtaatatttcaaagcacaaacaagagcttaaactgtcacagtacaaggatatcgagaagcgatatactaatcaatttctccagcttaagacaactgaaatggcaaacaaggacttggacagatattatactgctttagacaaggctcttatgcggttccacagcatgaagatggaggagataaataaaataatcaaggaactgtggcaacagacatacagaggccaggatattgattacataagcataaattctgattctgagggtgctggcactcgatcatacagctaccgcgttgttatgcaaactggtgatgctgagctggaaatgcgagggcgctgcagtgctggtcagaaggttcttgcttctcttataatcagactagcacttgcggaaactttctgcctgaactgcggtatattggctttggatgagccaactacgaatctagatgggccaaatgcagagagtcttgctgctgcgctgttgagaataatggaagccaggaaagggcaggagaacttccagttgattgtaatcactcatgatgagagatttgcccatcttatcggtcaaaggcagcttgctgagaagtactatcgagtctccaaggatgagaaccagcacagcataattgaatcccaagagatatttgactaagggtgttctaggaggctgtagcacgcactcgtttgctagtcgaatccagttaatttatgccaagtactggtgccagagcaatgttaacaagctttaggaggctctgttacgccgttacgtcagttgcgtgaaacctatccttcgttgttgtatacttatttaatctggccagaggatggaatgtgtgcactgggtgatggatgtttcacgacatcaatgaatgtttcacaatctagcatccgttttttttgcttcacatgatgtcatacaaaatcgctacggtttcatttggttttggaggtacctacgagtacgatggaacacaacggcatgtttctgcgtcgttggagccgttggattcgcttcaacatttgtaaggttgtctcttaacgtatgatgcttgtgcaatgacgaccatatttgagaaagatatttgtt

SEQ ID NO: 43727 - DNA, 4512 bp, Zea Mays
ctctttccaatcgttttgcaatcactacgagcgtaatgaatagaagttgatagggagatagcatccgcaatctaggtttggggcaatcgctctggccagactggatcggagtgcaagtcgtagagggaggcacttggggctcgtggggcaagatgagcaccgttgacaagatgctgatcaaggggattcggagcttcgatccggacaataagaacgtcatcaccttcttcaagccgctcaccctcatcgttggccccaacggtgctggcaagaccacgatcatcgagtgcctgaagctttcttgcaccggcgagctgccccccaactcccgctctggccacaccttcgtccacgaccccaaggtagctggcgagacggaaacaaaaggacaaattaagttgcggtttaagactgcagcaggaaaggatgtggtgtgcatccggtccttccagcttacccaaaaggcatcaaagatggagtttaaggcaattgaaagcgtcctccagactataaatccacacacaggggagaaagtctgcctcagctacagatgtgctgacatggatagagagattcctgccttaatgggtgtttcgaaggccgtactggagaatgttatatttgttcaccaagatgaatccaattggccattgcaggacccgtcaacacttaagaagaagttcgatgacatcttctctgccacacgctatacgaaagctcttgaagtcataaagaaacttcacaaggatcaaatgcaagagatcaagacttttaggttaaagctggagaaccttcagactgtaaaagaccaagcacataagctgcgtgaaaatattgctcaagatcaagaaaagtcagatgcctcaaaatctcagatggagcaactgaaggaaaagatctgtggtaccgagagagaaatcctgcaaatggaaacaagtttggatgaactgagaagacttcagggacaaattgacatcaaggcaacagagagaagtacattacttacgcagcagcatgaaaagcttgctgcactttctgaggaaaatgaagataccgatgaggaactaatggaatggcaaacaaaatttgaagaaaggattgcgttactagaaacaaaaatcagtaaacttgtaagagatatggatgatgaagcatcttatagctccgttctgtccaaacaaaattctgaattaacacatgaaattggaaagctccaggcagaagctgatgctcacctgactatgaagcatgaacgagactcagacataaaaaatatatgcactaaacataatcttgggccggttcctgaacatccctttacgaatgatgttgctatgaaccttacaaacaggattaaagcgagactatcaagtcttgagaatgatttgctggataagaagaaatccaatgaagatcagttagatgttttgtggaaacactatcttaaaataaatgctcgctactccgaagttgatggtcagatacaatctaagattgaatccatgtcaggcattttaagacggagaaaagataaagagaaagaacgcgatgctgcagaagtggagctttcaaaatttaatctatcccgtatcgatgagagggagagacatatgcaaattgaagtcgagaggaagacacttgcgcttggagaaagagactatgattcaattataagtcagaaacgaacagaagtatatagtttggaacagaaaataaaagtgcttctgcgggagaaagatataataaatagaaatgctgatgaaagagtaaaactgggtttgaagaaggatgcattggaaagcagcaaggacaagctcaatgagatagttaatgagcataaggataaaatcaaaaaggtacttagggggaggaatccttttgagaaggatatgaagaaggagatcaatcaagccttttggcctgtggacaaggaatacaatgagttaagatcaaaatcccaggaagcagagcaagagcttaaatttactcacagcaaagtaactgatgctagagaacaattgacaaaacttcgaagagatatggatgcaaaaagaagattcctggactcgaaacttcaatctattttacagatatctgctaatgttgacatgtttcccaaagttctacaagacgccatgaacaaaagagatgaacagaaaagattagagaatttcgcaaatggaatgcgggaaatgcttgcaccttttgaacatttggctcggaagaatcatgtatgcccatgctgtgaacgtgctttcacacctgatgaggaggatgagttcgtgaagaaacaaaggatgcaaaactcaagtactgcagagagatctaaagctctggcaatggaatcatcaaatgctgaagctctttttcagcaattggataaacttcggactatctatgatgcttatgtgaagctggtagaagaaaccatacctctagcagagaaaaacttgaatcaacatttggcggatgaaagtcagaaggcgcaggcatttgatgatcttttgggtgttcttgcccatgttcaaatggacagggatgcagtggaagccttattacaacccactgatactattgacaggcatgtacatgaaattcaacagctagtcaaagaagtagaagatcttgaatatgcacttgattctagtggccgaggtgtcaagtctttggaggaaattcaactggagctgaactttctgcagagaacaagggacacattgattgtcgaagtggatgatcttagagatcaacatagaatgctaaatgaagatatgtcaagtgctcaggtgagatggcacaatgctcgggaagagaaagtgaaagcttctagcatattggaaagattccaaaaatctgaagaggaattggtgcttctagctgaggaaaaagaacaactgattgtagaaaagaagcttttagaagagtctcttgatccattgtccaaagagaaagagagcttgttgcaagagtataatgctttgaagcaaaagctggatgaagagtatcatcagcttgcagaaagaaaaagggagttccagcaagaacttgatgctcttggaagacttagtatgaagataaaagggtacttggattccaagaaaaacgaaaagcttaaggaattgcagggaaggcatgttctttgccattctcagttacagagttgcatggcaaaacagcaaagaatatcagctgagttaaacaagagcaaagaactactgcagggccagggccagttgaaaagaaacattgatgacaatctcaagtacaggaaaacaaaggctgatgtggaacaacttactcgtgatatagaatcacttgaagaaaggctgctttcaataggtagcttgtctgctatagaagctgatctgaaacgccattctcaagaaaaagagaggcttaattcagaatttaacaggtggcaaggaacactttctgtttatcaaagtaatatttcaaagcacaaacaagagcttaaactgtcacagtacaaggatatcgagaagcgatatactaatcaatttctccagcttaagacaactgaaatggcaaacaaggacttggacagatattatactgctttagacaaggctcttatgcggttccacagcatgaagatggaggagataaataaaataatcaaggaactgtggcaacagacatacagaggccaggatattgattacataagcataaattctgattctgagggttgttatgcaaactggtgatgctgagctggaaatgcgagggcgctgcagtgctggtcagaaggttcttgcttctcttataatcagactagcacttgcggaaactttctgcctgaactgcggtatattggctttggatgagccaactacgaatctagatgggccaaatgcagagagtcttgctgctgcgctgttgagaataatggaagccaggaaagggcaggagaacttccagttgattgtaatcactcatgatgagagatttgcccatcttatcggtcaaaggcagcttgctgagaagtactatcgagtctccaaggatgagaaccagcacagcataattgaatcccaagagatatttgactaagggtgttctaggaggctgtagcacgcactcgtttgctagtcgaatccagttaatttatgccaagtactggtgccagagcaatgttaacaagctttaggaggctctgttacgccgttacgtcagttgcgtgaaacctatccttcgttgttgtatacttatttaatctggccagaggatggaatgtgtgcactgggtgatggatgtttcacgacatcaatgaatgtttcacaatctagcatccgttttttttgcttcacatgatgtcatacaaaatcgctacggtttcatttggttttggaggtacctacgagtacgatggaacacaacggcatgtttctgcgtcgttggagccgttggattcgcttcaacatttgtaaggttgtctcttaacgtatgatgcttgtgcaatgacgaccatatttgagaaagatatttgtt

SEQ ID NO: 43728 - DNA, 4451 bp, Zea Mays
aaaaacgcgattttctcctccactgcccctccttttctctttccaatcgttttgcaatcactacgagcgtaatgaatagaagttgatagggagatagcatccgcaatctaggtttggggcaatcgctctggccagactggatcggagtgcaagtcgtagagggaggcacttggggctcgtggggcaagatgagcaccgttgacaagatgctgatcaaggggattcggagcttcgatccggacaataagaacgtcatcaccttcttcaagccgctcaccctcatcgttggccccaacggtgctggcaagaccacgatcatcgagtgcctgaagctttcttgcaccggcgagctgccccccaactcccgctctggccacaccttcgtccacgaccccaaggtagctggcgagacggaaacaaaaggacaaattaagttgcggtttaagactgcagcaggaaaggatgtggtgtgcatccggtccttccagcttacccaaaaggcatcaaagatggagtttaaggcaattgaaagcgtcctccagactataaatccacacacaggggaggacccgtcaacacttaagaagaagttcgatgacatcttctctgccacacgctatacgaaagctcttgaagtcataaagaaacttcacaaggatcaaatgcaagagatcaagacttttaggttaaagctggagaaccttcagactgtaaaagaccaagcacataagctgcgtgaaaatattgctcaagatcaagaaaagtcagatgcctcaaaatctcagatggagcaactgaaggaaaagatctgtggtaccgagagagaaatcctgcaaatggaaacaagtttggatgaactgagaagacttcagggacaaattgacatcaaggcaacagagagaagtacattacttacgcagcagcatgaaaagcttgctgcactttctgaggaaaatgaagataccgatgaggaactaatggaatggcaaacaaaatttgaagaaaggattgcgttactagaaacaaaaatcagtaaacttgtaagagatatggatgatgaagcatcttatagctccgttctgtccaaacaaaattctgaattaacacatgaaattggaaagctccaggcagaagctgatgctcacctgactatgaagcatgaacgagactcagacataaaaaatatatgcactaaacataatcttgggccggttcctgaacatccctttacgaatgatgttgctatgaaccttacaaacaggattaaagcgagactatcaagtcttgagaatgatttgctggataagaagaaatccaatgaagatcagttagatgttttgtggaaacactatcttaaaataaatgctcgctactccgaagttgatggtcagatacaatctaagattgaatccatgtcaggcattttaagacggagaaaagataaagagaaagaacgcgatgctgcagaagtggagctttcaaaatttaatctatcccgtatcgatgagagggagagacatatgcaaattgaagtcgagaggaagacacttgcgcttggagaaagagactatgattcaattataagtcagaaacgaacagaagtatatagtttggaacagaaaataaaagtgcttctgcgggagaaagatataataaatagaaatgctgatgaaagagtaaaactgggtttgaagaaggatgcattggaaagcagcaaggacaagctcaatgagatagttaatgagcataaggataaaatcaaaaaggtacttagggggaggaatccttttgagaaggatatgaagaaggagatcaatcaagccttttggcctgtggacaaggaatacaatgagttaagatcaaaatcccaggaagcagagcaagagcttaaatttactcacagcaaagtaactgatgctagagaacaattgacaaaacttcgaagagatatggatgcaaaaagaagattcctggactcgaaacttcaatctattttacagatatctgctaatgttgacatgtttcccaaagttctacaagacgccatgaacaaaagagatgaacagaaaagattagagaatttcgcaaatggaatgcgggaaatgcttgcaccttttgaacatttggctcggaagaatcatgtatgcccatgctgtgaacgtgctttcacacctgatgaggaggatgagttcgtgaagaaacaaaggatgcaaaactcaagtactgcagagagatctaaagctctggcaatggaatcatcaaatgctgaagctctttttcagcaattggataaacttcggactatctatgatgcttatgtgaagctggtagaagaaaccatacctctagcagagaaaaacttgaatcaacatttggcggatgaaagtcagaaggcgcaggcatttgatgatcttttgggtgttcttgcccatgttcaaatggacagggatgcagtggaagccttattacaacccactgatactattgacaggcatgtacatgaaattcaacagctagtcaaagaagtagaagatcttgaatatgcacttgattctagtggccgaggtgtcaagtctttggaggaaattcaactggagctgaactttctgcagagaacaagggacacattgattgtcgaagtggatgatcttagagatcaacatagaatgctaaatgaagatatgtcaagtgctcaggtgagatggcacaatgctcgggaagagaaagtgaaagcttctagcatattggaaagattccaaaaatctgaagaggaattggtgcttctagctgaggaaaaagaacaactgattgtagaaaagaagcttttagaagagtctcttgatccattgtccaaagagaaagagagcttgttgcaagagtataatgctttgaagcaaaagctggatgaagagtatcatcagcttgcagaaagaaaaagggagttccagcaagaacttgatgctcttggaagacttagtatgaagataaaagggtacttggattccaagaaaaacgaaaagcttaaggaattgcagggaaggcatgttctttgccattctcagttacagagttgcatggcaaaacagcaaagaatatcagctgagttaaacaagagcaaagaactactgcagggccagggccagttgaaaagaaacattgatgacaatctcaagtacaggaaaacaaaggctgatgtggaacaacttactcgtgatatagaatcacttgaagaaaggctgctttcaataggtagcttgtctgctatagaagctgatctgaaacgccattctcaagaaaaagagaggcttaattcagaatttaacaggtggcaaggaacactttctgtttatcaaagtaatatttcaaagcacaaacaagagcttaaactgtcacagtacaaggatatcgagaagcgatatactaatcaatttctccagcttaagacaactgaaatggcaaacaaggacttggacagatattatactgctttagacaaggctcttatgcggttccacagcatgaagatggaggagataaataaaataatcaaggaactgtggcaacagacatacagaggccaggatattgattacataagcataaattctgattctgagggtgctggcactcgatcatacagctaccgcgttgttatgcaaactggtgatgctgagctggaaatgcgagggcgctgcagtgctggtcagaaggttcttgcttctcttataatcagactagcacttgcggaaactttctgcctgaactgcggtatattggctttggatgagccaactacgaatctagatgggccaaatgcagagagtcttgctgctgcgctgttgagaataatggaagccaggaaagggcaggagaacttccagttgattgtaatcactcatgatgagagatttgcccatcttatcggtcaaaggcagcttgctgagaagtactatcgagtctccaaggatgagaaccagcacagcataattgaatcccaagagatatttgactaagggtgttctaggaggctgtagcacgcactcgtttgctagtcgaatccagttaatttatgccaagtactggtgccagagcaatgttaacaagctttaggaggctctgttacgccgttacgtcagttgcgtgaaacctatccttcgttgttgtatacttatttaatctggccagaggatggaatgtgtgcactgggtgatggatgtttcacgacatcaatgaatgtttcacaatctagcatccgttttttttgcttcacatgatgtcatacaaaatcgctacggtttcatttggttttggaggtacctacgagtacgatggaacacaacggcatgtttctgcgtcgttggagccgttggattcgcttcaacatttgtaaggttgtctcttaacgtatgatgcttgtgcaatgacgaccatatttgagaaagatatttgtt

SEQ ID NO: 43729 - DNA, 4487 bp, Zea Mays
agactccaaaaaaacgcgattttctcctccactgcccctccttttctctttccaatcgttttgcaatcactacgagcgtaatgaatagaagttgatagggagatagcatccgcaatctaggtttggggcaatcgctctggccagactggatcggagtgcaagtcgtagagggaggcacttggggctcgtggggcaagatgagcaccgttgacaagatgctgatcaaggggattcggagcttcgatccggacaataagaacgtcatcaccttcttcaagccgctcaccctcatcgttggccccaacggtgctggcaagaccacgatcatcgagtgcctgaagctttcttgcaccggcgagctgccccccaactcccgctctggccacaccttcgtccacgaccccaaggtagctggcgagacggaaacaaaaggacaaattaagttgcggtttaagactgcagcaggaaaggatgtggtgtgcatccggtccttccagcttacccaaaaggcatcaaagatggagtttaaggcaattgaaagcgtcctccagactataaatccacacacaggggagaaagtctgcctcagctacagatgtgctgacatggatagagagattcctgccttaatgggtgtttcgaaggccgtactggagaatgttatatttgttcaccaagatgaatccaattggccattgcaggacccgtcaacacttaagaagaagttcgatgacatcttctctgccacacgctatacgaaagctcttgaagtcataaagaaacttcacaaggatcaaatgcaagagatcaagacttttaggttaaagctggagaaccttcagactgtaaaagaccaagcacataagctgcgtgaaaatattgctcaagatcaagaaaagtcagatgcctcaaaatctcagatggagcaactgaaggaaaagatctgtggtaccgagagagaaatcctgcaaatggaaacaagtttggatgaactgagaagacttcagggacaaattgacatcaaggcaacagagagaagtacattacttacgcagcagcatgaaaagcttgctgcactttctgaggaaaatgaagataccgatgaggaactaatggaatggcaaacaaaatttgaagaaaggattgcgttactagaaacaaaaatcagtaaacttgctcacctgactatgaagcatgaacgagactcagacataaaaaatatatgcactaaacataatcttgggccggttcctgaacatccctttacgaatgatgttgctatgaaccttacaaacaggattaaagcgagactatcaagtcttgagaatgatttgctggataagaagaaatccaatgaagatcagttagatgttttgtggaaacactatcttaaaataaatgctcgctactccgaagttgatggtcagatacaatctaagattgaatccatgtcaggcattttaagacggagaaaagataaagagaaagaacgcgatgctgcagaagtggagctttcaaaatttaatctatcccgtatcgatgagagggagagacatatgcaaattgaagtcgagaggaagacacttgcgcttggagaaagagactatgattcaattataagtcagaaacgaacagaagtatatagtttggaacagaaaataaaagtgcttctgcgggagaaagatataataaatagaaatgctgatgaaagagtaaaactgggtttgaagaaggatgcattggaaagcagcaaggacaagctcaatgagatagttaatgagcataaggataaaatcaaaaaggtacttagggggaggaatccttttgagaaggatatgaagaaggagatcaatcaagccttttggcctgtggacaaggaatacaatgagttaagatcaaaatcccaggaagcagagcaagagcttaaatttactcacagcaaagtaactgatgctagagaacaattgacaaaacttcgaagagatatggatgcaaaaagaagattcctggactcgaaacttcaatctattttacagatatctgctaatgttgacatgtttcccaaagttctacaagacgccatgaacaaaagagatgaacagaaaagattagagaatttcgcaaatggaatgcgggaaatgcttgcaccttttgaacatttggctcggaagaatcatgtatgcccatgctgtgaacgtgctttcacacctgatgaggaggatgagttcgtgaagaaacaaaggatgcaaaactcaagtactgcagagagatctaaagctctggcaatggaatcatcaaatgctgaagctctttttcagcaattggataaacttcggactatctatgatgcttatgtgaagctggtagaagaaaccatacctctagcagagaaaaacttgaatcaacatttggcggatgaaagtcagaaggcgcaggcatttgatgatcttttgggtgttcttgcccatgttcaaatggacagggatgcagtggaagccttattacaacccactgatactattgacaggcatgtacatgaaattcaacagctagtcaaagaagtagaagatcttgaatatgcacttgattctagtggccgaggtgtcaagtctttggaggaaattcaactggagctgaactttctgcagagaacaagggacacattgattgtcgaagtggatgatcttagagatcaacatagaatgctaaatgaagatatgtcaagtgctcaggtgagatggcacaatgctcgggaagagaaagtgaaagcttctagcatattggaaagattccaaaaatctgaagaggaattggtgcttctagctgaggaaaaagaacaactgattgtagaaaagaagcttttagaagagtctcttgatccattgtccaaagagaaagagagcttgttgcaagagtataatgctttgaagcaaaagctggatgaagagtatcatcagcttgcagaaagaaaaagggagttccagcaagaacttgatgctcttggaagacttagtatgaagataaaagggtacttggattccaagaaaaacgaaaagcttaaggaattgcagggaaggcatgttctttgccattctcagttacagagttgcatggcaaaacagcaaagaatatcagctgagttaaacaagagcaaagaactactgcagggccagggccagttgaaaagaaacattgatgacaatctcaagtacaggaaaacaaaggctgatgtggaacaacttactcgtgatatagaatcacttgaagaaaggctgctttcaataggtagcttgtctgctatagaagctgatctgaaacgccattctcaagaaaaagagaggcttaattcagaatttaacaggtggcaaggaacactttctgtttatcaaagtaatatttcaaagcacaaacaagagcttaaactgtcacagtacaaggatatcgagaagcgatatactaatcaatttctccagcttaagacaactgaaatggcaaacaaggacttggacagatattatactgctttagacaaggctcttatgcggttccacagcatgaagatggaggagataaataaaataatcaaggaactgtggcaacagacatacagaggccaggatattgattacataagcataaattctgattctgagggtgctggcactcgatcatacagctaccgcgttgttatgcaaactggtgatgctgagctggaaatgcgagggcgctgcagtgctggtcagaaggttcttgcttctcttataatcagactagcacttgcggaaactttctgcctgaactgcggtatattggctttggatgagccaactacgaatctagatgggccaaatgcagagagtcttgctgctgcgctgttgagaataatggaagccaggaaagggcaggagaacttccagttgattgtaatcactcatgatgagagatttgcccatcttatcggtcaaaggcagcttgctgagaagtactatcgagtctccaaggatgagaaccagcacagcataattgaatcccaagagatatttgactaagggtgttctaggaggctgtagcacgcactcgtttgctagtcgaatccagttaatttatgccaagtactggtgccagagcaatgttaacaagctttaggaggctctgttacgccgttacgtcagttgcgtgaaacctatccttcgttgttgtatacttatttaatctggccagaggatggaatgtgtgcactgggtgatggatgtttcacgacatcaatgaatgtttcacaatctagcatccgttttttttgcttcacatgatgtcatacaaaatcgctacggtttcatttggttttggaggtacctacgagtacgatggaacacaacggcatgtttctgcgtcgttggagccgttggattcgcttcaacatttgtaaggttgtctcttaacgtatgatgcttgtgcaatgacgaccatatttgagaaagatatttgtt

SEQ ID NO: 43730 - DNA, 4563 bp, Zea Mays
aacgccgctgaagactccaaaaaaacgcgattttctcctccactgcccctccttttctctttccaatcgttttgcaatcactacgagcgtaatgaatagaagttgatagggagatagcatccgcaatctaggtttggggcaatcgctctggccagactggatcggagtgcaagtcgtagagggaggcacttggggctcgtggggcaagatgagcaccgttgacaagatgctgatcaaggggattcggagcttcgatccggacaataagaacgtcatcaccttcttcaagccgctcaccctcatcgttggccccaacggtgctggcaagaccacgatcatcgagtgcctgaagctttcttgcaccggcgagctgccccccaactcccgctctggccacaccttcgtccacgaccccaaggtagctggcgagacggaaacaaaaggacaaattaagttgcggtttaagactgcagcaggaaaggatgtggtgtgcatccggtccttccagcttacccaaaaggcatcaaagatggagtttaaggcaattgaaagcgtcctccagactataaatccacacacaggggagaaagtctgcctcagctacagatgtgctgacatggatagagagattcctgccttaatgggtgtttcgaaggccgtactggagaatgttatatttgttcaccaagatgaatccaattggccattgcaggacccgtcaacacttaagaagaagttcgatgacatcttctctgccacacgctatacgaaagctcttgaagtcataaagaaacttcacaaggatcaaatgcaagagatcaagacttttaggttaaagctggagaaccttcagactgtaaaagaccaagcacataagctgcgtgaaaatattgctcaagatcaagaaaagtcagatgcctcaaaatctcagatggagcaactgaaggaaaagatctgtggtaccgagagagaaatcctgcaaatggaaacaagtttggatgaactgagaagacttcagggacaaattgacatcaaggcaacagagagaagtacattacttacgcagcagcatgaaaagcttgctgcactttctgaggaaaatgaagataccgatgaggaactaatggaatggcaaacaaaatttgaagaaaggattgcgttactagaaacaaaaatcagtaaacttgtaagagatatggatgatgaagcatcttatagctccgttctgtccaaacaaaattctgaattaacacatgaaattggaaagctccaggcagaagctgatgctcacctgactatgaagcatgaacgagactcagacataaaaaatatatgcactaaacataatcttgggccggttcctgaacatccctttacgaatgatgttgctatgaaccttacaaacaggattaaagcgagactatcaagtcttgagaatgatttgctggataagaagaaatccaatgaagatcagttagatgttttgtggaaacactatcttaaaataaatgctcgctactccgaagttgatggtcagatacaatctaagattgaatccatgtcaggcattttaagacggagaaaagataaagagaaagaacgcgatgctgcagaagtggagctttcaaaatttaatctatcccgtatcgatgagagggagagacatatgcaaattgaagtcgagaggaagacacttgcgcttggagaaagagactatgattcaattataagtcagaaacgaacagaagtatatagtttggaacagaaaataaaagtgcttctgcgggagaaagatataataaatagaaatgctgatgaaagagtaaaactgggtttgaagaaggatgcattggaaagcagcaaggacaagctcaatgagatagttaatgagcataaggataaaatcaaaaaggtacttagggggaggaatccttttgagaaggatatgaagaaggagatcaatcaagccttttggcctgtggacaaggaatacaatgagttaagatcaaaatcccaggaagcagagcaagagcttaaatttactcacagcaaagtaactgatgctagagaacaattgacaaaacttcgaagagatatggatgcaaaaagaagattcctggactcgaaacttcaatctattttacagatatctgctaatgttgacatgtttcccaaagttctacaagacgccatgaacaaaagagatgaacagaaaagattagagaatttcgcaaatggaatgcgggaaatgcttgcaccttttgaacatttggctcggaagaatcatgtatgcccatgctgtgaacgtgctttcacacctgatgaggaggatgagttcgtgaagaaacaaaggatgcaaaactcaagtactgcagagagatctaaagctctggcaatggaatcatcaaatgctgaagctctttttcagcaattggataaacttcggactatctatgatgcttatgtgaagctggtagaagaaaccatacctctagcagagaaaaacttgaatcaacatttggcggatgaaagtcagaaggcgcaggcatttgatgatcttttgggtgttcttgcccatgttcaaatggacagggatgcagtggaagccttattacaacccactgatactattgacaggcatgtacatgaaattcaacagctagtcaaagaagtagaagatcttgaatatgcacttgattctagtggccgaggtgtcaagtctttggaggaaattcaactggagctgaactttctgcagagaacaagggacacattgattgtcgaagtggatgatcttagagatcaacatagaatgctaaatgaagatatgtcaagtgctcaggtgagatggcacaatgctcgggaagagaaagtgaaagcttctagcatattggaaagattccaaaaatctgaagaggaattggtgcttctagctgaggaaaaagaacaactgattgtagaaaagaagagaaagagagcttgttgcaagagtataatgctttgaagcaaaagctggatgaagagtatcatcagcttgcagaaagaaaaagggagttccagcaagaacttgatgctcttggaagacttagtatgaagataaaagggtacttggattccaagaaaaacgaaaagcttaaggaattgcagggaaggcatgttctttgccattctcagttacagagttgcatggcaaaacagcaaagaatatcagctgagttaaacaagagcaaagaactactgcagggccagggccagttgaaaagaaacattgatgacaatctcaagtacaggaaaacaaaggctgatgtggaacaacttactcgtgatatagaatcacttgaagaaaggctgctttcaataggtagcttgtctgctatagaagctgatctgaaacgccattctcaagaaaaagagaggcttaattcagaatttaacaggtggcaaggaacactttctgtttatcaaagtaatatttcaaagcacaaacaagagcttaaactgtcacagtacaaggatatcgagaagcgatatactaatcaatttctccagcttaagacaactgaaatggcaaacaaggacttggacagatattatactgctttagacaaggctcttatgcggttccacagcatgaagatggaggagataaataaaataatcaaggaactgtggcaacagacatacagaggccaggatattgattacataagcataaattctgattctgagggtgctggcactcgatcatacagctaccgcgttgttatgcaaactggtgatgctgagctggaaatgcgagggcgctgcagtgctggtcagaaggttcttgcttctcttataatcagactagcacttgcggaaactttctgcctgaactgcggtatattggctttggatgagccaactacgaatctagatgggccaaatgcagagagtcttgctgctgcgctgttgagaataatggaagccaggaaagggcaggagaacttccagttgattgtaatcactcatgatgagagatttgcccatcttatcggtcaaaggcagcttgctgagaagtactatcgagtctccaaggatgagaaccagcacagcataattgaatcccaagagatatttgactaagggtgttctaggaggctgtagcacgcactcgtttgctagtcgaatccagttaatttatgccaagtactggtgccagagcaatgttaacaagctttaggaggctctgttacgccgttacgtcagttgcgtgaaacctatccttcgttgttgtatacttatttaatctggccagaggatggaatgtgtgcactgggtgatggatgtttcacgacatcaatgaatgtttcacaatctagcatccgttttttttgcttcacatgatgtcatacaaaatcgctacggtttcatttggttttggaggtacctacgagtacgatggaacacaacggcatgtttctgcgtcgttggagccgttggattcgcttcaacatttgtaaggttgtctcttaacgtatgatgcttgtgcaatgacgaccatatttgagaaagatatttgtt

SEQ ID NO: 43731 - DNA, 4631 bp, Zea Mays
cctaagaaccctaaccggtacaaaaccctaaaaaccctaacgccgctgaagactccaaaaaaacgcgattttctcctccactgcccctccttttctctttccaatcgttttgcaatcactacgagcgtaatgaatagaagttgatagggagatagcatccgcaatctaggtttggggcaatcgctctggccagactggatcggagtgcaagtcgtagagggaggcacttggggctcgtggggcaagatgagcaccgttgacaagatgctgatcaaggggattcggagcttcgatccggacaataagaacgtcatcaccttcttcaagccgctcaccctcatcgttggccccaacggtgctggcaagaccacgatcatcgagtgcctgaagctttcttgcaccggcgagctgccccccaactcccgctctggccacaccttcgtccacgaccccaagctggcgagacggaaacaaaaggacaaattaagttgcggtttaagactgcagcaggaaaggatgtggtgtgcatccggtccttccagcttacccaaaaggcatcaaagatggagtttaaggcaattgaaagcgtcctccagactataaatccacacacaggggagaaagtctgcctcagctacagatgtgctgacatggatagagagattcctgccttaatgggtgtttcgaaggccgtactggagaatgttatatttgttcaccaagatgaatccaattggccattgcaggacccgtcaacacttaagaagaagttcgatgacatcttctctgccacacgctatacgaaagctcttgaagtcataaagaaacttcacaaggatcaaatgcaagagatcaagacttttaggttaaagctggagaaccttcagactgtaaaagaccaagcacataagctgcgtgaaaatattgctcaagatcaagaaaagtcagatgcctcaaaatctcagatggagcaactgaaggaaaagatctgtggtaccgagagagaaatcctgcaaatggaaacaagtttggatgaactgagaagacttcagggacaaattgacatcaaggcaacagagagaagtacattacttacgcagcagcatgaaaagcttgctgcactttctgaggaaaatgaagataccgatgaggaactaatggaatggcaaacaaaatttgaagaaaggattgcgttactagaaacaaaaatcagtaaacttgtaagagatatggatgatgaagcatcttatagctccgttctgtccaaacaaaattctgaattaacacatgaaattggaaagctccaggcagaagctgatgctcacctgactatgaagcatgaacgagactcagacataaaaaatatatgcactaaacataatcttgggccggttcctgaacatccctttacgaatgatgttgctatgaaccttacaaacaggattaaagcgagactatcaagtcttgagaatgatttgctggataagaagaaatccaatgaagatcagttagatgttttgtggaaacactatcttaaaataaatgctcgctactccgaagttgatggtcagatacaatctaagattgaatccatgtcaggcattttaagacggagaaaagataaagagaaagaacgcgatgctgcagaagtggagctttcaaaatttaatctatcccgtatcgatgagagggagagacatatgcaaattgaagtcgagaggaagacacttgcgcttggagaaagagactatgattcaattataagtcagaaacgaacagaagtatatagtttggaacagaaaataaaagtgcttctgcgggagaaagatataataaatagaaatgctgatgaaagagtaaaactgggtttgaagaaggatgcattggaaagcagcaaggacaagctcaatgagatagttaatgagcataaggataaaatcaaaaaggtacttagggggaggaatccttttgagaaggatatgaagaaggagatcaatcaagccttttggcctgtggacaaggaatacaatgagttaagatcaaaatcccaggaagcagagcaagagcttaaatttactcacagcaaagtaactgatgctagagaacaattgacaaaacttcgaagagatatggatgcaaaaagaagattcctggactcgaaacttcaatctattttacagatatctgctaatgttgacatgtttcccaaagttctacaagacgccatgaacaaaagagatgaacagaaaagattagagaatttcgcaaatggaatgcgggaaatgcttgcaccttttgaacatttggctcggaagaatcatgtatgcccatgctgtgaacgtgctttcacacctgatgaggaggatgagttcgtgaagaaacaaaggatgcaaaactcaagtactgcagagagatctaaagctctggcaatggaatcatcaaatgctgaagctctttttcagcaattggataaacttcggactatctatgatgcttatgtgaagctggtagaagaaaccatacctctagcagagaaaaacttgaatcaacatttggcggatgaaagtcagaaggcgcaggcatttgatgatcttttgggtgttcttgcccatgttcaaatggacagggatgcagtggaagccttattacaacccactgatactattgacaggcatgtacatgaaattcaacagctagtcaaagaagtagaagatcttgaatatgcacttgattctagtggccgaggtgtcaagtctttggaggaaattcaactggagctgaactttctgcagagaacaagggacacattgattgtcgaagtggatgatcttagagatcaacatagaatgctaaatgaagatatgtcaagtgctcaggtgagatggcacaatgctcgggaagagaaagtgaaagcttctagcatattggaaagattccaaaaatctgaagaggaattggtgcttctagctgaggaaaaagaacaactgattgtagaaaagaagcttttagaagagtctcttgatccattgtccaaagagaaagagagcttgttgcaagagtataatgctttgaagcaaaagctggatgaagagtatcatcagcttgcagaaagaaaaagggagttccagcaagaacttgatgctcttggaagacttagtatgaagataaaagggtacttggattccaagaaaaacgaaaagcttaaggaattgcagggaaggcatgttctttgccattctcagttacagagttgcatggcaaaacagcaaagaatatcagctgagttaaacaagagcaaagaactactgcagggccagggccagttgaaaagaaacattgatgacaatctcaagtacaggaaaacaaaggctgatgtggaacaacttactcgtgatatagaatcacttgaagaaaggctgctttcaataggtagcttgtctgctatagaagctgatctgaaacgccattctcaagaaaaagagaggcttaattcagaatttaacaggtggcaaggaacactttctgtttatcaaagtaatatttcaaagcacaaacaagagcttaaactgtcacagtacaaggatatcgagaagcgatatactaatcaatttctccagcttaagacaactgaaatggcaaacaaggacttggacagatattatactgctttagacaaggctcttatgcggttccacagcatgaagatggaggagataaataaaataatcaaggaactgtggcaacagacatacagaggccaggatattgattacataagcataaattctgattctgagggtgctggcactcgatcatacagctaccgcgttgttatgcaaactggtgatgctgagctggaaatgcgagggcgctgcagtgctggtcagaaggttcttgcttctcttataatcagactagcacttgcggaaactttctgcctgaactgcggtatattggctttggatgagccaactacgaatctagatgggccaaatgcagagagtcttgctgctgcgctgttgagaataatggaagccaggaaagggcaggagaacttccagttgattgtaatcactcatgatgagagatttgcccatcttatcggtcaaaggcagcttgctgagaagtactatcgagtctccaaggatgagaaccagcacagcataattgaatcccaagagatatttgactaagggtgttctaggaggctgtagcacgcactcgtttgctagtcgaatccagttaatttatgccaagtactggtgccagagcaatgttaacaagctttaggaggctctgttacgccgttacgtcagttgcgtgaaacctatccttcgttgttgtatacttatttaatctggccagaggatggaatgtgtgcactgggtgatggatgtttcacgacatcaatgaatgtttcacaatctagcatccgttttttttgcttcacatgatgtcatacaaaatcgctacggtttcatttggttttggaggtacctacgagtacgatggaacacaacggcatgtttctgcgtcgttggagccgttggattcgcttcaacatttgtaaggttgtctcttaacgtatgatgcttgtgcaatgacgaccatatttgagaaagatatttgtt

SEQ ID NO: 43732 - DNA, 4645 bp, Zea Mays
aaaaccctaagaaccctaaccggtacaaaaccctaaaaaccctaacgccgctgaagactccaaaaaaacgcgattttctcctccactgcccctccttttctctttccaatcgttttgcaatcactacgagcgtaatgaatagaagttgatagggagatagcatccgcaatctaggtttggggcaatcgctctggccagactggatcggagtgcaagtcgtagagggaggcacttggggctcgtggggcaagatgagcaccgttgacaagatgctgatcaaggggattcggagcttcgatccggacaataagaacgtcatcaccttcttcaagccgctcaccctcatcgttggccccaacggtgctggcaagaccacgatcatcgagtgcctgaagctttcttgcaccggcgagctgccccccaactcccgctctggccacaccttcgtccacgaccccaaggtagctggcgagacggaaacaaaaggacaaattaagttgcggtttaagactgcagcaggaaaggatgtggtgtgcatccggtccttccagcttacccaaaaggcatcaaagatggagtttaaggcaattgaaagcgtcctccagactataaatccacacacaggggagaaagtctgcctcagctacagatgtgctgacatggatagagagattcctgccttaatgggtgtttcgaaggccgtactggagaatgttatatttgttcaccaagatgaatccaattggccattgcaggacccgtcaacacttaagaagaagttcgatgacatcttctctgccacacgctatacgaaagctcttgaagtcataaagaaacttcacaaggatcaaatgcaagagatcaagacttttaggttaaagctggagaaccttcagactgtaaaagaccaagcacataagctgcgtgaaaatattgctcaagatcaagaaaagtcagatgcctcaaaatctcagatggagcaactgaaggaaaagatctgtggtaccgagagagaaatcctgcaaatggaaacaagtttggatgaactgagaagacttcagggacaaattgacatcaaggcaacagagagaagtacattacttacgcagcagcatgaaaagcttgctgcactttctgaggaaaatgaagataccgatgaggaactaatggaatggcaaacaaaatttgaagaaaggattgcgttactagaaacaaaaatcagtaaacttgtaagagatatggatgatgaagcatcttatagctccgttctgtccaaacaaaattctgaattaacacatgaaattggaaagctccaggcagaagctgatgctcacctgactatgaagcatgaacgagactcagacataaaaaatatatgcactaaacataatcttgggccggttcctgaacatccctttacgaatgatgttgctatgaaccttacaaacaggattaaagcgagactatcaagtcttgagaatgatttgctggataagaagaaatccaatgaagatcagttagatgttttgtggaaacactatcttaaaataaatgctcgctactccgaagttgatggtcagatacaatctaagattgaatccatgtcaggcattttaagacggagaaaagataaagagaaagaacgcgatgctgcagaagtggagctttcaaaatttaatctatcccgtatcgatgagagggagagacatatgcaaattgaagtcgagaggaagacacttgcgcttggagaaagagactatgattcaattataagtcagaaacgaacagaagtatatagtttggaacagaaaataaaagtgcttctgcgggagaaagatataataaatagaaatgctgatgaaagagtaaaactgggtttgaagaaggatgcattggaaagcagcaaggacaagctcaatgagatagttaatgagcataaggataaaatcaaaaaggtacttagggggaggaatccttttgagaaggatatgaagaaggagatcaatcaagccttttggcctgtggacaaggaatacaatgagttaagatcaaaatcccaggaagcagagcaagagcttaaatttactcacagcaaagtaactgatgctagagaacaattgacaaaacttcgaagagatatggatgcaaaaagaagattcctggactcgaaacttcaatctattttacagatatctgctaatgttgacatgtttcccaaagttctacaagacgccatgaacaaaagagatgaacagaaaagattagagaatttcgcaaatggaatgcgggaaatgcttgcaccttttgaacatttggctcggaagaatcatgtatgcccatgctgtgaacgtgctttcacacctgatgaggaggatgagttcgtgaagaaacaaaggatgcaaaactcaagtactgcagagagatctaaagctctggcaatggaatcatcaaatgctgaagctctttttcagcaattggataaacttcggactatctatgatgcttatgtgaagctggtagaagaaaccatacctctagcagagaaaaacttgaatcaacatttggcggatgaaagtcagaaggcgcaggcatttgatgatcttttgggtgttcttgcccatgttcaaatggacagggatgcagtggaagccttattacaacccactgatactattgacaggcatgtacatgaaattcaacagctagtcaaagaagtagaagatcttgaatatgcacttgattctagtggccgaggtgtcaagtctttggaggaaattcaactggagctgaactttctgcagagaacaagggacacattgattgtcgaagtggatgatcttagagatcaacatagaatgctaaatgaagatatgtcaagtgctcaggtgagatggcacaatgctcgggaagagaaagtgaaagcttctagcatattggaaagattccaaaaatctgaagaggaattggtgcttctagctgaggaaaaagaacaactgattgtagaaaagaagcttttagaagagtctcttgatccattgtccaaagagaaagagagcttgttgcaagagtataatgctttgaagcaaaagctggatgaagagtatcatcagcttgcagaaagaaaaagggagttccagcaagaacttgatgctcttggaagacttagtatgaagataaaagggttaggtacttggattccaagaaaaacgaaaagcttaaggaattgcagggaaggcatgttctttgccattctcagttacagagttgcatggcaaaacagcaaagaatatcagctgagttaaacaagagcaaagaactactgcagggccagggccagttgaaaagaaacattgatgacaatctcaagtacaggaaaacaaaggctgatgtggaacaacttactcgtgatatagaatcacttgaagaaaggctgctttcaataggtagcttgtctgctatagaagctgatctgaaacgccattctcaagaaaaagagaggcttaattcagaatttaacaggtggcaaggaacactttctgtttatcaaagtaatatttcaaagcacaaacaagagcttaaactgtcacagtacaaggatatcgagaagcgatatactaatcaatttctccagcttaagacaactgaaatggcaaacaaggacttggacagatattatactgctttagacaaggctcttatgcggttccacagcatgaagatggaggagataaataaaataatcaaggaactgtggcaacagacatacagaggccaggatattgattacataagcataaattctgattctgagggtgctggcactcgatcatacagctaccgcgttgttatgcaaactggtgatgctgagctggaaatgcgagggcgctgcagtgctggtcagaaggttcttgcttctcttataatcagactagcacttgcggaaactttctgcctgaactgcggtatattggctttggatgagccaactacgaatctagatgggccaaatgcagagagtcttgctgctgcgctgttgagaataatggaagccaggaaagggcaggagaacttccagttgattgtaatcactcatgatgagagatttgcccatcttatcggtcaaaggcagcttgctgagaagtactatcgagtctccaaggatgagaaccagcacagcataattgaatcccaagagatatttgactaagggtgttctaggaggctgtagcacgcactcgtttgctagtcgaatccagttaatttatgccaagtactggtgccagagcaatgttaacaagctttaggaggctctgttacgccgttacgtcagttgcgtgaaacctatccttcgttgttgtatacttatttaatctggccagaggatggaatgtgtgcactgggtgatggatgtttcacgacatcaatgaatgtttcacaatctagcatccgttttttttgcttcacatgatgtcatacaaaatcgctacggtttcatttggttttggaggtacctacgagtacgatggaacacaacggcatgtttctgcgtcgttggagccgttggattcgcttcaacatttgtaaggttgtctcttaacgtatgatgcttgtgcaatgacgaccatatttgagaaagatatttgtt

SEQ ID NO: 43733 - DNA, 3698 bp, Zea Mays
aaaaacgcgattttctcctccactgcccctccttttctctttccaatcgttttgcaatcactacgagcgtaatgaatagaagttgatagggagatagcatccgcaatctaggtttggggcaatcgctctggccagactggatcggagtgcaagtcgtagagggaggcacttggggctcgtggggcaagatgagcaccgttgacaagatgctgatcaaggggattcggagcttcgatccggacaataagaacgtcatcaccttcttcaagccgctcaccctcatcgttggccccaacggtgctggcaagaccacgatcatcgagtgcctgaagctttcttgcaccggcgagctgccccccaactcccgctctggccacaccttcgtccacgaccccaaggtagctggcgagacggaaacaaaaggacaaattaagttgcggtttaagactgcagcaggaaaggatgtggtgtgcatccggtccttccagcttacccaaaaggcatcaaagatggagtttaaggcaattgaaagcgtcctccagactataaatccacacacaggggagaaagtctgcctcagctacagatgtgctgacatggatagagagattcctgccttaatgggtgtttcgaaggccgtactggagaatgttatatttgttcaccaagatgaatccaattggccattgcaggacccgtcaacacttaagaagaagttcgatgacatcttctctgccacacgctatacgaaagctcttgaagtcataaagaaacttcacaaggatcaaatgcaagagatcaagacttttaggttaaagctggagaaccttcagactgtaaaagaccaagcacataagctgcgtgaaaatattgctcaagatcaagaaaagtcagatgcctcaaaatctcagatggagcaactgaaggaaaagatctgtggtaccgagagagaaatcctgcaaatggaaacaagtttggatgaactgagaagacttcagggacaaattgacatcaaggcaacagagagaagtacattacttacgcagcagcatgaaaagcttgctgcactttctgaggaaaatgaagataccgatgaggaactaatggaatggcaaacaaaatttgaagaaaggattgcgttactagaaacaaaaatcagtaaacttgtaagagatatggatgatgaagcatcttatagctccgttctgtccaaacaaaattctgaattaacacatgaaattggaaagctccaggcagaagctgatgctcacctgactatgaagcatgaacgagactcagacataaaaaatatatgcactaaacataatcttgggccggttcctgaacatccctttacgaatgatgttgctatgaaccttacaaacaggattaaagcgagactatcaagtcttgagaatgatttgctggataagaagaaatccaatgaagatcagttagatgttttgtggaaacactatcttaaaataaatgctcgctactccgaagttgatggtcagatacaatctaagattgaatccatgtcaggcattttaagacggagaaaagataaagagaaagaacgcgatgctgcagaagtggagctttcaaaatttaatctatcccgtatcgatgagagggagagacatatgcaaattgaagtcgagaggaagacacttgcgcttggagaaagagactatgattcaattataagtcagaaacgaacagaagtatatagtttggaacagaaaataaaagtgcttctgcgggagaaagatataataaatagaaatgctgatgaaagagtaaaactgggtttgaagaaggatgcattggaaagcagcaaggacaagctcaatgagatagttaatgagcataaggataaaatcaaaaaggtacttagggggaggaatccttttgagaaggatatgaagaaggagatcaatcaagccttttggcctgtggacaaggaatacaatgagttaagatcaaaatcccaggaagcagagcaagagcttaaatttactcacagcaaagtaactgatgctagagaacaattgacaaaacttcgaagagatatggatgcaaaaagaagattcctggactcgaaacttcaatctattttacagatatctgctaatgttgacatgtttcccaaagttctacaagacgccatgaacaaaagagatgaacagaaaagattagagaatttcgcaaatggaatgcgggaaatgcttgcaccttttgaacatttggctcggaagaatcatgtatgcccatgctgtgaacgtgctttcacacctgatgaggaggatgagttcgtgaagaaacaaaggatgcaaaactcaagtactgcagagagatctaaagctctggcaatggaatcatcaaatgctgaagctctttttcagcaattggataaacttcggactatctatgatgcttatgtgaagctggtagaagaaaccatacctctagcagagaaaaacttgaatcaacatttggcggatgaaagtcagaaggcgcaggcatttgatgatcttttgggtgttcttgcccatgttcaaatggacagggatgcagtggaagccttattacaacccactgatactattgacaggcatgtacatgaaattcaacagctagtcaaagaagtagaagatcttgaatatgcacttgattctagtggccgaggtgtcaagtctttggaggaaattcaactggagctgaactttctgcagagaacaagggacacattgattgtcgaagtggatgatcttagagatcaacatagaatgctaaatgaagatatgtcaagtgctcaggtgagatggcacaatgctcgggaagagaaagtgaaagcttctagcatattggaaagattccaaaaatctgaagaggaattggtgcttctagctgaggaaaaagaacaactgattgtagaaaagaagcttttagaagagtctcttgatccattgtccaaagagaaagagagcttgttgcaagagtataatgctttgaagcaaaagctggatgaagagtatcatcagcttgcagaaagaaaaagggagttccagcaagaacttgatgctcttggaagacttagtatgaagataaaagggtacttggattccaagaaaaacgaaaagcttaaggaattgcagggaaggcatgttctttgccattctcagttacagagttgcatggcaaaacagcaaagaatatcagctgagttaaacaagagcaaagaactactgcagggccagggccagttgaaaagaaacattgatgacaatctcaagtacaggaaaacaaaggctgatgtggaacaacttactcgtgatatagaatcacttgaagaaaggctgctttcaataggtagcttgtctgctatagaagctgatctgaaacgccattctcaagaaaaagagaggcttaattcagaatttaacaggtggcaaggaacactttctgtttatcaaagtaatatttcaaagcacaaacaagagcttaaactgtcacagtacaaggatatcgagaagcgatatactaatcaatttctccagcttaagacaactgaaatggcaaacaaggacttggacagatattatactgctttagacaagatctggctgcagcgccgacaattgctggttaaggtgcgaaattcagcgagccgcctctatgtccctgacattgac

SEQ ID NO: 43734 - DNA, 451 bp, Zea Mays
cgctcattctatcttagatgtggtcgccctttcgctgcagctgggcctggtcgcgaggccgtgctcctcgacctcgttcgacctcgccatcggttgctcactcctgttgccgtgcaagctgccaggtcatcggacgctgctctcagctcgccgtaggactcgctgaacctgccctatagcgccagcatgccaagtcactgtcacgggaattcgcctcgcagcactactatgttagtcgtctgccgtgctttggaaccacgtggtcgacctccctgcttgctgcgcttatgttacagtttggagagaaaatccaaagtttgtttgatggagaaagaagcgaagccgcgcgacactcgtcagatgttcgacaacaagcccgagccaagatttatcaacattctcccgagtgttgagtcacgtttgatactgacaatgagcagcatgtggttcc

SEQ ID NO: 43735 - DNA, 1452 bp, Zea Mays
agctcagcgacgagcgcttcgtgtaggtggtgcggttcccaaaccacgtgatgcgctggcttgatgcccagaccccagcagcctccgtcatgctcgtctgcttcggcagcaagtacttcatgtcgaagcagcggtcgcggatgccgtcactcagcccttgtgccttgtcgagctcatctgcctctcttcctactcgccccaaccgcgtcattaaaccgctcattctatcttagatgtggtcgccctttcgctgcagctgggcctggtcgcgaggccgtgctcctcgacctcgttcgacctcgccatcggttgctcactcctgttgccgtgcaagctgccaggtcatcggacgctgctctcagctcgccgtaggactcgctgaacctgccctatagcgccagcatgccaagtcactgtcacgggaattcgcctcgcagcactactatgttagtcgtctgccgtgctttggaaccacgtggtcgacctccctgcttgctgcgcttatgttacagtttggagagaaaatccaaagtttgtttgatggagaaagaagcgaagccgcgcgacactcgtcagatgttcgacaacaagcccgagccaagatttatcaacattctcccgagtgttgagtcacgtttgatactggtataatatttactgcccgaatcgcttgcagcaatttggtcgatgtcgtgtggtaaatcgccagtttgagatataggttatgggaatagagtttcggtgggtatatttgtcaagcatgattaaactaattctaattttgcagtgtatggtatatcggtggtgcacaagttaaatttagtgctttaagcaattatcaataagtctgtcgatgttaattattatacttagtcttatatcgctagctagtatttgcttaacgcttgttataagtgtttcatcatcttcggtgtagattatccatcttatgctatttatactcgtgctcatacatgtgcatcgtgcatctcatgaggtacgctagttgatcacgtgatgtgaaggacaagagctggattaatttcaaggtgatgctgatggacgaacccgaagatggataatctgaacgagtgccaagacaaaggatggtcgtcaagtgatcgacgtctaacaaacactaacgtagtgtttattccagacaagtcccggtgcattatccctttccttgtgttttaaaatatttatcaccttatatgttgcattaggtgataggagttgtgtgctaaacaattgatgcatttcctttcttggaaaatcgatcaccattccttgattcccttttaaaaaaaggatttttatgatgcttagcattgctttagaaaaacaaaatgttttgttttacaacaaaaggtgatgcttcagattggatggaaatttttacaaagaaaaacttgtgatggtggatccattagggccttgatgggttcaaca

SEQ ID NO: 43736 - DNA, 2063 bp, Zea Mays
cggccctgtaagcagaagcaagtttgcagatcctcttgttcgttcttttccccgggcgtacagaaggatagcggacacgacagcatgcgtatcatgcattcttcatggcgacggtgaccagtttgagcttctcaggcagctgcagacacgggccacgctatactgcccggccggcggccagttctcgtagtagtcagctacttaatgatcagctagctagagcatcgcggagattacaagtggcggcgggcatggcggtggcggcgttcccttcctgcggcgccttcgcccctccttgcctagtgagtacaaggagagccttctcctcggtggtggccatggcttccgcagcccccaggaagcccttcgcccctcctcgcgaggtacaccgccccgtggcgcactcgctgcccccgcagaagcgggagatcttcgagtcgctcgagtcgtgggcggcggacaacatcctggtgctcctcaagcccgtggagaggtcctggcagccgcaggactacctgccggacgccgcctccgagtccttcgacgacgaggtccgggagctgcgagagcgcgcccgggagatccccgacgactacttcgtctgcttcgtgggcgacatggtcaccgaggaggcgctgccgacgtaccagaccatgctcaacaccctggacggcggcgtccgcgacgagaccggcgccagctcgaccagctgggcggtgtggaccagggcgtgggccgccgaggagaacaggcacggcgacctcatgaacaaatacctcttcctgacggggagggtggacatgaggcagatcgagaagaccgtccagtacctcatcgcctcagggatggatcccaagacggagacgaacccgtacatgggcttcgtctacacgtcgttccaggagcgcgccaccttcatctcccacggcaacacggcgcgccacgccaggcggtacggcgacaccaagctggcgcagatctgcggcacaatcgccgccgacgagaagcgccacgagtcggcgtacgagcggatcgtcgagaagctgttcgaggtggacccggactacacggtgcgcgccttcgcggacaccatgaggaagaaggtggccatgcccgcccacctcatgtacgacggccaggacgacgggctgttcgcgcgcttcagcgctgtcgcgcagcgcatcggtgtctacacggccagggactacgtcgacatcctcgagttcctggtccgccggtggggcgtccaggaactcacggggctgtccggggaaggccgccgcgcgcaggagttcgtgtgcgagctggggccccggttcaggaggctggaggagagggcgcacgacaacaaggccaaggatccggagttcgcgccattcagctggattcacgggcgccaggttcagctttgattaaagatgatgactgggggattcgccgactctctccgtcctcagatgatatgttgtactgtactagcatataactaagaattgattgaagttgctgtaaaatgcatcaaagtacatccgctcttgtttttggtgctagagcattgtaaaatgcagggaggccgggagagcgatgaaaacagaatggaagatatattgcctcagcgatgcacgcaagtactagtctgtatgcaacaataataattcatgaaatcagataccgaccacagacttacaaatctacagttggcgcccagttgatgtcaaacaaagtgagaaaccaagagttttgagtatacattgtactggttttttacgactcaaaggaccccaaagaaaggattggtgatggcagaattcagctcggctccagctgtgttcaggatagccttgtcgactttttcccttgccaaaaacaagtactcgttcccttcaagtttctcaaatccgcagagctccaggaactctatgcccacatgcaaatttccaaccctctcctgcaaggtgggttcataaacaaagaatttatcgatctcattattcttgaacaagctcaacagcaaagcaagcagtcaccaaaaaagatcaagattttttttcacctgaaatgta

SEQ ID NO: 43737 - DNA, 365 bp, Zea Mays
gcttggttgtgtgaagtctttcccctgcccttgagctctaactcgtggtcatcgtatgagtggagtggtagtgttcagcctgggtaacctccctcccaaaaaccccaaacctgatttgctcctatgctgtgtgccatctgctcggcttggtgaccatcacagccgatttcccccctcatcgtggctagaacgcttcaaagaacgtgcttgtgacgtcgcggtgcggcgccgtgaacaacctctctattgaccagtcatatggcgctttccccgactgtcttcacgcgagcaccgaggtgttggactcggcctcattttccagaaaagacaggggccctggcgcaattgctacaaagactcaggcg

SEQ ID NO: 43738 - DNA, 1801 bp, Zea Mays
agtgctggcaccatagaaaatactctccaccacatatgggctgaacttagagttgtctgcccttgatcagttgcactagggcttggttgtgtgaagtctttcccctgcccttgagctctaactcgtggtcatcgtatgagtggagtggtagtgttcagcctgggtaacctccctcccaaaaaccccaaacctgatttgctcctatgctgtgtgccatctgctcggcttggtgaccatcacagccgatttcccccctcatcgtggctagaacgcttcaaagaacgtgcttgtgacgtcgcggtgcggcgccgtgaacaacctctctattgaccagtcatatggcgctttccccgactgtcttcacgcgagcaccgaggtgttgaacacctagacgaggtggtattttaagaagtctatccagtgcctgctcatcaagtggatagagctatctaactaaaggttgggtagaaggatctagacctcttcactgcaacaaaggcaagccccggtgcatttacctcttccttgtatttttaaaagactttttatacacttaagtctagtgaaatgtgcactaagtttacaggaattgcttggaaactatttgatgcattgactaccttgatatccattcctgttatagatacttctttggaagtatcaaatattgtttacaaaaatgcttagccctgcttaaatcttatggatagaggttgtgttttgcaataatgcctagctcatgggttatcctgacgaaggatggcttctacttgcaagaatattttcattgggagcatggtgggatcttactgcaaagttccctatactgctcttttcatccttaggaacacaaaacaatcctaaggatggaagtacttaactcgagacttgggctaggaacaggtgatgctccacctaggttaattaaggattggatgcgtatgtaggcctgtatgatcaaggactatcttaactggctacatgcccagaatatgggatagggtaagcttgaacccggctattccatacatgaaaatacaatcgcgcactgggagtggagagatggcgagagtggcacgtaccctcctggcaaaggaccgcctaaaaggggtggtgtgctctcgggtggtgcggacatgttcatgcagtggacgatccatgggaatggtagacatatgcaaggtttacgagaaacatatgttgtgtggttagagatcctcatctgagtaaatcgatttgaatcgcagttatatccctggatagtggagacttgatctctgacctgcaaccttggtcaggatgtaaacattatgaatataaatgatgttgtacttatgatatggtgaaattagactagatgcaaccagagtctattaatatttaatctagcgttaaaatattgaaagtaaggactcactttagtaagctatttctataaaattatctaagttgattcttgctcaagcctttccttgattcctatttaaccagcatatccttgagagtcatttttccttagtcgggtgagacttgcgaaagtacactctgtactcagggttttcgaacccatgttgttgtaggtgatgaggagtactctaagtgttcctgtggctggagggcatttccaattccggaggaggactagctaggtttatgtatgagctttggagggtttctaccttcctacttttgtaataagttatgcactttgagtatatcaggacttgtaataaatattactctttctatgatgtaaaagttgtgttttgggaaatataaagaatgttttataaagtcttcc

SEQ ID NO: 43739 - DNA, 521 bp, Zea Mays
ccgccatcgagcccgagtgcatcattggccagcactctatcctcatggaaggttcgctggttgagaccaactcaatcctggaggctggctctgtattgcccccaggaaggcgaattccgactggtgaactctgggctggaagcccggctaggtttgttcggaagctgaccaacgaggagatcatggacattccaaagcttgcaactgccatcaacgatctgatgcaaagccatttctcggagttcctgccttactctaacgcttatttggaggtagagaagttgaagaagtcgttctcgatccccctgtaagagcatgttgccccgctcgtccagttgaatgaatgaggaaataaaggttccccaatgctagatgttttgtattgaatcgaacttctacttctgttacgtctttttggggggttctttgttgttttgagcatggggacacgtgcaggaatcatgtcttgatatctttttacgcaacccaattctgtgttgattactttcagttctactatt

SEQ ID NO: 43740 - DNA, 379 bp, Zea Mays
cttctcgtagaagcctcacgattgggcctaccgcctacgccgacgctttgcaggtgccctcgccgaatgtcgttgctgtcgcagccgccacctgctggtcaccacgttcaaggactgctgcaacatggcagcgctgccaccagcatgctccagctgtggtggtttgacggagcttctcaacgccatggacgcgcaatgggtagccggccctagcagcagcgtggacgctatagactctgttctctttcaacccactgcttttgttgcaaccggtgcacacatgcaacctggccttctcgttcatggtcctgttaaagcttcgcatcatgttgattcttgtgaagaattcaatacacctaaaaatatccaatcagtttaa

SEQ ID NO: 43741 - DNA, 1774 bp, Zea Mays
aggtgatgaaaggggcttaaagctactgcagtccattttgaagccaataatgctgagaaggactaaaaattgcacagacaaggagggcaggccaatccttaatttaccccctgcaaacattgaagtaaaatactgtgttttatctgaggctgagaaggatttctatgaagctctatttcgaagatctaaggtaaaatttgatcaatttgttgagcaaggaagggttctgcacaactatgcttcaattttggagttacttttgcgcctaaggcaatgctgtgatcatccattccttattatgagtcgtggggatacaaaagagtatgcagacctaaacaagcttgcaaagcgttttctgcgtggtggtaatggtgctgttaatggtgattcttgcatcccctctagagcttatatcaaacaggttgtccaagaattgcaaaaggatgaaggggagtgccctatttgtcttgaagcctttgaggatgcagtattaactccctgtgctcatcgtttatgccgagagtgtctcttatctagttggcggagtgcgacagcaggcctttgtcctgtctaatgtcaatgagcaagcaggaccttataactgctcctactgataaccgctttcaaatcgatgtcgaaaaaaattgggttgaatcttccaagatatctgctctcctgcaggagttggaagctcttcgcagttcaggcgccaagagtatcgtgtttagccagtggactgcttttttagatctgttgcaaattccactttctaggaataatttctcatttgctaggctggatgggacgttgaatcttcagcaaagggagaaagttataaaggagttctcagaggacaaaggcattttggttctgcttatgtctctgaaggctggaggtgttggaatcaatcttactgccgcttctaatgcatttgtcatggacccttggtggaatcctgctgtggaagaacaagctgtcatgcgcatccatcgaattggtcaaacgaagactgtttctatcagaagattcatcgtgaagggcactgtcgaagaacgaatggaggctgtgcaggctcgaaagcagcgaatgatttctggagctttgactgaccaagaagtccgcactgcacgtatagaagaactgaagatgcttttctcctgagactacaaaagggctgttgtgcatcggatggtcggcaattcggcatggctaaaacaagatggctggtagccagaatgttggaaggtaagacgagggtaggaaattgcacgcccaaatatcttggcgtttagctgctgttgtgcgcacgatttgtacatcatgaatggttaatggctgacaagagtccaagacgcttcattgagtgaaaatcgaaagcatcatctcaaaattgaatatttctgtttgggttttgtataagtagataaactgaacatttgcagtaatacgaaggcagctacctgctcgatcattaatttaacaataaataaatttggtaaggtggtcaagtataaatgtgtgtataattcatgaatcgtgagacatgtgtcgtttgcgttgtaaggatgtggccagattgtgtatatggtcgtgcaaaacactattttatattgtaaaaaatgtattgtttacaggatagagaatgaaataggagatacaggctataagctccatgagcttttcccctccaagcctggttgattacagaacagccatgtctgtggagagaataagtgcaggtgcatgacgagcgttgtaacacattgaatttgag

SEQ ID NO: 43742 - DNA, 3760 bp, Zea Mays
cccaccttcccgcgaaatctaatagtcggcggcgcgaagcaggagttctggggaaatttcgccggccgggtgcgagcagagccgccgccgccttcttgcgtgggagatggtgaaggagcgggaggagcaagtggccattgtgcgcatggtgcttggcgagggtacaccggagatggacatcatccgtgctctccacatggccggcgacgaccccaccaaggccattaacatcctcctcgacctcaacaaggctgcgccacctctcccgccgtcgccgtctccctttccctgtccatcgccctccccttcgccggggaaacccgccaaagccctcgtcgactcaaccccaccatgcaaagcccctacccggcccatgcccacggcagagaaacctaagtccactacaagcaacggtggcagcgaggagcactggtggctggtggggagcgccgagatggtggggctgtccacctgcaagggaaggcgaattacctcaggggacgtggtcaccttcagcttccccaatgccacaaccgccgtgggcaagagccgtccgagccgtcccgccctagcttcctgctcctccgagatcatgcgcttctccaccccgagccacggggaggtgggtcgcatccccaatgagtgggcaaggtgcctccttccccttctcaaagagaacaagttaaaagtcaagggctcgtgcaaatcagctcccgaggtgcttaccattatggacactgtcctcttgtcagtgagtatatatatcaacagctcaatgtttcatgatcaaaagcaatcgtcacccaaagcagctcgatttgctccatatgactccacatttcaccccctacctgcacttttcaaattgataggacttgctccttttattaaggccgcttttactccagaagatctttattccaggaagcggccaactgaaacaaagagcagtatagggtctcctgctgcaaagctgacatccggcagattgaggttgtcttctgatggaaacgaagatgatcatggtgaagaaactgtttcagattcagatttggatgatataattgggatctcagacagctgtgcactagaggaaagggctccccctgattctctgatgtgtgatctacgctcttatcaaaagcaggcacttcattggatgctgcagcttgagaaaggtagttcttcccaggatgccgctacaacccttcacccttgttgggaagcatacaaacttgaggataagagggaactcgttttgtacttgaacgtgttttcaggcgatgctacaactgaatttcctagtacattacaactttctagaggaggaattctggcagatgcaatgggactggggaagactattatgacgatagctcttcttctttctgattctagcaaaggatgcatcacaactcagaatgctgctcagacccctagagaagctagtgggttgggtgaatcgcatgatgctgtgaagaagcttgctaaccctttctcttttagcaaacacaagaaacctaaggccccacttattggaggaagcaatctaattatctgtccaatgacactaattagtcagtggaaggcagagattgaagctcatactaagccaggcactgcgaatatatatgttcactatggacaaaacaggccaaaagatgcaagcatcattggtcagagtgatattgtcctgactacatatggtgttgtgtcatcagagttttcaatcgataaaatggggctttgtactctgtacattggttcagagttgtgcttgacgaagcacacatgataaaatcttctaaaagtttgatatccctagctgcggctgctctgactgcagatcggcgctggtgtctcactggtacaccaattcagaacaatttggaggatttatacagccttttccggtttctgaaagttgaaccatggaggaactgggctttgtggaataaacttgtacagaaaccatatgaagaaggtgatgaaaggggcttaaagctactgcagtccattttgaagccaataatgctgagaaggactaaaaattgcacagacaaggagggcaggccaatccttaatttaccccctgcaaacattgaagtaaaatactgtgttttatctgaggctgagaaggatttctatgaagctctatttcgaagatctaaggtaaaatttgatcaatttgttgagcaaggaagggttctgcacaactatgcttcaattttggagttacttttgcgcctaaggcaatgctgtgatcatccattccttattatgagtcgtggggatacaaaagagtatgcagacctaaacaagcttgcaaagcgttttctgcgtggtggtaatggtgctgttaatggtgattcttgcatcccctctagagcttatatcaaacaggttgtccaagaattgcaaaaggatgaaggggagtgccctatttgtcttgaagcctttgaggatgcagtattaactccctgtgctcatcgtttatgccgagagtgtctcttatctagttggcggagtgcgacagcaggcctttgtcctgtctgtagaatgtcaatgagcaagcaggaccttataactgctcctactgataaccgctttcaaatcgatgtcgaaaaaaattgggttgaatcttccaagatatctgctctcctgcaggagttggaagctcttcgcagttcaggcgccaagagtatcgtgtttagccagtggactgcttttttagatctgttgcaaattccactttctaggaataatttctcatttgctaggctggatgggacgttgaatcttcagcaaagggagaaagttataaaggagttctcagaggacaaaggcattttggttctgcttatgtctctgaaggctggaggtgttggaatcaatcttactgccgcttctaatgcatttgtcatggacccttggtggaatcctgctgtggaagaacaagctgtcatgcgcatccatcgaattggtcaaacgaagactgtttctatcagaagattcatcgtgaagggcactgtcgaagaacgaatggaggctgtgcaggctcgaaagcagcgaatgatttctggagctttgactgaccaagaagtccgcactgcacgtatagaagaactgaagatgcttttctcctgagactacaaaagggctgttgtgcatcggatggtcggcaattcggcatggctaaaacaagatggctggtagccagaatgttggaaggtaagacgagggtaggaaattgcacgcccaaatatcttggcgtttagctgctgttgtgcgcacgatttgtacatcatgaatggttaatggctgacaagagtccaagacgcttcattgagtgaaaatcgaaagcatcatctcaaaattgaatatttctgtttgggttttgtataagtagataaactgaacatttgcagtaatacgaaggcagctacctgctcgatcattaatttaacaataaataaatttggtaaggtggtcaagtataaatgtgtgtataattcatgaatcgtgagacatgtgtcgtttgcgttgtaaggatgtggccagattgtgtatatggtcgtgcaaaacactattttatattgtaaaaaatgtattgtttacaggatagagaatgaaataggagatacaggctataagctccatgagcttttcccctccaagcctggttgattacagaacagccatgtctgtggagagaataagtgcaggtgcatgacgagcgttgtaacacattgaatttgag

SEQ ID NO: 43743 - DNA, 3762 bp, Zea Mays
ctcccaccttcccgcgaaatctaatagtcggcggcgcgaagcaggagttctggggaaatttcgccggccgggtgcgagcagagccgccgccgccttcttgcgtgggagatggtgaaggagcgggaggagcaagtggccattgtgcgcatggtgcttggcgagggtacaccggagatggacatcatccgtgctctccacatggccggcgacgaccccaccaaggccattaacatcctcctcgacctcaacaaggctgcgccacctctcccgccgtcgccgtctccctttccctgtccatcgccctccccttcgccggggaaacccgccaaagccctcgtcgactcaaccccaccatgcaaagcccctacccggcccatgcccacggcagagaaacctaagtccactacaagcaacggtggcagcgaggagcactggtggctggtggggagcgccgagatggtggggctgtccacctgcaagggaaggcgaattacctcaggggacgtggtcaccttcagcttccccaatgccacaaccgccgtgggcaagagccgtccgagccgtcccgccctagcttcctgctcctccgagatcatgcgcttctccaccccgagccacggggaggtgggtcgcatccccaatgagtgggcaaggtgcctccttccccttctcaaagagaacaagttaaaagtcaagggctcgtgcaaatcagctcccgaggtgcttaccattatggacactgtcctcttgtcagtgagtatatatatcaacagctcaatgtttcatgatcaaaagcaatcgtcacccaaagcagctcgatttgctccatatgactccacatttcaccccctacctgcacttttcaaattgataggacttgctccttttattaaggccgcttttactccagaagatctttattccaggaagcggccaactgaaacaaagagcagtatagggtctcctgctgcaaagctgacatccggcagattgaggttgtcttctgatggaaacgaagatgatcatggtgaagaaactgtttcagattcagatttggatgatataattgggatctcagacagctgtgcactagaggaaagggctccccctgattctctgatgtgtgatctacgctcttatcaaaagcaggcacttcattggatgctgcagcttgagaaaggtagttcttcccaggatgccgctacaacccttcacccttgttgggaagcatacaaacttgaggataagagggaactcgttttgtacttgaacgtgttttcaggcgatgctacaactgaatttcctagtacattacaactttctagaggaggaatgcaatgggactggggaagactattatgacgatagctcttcttctttctgattctagcaaaggatgcatcacaactcagaatgctgctcagacccctagagaagctagtgggttgggtgaatcgcatgatgctgtgaagaagcttgctaaccctttctcttttagcaaacacaagaaacctaaggccccacttattggaggaagcaatctaattatctgtccaatgacactaattagtcagtggaaggcagagattgaagctcatactaagccaggcactgcgaatatatatgttcactatggacaaaacaggccaaaagatgcaagcatcattggtcagagtgatattgtcctgactacatatggtgttgtgtcatcagagttttcaatcgatggttcaacagaaaatggggctttgtactctgtacattggttcagagttgtgcttgacgaagcacacatgataaaatcttctaaaagtttgatatccctagctgcggctgctctgactgcagatcggcgctggtgtctcactggtacaccaattcagaacaatttggaggatttatacagccttttccggtttctgaaagttgaaccatggaggaactgggctttgtggaataaacttgtacagaaaccatatgaagaaggtgatgaaaggggcttaaagctactgcagtccattttgaagccaataatgctgagaaggactaaaaattgcacagacaaggagggcaggccaatccttaatttaccccctgcaaacattgaagtaaaatactgtgttttatctgaggctgagaaggatttctatgaagctctatttcgaagatctaaggtaaaatttgatcaatttgttgagcaaggaagggttctgcacaactatgcttcaattttggagttacttttgcgcctaaggcaatgctgtgatcatccattccttattatgagtcgtggggatacaaaagagtatgcagacctaaacaagcttgcaaagcgttttctgcgtggtggtaatggtgctgttaatggtgattcttgcatcccctctagagcttatatcaaacaggttgtccaagaattgcaaaaggatgaaggggagtgccctatttgtcttgaagcctttgaggatgcagtattaactccctgtgctcatcgtttatgccgagagtgtctcttatctagttggcggagtgcgacagcaggcctttgtcctgtctgtagaatgtcaatgagcaagcaggaccttataactgctcctactgataaccgctttcaaatcgatgtcgaaaaaaattgggttgaatcttccaagatatctgctctcctgcaggagttggaagctcttcgcagttcaggcgccaagagtatcgtgtttagccagtggactgcttttttagatctgttgcaaattccactttctaggaataatttctcatttgctaggctggatgggacgttgaatcttcagcaaagggagaaagttataaaggagttctcagaggacaaaggcattttggttctgcttatgtctctgaaggctggaggtgttggaatcaatcttactgccgcttctaatgcatttgtcatggacccttggtggaatcctgctgtggaagaacaagctgtcatgcgcatccatcgaattggtcaaacgaagactgtttctatcagaagattcatcgtgaagggcactgtcgaagaacgaatggaggctgtgcaggctcgaaagcagcgaatgatttctggagctttgactgaccaagaagtccgcactgcacgtatagaagaactgaagatgcttttctcctgagactacaaaagggctgttgtgcatcggatggtcggcaattcggcatggctaaaacaagatggctggtagccagaatgttggaaggtaagacgagggtaggaaattgcacgcccaaatatcttggcgtttagctgctgttgtgcgcacgatttgtacatcatgaatggttaatggctgacaagagtccaagacgcttcattgagtgaaaatcgaaagcatcatctcaaaattgaatatttctgtttgggttttgtataagtagataaactgaacatttgcagtaatacgaaggcagctacctgctcgatcattaatttaacaataaataaatttggtaaggtggtcaagtataaatgtgtgtataattcatgaatcgtgagacatgtgtcgtttgcgttgtaaggatgtggccagattgtgtatatggtcgtgcaaaacactattttatattgtaaaaaatgtattgtttacaggatagagaatgaaataggagatacaggctataagctccatgagcttttcccctccaagcctggttgattacagaacagccatgtctgtggagagaataagtgcaggtgcatgacgagcgttgtaacacattgaatttgag

SEQ ID NO: 43744 - DNA, 3779 bp, Zea Mays
tctagccctcccaccttcccgcgaaatctaatagtcggcggcgcgaagcaggagttctggggaaatttcgccggccgggtgcgagcagagccgccgccgccttcttgcgtgggagatggtgaaggagcgggaggagcaagtggccattgtgcgcatggtgcttggcgagggtacaccggagatggacatcatccgtgctctccacatggccggcgacgaccccaccaaggccattaacatcctcctcgacctcaacaaggctgcgccacctctcccgccgtcgccgtctccctttccctgtccatcgccctccccttcgccggggaaacccgccaaagccctcgtcgactcaaccccaccatgcaaagcccctacccggcccatgcccacggcagagaaacctaagtccactacaagcaacggtggcagcgaggagcactggtggctggtggggagcgccgagatggtggggctgtccacctgcaagggaaggcgaattacctcaggggacgtggtcaccttcagcttccccaatgccacaaccgccgtgggcaagagccgtccgagccgtcccgccctagcttcctgctcctccgagatcatgcgcttctccaccccgagccacggggaggtgggtcgcatccccaatgagtgggcaaggtgcctccttccccttctcaaagagaacaagttaaaagtcaagggctcgtgcaaatcagctcccgaggtgcttaccattatggacactgtcctcttgtcagtgagtatatatatcaacagctcaatgtttcatgatcaaaagcaatcgtcacccaaagcagctcgatttgctccatatgactccacatttcaccccctacctgcacttttcaaattgataggacttgctccttttattaaggccgcttttactccagaagatctttattccaggaagcggccaactgaaacaaagagcagtatagggtctcctgctgcaaagctgacatccggcagattgaggttgtcttctgatggaaacgaagatgatcatggtgaagaaactgtttcagattcagatttggatgatataattgggatctcagacagctgtgcactagaggaaagggctccccctgattctctgatgtgtgatctacgctcttatcaaaagcaggcacttcattggatgctgcagcttgagaaaggtagttcttcccaggatgccgctacaacccttcacccttgttgggaagcatacaaacttgaggataagagggaactcgttttgtacttgaacgtgttttcaggcgatgctacaactgaatttcctagtacattacaactttctagaggaggaattctggcagatgcaatgggactggggaagactattatgacgatagctcttcttctttctgattctagcaaaggatgcatcacaactcagaatgctgctcagacccctagagaagctagtgggttgggtgaatcgcatgatgctgtgaagaagcttgctaaccctttctcttttagcaaacacaagaaacctaaggccccacttattggaggaagcaatctaattatctgtccaatgacactaattagtcagtggaaggcagagattgaagctcatactaagccaggcactgcgaatatatatgttcactatggacaaaacaggccaaaagatgcaagcatcattggtcagagtgatattgtcctgactacatatggtgttgtgtcatcagagttttcaatcgatggttcaacagaaaatggggctttgtactctgtacattggttcagagttgtgcttgacgaagcacacatgataaaatcttctaaaagtttgatatccctagctgcggctgctctgactgcagatcggcgctggtgtctcactggtacaccaattcagaacaatttggaggatttatacagccttttccggtttctgaaagttgaaccatggaggaactgggctttgtggaataaacttgtacagaaaccatatgaagaaggtgatgaaaggggcttaaagctactgcagtccattttgaagccaataatgctgagaaggactaaaaattgcacagacaaggagggcaggccaatccttaatttaccccctgcaaacattgaagtaaaatactgtgttttatctgaggctgagaaggatttctatgaagctctatttcgaagatctaaggtaaaatttgatcaatttgttgagcaaggaagggttctgcacaactatgcttcaattttggagttacttttgcgcctaaggcaatgctgtgatcatccattccttattatgagtcgtggggatacaaaagagtatgcagacctaaacaagcttgcaaagcgttttctgcgtggtggtaatggtgctgttaatggtgattcttgcatcccctctagagcttatatcaaacaggttgtccaagaattgcaaaaggatgaaggggagtgccctatttgtcttgaagcctttgaggatgcagtattaactccctgtgctcatcgtttatgccgagagtgtctcttatctagttggcggagtgcgacagcaggcctttgtcctgtctgtagaatgtcaatgagcaagcaggaccttataactgctcctactgataaccgctttcaaatcgatgtcgaaaaaaattgggttgaatcttccaagatatctgctctcctgcaggagttggaagctcttcgcagttcaggcgccaagagtatcgtgtttagccagtggactgcttttttagatctgttgcaaattccactttctaggaataatttctcatttgctaggctggatgggacgttgaatcttcagcaaagggagaaagttataaaggagttctcagaggacaaaggcattttggttctgcttatgtctctgaaggctggaggtgttggaatcaatcttactgccgcttctaatgcatttgtcatggacccttggtggaatcctgctgtggaagaacaagctgtcatgcgcatccatcgaattggtcaaacgaagactgtttctatcagaagattcatcgtgaagggcactgtcgaagaacgaatggaggctgtgcaggctcgaaagcagcgaatgatttctggagctttgactgaccaagaagtccgcactgcacgtatagaagaactgaagatgcttttctcctgagactacaaaagggctgttgtgcatcggatggtcggcaattcggcatggctaaaacaagatggctggtagccagaatgttggaaggtaagacgagggtaggaaattgcacgcccaaatatcttggcgtttagctgctgttgtgcgcacgatttgtacatcatgaatggttaatggctgacaagagtccaagacgcttcattgagtgaaaatcgaaagcatcatctcaaaattgaatatttctgtttgggttttgtataagtagataaactgaacatttgcagtaatacgaaggcagctacctgctcgatcattaatttaacaataaataaatttggtaaggtggtcaagtataaatgtgtgtataattcatgaatcgtgagacatgtgtcgtttgcgttgtaaggatgtggccagattgtgtatatggtcgtgcaaaacactattttatattgtaaaaaatgtattgtttacaggatagagaatgaaataggagatacaggctataagctccatgagcttttcccctccaagcctggttgattacagaacagccatgtctgtggagagaataagtgcaggtgcatgacgagcgttgtaacacattgaatttgag

SEQ ID NO: 43745 - DNA, 3506 bp, Zea Mays
attacttagagatttaggattgtattatgtagttttttgaagctgtcttttatatttagaaaattgttccaaagcattatgttgcacatgtcctaagtgttgcgagggcaaatcggtctagccctcccaccttcccgcgaaatctaatagtcggcggcgcgaagcaggagttctggggaaatttcgccggccgggtgcgagcagagccgccgccgccttcttgcgtgggagatggtgaaggagcgggaggagcaagtggccattgtgcgcatggtgcttggcgagggtacaccggagatggacatcatccgtgctctccacatggccggcgacgaccccaccaaggccattaacatcctcctcgacctcaacaaggctgcgccacctctcccgccgtcgccgtctccctttccctgtccatcgccctccccttcgccggggaaacccgccaaagccctcgtcgactcaaccccaccatgcaaagcccctacccggcccatgcccacggcagagaaacctaagtccactacaagcaacggtggcagcgaggagcactggtggctggtggggagcgccgagatggtggggctgtccacctgcaagggaaggcgaattacctcaggggacgtggtcaccttcagcttccccaatgccacaaccgccgtgggcaagagccgtccgagccgtcccgccctagcttcctgctcctccgagatcatgcgcttctccaccccgagccacggggaggtgggtcgcatccccaatgagtgggcaaggtgcctccttccccttctcaaagagaacaagttaaaagtcaagggctcgtgcaaatcagctcccgaggtgcttaccattatggacactgtcctcttgtcagtgagtatatatatcaacagctcaatgtttcatgatcaaaagcaatcgtcacccaaagcagctcgatttgctccatatgactccacatttcaccccctacctgcacttttcaaattgataggacttgctccttttattaaggccgcttttactccagaagatctttattccaggaagcggccaactgaaacaaagagcagtatagggtctcctgctgcaaagctgacatccggcagattgaggttgtcttctgatggaaacgaagatgatcatggtgaagaaactgtttcagattcagatttggatgatataattgggatctcagacagctgtgcactagaggaaagggctccccctgattctctgatgtgtgatctacgctcttatcaaaagcaggcacttcattggatgctgcagcttgagaaaggtagttcttcccaggatgccgctacaacccttcacccttgttgggaagcatacaaacttgaggataagagggaactcgttttgtacttgaacgtgttttcaggcgatgctacaactgaatttcctagtacattacaactttctagaggaggaattctggcagatgcaatgggactggggaagactattatgacgatagctcttcttctttctgattctagcaaaggatgcatcacaactcagaatgctgctcagacccctagagaagctagtgggttgggtgaatcgcatgatgctgtgaagaagcttgctaaccctttctcttttagcaaacacaagaaacctaaggccccacttattggaggaagcaatctaattatctgtccaatgacactaattagtcagtggaaggcagagattgaagctcatactaagccaggcactgcgaatatatatgttcactatggacaaaacaggccaaaagatgcaagcatcattggtcagagtgatattgtcctgactacatatggtgttgtgtcatcagagttttcaatcgatggttcaacagaaaatggggctttgtactctgtacattggttcagagttgtgcttgacgaagcacacatgataaaatcttctaaaagtttgatatccctagctgcggctgctctgactgcagatcggcgctggtgtctcactggtacaccaattcagaacaatttggaggatttatacagccttttccggtttctgaaagttgaaccatggaggaactgggctttgtggaataaacttgtacagaaaccatatgaagaaggtgatgaaaggggcttaaagctactgcagtccattttgaagccaataatgctgagaaggactaaaaattgcacagacaaggagggcaggccaatccttaatttaccccctgcaaacattgaagtaaaatactgtgttttatctgaggctgagaaggatttctatgaagctctatttcgaagatctaaggtaaaatttgatcaatttgttgagcaaggaagggttctgcacaactatgcttcaattttggagttacttttgcgcctaaggcaatgctgtgatcatccattccttattatgagtcgtggggatacaaaagagtatgcagacctaaacaagcttgcaaagcgttttctgcgtggtggtaatggtgctgttaatggtgattcttgcatcccctctagagcttatatcaaacaggttgtccaagaattgcaaaaggatgaaggggagtgccctatttgtcttgaagcctttgaggatgcagtattaactccctgtgctcatcgtttatgccgagagtgtctcttatctagttggcggagtgcgacagcaggcctttgtcctgtctgtagaatgtcaatgagcaagcaggaccttataactgctcctactgataaccgctttcaaatcgatgtcgaaaaaaattgggttgaatcttccaagatatctgctctcctgcaggagttggaagctcttcgcagttcaggcgccaagagtatcgtgtttagccagtggactgcttttttagatctgttgcaaattccactttctaggaataatttctcatttgctaggctggatgggacgttgaatcttcagcaaagggagaaagttataaaggagttctcagaggacaaaggcattttggttctgcttatgtctctgaaggctggaggtgttggaatcaatcttactgccgcttctaatgcatttgtcatggacccttggtggaatcctgctgtggaagaacaagctgtcatgcgcatccatcgaattggtcaaacgaagactgtttctatcagaagattcatcgtgaagggcactgtcgaagaacgaatggaggctgtgcaggctcgaaagcagcgaatgatttctggagctttgactgaccaagaagtccgcactgcacgtatagaagaactgaagatgcttttctcctgagactacaaaagggctgttgtgcatcggatggtcggcaattcggcatggctaaaacaagatggctggtagccagaatgttggaaggatagagaatgaaataggagatacaggctataagctccatgagcttttcccctccaagcctggttgattacagaacagccatgtctgtggagagaataagtgcaggtgcatgacgagcgttgtaacacattgaatttgag

SEQ ID NO: 43746 - DNA, 2039 bp, Zea Mays
caaagcattatgttgcacatgtcctaagtgttgcgagggcaaatcggtctagccctcccaccttcccgcgaaatctaatagtcggcggcgcgaagcaggagttctggggaaatttcgccggccgggtgcgagcagagccgccgccgccttcttgcgtgggagatggtgaaggagcgggaggagcaagtggccattgtgcgcatggtgcttggcgagggtacaccggagatggacatcatccgtgctctccacatggccggcgacgaccccaccaaggccattaacatcctcctcgacctcaacaaggctgcgccacctctcccgccgtcgccgtctccctttccctgtccatcgccctccccttcgccggggaaacccgccaaagccctcgtcgactcaaccccaccatgcaaagcccctacccggcccatgcccacggcagagaaacctaagtccactacaagcaacggtggcagcgaggagcactggtggctggtggggagcgccgagatggtggggctgtccacctgcaagggaaggcgaattacctcaggggacgtggtcaccttcagcttccccaatgccacaaccgccgtgggcaagagccgtccgagccgtcccgccctagcttcctgctcctccgagatcatgcgcttctccaccccgagccacggggaggtgggtcgcatccccaatgagtgggcaaggtgcctccttccccttctcaaagagaacaagttaaaagtcaagggctcgtgcaaatcagctcccgaggtgcttaccattatggacactgtcctcttgtcagtgagtatatatatcaacagctcaatgtttcatgatcaaaagcaatcgtcacccaaagcagctcgatttgctccatatgactccacatttcaccccctacctgcacttttcaaattgataggacttgctccttttattaaggccgcttttactccagaagatctttattccaggaagcggccaactgaaacaaagagcagtatagggtctcctgctgcaaagctgacatccggcagattgaggttgtcttctgatggaaacgaagatgatcatggtgaagaaactgtttcagattcagatttggatgatataattgggatctcagacagctgtgcactagaggaaagggctccccctgattctctgatgtgtgatctacgctcttatcaaaagcaggcacttcattggatgctgcagcttgagaaaggtagttcttcccaggatgccgctacaacccttcacccttgttgggaagcatacaaacttgaggataagagggaactcgttttgtacttgaacgtgttttcaggcgatgctacaactgaatttcctagtacattacaactttctagaggaggaattctggcagatgcaatgggactggggaagactattatgacgatagctcttcttctttctgattctagcaaaggatgcatcacaactcagaatgctgctcagacccctagagaagctagtgggttgggtgaatcgcatgatgctgtgaagaagcttgctaaccctttctcttttagcaaacacaagaaacctaaggccccacttattggaggaagcaatctaattatctgtccaatgacactaattagtcagtggaaggcagagattgaagctcatactaagccaggcactgcgaatatatatgttcactatggacaaaacaggccaaaagatgcaagcatcattggtcagagtgatattgtcctgactacatatggtgttgtgtcatcagagttttcaatcgatggttcaacagaaaatggggctttgtactctgtacattggttcagagttgtgcttgacgaagcacacatgataaaatcttctaaaagtttgatatccctagctgcggctgctctgactgcagatcggcgctggtgtctcactggtacaccaattcagaacaatttggaggatttatacagccttttccggtttctgaaagttgaaccatggaggaactgggctttgtgggggagttggtgttgttgaag

SEQ ID NO: 43747 - DNA, 1672 bp, Zea Mays
gcgaagcaggagttctggggaaatttcgccggccgggtgcgagcagagccgccgccgccttcttgcgtgggagatggtgaaggagcgggaggagcaagtggccattgtgcgcatggtgcttggcgagggtacaccggagatggacatcatccgtgctctccacatggccggcgacgaccccaccaaggccattaacatcctcctcgacctcaacaaggctgcgccacctctcccgccgtcgccgtctccctttccctgtccatcgccctccccttcgccggggaaacccgccaaagccctcgtcgactcaaccccaccatgcaaagcccctacccggcccatgcccacggcagagaaacctaagtccactacaagcaacggtggcagcgaggagcactggtggctggtggggagcgccgagatggtggggctgtccacctgcaagggaaggcgaattacctcaggggacgtggtcaccttcagcttccccaatgccacaaccgccgtgggcaagagccgtccgagccgtcccgccctagcttcctgctcctccgagatcatgcgcttctccaccccgagccacggggaggtgggtcgcatccccaatgagtgggcaaggtgcctccttccccttctcaaagagaacaagttaaaagtcaagggctcgtgcaaatcagctcccgaggtgcttaccattatggacactgtcctcttgtcagtgagtatatatatcaacagctcaatgtttcatgatcaaaagcaatcgtcacccaaagcagctcgatttgctccatatgactccacatttcaccccctacctgcacttttcaaattgataggacttgctccttttattaaggccgcttttactccagaagatctttattccaggaagcggccaactgaaacaaagagcagtatagggtctcctgctgcaaagctgacatccggcagattgaggttgtcttctgatggaaacgaagatgatcatggtgaagaaactgtttcagattcagatttggatgatataattgggatctcagacagctgtgcactagaggaaagggctccccctgattctctgatgtgtgatctacgctcttatcaaaagcaggcacttcattggatgctgcagcttgagaaaggtagttcttcccaggatgccgctacaacccttcacccttgttgggaagcatacaaacttgaggataagagggaactcgttttgtacttgaacgtgttttcaggcgatgctacaactgaatttcctagtacattacaactttctagaggaggagcagagattgaagctcatactaagccaggcactgcgaatatatatgttcactatggacaaaacaggccaaaagatgcaagcatcattggtcagagtgatattgtcctgactacatatggtgttgtgtcatcagagttttcaatcgatggttcaacagaaaatggggctttgtactctgtacattggttcagagttgtgcttgacgaagcacacatgataaaatcttctaaaagtttgatatccctagctgcggctgctctgactgcagatcggcgctggtgtctcactggtacaccaattcagaacaatttggaggatttatacagccttttccggtttctgaaagttgaaccatggaggaactgggctttgtaa

SEQ ID NO: 43748 - DNA, 1976 bp, Zea Mays
cccaccttcccgcgaaatctaatagtcggcggcgcgaagcaggagttctggggaaatttcgccggccgggtgcgagcagagccgccgccgccttcttgcgtgggagatggtgaaggagcgggaggagcaagtggccattgtgcgcatggtgcttggcgagggtacaccggagatggacatcatccgtgctctccacatggccggcgacgaccccaccaaggccattaacatcctcctcgacctcaacaaggctgcgccacctctcccgccgtcgccgtctccctttccctgtccatcgccctccccttcgccggggaaacccgccaaagccctcgtcgactcaaccccaccatgcaaagcccctacccggcccatgcccacggcagagaaacctaagtccactacaagcaacggtggcagcgaggagcactggtggctggtggggagcgccgagatggtggggctgtccacctgcaagggaaggcgaattacctcaggggacgtggtcaccttcagcttccccaatgccacaaccgccgtgggcaagagccgtccgagccgtcccgccctagcttcctgctcctccgagatcatgcgcttctccaccccgagccacggggaggtgggtcgcatccccaatgagtgggcaaggtgcctccttccccttctcaaagagaacaagttaaaagtcaagggctcgtgcaaatcagctcccgaggtgcttaccattatggacactgtcctcttgtcagtgagtatatatatcaacagctcaatgtttcatgatcaaaagcaatcgtcacccaaagcagctcgatttgctccatatgactccacatttcaccccctacctgcacttttcaaattgataggacttgctccttttattaaggccgcttttactccagaagatctttattccaggaagcggccaactgaaacaaagagcagtatagggtctcctgctgcaaagctgacatccggcagattgaggttgtcttctgatggaaacgaagatgatcatggtgaagaaactgtttcagattcagatttggatgatataattgggatctcagacagctgtgcactagaggaaagggctccccctgattctctgatgtgtgatctacgctcttatcaaaagcaggcacttcattggatgctgcagcttgagaaaggtagttcttcccaggatgccgctacaacccttcacccttgttgggaagcatacaaacttgaggataagagggaactcgttttgtacttgaacgtgttttcaggcgatgctacaactgaatttcctagtacattacaactttctagaggaggaattctggcagatgcaatgggactggggaagactattatgacgatagctcttcttctttctgattctagcaaaggatgcatcacaactcagaatgctgctcagacccctagagaagctagtgggttgggtgaatcgcatgatgctgtgaagaagcttgctaaccctttctcttttagcaaacacaagaaacctaaggccccacttattggaggaagcaatctaattatctgtccaatgacactaattagtcagtggaaggcagagattgaagctcatactaagccaggcactgcgaatatatatgttcactatggacaaaacaggccaaaagatgcaagcatcattggtcagagtgatattgtcctgactacatatggtgttgtgtcatcagagttttcaatcgatggttcaacagaaaatggggctttgtactctgtacattggttcagagttgtgcttgacgaagcacacatgataaaatcttctaaaagtttgatatccctagctgcggctgctctgactgcagatcggcgctggtgtctcactggtacaccaattcaggattatggagccgacattttactcttatttttcacgcatgtatttgcgtactaggtgcttatgcattcaaatttatgaagtttac

SEQ ID NO: 43749 - DNA, 1350 bp, Zea Mays
cgtcgtcgtgtgtgtagcaacatcgctgattcctccatggtgcctatcgacgaactttgcttcatcggtttgtcgccttcggttcggcacatgtgtggccgccgaatgcgttcgctgcttaaccccgtggtgttagagctcatgatctcactgtcgtcagagttctcactggattcgtgtcctcgccagctcgcaccagactcaatctcgtcgtcgttcggtcaccccacctcgatgtcggtccctacgtgttgtctccgacttatgctcgcgccgacaaaagaatcccaagaagatgtggagaagcaagcccctggtcgatgtcccaagtgctcgacagaaagctcgaacaagtcatcgatcgtcatcctcgtccacgccaagatctgggaagattaggcgtagatccacgaagattaggcgcagaagaaaataaattagtacacagccggaggatactcgatgcgaaaaaagatgaagcgtgattcgacgcagcactcaccctatttccggtgaaatgctgagctgaaaggcgtcgttggtttcgcgatttcaagtcggatttaataagggtacgttaattaatcgcgtgacgcggaagacgacccatgtcgaccccaagcgcgggctaatcaacaggttgatgctgatggacgaactggaagatggataatctgaacgagtgccaacataaaagatgatcgtcaagtggacatcgcctaacaaacactaacttagtgttattcaggcaagccccggtgcatttgccacctccttgatgttttaaaatttttatcaccttgtttgatgcattaggtgataggagttgtgtgctaaagcgttgatgcatttccttccttaaaaattgattacccttccttgataccctttttgaaaaagaattttatgatgcttagccttgctttagcaaacaaaaatgttttgttttcaaacaaaagtgatgcttcagtgggtgggaatgttttcaaaaataaaacttgatggtggatccgtcaaaggccttgatgggttcaacatcgaaaaagatgtacctctaccaggtaccaaactttgggttgaaattaataaagctgagaccgggcggttgacttgcacgagacgggagtctcggtgtagtgtctctgtctgagtcgattaaggaccttgtcaatgtaggcttgctgatcgaggaccttttaactggtcacatgcctcgggcagactaataccatcataagataacacgcaatgtgagtggagaaatggcgagagtagcgtgtaccctccgtggcaagaggctgcacagtggtgtatatgtgctctcagttggcgtgaacctgatctggtctt

SEQ ID NO: 43750 - DNA, 1698 bp, Zea Mays
ccctgatgccgcgccttgctccctggcacagcaagctcaccgcgccctgggtcgcgcgccctggctcctactcggccgctgcttctctctgaagctctctcacgcgcgcgtgactgccttctctgcacctcctgtgctcggaccgcgaaactctttggcgctctcccatggcggcgcgcccatcccccaagctccttgccatggccgccatctcccatggaagctgcgtccagccgagctcccagcgctgcagccttcccccaattcctctctgctcgcggagctccctctgcctgcttcccatggcgctcgtccctacctgctcagcctccggctccggctcgccggcgctcctccctgtgcccagccgtgtttgcgcggacctctgctccttcatcccacgcgcttgcttctctgtgcccacgcgcgcgcgaagctctttgcgcaccgcggctcgatcccttcatcccgcgcgcgctctggctctccgtcagcacgtcgcgccctgccggttctctgctcgaccatggaagtcgcggttcccagctccctctgctcgtgacgcgcgcccagccatggagttctcgcggtgctcctgttccccgtccatggcaccgtcgtttttcatcttcgcgtcccaagtctggctgtctagcgcgccctcctgctccctgattcaagtttctgcgcgtcgtcgcccagctcgcccaagtcgcccatgcctatgcacggtgttcttgtcgatgctgtgctgttgcccatgctgtagagctcgccttgctcctcgcgttgtcgttcgtcggtttcggatgcttgggtctctagccgcgtgtccgtctctagtcctggctgcggggcagtccgcgccattgagtttgcccggccatgacctcgctttgctcctcacgtcattgctcgccgagtctttactcagtctgcgatctctcactgcccgtcgttgcgtcgttcgtcgtcgtgtgtgtagcaacatcgctgattcctccatggtgcctatcgacgaactttgcttcatcggtttgtcgccttcggttcgacacatgtgtggccgccgaatacgttcgctgcttaaccccgtggtgttagagctcgtgatctcactgtcgtcagagttctcactggattcgtgtcctcgccagctcgctccagactcgatcttgtcgtcgttcgttcaccccacctcgatgtcggtccctacatgctgtctccgacttatgctcgcgccgacaaaagaatcccaagaagatgtggagaagcaagcccctggtcgatgtcccaagtgctcgacagaaagctcgaacaagtcgtcgatcgtcatcctcgtccacgccaagatccgagaagattaggcgcagaagaaaataaattagtacgcgaccggaggatactcgatgcggataaagatgaagcgtgattcgacacagcactcaccctatttccggtgaaatgctgagctgaaaggagtcgtcgatttcgttgtttcaagtcggatttaataagggtacgttaattaatcacgtgacacggaagacgacccaagtcgaacccaagcgcgggctaatccgcaggttgatgctgatggacgaaccagaagatggataatttgaacgagtgcaaacataaaagatgatcgtcaagtggacatcgcctaacaaacactaacctagtgttattcaggca

SEQ ID NO: 43751 - DNA, 1346 bp, Zea Mays
tgagcaagccaagcttgctggtgcagccgagtagctcgctctctccccctcaagctcatatctcacgcgcgcccctgctccctgatttttcttgctcgtctccatggccatcgcaccccctggtggttgagctcgccaagctccctctcccgtggtgccctggcctcgctggatccgtcgtctccctcatcgtcttcttccccgccggcaggctatgcgaacgtcaccacgcatctctggtgctcgcgcccagcccggtttccagcgctctccctgccgcagctctcgcccgtcgtcctgcctgctgagctcgccccagcctcctgctccctccagccctaccatggcgctcgcccctcgctgcttttccctctcgctggacgcacaaccttggccctcatttcgccgttcgtcgagcccatctccgcccctctctgctcgtcgtcactgcagcgtgctcgcatttgtcgttgaaccccgttatccctgctcgactcccaagcaggctccctgatccgcgcccaactcgttgtgtcgttatgagctttttggtgagctaccattgtacccaaatcacggtcatctcagcctcgttgatgtcgtcctttttaagcgggaccgtgttgatgctgcttgcatggcacgttgtcggccagggtcaccaccacgactctgcatcactgtgctcggtcgcacctcctcagtcgtcttgcgtgcacttatctccaaacagaaccgcgcggccgactgttgaccctgccatttcctcgcagcgctcggacatcgacatcgttacccgacaacatgtttgcctgtcaccacattatcttctgcatcacggctctgttggactccgtgtgctcatcgacaccaagttgtcgatctccgccaggtcatgcccctcctcttcagcatcgtcgtcactttttttctgttatgtcacaagcgttcgtggattggtacgttagatgatctcgtgatgcggaatacgacccaagtcgaccccaagatggtgtaacgggcaggttactccatgaggtgatgctggtggatccacctgaagacggataggctgaacaagtgcctattttccatccccttggcggaactgctgctgctgctgaggttgattgttccttgtagcgggagcagggaaatggatgggtgcttgatgctgctgcgatggcctgatggcccatcttcctgcctgctgctggaattccctgctctgattgtgggagacaatccgaaacctctggggtggagcttaagttgttgacattggtgccttcctcttcttttctgcccggtgagctataatacagtcttcctgtgatatggcaagg

SEQ ID NO: 43752 - DNA, 1559 bp, Zea Mays
agtcgctgggatttttctgcgtcgttgaaatatcccacatgctccgtgcgttcgtcctccagcccacctccgtggcgcccctctccctgctccagctccttccaccaccgagctgtcgcactggtgaagcagcaacgctcggcttcccctagcctccaacccttccgtcgtctttctcctctctctaatctccagcacatgcccagctcctctccacgccacgcgactgcagaccgaggagcagtccgcgccaggtgaaggcaaggagtccatctcccgcgacatgctccaggccagcggcgtgggtctggccgtggtggtcagcacggtggctatccggccatgtggagacgagcggtggtgagcagggcatccttccattgatttcctccctcggctccctccttgcttcactctctccctcagatttgtctgcgcgcagtcgtgggttcctctgctcgtccgtctccctaaccccgtcgatttcttcctgggcgcgttggtggctggcggatcccctggccgtgtgcccctgtgccggtcgctcctccctgccccagcccggcgtttctcccgccggtcaagctccctgcgctcgcccatggcgcgcgctcctccaagccggcgtccactgctcgccatggctgccgatcctgacccagccgtgtgctcgcccagctcggcctctgctctgtccctgctgcgcgcgcgagctcgtcggtcttcccagctcgcctgtgctccttcctctactctagctctagcgtgtttccttcagcaccttcccatggtcgccgcgccctctactccttccagccggtcgagtctctctgcagccgtgcgctcggcctccagctcccgtgcgcgcgcgtccctggtccctgctcggatctcgcccgacctcagcgctagcactcctcgatgtcggcgtcgagtttgggaccctacttgccatcgcgaccgccgtcgaatcgtcggattccatcccccatggcgcttccatttcctcgccattctacatcgccagcttcgttcctgttcactagccatcttgctctccacgtcgtagttctgttaagggaaacgatgttgcttgagtagtggtcagtatgtgtgtagagatgagcttgaagatgggactattgatagggaagacagtgatgttccgtatgtcactcatgagatgttcgacgaaaaccccgaactaaaaatcatcgacgttcttgcaaatttgagccgggtatagttcgggagaagtctaaggatgtcaattagtgaaaagcaaggcccgtgtgcatcgctcatcaagtgctcggttgaagacttcaatcgaaggtcgtcatcgttcgtgtgatgatcgagtcaaattgtaatatgtgagttgattcgctatttctattattagttcgatgattggattagctagatttattagtcatgatgattctcgtgtttagcaggcgtgctgtgtgatgagctccatattcttactattttaggtacgataattaatcgcgtgatgcggaagataacccaagtcgaccccaaaatgacgtagc

SEQ ID NO: 43753 - DNA, 705 bp, Zea Mays
ctttcctgtttccagaatccactcgacacggttcctggtaccatggtcgcctcctattttcatctgatgaagcttggctccctgggaaatccttcgccaacacccttacctggaggtttctcccttgtgctggcgcctgcagggatccctgtgggtgctccatccgtttcctttcgcctacaacaacatcgtcgtgccgcgttgtcgactgtgttcagccccgagccatcgaccaccgaccccaacagcgccgcgcttccctgaccctgaccccaaacatcacaaagacctgcgcacgtgctcctcatcgaagtgctcgacaaaccttgcctcgccaacgtctcgccaagttgtcagacccgtcctcgagtttggtggagtcccaagcttgcacgccgtcgactccctgctcgcctcgcttcgttgtcatcgttcactatcttcgtcctcgtcgtctacctcgccggttctcgcgcccaactggccatcgtgctcgacgtgttttcctccgtgcagattcgcatgtacctttcactccatccgctagtcgcgtggtagagaagatcacgttatcggtggatcaatcgccttgtggagtaatttcttggaggctggtcgtcaccctgaagatttgtggcaaattattttcttagtcattggctcttcactgcaacaaaggaggtgagaatccaagaacgacgtgca

SEQ ID NO: 43754 - DNA, 1038 bp, Zea Mays
tctccctcttatcctctcacgttactctttcctgtttccagaatccactcgacacggttcctggtaccatggtcgcctcctattttcatctgatgaagcttggctccctgggaaatccttcgccaacacccttacctggaggtttctcccttgtgctggcgcctgcagggatccctgtgggtgctccatccgtttcctttcgcctacaacaacatcgtcgtgccgcgttgtcgactgtgttcagccccgagccatcgaccaccgaccccaacagcgccgcgcttccctgaccctgaccccaaacatcacaaagacctgcgcacgtgctcctcatcgaagtgctcgacaaaccttgcctcgccaacgtctcgccaagttgtcagacccgtcctcgagtttggtggagtcccaagcttgcacgccgtcgactccctgctcgcctcgcttcgttgtcatcgttcactatcttcgtcctcgtcgtctacctcgccggttctcgcgcccaactggccatcgtgctcgacgtgttttcctccgtgcagattcgcatgtacctttcactccatccgctagtcgcgtggtagagaagatcacgttatcggtggatcaatcgccttgtggagtaatttcttggaggctggtcgtcaccctgaagatttgtggcaaattattttcttagtcattggctcttcactgcaacaaagatcacgttatcgatggatcaatcgtctactggagtaatttcttggaggctggtcatcaccctgaagacttgtggcaaattatttttgttggggacttgttctcaaatgctgagttaagaacaaggcaacacaaatgttaatggttaaagaccttcgtctttcgaagcattatctccctgcggatataatgatcttcagacgaaggttatgaaggacataccttcataatttcagtatgtaataatgaaagcagaaacatatgaaacatagaaaagaacatgttaatcacattaaaccatcagattatttgtgttctcattatataatcatgaac

SEQ ID NO: 43755 - DNA, 1053 bp, Zea Mays
aaaatcctcaaccatcctgatcgcccttatccataatacgatcatcactgtaaaatcttccccaccgcccatatctccctcttatcctctcacgttactctttcctgtttccagaatccactcgacacggttcctggtaccatggtcgcctcctattttcatctgatgaagcttggctccctgggaaatccttcgccaacacccttacctggaggtttctcccttgtgctggcgcctgcagggatccctgtgggtgctccatccgtttcctttcgcctacaacaacatcgtcgtgccgcgttgtcgactgtgttcagccccgagccatcgaccaccgaccccaacagcgccgcgcttccctgaccctgaccccaaacatcacaaagacctgcgcacgtgctcctcatcgaagtgctcgacaaaccttgcctcgccaacgtctcgccaagttgtcagacccgtcctcgagtttggtggagtcccaagcttgcacgccgtcgactccctgctcgcctcgcttcgttgtcatcgttcactatcttcgtcctcgtcgtctacctcgccggttctcgcgcccaactggccatcgtgctcgacgtgttttcctccgtgcagattcgcatgtacctttcactccatccgctagtcgcgtggtagagaagatcacgttatcggtggatcaatcgccttgtggagtaatttcttggaggctggtcgtcaccctgaagatttgtggcaaattattttcttagtcattggctcttcactgcaacaaaggtactagagttgtgctgttgtggatggtgttaagtgccagtaggcacgaccttcttataagtctaagtaactcttctatacttcttattgaggatggtcacttaagctagcgtatatttcaaacttataaataatttataacatttcaaagtttatttctttgaatcacttttgtaatcactccgataaacataatgtaaatttgttgtaacttgtaacttttgtaataaaaacaattctgatgcaaaaaagttggtgtgtgatttgtgtttactt

SEQ ID NO: 43756 - DNA, 623 bp, Zea Mays
attgctgggtattgactaccattgcaacgacaatggtggcatgaaggttaaagctgatcgtgatgagtcctcgccttatgctgctatgcttgcctcacaggatgtcgcgcaaagatgcaaggagcttggaattactgcattgcacattaagctccgtgctactggtggaaacaagaccaaaacccctggccctggtgctcagtctgctcttagagctcttgctcgatctggcatgaagataggccgtattgaggatgttactccagtccccacagacagcacacgcagaaagggtggtagaagaggaaggaggctgtaatttcgagtcctgacgtggtgccctgtcagatgtagcagttcaagtctgtctgcatctaatatactgagttattaggttttgtatcgattgaagttttgagtgaactcttgaatgcttaccaatactcattcttgacatggcatacaacatagcagcacaattacaagaggccctactgactgtttgtctgtgtttgatcggtactggggagcggtgtcaacctatggtttcgggtgaccctaacaatggacagcatgttcctgacttcctatggctttaatctgaactagctacatctgaacta

SEQ ID NO: 43757 - DNA, 1985 bp, Zea Mays
ttttgctcgatattcacctaggcaccgattctctcctccttggtgatcgtccctgctccccttggcaacagctgaaaccagtcgttcctatctccaactctagtgacttctataccgtacgcctgtgagcagtttgtgctgtcttcttcaagctttgaccaccggtcagcccctgctctcagctgctcctcaccctctgttcgttgtctccaacgccccagtctagctcgcccctgtgctcacccagctcacgtctaactcccctgttgccgacgaccgtgtgctctgctcgccggatccgaggtcgtcctcgtctcttccccatctccggtcgccatgccccatcttcggcgttggtctgcacctcacctcaaactgctctgctcggccagggcaccgtcctcgaccctgcaatggtgtcggccgccgcagcacctgctccctgcacgctggccgcccctgctcgtccccatggcgtccctcgcctccctgtagctccagctcgcgctgacgccgtcgtttctcagctccacaggctcgcatctggacgtgcctctacagcttgtcttccttcgccgctcggcctaggatgccgaatcccatgcctctctctcagctcgttcatcacgctacgctggccatctgggcgtccccctcaacaccgccgttcgaccctcgcctcgtcctcacgattgtggtcggctagtgttgtcctcctcgacctcaccgtggtgctcggcctcgccgtgctgctagatcatagtgccatcggctccttgtccggctttaacctcgcagtcgacctcctcctcatcacgcccaactgctctccagcgtccagctcctgtccgcggcgtcacgcgccgtacgtctctctctctgctcgacccggcatgggctctcgccgtcagccaagtgcctggatgctcgtgctcgagcatctgcagcagttcgcttgacgtcagctcgccgttgtcattgtctgcggctcgagaacgtcgtctccctactcatcttgcgccgtcattcaccactattccgcccttgtgtcatcgctgtcgtcttgacttgacagcaagcgccattgcatcctcgtcttctccagcctccgtagcaacgtcgtcgtcgcttcgactctgcctcaccagcgtcaggtacgctagctgagaatcgtacaaagcaaaggacgtggaccagagcagaccacaagatgatgtcggccggtgaaccggaaaaacgaacggactgaaccagacaagagatagtcgtcaagcggatatcgtctaacaaacactgacctagtgtttatcccaggtatgctagctgaaaatcgtacgaagcaaaggacgtggaccagagtagaccacaagatgatgttggccggtgaaccggaaaaatggacgggctgaaccagacaagagatagtcgtcaagcggatatcgtctaacaaacactgacctagtgtttatcccaggcaagcccagatgcattatccctttccttgttgttttaaaaactttatcatcgtgtatgatgcattaggtgataggagttggatgctaaacaatcaatgcatttccttccttgaaaatttgggtaccattccttgttacctgatttatttaaataagttttctgatgcttagccttgctttagaaaacaaaatttttgttttaaaacaaaaggtgatgcttcacactggatgagaattttttcaaaaaaagacttatgatggtgaatccatcacggctgtgatgggttcaacatcctaaaagagtacctctgtcaggtaccaaactttgggttataaatgatatagacgagaccgggcggatgacttgcacgagaaggaagtctcagtgtagtgtctccgtctgagtcgcttaaggaccgagtcgatgtaggcctactgattgaggacctttaactggcctcgtgaatcatcatgggtaagctttgtctcggccgaacaaataccaaaaag

SEQ ID NO: 43758 - DNA, 1487 bp, Zea Mays
tgaaaccagtcgttcctatctccaactctagtgacttctataccgtacgcctgtgagcagtttgtgctgtcttcttcaagctttgaccaccggtcagcccctgctctcagctgctcctcaccctctgttcgttgtctccaacgccccagtctagctcgcccctgtgctcacccagctcacgtctaactcccctgttgccgacgaccgtgtgctctgctcgccggatccgaggtcgtcctcgtctcttccccatctccggtcgccatgccccatcttcggcgttggtctgcacctcacctcaaactgctctgctcggccagggcaccgtcctcgaccctgcaatggtgtcggccgccgcagcacctgctccctgcacgctggccgcccctgctcgtccccatggcgtccctcgcctccctgtagctccagctcgcgctgacgccgtcgtttctcagctccacaggctcgcatctggacgtgcctctacagcttgtcttccttcgccgctcggcctaggatgccgaatcccatgcctctctctcagctcgttcatcacgctacgctggccatctgggcgtccccctcaacaccgccgttcgaccctcgcctcgtcctcacgattgtggtcggctagtgttgtcctcctcgacctcaccgtggtgctcggcctcgccgtgctgctagatcatagtgccatcggctccttgtccggctttaacctcgcagtcgacctcctcctcatcacgcccaactgctctccagcgtccagctcctgtccgcggcgtcacgcgccgtacgtctctctctctgctcgacccggcatgggctctcgccgtcagccaagtgcctggatgctcgtgctcgagcatctgcagcagttcgcttgacgtcagctcgccgttgtcattgtctgcggctcgagaacgtcgtctccctactcatcttgcgccgtcattcaccactattccgcccttgtgtcatcgctgtcgtcttgacttgacagcaagcgccattgcatcctcgtcttctccagcctccgtagcaacgtcgtcgtcgcttcgactctgcctcaccagcgtcaggtcatcatctggtacgctagctgagaatcgtacaaagcaaaggacgtggaccagagcagaccacaagatgatgtcggccggtgaaccggaaaaacgaacggactgaaccagacaagagatagtcgtcaagcggatatcgtctaacaaacactgacctagtgtttatcccaggcaagccctgatgcattatccctttccttgttgttttaaaaactttatcatcgtgtatgatgcattaggtgataggagttagatgctaaacaattgatgcattcccttccttgaaaaattgggtaccattccttgttacctgatttatttaaacatgttttctgatgcttagccttgctttataaaacaaaatttttgttttaaaacaaaaggtgatgcttcacactagatgag

SEQ ID NO: 43759 - DNA, 428 bp, Zea Mays
ccggctcctagtgaacccatcgtgcacactatgtcttgcttggagtattgggggtttcccagtcctatatcattggttgccttggacgtggtgaccacgccgagccttttcatcctttcatcgtggttagctgcttcaagggaaagaatttgatgacttgggctttattagttgcttcttgtggagatcttgaagcttaggttacttatgtgtatcttttatggaaaggcttcatctttccaagtattgtaattaagttatgcactttaaagactatcaggacttgtaaatattataactcttagtgaaagggaattagacttacacctatttcctaaatgattttggtggttgaattgcccaacgcaaataaattgaactaactagtttgctctagtgcataagctatacaggtgccaaaggttcac

SEQ ID NO: 43760 - DNA, 2000 bp, Zea Mays
ccagagccctctttaaccggctcctagtgaacccatcgtgcacactatgtcttgcttggagtattgggtctgaaaccattcctgcctctctcccattacttcgattctggtcatttgaaactcaataactgatgttctatgaccattccaactctctactaaacatcacaggggtttcccagtcctatatcattggttgccttggacgtggtgaccacgccgagccttttcatcctttcatcgtggttagctgcttcaagggtaaatttcttttgcgctatttgtgttctatagccattaagtactcgtaaagctctctggccgggccgtttaaagtttctcgtggtgcagtgcttagaacggtatagaatctttggtgaatgctgttgtctagcatgtccgcgtcgaccagcgaggccagtgttccccaagtcaatcagtgtaagaatcacatgttagatgtattgttgatgctagctgcggcatcggattaaacgctactgccaaatgaccttgggcgtagcttaaccaaggttgcgctcctcctgtcgtcggatgtagatggggttcagggtcagcacagatcaatccggttgaggggattagtcaactaaggccaaagttggtgcgggaatgtttatttccaatacagtaggtcacctgtggcgaacgcttgtgccatggccaggtgctcgacctgggttaccaccggaggtgggtagaggaccgggactcacaaatgaaggaatagaggagggtctcagcgtagatgtcagtgaaacaagaaactagggcaccagacttttgcgctgttaactgatcttacgaggggatgttagtataaactccatatacgatcgttggcggcctgtgtgctgctgttttccctgtgtgcaggggccgagcccataagtttcagccatcactgttaagtcatttatctttttcttttacccgacaacaaatagcttacactagaaaatgtagaaaaatgataacatagtgaaacaaatttttgagagtccatgaaaacctgtagttcctgtaaaaaaattagctataggatttttgtagcaactagtagattttttatttatttaaaagtacctttaagaggattaaaataattttagaaataaaaccgtaggtccaaaaaccatgaaaattagtgggaaaattatatacctttaaaatagctcctgttaaaaatcttagcctgtttagtgttgatttacctagagaaccacaaactagctaggtatatgtatttaaaaccttaacctaggtactaatttagggttaaaacaaacttgaatcatacctagtgttaaacagtaaattgactaactagaacttgaataattctatgatttttctaaagtaagtttaatatgatcccttagatgaagattatactacccagaaacatgagtataaatgtcatatgcttaactcagagtatgtaagccttccacctctctttaaatgagagtttgcatagcatctcattacatgagcattcatatactttgaattgacttgtagagcaccttgaagaagaatttgaagtggaagtagaaggggagcttgttccttcatctgaaccttctccaactgaggttgtcaccgaaggtgctccggaaggtgccccatttggatttgctgctaactataatatcctagtagaagaacccgactctcctcctcaccaaggaaagaatttgatgacttgggctttattagttgcttcttgtggagatcttgaagcttaggttacttatgtgtatcttttatggaaaggcttcatctttccaagtattgtaattaagttatgcactttaaagactatcaggacttgtaaatattataactcttagtgaaagggaattagacttacacctatttcctaaatgattttggtggttgaattgcccaacgcaaataaattgaactaactagtttgctctagtgcataagctatacaggtgccaaaggttcac

SEQ ID NO: 43761 - DNA, 844 bp, Zea Mays
cctgcctctctcccattacttcgattctggtcatttgaaactcaataactgatgttctatgaccattccaactctctactaaacatcacaggggtttcccagtcctatatcattggttgccttggacgtggtgaccacgccgagccttttcatcctttcatcgtggttagctgcttcaaggagcaccttgaagaagaatttgaagtggaagtagaaggggagcttgttccttcatctgaaccttctccaactgaggttgtcaccgaaggtgctccggaaggtgccccatttggatttgctgctaactataatatcctagtagaagaacccgactctcctcctcaccaaggcaagccccagtgcatttgccaccctccttgtatttacaaaattttatcacttatatgatgcattaggtgataggagttgattgattaaacacttgatgcattaccatcccttgaaagaattgattaccataccttgtcacctgatttataaaagctagagatgcttcatcatgcgatagattaaaaaaatttgatctatgactcataatttccaaaagaaaattggcttgggataatgaaggaatcatatgcagtgagaaattcagtatccaggcatggcccctctgtcaggtgccaaatgttttgagaaatagcataagtaaacttgaggcccgacggttgacttgcaccagaacggagtctgggtgtagtgtctccgtctgtgtcgattaaggaccgtaccgattgtatgcctgttgatctaggaccttttagctagccacatacctcatcatgggtaagcctgaacccggctattccatatgtgaaaggac

SEQ ID NO: 43762 - DNA, 831 bp, Zea Mays
gccgtcttcatctttcccagccgatcccctctccctcacggcgtcctctcccatggccgtcggccctccctgccatggtggtcacgccgctgctcgtcctcgctgctccccagtgctcggccagggagcttcctttcctctcgcgcccatctccctctcgcctttccttgctcgccagccatgtccctggcgcccgttccggctacagtctcccccatggtggctctttggtccttttctgcagctggtcagcatcccatccccttccctctctgctgatgtccgcggcacccagaatccttcccagacgcgctcgacccccttcctgcagccggccgtcgtttcccctcgctgctcttggagccggtcgtccccgtcgtgagccccttcttggtcgcctctcttttttccccatccggccgtcgttcttcagaacaggtcatcacggcgcctcagtccaacgcgccgctgcatcgccctttctagcgtcggccttggaaccgcttcccctagcgccccagtcgagctcgcctaggccgcggcctcgccgaaccgtgcagcccctgctctccttccccagccgcgcttagcccagccctccctcctagctccctgctcttttccatcgcccaagatttggccagcgctctccctactcgcctctaccctgctgctcccctatgtgttgtgcgatggggaatttttagttgcggcaatcgctatctgaacctccaatgttcatgttcttttggtgtgcaatttcaggtacgctagatgattatgcgaatgggagagcatggatcaggatggatcacaaggtggctttgatgg

SEQ ID NO: 43763 - DNA, 1712 bp, Zea Mays
cctatctccctgggattttaccagccgcgctcgcttgccgtcttcatctttcccagccgatcccctctccctcacggcgtcctctcccatggccgtcggccctccctgccatggtggtcacgccgctgctcgtcctcgctgctccccagtgctcggccagggagcttcctttcctctcgcgcccatctccctctcgcctttccttgctcgccagccatgtccctggcgcccgttccggctacagtctcccccatggtggctctttggtccttttctgcagctggtcagcatcccatccccttccctctctgctgatgtccgcggcacccagaatccttcccagacgcgctcgacccccttcctgcagccggccgtcgtttcccctcgctgctcttggagccggtcgtccccgtcgtgagccccttcttggtcgcctctcttttttccccatccggccgtcgttcttcagaacaggtcatcacggcgcctcagtccaacgcgccgctgcatcgccctttctagcgtcggccttggaaccgcttcccctagcgccccagtcgagctcgcctaggccgcggcctcgccgaaccgtgcagcccctgctctccttccccagccgcgcttagcccagccctccctcctagctccctgctcttttccatcgcccaagatttggccagcgctctccctactcgcctctaccctgctgctcccctatgtgttgtgcgatggggaatttttagttgcggcaatcgctatctgaacctccaatgttcatgttcttttggtgtgcaatttcaggtacgctagatgattatgcgaatgggagagcatggatcaggatggatcacaaggtggctttgatggccccatcccgatatggacgacttgatcaagtgtcaggatttttgaggctcgccaagcggacatcatctaaccatactaacctagtgttattctaggaaagccccggtgcatttgccagctccttctgttttaaaaagttttagcaccttgaatgatgcattaggtgataggagttgtgtgatcaaacagttgatgcatttccttccttgattaaacaaccctaatacccgttttatgaaaatttagtgatgcttagccctgcttattaatttaggattgtttttaaaatatgatgtgttacatgggatatgggaatttatgaaataaaagaatttgtgatgatgaacccattgtggtcatgatggtttcatcattcaagtagggtacctctcttaggtatcaagttttgggaaataatatgtaatgtagaccagacgttgagcaggaaagtttgcctgtctgtgtcgattaaggaccgttcgatgtaggcctgttgtggtggagactttgcaactagccacatgctccggtaagcctgaacctggctattccatacgtgaaaagacaatcatgcactgggcgtgcgagatggtgggagtatcgtgtaccctcctggctagaggctgtacggaggagtactgtgctcccgggtagcgcggaccggttcacgttgttgttgggaccatgcttcgtcgccgaaggtcctgcagaaagaaacaacttcggctgaagctgctcgtacgtgatgacgaaggtaccattcatgaagcttcggtattgcagcatatccgaagatgaagggtcgaaccgacttaaagatagaatgaccctttagcccataaggg

SEQ ID NO: 43764 - DNA, 2323 bp, Zea Mays
ttccctcccttctctattctgttcccctttcccccctccttctccctcctcgccaacccggtagtaaccccacccaccgcccgcctccagcctcgcgggtccccgccccgccttgccggaaccctagctccggcgcgtgccccggcctccccagccacctatcggttccgggggccccgcgcccctcggctcgatcgcgcgagatccggagccgccgccggccgggcgcagaagccatatgtcgggggtcggcagcggcaggccgccggcagcccagaagatcctgcagtccctgcgaccgccgctgtccttctccacgccgtcgcggccacccttcgccgcgcccgacgactaccaccgctttccaacgccggctgcggccacgtcccccgccgccacctcaggcggcgttggcgcgggggctgctcctcctgatactgtcgaggaggggctggtcatacggactccgctaaaaaggaaagccacatctgaagaaaatgctgctgctgactcaagcagttgtatcattaccagtccaatgctcactccggtctctgctaaaactgttaaagcttctaaggcaaaggctaagaacagtaaaactgggcctcagacacctacatcaaatgttggttcaccactcaatccaccaacgcctgttggcacatgccgctatgacaattcactaggacttctgacaaaaaagttcattaacttgcttaagcaagctccagatggcattctagatttgaacaatgctgcagaagtactagaggttcaaaagcggcgcatatatgacattaccaatgtccttgaaggcattggactaatagagaagacacttaagaatagaatccgttggaaggccctggatgattcaagtgttcaattagataatggtatctctgctttgcaggcagaagttgaaaatcttagtctgcaggagcaagctctagatgagcgtataagtgacatccgtgaaaaattaaggggcttaactgaagatgaaaataatcaaaggtggctctatgtgactgaagacgatatcaagggattacccagctttcagaatgaaacactaattgcaattaaagcacctcatggtactactcttgaagtaccagatcctgatgaggcaggtgattatctccaaaggagatatagaattgtattaagaagtacgatgggaccaatagatgtttacttagttagtcaatttgatgaaaaatttgaggaactgggtggtgttgcgacacccgccaagcattcaaatgtgcccagacatcaaccagctgaagatttcaatacatcatatgctggacaaagtagcacactaatgggtgtggcacatgatgcacagcacagccagaagattccccaggatcctagtgctttgcatgactttggagggatgacaaggattagtccttcagacgtccatacggattctgattactggctcctaacagagggggatgttagcatgactgatatgtggaaaacagaactgggatgagatggatttcttgtcagaagatgttgtcacccctcgagcccataatcagcagctggtcacagttgatgggccacatatggaggttccaagcacagatccataagatcataatggcctcaacaaaactgacatctgaacacctggagcggtgagtgttgaatgggaaggattctcgtgtgacagtaaatgcttattattgcaacggaagagccggacgatttcatcagggaatgtcacctggagtttagtcagggcatcagttcacaacttcagattggtgcacaccgctgttgtgaagattggcgaggtcagcttggttaacaatttactgcctgattggtaacctgcagctatttagcttagccgacactgctcccggcttctgtgactttggtgttgtgctcattcatccctgctccattggcttgccaagctattatcataccagaccggtggacctccactgaaaaatgctgcacaatgtataaaacatcaggtcaaaacggtgcacagtgcatggggtgttggcgttacaaaaccattgggtgagctatcaatgtaaggcagaaaattctttgtaccgcgttacaaaaccattgggtgagctatcgatgtaaggcagaaaattctttgtacaattgtttgataccccagatcaaagcatagctgttcgattgtaaacaaatgtttctatgcatgtatcagagaggagctcaaattgtttggcatacatttgatccattcacaggttcataccctgttaaacgtaacaacctttgataacgaagaaagatgctctattatgtg

SEQ ID NO: 43765 - DNA, 1312 bp, Zea Mays
ccgttgcaatagctgactcgaatccgcgagatcggtaatgattctccgaagtaggcaatttgtcgagcgcttggcagatactatccgaacttcacacaccccaccatccaacctttggacattttctcttggggattcttttgtcagcgcgattccaactcggaggtatcacgtagggaccgacatcgagatggggtgaccgaacgacgacggcaagacaaaggttggagacgaccggatatcaatgataagcactagagttttacgacgggctgttgtaatgaacgttgatacactatccatggcaattaggagatcgacgtaggcagaatcgatagccgaacaggaactacgcagatcgacgacgcgagactcgatctggcgagcacgacgcaagggatcacagctgctgcttcaacgtgaattacttgctgccgagcacgacggaggccggggagcaggatcgctgcgcagcgaaacccacagctgtgcgcaggggtgaactcggctgggcgcggcgagctgctcggcaggggaaggggcgagccagctgagggagcgagggcgcacaaaccagtgaactagggagggcacactggcgagcaagaagtcccgtgagtactggacagggaaaacgacgagctcgactgcgtccttggctagagcgagcatcagaaacgagcacgacggagcggctaccggcgaactccatggccgggaggacgcggcgtccaggagcaggaaacacgggcgcgcagggacgagctcggctgccgtggcgctgggtagagccaggacagcgagcgcgccagggagaatcgccgggcgccatgggagagctcagggcacgcaggccgagctagagccaagcgccagccatgggagagcgccagagagcttcgtggtccgagctgggtgagctccatggccggacagagagcgaggtaccagggagatccgaccggcgcggttggggaagaagcagaggaactcgagcttggggagaggctgggcgtgcgtcgtgagcaaagggagctgggaaccgcagcgagggagctcagctgcgtggctggaggagtaccagggaagaacgacgccatggattgaggagcagagaaggcaccggcgagcagcaagcagagagaaggcgcggcggccaggacgaacgccagggagctttggccatggcgacgagcttggggagatggggaggagagaggagggaggtccaagcaggtagagagagaggcgcagggaacaccacggcgcgcggcagagggagcaaagaagcaggcgcggctgggaagataag

SEQ ID NO: 43766 - DNA, 4147 bp, Zea Mays
atgagccaggactacaggcccatttcattccgccgccaacttcaaggccgttgcgtttgcgttcatcaaccgcgtctggcgactcttgcgttcacggttcacccgaaccacacccgttcctttcctttctcctccctccctactcacacccctgaaccctttcacttcgtggcgccgactgcgcaaccggcaccaaccttcgccaggttttcgtgggctctttcaccgatacaaccatcctccagaacgcaagggatgctcgattgactctagttacttagcagaaccaaaagtggaaggccatcaaagatacgaggctattttctctccatgtctcggtcaccccacctcccaccccgctgcccaccgctgggtcctcagatcactcgaagggatgacggcatgttcacgcaaagctgcaggtttccatctggggatacgttcattggtgaaccaccgtgctggctggatgatctccttgaagattctgggaaagctcccaagctccctcctctcagaagggcctgcagcgattctgatgccatcttagatgcgctgtcgacattccagagcccaatttatccaatcgaggaatgtgatctaaactcaggtggtgaagctgaggacttgttgggtggagtcgaaggtgatgaaagtggttctgtggtcgaggctagctgtttctatggtccgaattcgccaagacagaagagtaggcttacaacttcagagagttccatggtaaatgctgtgcttgagaatgtccccggcaaccccttgcagtacctgaccatcgatgcctgcagtgatgtgaatggtaatgtggccaatgtaactgctgatgcctgtgatgcttttggccatcctgatcaagacaagtcatttaaaaggcgctcagggcaaagatctagggtccgaaaacttcaatacatcgctgaacttgaaagaactgtcgaatcgcttcagaacattggagctgatttggccgtcagaatgtcatcacttttccatcttcacaatgctctatcaatggaaaacaagcaactgaggatacatatttccagtcttcagcaagcaaaactgattaaggatggtcagacgcaggccctaaagaatgaagctgaaaggttgaagcagatgtctgcccgtcaccgccggagcagaagcgtcacttcctgttatgacctgagctcattcggagcagatgctacggcagtcaattggcagatgcctgacatggcaaggctcagcctgaatggaagctcctctgtctccccaagaagcggctatggtatatgacagcagccggccctaacctccctcagaagataagtcgaggcattaccctagataacttttcgctaaccttacccaggcatatatttgagggcccatctttgactaggatatcagttggattcgctgaattttgcagaggctatcagcttaggcccggtttggttggggttttaggctgtttttgctttccaaaagccaaaagatcaaccaaaagacttttttcagaagcagttgcttttcgtaattttttttaaaacaccttagaccttgtttttggcttttggttttctgcttttctaaatgggttgaataaataacacagttgtttcgagagagatactataagaggtacattttacatttgttttaacggttcaggtttttcatagttgacgccttaccgcagagtacacaacatcttatcgctcatggctagtggtgataatggattatgatccaaatatttcttcacaagaaattagagctcttaataaattttagttaaaaatgaagaggaatagagattggtcctaatttgatttgacccttaaattttagtgtaaaatttagagcttattaacacccctacctatggcctacaacacattactcttagggtctgtttatttcggtatttttgataagcttttctaaaaatctggtcgtagggagatttaagtatcgtgagaactacatgtagggaaagatgaagtggtccataagatttgtgaaccagacagaatctactatcgtgacaattcgaccaattctatgttcacgttgattttgaacggtttttattaaaacgatttttacaaaaacaaattgaaagttagatgttttgcagtccacaacagcttttgatggctagaagctaaaaaaagttgaaacaatcaaaacttttcaattataataaaaaaggccacgcagaaataaaaaaggaaacaagactactgatacagggggtagaacaaaacgctgttggctgtcaattttgatctcatctattgaacgaatgactttggcaattatagcatgcctatttttggtcttttaaaagttgttggttgtatatatgttgtgatgctatgtcggggaaggttccctttctattattacaggccgtctgctcagtccgctcgactgattggcgtgtgtgtattgcaccccaccccactaaccttgtgcactacgccgggacaaatgacgtgacatgcaaggagggacaacacaagtacacaacaacccacgttaactaatgctctttttttagaaaacaacctaaaagcacttgcgacgtgtttggttcgatgtaatgtaatggtataggattccttcgggtatctgataacgttacatgtgtttgttataagttctattagaattagatacattggaatcggataccgctgtatagaaaactgaaaccctccaaccctagccggaatcaatgccccgattcactcgctcagggccgctcgagccttcctcctcctccttggacgccagtgccgcgccaccacctaggcctccatcctcctcggatgccagaagccagcgccaagtcttcgccgccgtccaggtaacaaatctcccagagtccattctctctaaatctcgaatttgcccagagtctgtctctctgaatcccctagagtccgtctctccgaatcccgattttgcccatgtgcttcgctcctttctagttcgtcagagttctagatccattggactgcgcgatagactgctccatgatcccgcggactactggttttggttcatcggagttctagatccagtgtaatcctggcagcagtagtagaccatggaggtctgctgcgcccagcgcatggcgtcccgctgctgcacgctgagtccgacgccgacgggggacgccggcacgggacgacactgggtgggactggcggacctgggagagggagagctggagagggcacgggggaatggacctagacctgcactgttttcttcagcgcgacagcccccagccaggtgtgggttgagttggactgccttcttcctcactggaatctgtatcccgttgtgcatttgctagctttatttttctgtggtccagcagaaataatttccagccagtttgcaccatgatcgcttccaaggttctggtcagcattttcaatcatttgtgaatcctgtcgttggttgctccttattttgtacgctagacttttgttgtacccaagcgttgctattcctcgtcgtaaactaatgaagggagtatttggcaattgtttctgtctattttatattctcttcattagtttcatacatatcttagatctgaatattttgttatataaattatgtttgactttatttattcgtaatctactactgtaaactataaacttgttggttggattttttatgtgggaatacataagaatgaaatcctggcacaagggggtttgttcagcagaggaaagttttgttcttaatttattagtctgcgggaagccaaagtggtttgcttctaagatctggtatcagtgaagaagcaatcaaagtgtttcacctgaaacgtaaattcttcgatttaggacaatttcactattcgatgataataatcctaacacaaactttgttttagttaagatggaccaatccatttgatcatgtactttataacaggatctgaaacttgtgtaacttgttttgcttcggatttagctggtggtactaccgtggccactccgaatgtcattttcttctgagtcctctatgctctgtttaatttatttgatgtgcacaatgatatccagatttatatgaaactcatttgttgacctccagatttatcctcaag

SEQ ID NO: 43767 - DNA, 4085 bp, Zea Mays
atgagccaggactacaggcccatttcattccgccgccaacttcaaggccgttgcgtttgcgttcatcaaccgcgtctggcgactcttgcgttcacggttcacccgaaccacacccgttcctttcctttctcctccctccctactcacacccctgaaccctttcacttcgtggcgccgactgcgcaaccggcaccaaccttcgccaggttttcgtgggctctttcaccgatacaaccatcctccagaagaacgcaagggatgctcgattgactctagttacttagcagaaccaaaagtggaaggccatcaaagatacgaggctattttctctccatgtctcggtcaccccacctcccaccccgctgcccaccgctgggtcctcagatcactcgaagggatgacggcatgttcacgcaaagctgcaggtttccatctggggatacgttcattggtgaaccaccgtgctggctggatgatctccttgaagattctgggaaagctcccaagctccctcctctcagaagggcctgcagcgattctgatgccatcttagatgcgctgtcgacattccagagcccaatttatccaatcgaggaatgtgatctaaactcaggtggtgaagctgaggacttgttgggtggagtcgaaggtgatgaaagtggttctgtggtcgaggctagctgtttctatggtccgaattcgccaagacagaagagtaggcttacaacttcagagagttccatgtgatgtgaatggtaatgtggccaatgtaactgctgatgcctgtgatgcttttggccatcctgatcaagacaagtcatttaaaaggcgctcagggcaaagatctagggtccgaaaacttcaatacatcgctgaacttgaaagaactgtcgaatcgcttcagaacattggagctgatttggccgtcagaatgtcatcacttttccatcttcacaatgctctatcaatggaaaacaagcaactgaggatacatatttccagtcttcagcaagcaaaactgattaaggatggtcagacgcaggccctaaagaatgaagctgaaaggttgaagcagatgtctgcccgtcaccgccggagcagaagcgtcacttcctgttatgacctgagctcattcggagcagatgctacggcagtcaattggcagatgcctgacatggcaaggctcagcctgaatggaagctcctctgtctccccaagaagcggctatggtatatgacagcagccggccctaacctccctcagaagataagtcgaggcattaccctagataacttttcgctaaccttacccaggcatatatttgagggcccatctttgactaggatatcagttggattcgctgaattttgcagaggctatcagcttaggcccggtttggttggggttttaggctgtttttgctttccaaaagccaaaagatcaaccaaaagacttttttcagaagcagttgcttttcgtaattttttttaaaacaccttagaccttgtttttggcttttggttttctgcttttctaaatgggttgaataaataacacagttgtttcgagagagatactataagaggtacattttacatttgttttaacggttcaggtttttcatagttgacgccttaccgcagagtacacaacatcttatcgctcatggctagtggtgataatggattatgatccaaatatttcttcacaagaaattagagctcttaataaattttagttaaaaatgaagaggaatagagattggtcctaatttgatttgacccttaaattttagtgtaaaatttagagcttattaacacccctacctatggcctacaacacattactcttagggtctgtttatttcggtatttttgataagcttttctaaaaatctggtcgtagggagatttaagtatcgtgagaactacatgtagggaaagatgaagtggtccataagatttgtgaaccagacagaatctactatcgtgacaattcgaccaattctatgttcacgttgattttgaacggtttttattaaaacgatttttacaaaaacaaattgaaagttagatgttttgcagtccacaacagcttttgatggctagaagctaaaaaaagttgaaacaatcaaaacttttcaattataataaaaaaggccacgcagaaataaaaaaggaaacaagactactgatacagggggtagaacaaaacgctgttggctgtcaattttgatctcatctattgaacgaatgactttggcaattatagcatgcctatttttggtcttttaaaagttgttggttgtatatatgttgtgatgctatgtcggggaaggttccctttctattattacaggccgtctgctcagtccgctcgactgattggcgtgtgtgtattgcaccccaccccactaaccttgtgcactacgccgggacaaatgacgtgacatgcaaggagggacaacacaagtacacaacaacccacgttaactaatgctctttttttagaaaacaacctaaaagcacttgcgacgtgtttggttcgatgtaatgtaatggtataggattccttcgggtatctgataacgttacatgtgtttgttataagttctattagaattagatacattggaatcggataccgctgtatagaaaactgaaaccctccaaccctagccggaatcaatgccccgattcactcgctcagggccgctcgagccttcctcctcctccttggacgccagtgccgcgccaccacctaggcctccatcctcctcggatgccagaagccagcgccaagtcttcgccgccgtccaggtaacaaatctcccagagtccattctctctaaatctcgaatttgcccagagtctgtctctctgaatcccctagagtccgtctctccgaatcccgattttgcccatgtgcttcgctcctttctagttcgtcagagttctagatccattggactgcgcgatagactgctccatgatcccgcggactactggttttggttcatcggagttctagatccagtgtaatcctggcagcagtagtagaccatggaggtctgctgcgcccagcgcatggcgtcccgctgctgcacgctgagtccgacgccgacgggggacgccggcacgggacgacactgggtgggactggcggacctgggagagggagagctggagagggcacgggggaatggacctagacctgcactgttttcttcagcgcgacagcccccagccaggtgtgggttgagttggactgccttcttcctcactggaatctgtatcccgttgtgcatttgctagctttatttttctgtggtccagcagaaataatttccagccagtttgcaccatgatcgcttccaaggttctggtcagcattttcaatcatttgtgaatcctgtcgttggttgctccttattttgtacgctagacttttgttgtacccaagcgttgctattcctcgtcgtaaactaatgaagggagtatttggcaattgtttctgtctattttatattctcttcattagtttcatacatatcttagatctgaatattttgttatataaattatgtttgactttatttattcgtaatctactactgtaaactataaacttgttggttggattttttatgtgggaatacataagaatgaaatcctggcacaagggggtttgttcagcagaggaaagttttgttcttaatttattagtctgcgggaagccaaagtggtttgcttctaagatctggtatcagtgaagaagcaatcaaagtgtttcacctgaaacgtaaattcttcgatttaggacaatttcactattcgatgataataatcctaacacaaactttgttttagttaagatggaccaatccatttgatcatgtactttataacaggatctgaaacttgtgtaacttgttttgcttcggatttagctggtggtactaccgtggccactccgaatgtcattttcttctgagtcctctatgctctgtttaatttatttgatgtgcacaatgatatccagatttatatgaaactcatttgttgacctccagatttatcctcaag

SEQ ID NO: 43768 - DNA, 1730 bp, Zea Mays
acggctatgcatgtgcaccagataacttaacaggatctgtctgattgccccaaggacatcggataaaccacttacaatcaggaccgcaagattaagtaacacaaatcacacaccaatatttttgcagcgaaaacttattaccaaattttacaagttacaaaaattatacattattttatcagagtgattgcaaaagtataagtttgaaatatatgctagctcaagtgaccatcctcaataagaagtatagaagaagtacttagacttataagaaggacgagcccaacgtcacttaacaccatcatcagcagcacaaaactataacctgaaaaacaacagggaataaaaccctgagtatggaattactcaacaagacttacccgactaaagaaaagactctcaagggtatgctggctagagggattcaaggtatggcttatcaataatcaaagactcggttttgcagaaatgcttactaaaagtggatccttaaaaatccatttttacttgtcaggttaagtaaaattacctgcaactaaagttctttctaccctagttcaatcacttgacctatactagccaatttcttaacaacccttcagctttactggagttctacgtatagggcagtgaccaagtcttcatacccgcgaaggtacggtgatctgaatcgattatactcagctgaggatctccgatcacacgacatatgtagcacttaacccttgcatatgtcaacctgccaccggggttcttaagaccagatcaggttcacgtcaaccgagagcacagatacaccactgtccagcctcttgccatggagggtacacgctactctcaccatcgctccactcccattgcgtgttatcttattatggccttagtctgcccgaggcaaagcttacccatgacgaggcatgtgaccagttaaatggtcctcggtcatcaagcctacatcgacacggtccttaatcgactcagacggagacactacaccgagactcctttctcgtgcaagtcacccgtccggtctcagcttaatcatttcaaacccaaagtttggtacctggcaaaggtacatcttttccgatgttgaacccatcagggccatgatggatccaccatcaagttttattttcgaaaacatcccacccacttttgccacatcatcttttgtaaaaataaaacattttgtttttctaaagcaaggctaagcatcaaaaatctttttgtaaaacagggatttcaaggaaggtaatcaaatccaaggaaggtaatgcaggaattgttttagcaatcaactcctatcacctaatgcatcaagcaagtgaaaaagatttttaaaacacaaggaggtgataaatgcaatgggtttgcctgaataacactaggttagtgttgttaggtgacgtccacttgacgatcatccttgttctgatacttgtttcgtctatccatctttagattagttcatcagcttcatcctgcggattagcccgcgcttagggtcgatttggctcatcttccgcatcacgcgattaattaacgtatcgtttcaatagccgactcgaatccgcgagatcggtagtgattttccgatccaagcaattatcgagcgcttggggaatatcacgctgctagcttcgtcatcacccgattcttgggattcttgatgacacgcggaacggcgacgatcttcgattgaagtcttcaatcgagtacttgataag

SEQ ID NO: 43769 - DNA, 826 bp, Zea Mays
atggttagctgttgattatatttatatgaatatgtgtgttttgtgaggagaggaatttcatgtgtgtgaagagaagcaaggcacgtggcgcttgcaaggtgtcaaatagaaagaccgaacccaaaccacagctcggcctccatagctcggcttccactcacatcaaattccacggcttccacgcctagtgaagatgaggaagacaggagtaacattcctacagttactattcagatattgatcgaaccatgaagaagttaactattcagatattcagatctttcttctggttcttgatctggaaaaggtttggtgtgtaaatgataaagacaaggttcaactctcaccctctgaccaatccaaattttacactggcgattgctacatatttcagtatacttatcctagagatgataagaaggaatgtcttattggaacctggtttgggaaaaagagtattgaggaggataggctaatagcagtttcacttgcaagcaagatggttgaatctgctaagtttcaggctgtccaggcgcgcttttatgaggggaaagaaccgattcagttctttgtgattatcaatcagtgcgggagtgatgtcgttgtggtgcttttgaacctattattagaatgcatcagtcaaactcgccttcagtctagtggcgttgtactcccatttcaacaaactgtaaatgatctagttgtgaatgatattataattgtgatgcttttgtgaatatataattgtggtgcttttgtgtttatgtgatggatctatgactgtggtatactgtatgtctttatgatttgtgtataaaaatctgtg

SEQ ID NO: 43770 - DNA, 760 bp, Zea Mays
tgaccatctcccgtcacctagaacccaaaaggacctggccgccatcacctgagggagctcgggagggcgaagccgagggccacggacacaagcttcaccgcccggaccaccgaccacctcctgtgcgatgaggaagacaggagtaacattcctacagttactattcagatattgatcgaaccatgaagaagttaactattcagatattcagatctttcttctggttcttgatctggaaaaggtttggtgtgtaaatgataaagacaaggttcaactctcaccctctgaccaatccaaattttacactggcgattgctacatatttcagtatacttatcctagagatgataagaaggaatgtcttattggaacctggtttgggaaaaagagtattgaggaggataggctaatagcagtttcacttgcaagcaagatggttgaatctgctaagtttcaggctgtccaggcgcgcttttatgaggggaaagaaccgattcagttctttgtgattatcaatcagtgcgggagtgatgtcgttgtggtgcttttgaacctattattagaatgcatcagtcaaactcgccttcagtctagtggcgttgtactcccatttcaacaaactgtaaatgatctagttgtgaatgatattataattgtgatgcttttgtgaatatataattgtggtgcttttgtgtttatgtgatggatctatgactgtggtatactgtatgtctttatgatttgtgtataaaaatctgtg

SEQ ID NO: 43771 - DNA, 336 bp, Zea Mays
cgcacctcacgctttaaggccttatccttatcatctgaagcatttgaccatctcccgtcacctagaacccaaaaggacctggccgccatcacctgagggagctcgggagggcgaagccgagggccacggacacaagcttcaccgcccggaccaccgaccacctcctgtgcgacgaacaagtgaccgaggacctaggtgttcagcaggtggaaattgttgagcaggagctcattgaaggcaagttgtgcccttgaccacttttatttacccaataatgttctctataattttggcatgcttaggcttaattttgatgggacccaataggtcacccta

SEQ ID NO: 43772 - DNA, 1102 bp, Zea Mays
caccgcgtaccggagccgtgggcagcttcaccaaggaccgaacaacctgtgttttctccaagcaacttcacgcgagcataggaatcttggatggtgataagaagtactcgaggtgttcctgaggctggagggtgtttctagttctagagtaggattagttaggcttgtgtataagctttggagggttcctaccttcctgctattgtaataagttttgcactttgagtatatcaggacttgtaataaatgtaactctttctatgtaataaacttcagttttagaaataaaaataatgttttataaagtcttccactcttatctctgaagtgtgtgtgtatcgaatgtgatcactgtaatatacatgaatgtgggagatctttgggataatgagtttaggttgttgaactcgtgatagccttgttaagttacatggtacatgcgcatagccatctcaggccattatggcaaagattggtgcacgtgggcccgataacttgggagggctgccacacccctctggcttcgtacaacccaaatgaaaacgctaaggcgaactatggcattcagatttagttgatgcatatatacctcataacgttgtagtaccttcacaatcatcttgtactttagaagctgaagtcctaccttaaagaagcttctatacacaacaacttcgtctttgcctggatttagagttgtttcatttccagtgaggcgcatgttgaccttactgctaaaataaccaagcttcttcatagattgcaggtctttctccctcaaagtggaacgaccaatctcaatatagattggtttcgaaggcctatccctaggcatctcctgagcaggctttgatgatgacaaatccttcatagctttggagataggcatgatatgttggcgagcctccaaagaggtaggtgtgatcagttttgtggtggatcgaatcctagcaatttgagtgaactgaaaattgtctaagatgacttcaccgaagccagcttccgaagcaacaatggctggaaagctttgaaggcatggaaattttggctccaggtagctgagggtagtaaatgtgatctgcatcaacccgctcgactattt

SEQ ID NO: 43773 - DNA, 1242 bp, Zea Mays
ccaccgcgtaccggagccgtgggcagcttcaccaaggaccgaacaacctgtgttttctccaagcaacttcacgcgagcataggaatcttggatgagctcccaacataagggtgaagactccagatgaagtggtgttgaaaggaggagtctactccagtggctgctgataagtgaaggagccagctaactgggtattggatagagggatctagaattccgtctctgcaacaaaggtgataagaagtactcgaggtgttcctgaggctggagggtgtttctagttctagagtaggattagttaggcttgtgtataagctttggagggttcctaccttcctgctattgtaataagttttgcactttgagtatatcaggacttgtaataaatgtaactctttctatgtaataaacttcagttttagaaataaaaataatgttttataaagtcttccactcttatctctgaagtgtgtgtgtatcgaatgtgatcactgtaatatacatgaatgtgggagatctttgggataatgagtttaggttgttgaactcgtgatagccttgttaagttacatggtacatgcgcatagccatctcaggccattatggcaaagattggtgcacgtgggcccgataacttgggagggctgccacacccctctggcttcgtacaacccaaatgaaaacgctaaggcgaactatggcattcagatttagttgatgcatatatacctcataacgttgtagtaccttcacaatcatcttgtactttagaagctgaagtcctaccttaaagaagcttctatacacaacaacttcgtctttgcctggatttagagttgtttcatttccagtgaggcgcatgttgaccttactgctaaaataaccaagcttcttcatagattgcaggtctttctccctcaaagtggaacgaccaatctcaatatagattggtttcgaaggcctatccctaggcatctcctgagcaggctttgatgatgacaaatccttcatagctttggagataggcatgatatgttggcgagcctccaaagaggtaggtgtgatcagttttgtggtggatcgaatcctagcaatttgagtgaactgaaaattgtctaagatgacttcaccgaagccagcttccgaagcaacaatggctggaaagctttgaaggcatggaaattttggctccaggtagctgagggtagtaaatgtgatctgcatcaacccgctcgactattt

SEQ ID NO: 43774 - DNA, 3197 bp, Zea Mays
gatccacgtgcacattcacgcgcccatccaaaactgatactccgacccaccaaaagcagcgaccattaatttcctcttcctttttattaactccttggattaaaccaatcagcaaattcttgcccgtggaaattagaattccccagcagaaataggtgcatcgtcgcgttcttttaatctagtaaaattcttccattttttcagtaatcctttcccttcccctgcatcgatcggagtatcggaccaagaacagagggtagaatcaggtagaaagaaacaagaactgacttagccagtggtaattccggcctccatttggtggatttatccaatacgatggcaagagtgtccggtgaatcgtgacttaattcctgacgaatttctcgtggtttccgtggacaaagctgtgacctttgcgatgcagtacaaccaccgtagccgcttgccgccgccgccgccgttcggccgtggtgggtatcctcgcggccacaagcagccgtactacgctcctcctcctcctccgccgtttccgccggcgccgccgccgccgccgctagagcgcaagtacgaggtgcttatggaggccggtcgcctcgctgccgagtatctggttgcccagggcgtgctcccgccagccgccctccagcgtggcgccggcatctctggcacgtggcttgctcatcctcttcctccgcccccgcagctaccacagcagcaggaaccccccgggttttatggccggaggaggtacgaagatgaatacaacagtaaccctaacggctggcctaggcgagccaatggcactagtagcagcactagtagcagagatgattgcagccgtggcagctacaatggaagagggaagaggaagtatggggagtacaggagggggtatctggactcagggagagacagggaggagagaggaaggccatttccgaacggtcggcactacgaggaggatggggatgaagatggggcacctgggtttcagagagagcgccgcggcaatcgggggaatgatgaggcgagtactagtgttacagaggcagtgagggaggggacaccattgacagcgaaggctgtagcagggttatgcatggaggatacaacatcgaagattatgagctctgtcaaagatactagtaaggatgctaatgatgcatcaaaggtgctggaggagactgaggaaggtgaggtggaggatgacagtgggacgcaaaattcagaaactgaggtggttaagcaagggatagacaccgatgtaaatcatgcttcttgtcgtgttgttacagagtcagatcccaaacagttaccatatggtaagattgaagatgaggttcctgatgaggaagctggaaatgaaaaaaaagttatggatgaggctactttggatcacaacacttctgatggtgagacaaatatggaagttgagatgcatgttggtaaggatagtttgattgactattgtaacttcacaagaaccccaacaaggcccaggtcagtgcgtgcacacagaaatgcagcatgtatcccaggagaaactgcagttgttgaaacagttgatctagtttcttcttgtcaagcttcacagatggtaatcggtgattctgctgagagatctttgactaacgtcgcgtcagaaaacagagaagataaaatttgccatgaaaacactagctctggtgatgtctgtgctgaaccaaaagagtcgatgcttcttcaagaaaatggaataccagttgggactggaaacatggtagaagagaaggttgatgcacaaccacatgtggttgtccagcaatataaggaagaaactaacttatctccgttaacagatgccctcaagaagagcttgatgcaggaaaccaccttatctccatttgcagcttctcacaaggatagcttgacgcaagaggatggcttcatgcaagaagctgatttatctccgttgactgctaatcacagggatagcttgattgaagaaaccaaattgctaccaacaacagcttttcacaaggtcagcttgattgaggaaactggcttaactcggacaatatcttatgagaataacttgaagttacaatttaaggaaggaacaaagatcggtgatatcgatatgctgccacaagatgtggacctgattgagttgcccgatcaaaggaaaataattggtcatgatgttggtgctgaaactgtaatagaaatggaaaagggaaagctggatcaatctagctcactaaatctatccgatcttgacctagttcgtggtacagaggttgccgctgtacacaattgtccagcgttggtccagccatctgcagctggatcttctgcagagtcaaataataaacagcaagaaggtcctgaaacttttacaggcgccaatgccagtcatacatatgatttatgccagattccattagataataaggatgttcaagtaattgatatagaatgtggcacaccagttgaagttgatggatttgatttgtcaaagtcaaagaattcctgatagtcctgtatgcgtctctggccttttccctgtgtgtcaagagaccagaatgagatgatgtgctctagcatggatagcatgatggaccccggccatggaatacatacggatattcttcctggtattcaagatggatacagccttgcattttctgattttcttggttctgatataccatgctacccatcaatgcaatcagatcttcatgctggaataggtgccaacgactctgagggcattgctgtcatggatgatccaatatatgggtccctctctgatattggtttcatggacgtgtgggggcagcccactcaagactacgacaaattcttctaggctgccgccgggggccgaggttcagtgatttgacaggagaattagttgagttacctgagtacaggcgagaataaatagatcgggttatctcagagaaatgttgtaatcattcctaattgtagagctagacaaactctcttttttttcgatacccatttcgacggagttactgatccaaagactggtcttatgcgttcaatggtttgagtgcggtattttttcgtttttaagttaggtaccgtttggttcgcgaaatgtaacataaatagtaatagtaactggttcgcgaaatgtaacgtaaatagtaatagtaacgattcacactcgaataccgatggtaacaaat

SEQ ID NO: 43775 - DNA, 3251 bp, Zea Mays
ctattaccatctatattgatgcgctatatcaaacagctgctttcaaacaacaacttccgaaccgtccggccttagcaaatgacatccgggacccaccagtccttctccatactcccgagtcccgacccaagcagcagatagaggaattggatccacgtgcacattcacgcgcccatccaaaactgatactccgacccaccaaaagcagcgaccattaatttcctcttcctttttattaactccttggattaaaccaatcagcaaattcttgcccgtggaaattagaattccccagcagaaataggtgcatcgtcgcgttcttttaatctagtaaaattcttccattttttcagtaatcctttcccttcccctgcatcgatcggagtatcggaccaagaacagagggtagaatcaggtagaaagaaacaagaactgacttagccagtggtaattccggcctccatttggtggatttatccaatacgatggcaagagtgtccggtgaatcgtgacttctgtgacctttgcgatgcagtacaaccaccgtagccgcttgccgccgccgccgccgttcggccgtggtgggtatcctcgcggccacaagcagccgtactacgctcctcctcctcctccgccgtttccgccggcgccgccgccgccgccgctagagcgcaagtacgaggtgcttatggaggccggtcgcctcgctgccgagtatctggttgcccagggcgtgctcccgccagccgccctccagcgtggcgccggcatctctggcacgtggcttgctcatcctcttcctccgcccccgcagctaccacagcagcaggaaccccccgggttttatggccggaggaggtacgaagatgaatacaacagtaaccctaacggctggcctaggcgagccaatggcactagtagcagcactagtagcagagatgattgcagccgtggcagctacaatggaagagggaagaggaagtatggggagtacaggagggggtatctggactcagggagagacagggaggagagaggaaggccatttccgaacggtcggcactacgaggaggatggggatgaagatggggcacctgggtttcagagagagcgccgcggcaatcgggggaatgatgaggcgagtactagtgttacagaggcagtgagggaggggacaccattgacagcgaaggctgtagcagggttatgcatggaggatacaacatcgaagattatgagctctgtcaaagatactagtaaggatgctaatgatgcatcaaaggtgctggaggagactgaggaaggtgaggtggaggatgacagtgggacgcaaaattcagaaactgaggtggttaagcaagggatagacaccgatgtaaatcatgcttcttgtcgtgttgttacagagtcagatcccaaacagttaccatatggtaagattgaagatgaggttcctgatgaggaagctggaaatgaaaaaaaagttatggatgaggctactttggatcacaacacttctgatggtgagacaaatatggaagttgagatgcatgttggtaaggatagtttgattgactattgtaacttcacaagaaccccaacaaggcccaggtcagtgcgtgcacacagaaatgcagcatgtatcccaggagaaactgcagttgttgaaacagttgatctagtttcttcttgtcaagcttcacagatggtaatcggtgattctgctgagagatctttgactaacgtcgcgtcagaaaacagagaagataaaatttgccatgaaaacactagctctggtgatgtctgtgctgaaccaaaagagtcgatgcttcttcaagaaaatggaataccagttgggactggaaacatggtagaagagaaggttgatgcacaaccacatgtggttgtccagcaatataaggaagaaactaacttatctccgttaacagatgccctcaagaagagcttgatgcaggaaaccaccttatctccatttgcagcttctcacaaggatagcttgacgcaagaggatggcttcatgcaagaagctgatttatctccgttgactgctaatcacagggatagcttgattgaagaaaccaaattgctaccaacaacagcttttcacaaggtcagcttgattgaggaaactggcttaactcggacaatatcttatgagaataacttgaagttacaatttaaggaaggaacaaagatcggtgatatcgatatgctgccacaagatgtggacctgattgagttgcccgatcaaaggaaaataattggtcatgatgttggtgctgaaactgtaatagaaatggaaaagggaaagctggatcaatctagctcactaaatctatccgatcttgacctagttcgtggtacagaggttgccgctgtacacaattgtccagcgttggtccagccatctgcagctggatcttctgcagagtcaaataataaacagcaagaaggtcctgaaacttttacaggcgccaatgccagtcatacatatgatttatgccagattccattagataataaggatgttcaagtaattgatatagaatgtggcacaccagttgaagttgatggatttgatttgtcaaagtcaaagaatgagatgatgtgctctagcatggatagcatgatggaccccggccatggaatacatacggatattcttcctggtattcaagatggatacagccttgcattttctgattttcttggttctgatataccatgctacccatcaatgcaatcagatcttcatgctggaataggtgccaacgactctgagggcattgctgtcatggatgatccaatatatgggtccctctctgatattggtttcatggacgtgtgggggcagcccactcaagactacgacaaattcttctaggctgccgccgggggccgaggttcagtgatttgacaggagaattagttgagttacctgagtacaggcgagaataaatagatcgggttatctcagagaaatgttgtaatcattcctaattgtagagctagacaaactctcttttttttcgatacccatttcgacggagttactgatccaaagactggtcttatgcgttcaatggtttgagtgcggtattttttcgtttttaagttaggtaccgtttggttcgcgaaatgtaacataaatagtaatagtaactggttcgcgaaatgtaacgtaaatagtaatagtaacgattcacactcgaataccgatggtaacaaat

SEQ ID NO: 43776 - DNA, 1430 bp, Zea Mays
agatgtgggactccaagaacatgatgtgtgctgctgaccctcgtcacggtcgctacctcacggcatctgctatgttctgtgggaagatgagcaccaaggaagtggatgagcaaatgttgaacatgcagaacaagaactcttcctactttgtggagtggatccccaacaatgtgaagtcgaggtgtatatggctaccctattgagattcaagcccttttctttatggcactaaggtgtgctcttcaaatgcttaagcatgataatgaagggaaggaatttgtagagaagattgctacccgccttcacgctttaagttatcacatgcgaagttatttttggctcgatttccaacagctaaatgacatttatcgttacaagacagaagaatattcccacacagctgtcaacaaattcaatgttattcccgattcaattccggactggttatttgactttatgccttgtcagggtggttttttcgttggtaatgttagtcctgccaggatggacttccgatggtttgcacttggaaacatgatcgctatactttcttctctcgcaacacctgagcaatctaacgctataatggatcttattgaggagcgctgggaagagcttatcggtgaaatgcctctgaagatatgttatcctgctattgagaaccatgaatggcgaattgtgactggctgtgatccaaaaaatactagatggagttatcacaatggaggatcgtggccagtgcttctgtggctgctgactgcagcctgcatcaaaactggacggccgcagattgcaagaagagcaatcgacctagcagagaggaggctgttgaaggatggctggccggagtactatgatgggaagcttggtcggtatgttggcaagcaggcgaggaaattccagacttggtccatcacggggtatttggtcgccaagatgctgttggaagatccttcacatcttggcatgatcgccctggaagaggacaaggcgatgttgaagcctgttttgaagcggtccgcgtcatggacaaattgagatggtgacgaaaatttttagggaggcgaagtcagctgaaaacacgaattcctgtggtagcgtctccttgtctgctgaccccttcatttgacttccaaaccaggatggtttgtgtctacttggttgtacaatatctcagctcgtttcctgagttgaaaaaaagaagcaactgcagaaatgggcattttatttttttctctctctttctcaatctctgtaagaagacactctgattcttgcttaggtcataccctataaataatggatccttttggttaggctcaactttgttgtaccagtggactatacagatgagtaagctgattccagcttccctgtgaagcataagtgctatttctaacgaatgaataagctactttccctgcgttgct

SEQ ID NO: 43777 - DNA, 3141 bp, Zea Mays
cgacgccctgcccgtcctcccccgtgggagcagggcagcaggcagccactcgaccgcgatcaccgtgccacgtcggcgccgcgtcctccccaccctccaccaaccccacgtgcaacacagctgcacctgcacacccgctctagctgtttgcttcgacccaccaaaatcccgcacccccaggaacgaagctgccgggcaaccaccttcatccacgcgagggcccccttgacccaccaatccaccattgctcgctataagactccgtggtgccgcacggctccgccgccggcgaggcctcatctcggtttactataagagtataagtacgtctccgcaacaagctaatcttttttttgccccctccttccacgtccccaccctgccgtcgtcgctactcgcatagagattcgcgcggccgtgtcttgctcgcgcctgcccccttccttccttgtcgtgccagcgcccagatctctcgctcgccggcgctcgggccagatctgggtgggggctcggaggcggagccgggcgcaggtttggtttgacccaaggggcgaggaggagagggaagaagaccccggacgccatggagctggcggttggcggcgggatgcggcggtcggcgtcgcacacctcgctgtcggagtcggatgactttgagctcacgcggctgctcagtaagccgcggatcaacgtcgagcgccagcgctccttcgacgaccactctctcagcgacgtctcgcactccggcggatacggcaggggtggcttcgacggcatgtactcgcctgggggcggcctgcgctccctcgtcggcacgccggcctcctccgcgctgcactccttcgagccccaccctatcgtcggcgacgcctgggaggcgctccgccgctccctcgtcttctttcgcggccagccccttggcaccgttgccgccgtcgaccacgcgtccgaggaagtcctcaactacgaccaagtgggctgtcactccattttatagctccctcttgtgaaaaattgattattacttgtaatagacattcatatcgcttagaaaatggtataaatgtatattcgacacattcatatcgcttagaaagtatcagttaaaaaaagtcatttaggtagtattgtaagtctcttatgctcttttatgtctaaattttaactgacaggcgtttgaagtatttatattgtaatttatgccttcgaatttaaaatttaggagtatcttgttatccagtgcatgtatatcaaattacattgtaattctacaactgttactaccaaattgaaaaatggttctatcgaattgtataatcatttttggtggcatacccttagataaaaatcttagatccaccactgttgttgacacaagttgaaaattatttgattccaagcttgtcattcgaagctcgtaggagtacatatatcttattcagggtaccttggtgggcaggtgtttgtgagggatttcgtgccgagtgcactggcgtttctgatgaatggcgagccagatattgtcaagaacttccttctcaagaccctgctgctgcagggctgggagaagaaagtcgaccggttcaagcttggggagggagccatgccggctagcttcaaggtgatgcatgacgccaagaagggggtcgagaccctacatgctgattttggagagagcgccattgggagggttgcacctgtggattctgggttctggtggattatactcctccgggcctacacaaaaagtactggcgatttgacgctggcagagacaccggagtgccagaaagggatgaggctcatactcagcctgtgcttatctgaggggtttgataccttcccgacattgttgtgtgctgatggttgctgtatgatagatcgcagaatgggtgtatatggctaccctattgagattcaagcccttttctttatggcactaaggtgtgctcttcaaatgcttaagcatgataatgaagggaaggaatttgtagagaagattgctacccgccttcacgctttaagttatcacatgcgaagttatttttggctcgatttccaacagctaaatgacatttatcgttacaagacagaagaatattcccacacagctgtcaacaaattcaatgttattcccgattcaattccggactggttatttgactttatgccttgtcagggtggttttttcgttggtaatgttagtcctgccaggatggacttccgatggtttgcacttggaaacatgatcgctatactttcttctctcgcaacacctgagcaatctaacgctataatggatcttattgaggagcgctgggaagagcttatcggtgaaatgcctctgaagatatgttatcctgctattgagaaccatgaatggcgaattgtgactggctgtgatccaaaaaatactagatggagttatcacaatggaggatcgtggccagtgcttctgtggctgctgactgcagcctgcatcaaaactggacggccgcagattgcaagaagagcaatcgacctagcagagaggaggctgttgaaggatggctggccggagtactatgatgggaagcttggtcggtatgttggcaagcaggcgaggaaattccagacttggtccatcacggggtatttggtcgccaagatgctgttggaagatccttcacatcttggcatgatcgccctggaagaggacaaggcgatgttgaagcctgttttgaagcggtccgcgtcatggacaaattgagatggtgacgaaaatttttagggaggcgaagtcagctgaaaacacgaattcctgtggtagcgtctccttgtctgctgaccccttcatttgacttccaaaccaggatggtttgtgtctacttggttgtacaatatctcagctcgtttcctgagttgaaaaaaagaagcaactgcagaaatgggcattttatttttttctctctctttctcaatctctgtaagaagacactctgattcttgcttaggtcataccctataaataatggatccttttggttaggctcaactttgttgtaccagtggactatacagatgagtaagctgattccagcttccctgtgaagcataagtgctatttctaacgaatgaataagctactttccctgcgttgct

SEQ ID NO: 43778 - DNA, 914 bp, Zea Mays
cttgcaaccacgaaatcgacgacgcctttcagctcagcatttcaccgaaaatagggtgagtgctgcgtcgagtggcgcttcttcttcatctacatcaagaattttctggccgcgtactgatttattttcttctacgcctaatcttctcggatcttggtgtagacgaggatgacgatcgacgacatcgacgtggtggcacgacaattctatttgacggaaataatggtgtggcgacacgtttgggctttttgtcaagcacaagcgcagggtgtcaggatggagcggacatcgcgatggccgaagttggcacaagcggcaaggcgagtgcaggactacaatagacgacaacccgacgagcatgcaacaaggcacacaaccgcgacgacagtcgaatcggcaataaagcttggcgaactcgataaacacgaccacggtcgcgtgctgacgcggataggataacggcggctggcgagcccaacagaggagcgcggcgcatggctagcagggagatgggaggacgcagggccaacgagatggtcgagtgttgctgagatggcatggtgtttggagacaaggagaacagagatggctggaccatacggcaccaacgagctccaaagcgggaccaaaactgcggcaaggaggatgaagtctggacgttgagcacgttggagcaagaatgaatggctgacggctagagagatagagaagcaccatgcatgacagcggctgggtgtttgcacggatggaggaaaagcacactgcttggatgaagcttgaagacttgacgcgggatggagctcagcttggggtcggactaggggagctcgcaggggagaggaagaaatctacggccagaccggcaaggtggcggagaggcacgcaagggaactgccacgttcaccagggagaag

SEQ ID NO: 43779 - DNA, 2300 bp, Zea Mays
gataagataagaccccagttgatgaagcaaaggaattctacctgttatttggccttggggctaatattgaccttatctttttcgtgcgtacattgaagtatttcttaaatttgcgcaagacattgggtcctggaattgatggctgggaagtatctttgaaagtaacgatgagcatagtggtacttcttggacttgtcataacttccatctattggggagtgaacaagtttgttttagcgattcttcacttccaaagtctgatcgtaagaagaaaaaggaaaaccctaaacttgcatgaaagagagtctgaaggttctgctctcctcgagatatgtgagggatatagctaccctcggtgccctcgataaccctggtctcatccgcgtctactaacatatctcggccaccacctgcctcgagatatgtgagggatctaagtgtctactaacatcagatgcatttgttgatgtcttgataagctgtagcaggttaatctctatatctatgtcacaacatcatcaaagatgtgatacttatatttatttttggaaaccgtagcaacacacatcagtgttacgatgatattttgcatatcataatgatatttgtcgttccgtttctatatttcatacaaaaaatttactcccgtcgcaacgcacgggcatatacctagttaaattctaagctcaatggtctaaggaaatttaaatctagaacaagaataaaagcacatcactttttagaccacgcgactggattaaattatataccactctaagctatcatatatagcctaccattaattttatcaaacaattataattcgtcataagtaatactaataatattattgtttagacattttaaaatactaaatttaaacttcattcactaatttaccgtacgtcacataattaacatctcaaacctacctaacgcgactactccaaaatctacctaacgcgactactccaaaatcgtgaaaataatcacatcgcattcattgaactaattcaataattaagctaacggaaatatgaatcagcttaccatattaaatcaaacttgcaaccacgaaatcgacgactcctttcagctcagcatttcaccgaaaatagggtgagtgctgcgtcgagtcttgcttcttcttcatctacatcgagaattctccggccgcgtactgatttattttcttctacgcctaatcttcttggatcttggcgtagacgagtatgacgatcgacgacatcgacgtggtggcacgacaattctatttgaaggaaataatggcgtggcaacacgtttgggctttttgtcaagcacaagcgcagggtgtcgggatggagcagacatcgtgatggccgaagttggcacaagcggctaggcgagtgcaggagtacaatagacgacaccacaacgagcacgcaacaaggcacacaaccgcaacgacagtcgaatcagcaacagagtgttggcgacaactcgataaacacgaccacggtcgcgtgctgatgcggatacgacaacagcggctggcaagcccaacagaggagcgcggcgcgcggctagcagggagatgggaggacgcagggccaacgtgatggtcgagtgttgctgagacggcatggtgtttggagacaaggagaacagagatggctggaccatacgacaccagcgagctccaaagcgggaccaaaactgcggcaaggaggatgaagtctggacgttgagcacgttggagcaagaatgaatggctgacggctggagagatagagaagcaccatgcatgacagcggctgggtgtttgcacggatggaggaaaagcacactgcttggatgaagcttgaagacttgacgcgggatggagctcagcttggggtcggactaggggaggtcgcaggggagaggaagaaatctacggccagaccggcaaggtggcggataggcacgcaagggagctgccacgttcaccaggcagaagactgggcggcggtaggatagagacgaagagaaaataaatagagagagagggcggcttggggataggaacggttcaggaaaaatccggaaagatatttcccatttttacttcttttatcagagtgaaatgcagatattttgggatataaaataagggtctaaaagatatataaaagggtcgaaccaaataagatcgacaacaatatttaaaccggatttaatttagtgaatatttcggagtcagataaattttcacctgctatttatatccgaagttttgaatctgggcgagaaacacatgaccaaaccaaacgagatca

SEQ ID NO: 43780 - DNA, 1362 bp, Zea Mays
agacgcgggacgcagcccacgtaaaattacatccatgtccattacatttgttaacggtttatggaaatctattgaggaccccgaagtcttttcatcttaaggtcggttcccccttgtgccatcgcgccgaagcttccctgcgtacagcttcggctgcccccgaccttcgtctggctcagccttcgtcctggtcgtgctccatatccataattctgaatccgaaaatacctgttcatataattcacttggaaaacattgtcaaatcatgtttttgaggaccttcggaggacgaaggcccccaacacatattagctttttttgcgaactaatatctacttgaataacaatacaagttctagaggaaactgggtgtgatctttcttgacttctaaatttggatgattacattgaagtttcaattgaacaacaaagggttcggttctacatcataacaggggttaaaagatatattgttttgcacttcaaaccaagaaggaaatcggtgtatgcatagttctaaatcttgttcccatcgcttttattggcagtatgcacctttactttccaaggcttattgttgctattatgctcagaaaaatgtttttgggctggtgctattttacaaataacaaggatggtttttgtttgtgttatgttagtcacttccttttctgtatcatttgcttttgtcttttttcaatattcttttggttaatcaatgtcatgggcattcactagaaaaattctaatagcatattggaactgttattagaatttatatgtgttggttgtgttcctatcgacaaaaaattgtggtatattttaacaatcagcagtctactataccattctttggatataacttatttcaagtcgtccatagactctcaccttcttgatctactttagaacaacttctagacaacagagattatgttgctaggcatatctttgatttaggcaagcaactcatttataatgatatcctgtttctatattcaaattattatatttgttctgtccatgtaatattatgcaccattcaaattatcaactaattcttctaattcaaaataagaaaatggaccaagctcatgcccagtgccatcaaggtagtaccagttaccctaattaactgatagctcatcataagtgcatacaaggtcctttggaatgcttggaacatgcttggacttgtgcaaactttctgaatcatggtcatggtgcttccagaaatgagacaaattaaaccttcaaggacaaaacttatctcagctccaattgaatgggaacgtgatgcatttcctcttaaatcagtgttaaataccaccttatatattttatctatttctacaaactcag

SEQ ID NO: 43781 - DNA, 987 bp, Zea Mays
cttagatgtcaccaagattagtttatgcaatggacattgctcagtatttatgcattattggtttcaagaagctttgtcaaattttgaagatggcagacgtttggtcttgtggagtgactctttacgtgatgctggttggtgcatacccttttgaggaccccgatgatcccaagaatttcagaaaaacgattgggagaatagtgtcaattcaataccagataccagagtatgtccacatatcccaggattgcagacagctccttgctaggatcttcgtcgcaaatcctgcaaagagaataacaattagggagattaggaatcacccctggttcctgaagaatttgcccagagagcttacagaagctgcgcaagcgaagtactacaagaaggacaacggtgcccccaccttctctgatcaaacagtcgaagagatcatgaagatcgtagaggaggcccgcacgccgccccagtcgcctgctccagtggctggttttggttgggcagaggaagaagagcaggaagatgggaagaaacctgaggatgacgagcaggatggggaggatgagcaatacgacggcgaggacgagtatgacaaacaggtgaagcaagtacatgccagcggggactttcgacacctaataaaatgaagctcctagcaagaccgagttctcaactgatgagatactgtctggttttgctgtagtttgtggtgctaagatgatgcaccctcggtgcttacgtagtatacttctgtctggattcacctttttttcgcatattgtgttaatactctgtaaattatcaaactggcttcctcaatgctcgtgtaattaaatgaaccgttgagtgattaagctagaaggcaagatatactttctatggagtaaattctgaaagtatcaatatgtgttgaactagactaatttaaattttattttcgcaaccattacatactattgaatagtctatttcattctgtgtacctag

SEQ ID NO: 43782 - DNA, 989 bp, Zea Mays
gaaatgttcattctgtgtcactgggacattttttttccacttgtctaatgctcaactttgccccggtggattatgcctgcttctctttcatatggcagacgtttggtcttgtggagtgactctttacgtgatgctggttggtgcatacccttttgaggaccccgatgatcccaagaatttcagaaaaacgattgggagaatagtgtcaattcaataccagataccagagtatgtccacatatcccaggattgcagacagctccttgctaggatcttcgtcgcaaatcctgcaaagagaataacaattagggagattaggaatcacccctggttcctgaagaatttgcccagagagcttacagaagctgcgcaagcgaagtactacaagaaggacaacggtgcccccaccttctctgatcaaacagtcgaagagatcatgaagatcgtagaggaggcccgcacgccgccccagtcgcctgctccagtggctggttttggttgggcagaggaagaagagcaggaagatgggaagaaacctgaggatgacgagcaggatggggaggatgagcaatacgacggcgaggacgagtatgacaaacaggtgaagcaagtacatgccagcggggactttcgacacctaataaaatgaagctcctagcaagaccgagttctcaactgatgagatactgtctggttttgctgtagtttgtggtgctaagatgatgcaccctcggtgcttacgtagtatacttctgtctggattcacctttttttcgcatattgtgttaatactctgtaaattatcaaactggcttcctcaatgctcgtgtaattaaatgaaccgttgagtgattaagctagaaggcaagatatactttctatggagtaaattctgaaagtatcaatatgtgttgaactagactaatttaaattttattttcgcaaccattacatactattgaatagtctatttcattctgtgtacctag

SEQ ID NO: 43783 - DNA, 1089 bp, Zea Mays
gcgaagtgttctctttatgcaacaaaaagctggagaacacgctgttggatggcagcccggcgccgcgcctaaagatctgcgactttggctactctaagtcatcgctgctgcactcaaagcctaaatccacggttggaactccggcgtacattgctccggaggtactctctcgccgggaatacgacggcaagatggcagacgtttggtcttgtggagtgactctttacgtgatgctggttggtgcatacccttttgaggaccccgatgatcccaagaatttcagaaaaacgattgggagaatagtgtcaattcaataccagataccagagtatgtccacatatcccaggattgcagacagctccttgctaggatcttcgtcgcaaatcctgcaaagagaataacaattagggagattaggaatcacccctggttcctgaagaatttgcccagagagcttacagaagctgcgcaagcgaagtactacaagaaggacaacggtgcccccaccttctctgatcaaacagtcgaagagatcatgaagatcgtagaggaggcccgcacgccgccccagtcgcctgctccagtggctggttttggttgggcagaggaagaagagcaggaagatgggaagaaacctgaggatgacgagcaggatggggaggatgagcaatacgacggcgaggacgagtatgacaaacaggtgaagcaagtacatgccagcggggactttcgacacctaataaaatgaagctcctagcaagaccgagttctcaactgatgagatactgtctggttttgctgtagtttgtggtgctaagatgatgcaccctcggtgcttacgtagtatacttctgtctggattcacctttttttcgcatattgtgttaatactctgtaaattatcaaactggcttcctcaatgctcgtgtaattaaatgaaccgttgagtgattaagctagaaggcaagatatactttctatggagtaaattctgaaagtatcaatatgtgttgaactagactaatttaaattttattttcgcaaccattacatactattgaatagtctatttcattctgtgtacctag

SEQ ID NO: 43784 - DNA, 1308 bp, Zea Mays
ccaaacagaaagggaattggatttcgcgtacggagtgtttcctgcacacctcccctgctgccgctgaagtcgtgctcacgcccacgcacctcgctatcgtcatggagtacgccgccggcggcgagcttttcgacaggatctgcagcgccgggaggttcagcgaggacgaggcgaggtatttcttccagcagcttatctgcggtgtcagctactgccacttcatgcaaatttgtcaccgggacttgaagctggagaacacgctgttggatggcagcccggcgccgcgcctaaagatctgcgactttggctactctaagtcatcgctgctgcactcaaagcctaaatccacggttggaactccggcgtacattgctccggaggtactctctcgccgggaatacgacggcaagatggcagacgtttggtcttgtggagtgactctttacgtgatgctggttggtgcatacccttttgaggaccccgatgatcccaagaatttcagaaaaacgattgggagaatagtgtcaattcaataccagataccagagtatgtccacatatcccaggattgcagacagctccttgctaggatcttcgtcgcaaatcctgcaaagagaataacaattagggagattaggaatcacccctggttcctgaagaatttgcccagagagcttacagaagctgcgcaagcgaagtactacaagaaggacaacggtgcccccaccttctctgatcaaacagtcgaagagatcatgaagatcgtagaggaggcccgcacgccgccccagtcgcctgctccagtggctggttttggttgggcagaggaagaagagcaggaagatgggaagaaacctgaggatgacgagcaggatggggaggatgagcaatacgacggcgaggacgagtatgacaaacaggtgaagcaagtacatgccagcggggactttcgacacctaataaaatgaagctcctagcaagaccgagttctcaactgatgagatactgtctggttttgctgtagtttgtggtgctaagatgatgcaccctcggtgcttacgtagtatacttctgtctggattcacctttttttcgcatattgtgttaatactctgtaaattatcaaactggcttcctcaatgctcgtgtaattaaatgaaccgttgagtgattaagctagaaggcaagatatactttctatggagtaaattctgaaagtatcaatatgtgttgaactagactaatttaaattttattttcgcaaccattacatactattgaatagtctatttcattctgtgtacctag

SEQ ID NO: 43785 - DNA, 1663 bp, Zea Mays
cccgcgcggcgcgatcgcaatcacgcgcaaacccaatcgcggagacaaagcacacaagcaaaagcaaccccgcgggccgcgctagcagtagtagccgaacgaggaggagcctcgaatccagccaggccaggctcctcccattcctcctctcccacgagctctcaccgctcctcgcggcggcaaaaccccccttgaattccctacgcgcccgcctccaatcccgccagtccggcggcgacccagggatccatggagaggtacgaactgctcaaggacatcggttccggcaacttcggggtggcgcggctgatgcggaacaaggacaccaaggagctcgtcgctatgaagtacatcccgagggggctcaagattgacgagaatgtggcgagggagatcataaaccaccgctcgttgcggcaccccaacatcatccgcttcaaggaggtcgtgctcacgcccacgcacctcgctatcgtcatggagtacgccgccggcggcgagcttttcgacaggatctgcagcgccgggaggttcagcgaggacgagcttatctgcggtgtcagctactgccacttcatgcaaatttgtcaccgggacttgaagctggagaacacgctgttggatggcagcccggcgccgcgcctaaagatctgcgactttggctactctaagtcatcgctgctgcactcaaagcctaaatccacggttggaactccggcgtacattgctccggaggtactctctcgccgggaatacgacggcaagatggcagacgtttggtcttgtggagtgactctttacgtgatgctggttggtgcatacccttttgaggaccccgatgatcccaagaatttcagaaaaacgattgggagaatagtgtcaattcaataccagataccagagtatgtccacatatcccaggattgcagacagctccttgctaggatcttcgtcgcaaatcctgcaaagagaataacaattagggagattaggaatcacccctggttcctgaagaatttgcccagagagcttacagaagctgcgcaagcgaagtactacaagaaggacaacggtgcccccaccttctctgatcaaacagtcgaagagatcatgaagatcgtagaggaggcccgcacgccgccccagtcgcctgctccagtggctggttttggttgggcagaggaagaagagcaggaagatgggaagaaacctgaggatgacgagcaggatggggaggatgagcaatacgacggcgaggacgagtatgacaaacaggtgaagcaagtacatgccagcggggactttcgacacctaataaaatgaagctcctagcaagaccgagttctcaactgatgagatactgtctggttttgctgtagtttgtggtgctaagatgatgcaccctcggtgcttacgtagtatacttctgtctggattcacctttttttcgcatattgtgttaatactctgtaaattatcaaactggcttcctcaatgctcgtgtaattaaatgaaccgttgagtgattaagctagaaggcaagatatactttctatggagtaaattctgaaagtatcaatatgtgttgaactagactaatttaaattttattttcgcaaccattacatactattgaatagtctatttcattctgtgtacctag

SEQ ID NO: 43786 - DNA, 2994 bp, Zea Mays
gaaaaaataatggaggctcgctctcactaagctccctgtttgctaaatcgcaactaatccgatgcaaaatatttgtagaagaagagagaatagagggttcaacgcagaggcagaacaacagctgccccaccaagcgccgtcctgtcggagatggcagctgcggctccggcggcgtgcaaggggaaacgaaagcggcacctctccgaggacgacgtctggctcctcctccacaggtgcccccgtcctcccccagcccgtcctcctgttctctccccgggcggctggctttcatcttgggttttacttcaccgcgtcgcttgcaacccttccccccgcaggtaccatccagggacgatcctgacggcgctgcaggaggtggcgcagcacgcggatggccggcgcatagactggagggcggtggtggcgaagtcggccacggggatcacctccgcccgcgagtaccagatgctctggcgccacttcgcctatcatcacgacgtagacgagagcgtcgacgccgatgaccagcctctggacgatgacagtgacctagaactggagcttgaacccgatcccaacctgaccaaggaagctttatgcgctaatatctggatcttcacaagcctctggtcatcgtattaacttggatactcatgttctgaacacccgaaatgaaaagatagtgcgggttccatctgagaaacagcttgctcaaagtcatcgtgtaacaaatgttgcaggtcctgtttccaattcaaaacagttagcccatataggaccctctgctggtcttttggatccaaatggaccttcaaaaaagaggaaaaagccaaaagcatggtctaaagaggaagatgcagacctggcagctggtgtgcagaagtatggtgaaggaaattgggaggatattttgcataaatgtaacttcgataatacaagaacgcctgatcagttatctcagagatgggcgctgaagcgtccaggaggatcaaccaagcctgctagcactaaacacgcctctgttggcttagaggaaagatcagcagccctcaaggcactttcattggctgtcggacctatgcgtggatcatctgcactgagatcaggagcttatccacaaagcattcagcataagtctacagtgtttgctcctaagatgccagaactaagatctgcagtaaccccttcaccggcaccagcagtgccagtcccagttgctatgcctctgcgtgtggcagctcaagtacaggctccgcctcatcaagggcatcaagctcctgcccatgctgcaccaccaaaattgttaaatgcttcaaataagacacggaagaagcaagcagctcagccaaatcccaccatcagtccttcctcaatacaagcagctgcgattgctgctggtgggcgacttgccacagcctcaaccgccgcaaattttttaaaagtcgcacaatctaagaatgctgtgcacataagatctctaggagcaacatctttgaaaccttccgcaagctttaaggcatcgattgtggttgagcatggaacacaacctgggggctcccagcacctagaacctctaaatgctagtgcagttcatgatgtttcaggagttgctgcagttaatcaatcagggccacttgctggggcatgttcagagactaagaaggcattgagtaccgcactagcacctgtcccatgcgacagcgaggaaaaggaggatgactcggaattttgtgtgattacgatagatgatctgttccctgaagatgcaaagcagccagaaactgtggataccaaggcaaagcaaccacaaaccacgggtctgaaggcaaatcagccagaaaacgcagatcccaaggtaatgcaacaagaaaccatggatcccaaatcaaagcagtcagatacagtagaggttgagatagttgatccgaaagataaagacatgctagagtttgatcaatatgttgcttctcaaggagggcacttaaacacggatgatctgaataaaagcaagtgtaccaacagtgtttcccaagcccaaggtcttgttggcagccagcaaaaactgattcctgcggatgggaaaggtagccctgtaactgtggttgggaaaggcaagcctgtaactgctggagtggcagcaactgggaggaagactaaattccctgtctcacatttggcagcagggaccccacgtggcattgttgacacagtcaacgccaacgccccaaataaaacgctagtaaggagggcagccatccctgcccctgtccctgctggttgccaagttaggaaggatgccatgaactcaaaaggtaaccaaatgacccctggcaatgccggttctggagtaccagccagcagtcagactagcgtggctgcacaagctgccagcaaagcaaatctaccatccagcagcagccaggccaagcccaataacatggtggtgaatggtggtaacaggctagtggttaatccaccgtccagcagccaagctagtgcggccgtgaacgacgctaacagggctgcgacaccacagtccagcaaccctgtcaacggtgccaacaacagagaggttaatccaccacccagcagccaggctagcacagccgtgaatggtgctgctaacaaggggaatgtgccagcagcagccaggcccccttaatacagtaaattttgtaatgattcccgtaggacttgtgtgcgtggaagaaatgtgtatagggcattaggcagaggtcatgtcattcttttcgccttgcatttgcagtttgcacccgtgaactggagaccactaggttggaatggttttttggctgctatctcctgctggccagttcccttgtgatgtaaatttttgatgcttgtgtttgtttacttgcgcccgagatgatggtgccaactttgtgcctgtctggacagatcattcgcatctcttaggggccgttcgtttccattggaataaacccggtttcgttccaactcatcaaaatttat

SEQ ID NO: 43787 - DNA, 3069 bp, Zea Mays
aaaagatagaggttgaagatgatcgtcaatctcttatcgatgcgcacaagctgaaaaaataatggaggctcgctctcactaagctccctgtttgctaaatcgcaactaatccgatgcaaaatatttgtagaagaagagagaatagagggttcaacgcagaggcagaacaacagctgccccaccaagcgccgtcctgtcggagatggcagctgcggctccggcggcgtgcaaggggaaacgaaagcggcacctctccgaggacgacgtctggctcctcctccacaggtaccatccagggacgatcctgacggcgctgcaggaggtggcgcagcacgcggatggccggcgcatagactggagggcggtggtggcgaagtcggccacggggatcacctccgcccgcgagtaccagatgctctggcgccacttcgcctatcatcacgacgtagacgagagcgtcgacgccgatgaccagcctctggacgatgacagtgacctagaactggagcttgaacccgatcccaacctgaccaaggaagctttatgtgaggcctctgcattagccaaggaaagagaggcacctgcttgtgtagcatttgctctgccatttttcaacaccttattttaccatgatcaagtatccagaagggttttggctgcatacacttgttcggcgctaatatctggatcttcacaagcctctggtcatcgtattaacttggatactcatgttctgaacacccgaaatgaaaagatagtgcgggttccatctgagaaacagcttgctcaaagtcatcgtgtaacaaatgttgcaggtcctgtttccaattcaaaacagttagcccatataggaccctctgctggtcttttggatccaaatggaccttcaaaaaagaggaaaaagccaaaagcatggtctaaagaggaagatgcagacctggcagctggtgtgcagaagtatggtgaaggaaattgggaggatattttgcataaatgtaacttcgataatacaagaacgcctgatcagttatctcagagatgggcgctgaagcgtccaggaggatcaaccaagcctgctagcactaaacacgcctctgttggcttagaggaaagatcagcagccctcaaggcactttcattggctgtcggacctatgcgtggatcatctgcactgagatcaggagcttatccacaaagcattcagcataagtctacagtgtttgctcctaagatgccagaactaagatctgcagtaaccccttcaccggcaccagcagtgccagtcccagttgctatgcctctgcgtgtggcagctcaagtacaggctccgcctcatcaagggcatcaagctcctgcccatgctgcaccaccaaaattgttaaatgcttcaaataagacacggaagaagcaagcagctcagccaaatcccaccatcagtccttcctcaatacaagcagctgcgattgctgctggtgggcgacttgccacagcctcaaccgccgcaaattttttaaaagtcgcacaatctaagaatgctgtgcacataagatctctaggagcaacatctttgaaaccttccgcaagctttaaggcatcgattgtggttgagcatggaacacaacctgggggctcccagcacctagaacctctaaatgctagtgcagttcatgatgtttcaggagttgctgcagttaatcaatcagggccacttgctggggcatgttcagagactaagaaggcattgagtaccgcactagcacctgtcccatgcgacagcgaggaaaaggaggatgactcggaattttgtgtgattacgatagatgatctgttccctgaagatgcaaagcagccagaaactgtggataccaaggcaaagcaaccacaaaccacgggtctgaaggcaaatcagccagaaaacgcagatcccaaggtaatgcaacaagaaaccatggatcccaaatcaaagcagtcagatacagtagaggttgagatagttgatccgaaagataaagacatgctagagtttgatcaatatgttgcttctcaaggagggcacttaaacacggatgatctgaataaaagcaagtgtaccaacagtgtttcccaagcccaaggtcttgttggcagccagcaaaaactgattcctgcggatgggaaaggtagccctgtaactgtggttgggaaaggcaagcctgtaactgctggagtggcagcaactgggaggaagactaaattccctgtctcacatttggcagcagggaccccacgtggcattgttgacacagtcaacgccaacgccccaaataaaacgctagtaaggagggcagccatccctgcccctgtccctgctggttgccaagttaggaaggatgccatgaactcaaaaggtaaccaaatgacccctggcaatgccggttctggagtaccagccagcagtcagactagcgtggctgcacaagctgccagcaaagcaaatctaccatccagcagcagccaggccaagcccaataacatggtggtgaatggtggtaacaggctagtggttaatccaccgtccagcagccaagctagtgcggccgtgaacgacgctaacagggctgcgacaccacagtccagcaaccctgtcaacggtgccaacaacagagaggttaatccaccacccagcagccaggctagcacagccgtgaatggtgctgctaacaaggggaatgtgccagcagcagccaggcccccttaatacagtaaattttgtaatgattcccgtaggacttgtgtgcgtggaagaaatgtgtatagggcattaggcagaggtcatgtcattcttttcgccttgcatttgcagtttgcacccgtgaactggagaccactaggttggaatggttttttggctgctatctcctgctggccagttcccttgtgatgtaaatttttgatgcttgtgtttgtttacttgcgcccgagatgatggtgccaactttgtgcctgtctggacagatcattcgcatctcttaggggccgttcgtttccattggaataaacccggtttcgttccaactcatcaaaatttat

SEQ ID NO: 43788 - DNA, 3058 bp, Zea Mays
aaacaacctaagttattattggagatgcttttgtaagtttcggtaaagcaatatgccaaatatagagaaaaaggataaaggttgaagagagagaaaaagatagaggttgaagatgatcgtcaatctcttatcgatgcgcacaagctgaaaaaataatggaggctcgctctcactaagctccctgtttgctaaatcgcaactaatccgatgcaaaatatttgtagaagaagagagaatagagggttcaacgcagaggcagaacaacagctgccccaccaagcgccgtcctgtcggagatggcagctgcggctccggcggcgtgcaaggggaaacgaaagcggcacctctccgaggacgacgtctggctcctcctccacaggtaccatccagggacgatcctgacggcgctgcaggaggtggcgcagcacgcggatggccggcgcatagactggagggcggtggtggcgaagtcggccacggggatcacctccgcccgcgagtaccagatgctctggcgccacttcgcctatcatcacgacgtagacgagagcgtcgacgccgatgaccagcctctggacgatgacagtgacctagaactggagcttgaacccgatcccaacctgaccaaggaagctttatgtgaggcctctgcattagccaaggcgctaatatctggatcttcacaagcctctggtcatcgtattaacttggatactcatgttctgaacacccgaaatgaaaagatagtgcgggttccatctgagaaacagcttgctcaaagtcatcgtgtaacaaatgttgcaggtcctgtttccaattcaaaacagttagcccatataggaccctctgctggtcttttggatccaaatggaccttcaaaaaagaggaaaaagccaaaagcatggtctaaagaggaagatgcagacctggcagctggtgtgcagaagtatggtgaaggaaattgggaggatattttgcataaatgtaacttcgataatacaagaacgcctgatcagttatctcagagatgggcgctgaagcgtccaggaggatcaaccaagcctgctagcactaaacacgcctctgttggcttagaggaaagatcagcagccctcaaggcactttcattggctgtcggacctatgcgtggatcatctgcactgagatcaggagcttatccacaaagcattcagcataagtctacagtgtttgctcctaagatgccagaactaagatctgcagtaaccccttcaccggcaccagcagtgccagtcccagttgctatgcctctgcgtgtggcagctcaagtacaggctccgcctcatcaagggcatcaagctcctgcccatgctgcaccaccaaaattgttaaatgcttcaaataagacacggaagaagcaagcagctcagccaaatcccaccatcagtccttcctcaatacaagcagctgcgattgctgctggtgggcgacttgccacagcctcaaccgccgcaaattttttaaaagtcgcacaatctaagaatgctgtgcacataagatctctaggagcaacatctttgaaaccttccgcaagctttaaggcatcgattgtggttgagcatggaacacaacctgggggctcccagcacctagaacctctaaatgctagtgcagttcatgatgtttcaggagttgctgcagttaatcaatcagggccacttgctggggcatgttcagagactaagaaggcattgagtaccgcactagcacctgtcccatgcgacagcgaggaaaaggaggatgactcggaattttgtgtgattacgatagatgatctgttccctgaagatgcaaagcagccagaaactgtggataccaaggcaaagcaaccacaaaccacgggtctgaaggcaaatcagccagaaaacgcagatcccaaggtaatgcaacaagaaaccatggatcccaaatcaaagcagtcagatacagtagaggttgagatagttgatccgaaagataaagacatgctagagtttgatcaatatgttgcttctcaaggagggcacttaaacacggatgatctgaataaaagcaagtgtaccaacagtgtttcccaagcccaaggtcttgttggcagccagcaaaaactgattcctgcggatgggaaaggtagccctgtaactgtggttgggaaaggcaagcctgtaactgctggagtggcagcaactgggaggaagactaaattccctgtctcacatttggcagcagggaccccacgtggcattgttgacacagtcaacgccaacgccccaaataaaacgctagtaaggagggcagccatccctgcccctgtccctgctggttgccaagttaggaaggatgccatgaactcaaaaggtaaccaaatgacccctggcaatgccggttctggagtaccagccagcagtcagactagcgtggctgcacaagctgccagcaaagcaaatctaccatccagcagcagccaggccaagcccaataacatggtggtgaatggtggtaacaggctagtggttaatccaccgtccagcagccaagctagtgcggccgtgaacgacgctaacagggctgcgacaccacagtccagcaaccctgtcaacggtgccaacaacagagaggttaatccaccacccagcagccaggctagcacagccgtgaatggtgctgctaacaaggggaatgtgccagcagcagccaggcccccttaatacagtaaattttgtaatgattcccgtaggacttgtgtgcgtggaagaaatgtgtatagggcattaggcagaggtcatgtcattcttttcgccttgcatttgcagtttgcacccgtgaactggagaccactaggttggaatggttttttggctgctatctcctgctggccagttcccttgtgatgtaaatttttgatgcttgtgtttgtttacttgcgcccgagatgatggtgccaactttgtgcctgtctggacagatcattcgcatctcttaggggccgttcgtttccattggaataaacccggtttcgttccaactcatcaaaatttat

SEQ ID NO: 43789 - DNA, 1981 bp, Zea Mays
ccccaaccggatgcttgcttgcttctctaatcttcttccacgacgcacgtcctagaccccataaactcgaaactgcctgccccgactctctccctgcacaaccggctcatcctcccctctctagagctacctgttgcgtcatcgttcgtcggatccgcgccatcaccactcgtccgccaagactgcgatccattccgagctttgagggatcaacgatcaagcgttggcgaccaagtggtcgggctcttcgagttccacaaggttgaagaccctgagcatctgtttggtgaaggcaagtgtcctctgacctattatgtcctacatacttataattcaccgtccaacattacattattgaaacctaaagattgacaattctgtatttccttatccttatttaccttttggggttatcatggttagctttatgctattgctttactttaatcaatgaacatgatgtgaatatttatgatatgatgatgttatcccaatgatgatcttgtgatattttaggggactcaggctattttcctgagtacctctccgtaaggacctgttcgtggagtgacaatccgggataacagtgcggccatgagggtggaatgggatgcccttagctgattaattagaggaaccagaggagtagttggcttcatcgtagggccgtcaatggggtccaggcacagtacttgctctaccgaggctgattgcagaggttctttgatttggttttggttagtcaccctttctttggggagaggtacagtgtttatcaaactggacaaacctaattggtggctatgacctctggaaaatctttgtaaagtctacgtagtgagaccctgctaggtcaccttggaagtgatcaatggagagtcatgatctcctggcagaatggggatcacgacttgtggggaaagtgtgcgacctctccagagggttagaaactgatatatcagtcgtgctcacggttatgagcggccttgggatcctatttgattagagatacagatggtttgatatacaatggttctatttattattttggttcgatgatgataatgatgttcctcgatgaggaaaggattcatgggttggttatattataaaacttggcttccactaataataaatacctgaccaactaaaaagcaactgctttgaccttaacccccacataaagctagtccacttcagccaaacgagacatttgctgagtacgttgatgtgtactcacccttgctttcacaaaacaccaggttgcctttggtgcaatctatgctcacgtaaataagaaggcatctctccaggagttccaggacatcagcgagatcgaggattagcctagcgacctcccccagtcagctgcctgtggtgggtttatttacgttggctacgtttcgattctgtgtactttgatttatattatataaatgctctagtctttaatattataacttactcttccttgttattcaaagcattgtgctatgatgagtcacttatgtaatcgccgtgtacgtgaatttctggtcctgacacgtacatggttcgcattcgatctaccttccaaaactgggtgtgaccacttaaagggattcttaagacgggctctgttaggggcctgcttcatcgccgaaggtcccataagaagaaacaccttcggaagactagcacaaagccgaagctatcaatcaaagggcttcagagtacatttccaaatgcaccgacctaaagatgaaatgaccaattggcccgtgataacttgtattatgattataaacctttgtaaaggatatgaatgtaatttctcacaggctgcgtcctgtgccaataaatagatgaacagtacccctgtactgttcacacgattttgtattcgctcgtgcgcaacgtttggattttttgccttctgtcaagccgaaggtataaatgtgattaaatattgtatttaaatacttgaatttatgtaatgaag

SEQ ID NO: 43790 - DNA, 1251 bp, Zea Mays
ctattttccaaaatcgatttcattttcttcatattaggattgacctctaatatgcagtatacttgcatgcttttttcccccaaggtggcggtgagggtcgcctccgtgaaaaatatgcaaaatctattgaacctattcttagtgaagatataagatatgtgcacttcgacttccaccgagtttgtggtcatattcactttgagcgcctttctcagctatatgatcagatcaaggactatcttcagaaacataagtacttccttataaatgataaaggagagaaaattgaggagcagactggcactgtaagaacaaattgtatagattgtctggatcgtaccaatgtgactcagagcatgattggggggaaaattctggaaagccaacttcaacgtataggagttcttagtgctggtgatacaataagcaaacatccagcctttgatacaaactacaaaattttgtgggccaatcatggagatgcaataagcattcagtactctggaactcctgctctgaagggagattttgttcggtacgggaagcgaactactcagggaattctaaacgatttgaggaatgcacttgctagatactacttgaataacttcgttgatgggactaagcaggatgccatggatcttcttcaaggacataacatgacatctgttagtcgagacatggcagtgccaagcaaatcaggacttctggagagttatgcgtccttccgccttgcttttgcattggttatgggagctctagtgttcatgatgatgtcactaagacaagcccggaatgatgctcgccatttgatgctgtcatttctttgggccggtctttgtattggcatctcacattttgtcagagccaacggccgcacgttcactaaccgacctaggtttcacaagtcacgccattgatggatgcaagatgaccgtttgctcgtcaagcgacgtcatagattgtcatcattcatcgaacttgttgacacaaattggtttgcatgaagtgttgcattttttttggcatggtacttgccctttgtaataagttttcttccatttcgtaactagtttttgtttcttcctctcctatgtctggtccatactgttctggccttctatggtcttcggtagaattcattggtaaaaaccatatgaagtgtattatgattttttcgtattgcatactcagtcctcggcatttgcaccagggatggctattcttcttctaacaagaggttcatctata

SEQ ID NO: 43791 - DNA, 2179 bp, Zea Mays
gcgccgtggatcagccgctcgtatgagattcgattgggcggttataccgccatggatgagacaactgatgcaagcacttcgttgaaactccatacaagattgagactctgggagtttcctgactgttatatatttgaaccaattgatggcctggctgacttgtacttgtcagttagccgggccagcggaacaatgaatctagttcaagacttgccaccacgtggacccactacaaaacataaagttcaaacagtatatggtgtgataggagtgctcaaacttgcagttggatcatattttgtggtgatcacggatcgtgattgtgtgggatcctactttggacacgcaatttttaaagtgacaggactaaaagttcttccctgcaatagtgcacataacaccacctctgctgagcagaaaaaaatggaaacagaattctcagaactcctggatgctgcagagaggactattggccttcacttttcctacgatatcaacctaacactttctgcacagaggctacatgatctaggcgatgagtatagagctcttcctctctggagacaggcggaaccaagatttctatggaatgcttacttgttagaacctctaattgagaacaagctgaaccagtacttattgccggtaattcaaggcagctttcaaaatatccaagcagaagttgggtcagagaaggtaaatgtgatcctgattgcacgaaggtgcacacgaaggataggtactcgaatgtggagacgaggagctgatgcagagggttttgctgcaaacttcgttgaatcagagcagataatgcagtcaaaagggtttacagcatcctatgtacaagttcgaggttctatgccattcttgtgggagcagattgttgatttgacatacaaacctagttttgacattgttagacaagaggatgcgccttctgtgcttgagaggcatttccatgatttgcaaaagaaatacggagctgtcttagctgttgatcttgtcaatacaggtggcggtgagggtcgcctccgtgaaaaatatgcaaaatctattgaacctattcttagtgaagatataagatatgtgcacttcgacttccaccgagtttgtggtcatattcactttgagcgcctttctcagctatatgatcagatcaaggactatcttcagaaacataagtacttccttataaatgataaaggagagaaaattgaggagcagactggcactgtaagaacaaattgtatagattgtctggatcgtaccaatgtgactcagagcatgattggggggaaaattctggaaagccaacttcaacgtataggagttcttagtgctggtgatacaataagcaaacatccagcctttgatacaaactacaaaattttgtgggccaatcatggagatgcaataagcattcagtactctggaactcctgctctgaagggagattttgttcggtacgggaagcgaactactcagggaattctaaacgatttgaggaatgcacttgctagatactacttgaataacttcgttgatgggactaagcaggatgccatggatcttcttcaaggacataacatgacatctgttagtcgagacatggcagtgccaagcaaatcaggacttctggagagttatgcgtccttccgccttgcttttgcattggttatgggagctctagtgttcatgatgatgtcactaagacaagcccggaatgatgctcgccatttgatgctgtcatttctttgggccggtctttgtattggcatctcacattttgtcagagccaacggccgcacgttcactaaccgacctaggtttcacaagtcacgccattgatggatgcaagatgaccgtttgctcgtcaagcgacgtcatagattgtcatcattcatcgaacttgttgacacaaattggtttgcatgaagtgttgcattttttttggcatggtacttgccctttgtaataagttttcttccatttcgtaactagtttttgtttcttcctctcctatgtctggtccatactgttctggccttctatggtcttcggtagaattcattggtaaaaaccatatgaagtgtattatgattttttcgtattgcatactcagtcctcggcatttgcaccagggatggctattcttcttctaacaagaggttcatctata

SEQ ID NO: 43792 - DNA, 1023 bp, Zea Mays
ctttcttgatggcactagctgtatatcaggttatattcttgaagagaaaatgaagcagcaatcggtgtctgataaattgaacttggagacggacatcagtcattggattgtccgctcatatctcctacattatggataccaagatacattaaatgcttttgatatggcaaatgcaactgacccccccaccaatcgccaaaatggtcatgcagaacctcccgaaacgtatggtcttagccacagaaaacttttgcgtcagcttatcatgagtggagatattgactctacattcaaaagacttggggagtggtatccacaagtgataaaggatgagaaatcggttatttgcttactactccattctcaaagattcatagaatatatcagggctgaacaactggaagatgctgtgcactatggtcgtgctaacctggcaagcttcttgacacacgaagcttttgagtggctgctgaaggatagtgtggccctgctggcgtacgagaagcctgcagaatcatgcttgggatacctgatgggctctccccagcgtgaattcgtggcagacgcagtgaacgcggctgtcctgtcgacgaaccccaccatgaaggaccctgagagctgcctctactcgtgtctcgagaggctactaaggcagctcacagtttgtagccttgagcgacgtgcattcaacaacgaccaaggagatgcattcttactccacaaagaaatgcaaaactatgaaaggtctaggcgctcatagcctcataggcatcaggattgttgcgcttctgaagtaaactcggtctgcagcgcccctcagctttcgcaagggtgagcaccgaattgcatggacacagctcaggcgcttcgggaggtgttctaacctctctgtaatcagaaaactcacagtgagataaagccaacgtttcagatttcccctattttgttggttggctaatatgctgtttgacactatgaatgctaaaaagtaaagacgcttcgacatatgcccctggtacaaga

SEQ ID NO: 43793 - DNA, 2023 bp, Zea Mays
aaatcacacccgtgtctgtacgccacccagttgcttctctgtgtactctccaactcatcaccggctccatccttgtcctacactgacctcgtccccatcccgcaaccgcaagcaaccaccgatccagcccgttcggcctttcggcgaatggtgacgaaccaggacgcggaggcggcatcggcggcagccccggggccaggggcgacggtggacccgatgcgcctagcgtcgcggtggcggtcccagacggagtgggaccgcgcggtgccggagctggaggctgagccggagccgtccgagctcaacaccgtcaacagttcgggactcttctccgtcgtctctacggacaagttgtccgtgaaatacctcggcagccatcaccacggccacgacgtcggtgtcgtgcaggccgaccgccccgctcccacgcgccgggccgtgtactacttcgagatggccgtcaggaacgcgggatacaaggggcagacatccatagggttcacgagcgagagcttcaagatgaggcgacaaccgggttgggagtcaaacagttgtggataccatggtgacgacggccacctttaccggggtctagggaaaggcgaaccgtttgggccaaaattcacatctggtgacataattggcgctggcatcaactacttgtcacaggagttcttcttcacgaaaaatggagctccggttggagccattccaaaagaaattaaaggcccactatatcctacaattgcagttcatagtcagggtgaagagttgactgtaaactttggaaaggaaccattctgttttgacattgagggttatattcttgaagagaaaatgaagcagcaatcggtgtctgataaattgaacttggagacggacatcagtcattggattgtccgctcatatctcctacattatggataccaagatacattaaatgcttttgatatggcaaatgcaactgacccccccaccaatcgccaaaatggtcatgcagaacctcccgaaacgtatggtcttagccacagaaaacttttgcgtcaggaaagtggcagttggtctttgctctcagctgccttgcaagcctgagctcttttatctttggatgtgcagcgcaaatatgttgtagtattacatttatccacatcattccactgtatcttgcagatgcagctgtatcttgatttgacattgccctcttttgatttttttggcctctggtatgccttcggccttctgaaaacagtttattttatttgataaagcttatcatgagtggagatattgactctacattcaaaagacttggggagtggtatccacaagtgataaaggatgagaaatcggttatttgcttactactccattctcaaagattcatagaatatatcagggctgaacaactggaagatgctgtgcactatggtcgtgctaacctggcaagcttcttgacacacgaagcttttgagtggctgctgaaggatagtgtggccctgctggcgtacgagaagcctgcagaatcatgcttgggatacctgatgggctctccccagcgtgaattcgtggcagacgcagtgaacgcggctgtcctgtcgacgaaccccaccatgaaggaccctgagagctgcctctactcgtgtctcgagaggctactaaggcagctcacagtttgtagccttgagcgacgtgcattcaacaacgaccaaggagatgcattcttactccacaaagaaatgcaaaactatgaaaggtctaggcgctcatagcctcataggcatcaggattgttgcgcttctgaagtctgcagcgcccctcagctttcgcaagggtgagcaccgaattgcatggacacagctcaggcgcttcgggaggtgttctaacctctctgtaatcagaaaactcacagtgagataaagccaacgtttcagatttcccctattttgttggttggctaatatgctgtttgacactatgaatgctaaaaagtaaagacgcttcgacatatgcccctggtacaaga

SEQ ID NO: 43794 - DNA, 1916 bp, Zea Mays
aaatcacacccgtgtctgtacgccacccagttgcttctctgtgtactctccaactcatcaccggctccatccttgtcctacactgacctcgtccccatcccgcaaccgcaagcaaccaccgatccagcccgttcggcctttcggcgaatggtgacgaaccaggacgcggaggcggcatcggcggcagccccggggccaggggcgacggtggacccgatgcgcctagcgtcgcggtggcggtcccagacggagtgggaccgcgcggtgccggagctggaggctgagccggagccgtccgagctcaacaccgtcaacagttcgggactcttctccgtcgtctctacggacaagttgtccgtgaaatacctcggcagccatcaccacggccacgacgtcggtgtcgtgcaggccgaccgccccgctcccacgcgccgggccgtgtactacttcgagatggccgtcaggaacgcgggatacaaggggcagacatccatagggttcacgagcgagagcttcaagatgaggcgacaaccgggttgggagtcaaacagttgtggataccatggtgacgacggccacctttaccggggtctagggaaaggcgaaccgtttgggccaaaattcacatctggtgacataattggcgctggcatcaactacttgtcacaggagttcttcttcacgaaaaatggagctccggttggagccattccaaaagaaattaaaggcccactatatcctacaattgcagttcatagtcagggtgaagagttgactgtaaactttggaaaggaaccattctgttttgacattgagggttatattcttgaagagaaaatgaagcagcaatcggtgtctgataaattgaacttggagacggacatcagtcattggttctcttaaattgtttcattactggctcattgcattccatgggccctccatttcctggtttttgaaatctattctatcttgccttatggatacacaccatgaacttgtgacaggattgtccgctcatatctcctacattatggataccaagatacattaaatgcttttgatatggcaaatgcaactgacccccccaccaatcgccaaaatggtcatgcagaacctcccgaaacgtatggtcttagccacagaaaacttttgcgtcagcttatcatgagtggagatattgactctacattcaaaagacttggggagtggtatccacaagtgataaaggatgagaaatcggttatttgcttactactccattctcaaagattcatagaatatatcagggctgaacaactggaagatgctgtgcactatggtcgtgctaacctggcaagcttcttgacacacgaagcttttgagtggctgctgaaggatagtgtggccctgctggcgtacgagaagcctgcagaatcatgcttgggatacctgatgggctctccccagcgtgaattcgtggcagacgcagtgaacgcggctgtcctgtcgacgaaccccaccatgaaggaccctgagagctgcctctactcgtgtctcgagaggctactaaggcagctcacagtttgtagccttgagcgacgtgcattcaacaacgaccaaggagatgcattcttactccacaaagaaatgcaaaactatgaaaggtctaggcgctcatagcctcataggcatcaggattgttgcgcttctgaagtctgcagcgcccctcagctttcgcaagggtgagcaccgaattgcatggacacagctcaggcgcttcgggaggtgttctaacctctctgtaatcagaaaactcacagtgagataaagccaacgtttcagatttcccctattttgttggttggctaatatgctgtttgacactatgaatgctaaaaagtaaagacgcttcgacatatgcccctggtacaaga

SEQ ID NO: 43795 - DNA, 520 bp, Zea Mays
gatttctgctcacgactgaaacagtaaacacacaaaatagggcgtctggatgatccttgtgttctttgtttcccgtcccgcggtgtgcgcgcgcacgtctgccgtctgccaagaggagtaggcagagatggcttgccctgcgcagtccatgctctccgccagcggctgcatcctcctgaggagcaagcctcgggcttcctcctcccacgtgcgagggggcatcatcggcggtggctgcagcagcaggccgttccagctaacctgcaacgcttcctcttccccgtctcctccctcgccggcgccggcgcaggaagaccccgactgcaacgacgaggagtgcgccccggagaaggaggtcgggagcttgagggccgagtggctggccgaggagaggacccaggtcgtcggcactttccctcccaggaagagagggtggaccggcttagtggagaaggacaccgccggccagaccaacatctattctgtcgagccaggagctttgcctcaagaagctgccctc

SEQ ID NO: 43796 - DNA, 471 bp, Zea Mays
tccttgtgttctttgtttcccgtcccgcggtgtgcgcgcgcacgtctgccgtctgccaagaggagtaggcagagatggcttgccctgcgcagtccatgctctccgccagcggctgcatcctcctgaggagcaagcctcgggcttcctcctcccacgtgcgagggggcatcatcggcggtggctgcagcagcaggccgttccagctaacctgcaacgcttcctcttccccgtctcctccctcgccggcgccggcgcaggaagaccccgactgcaacgacgaggagtgcgccccggagaaggaggtcgggagcttgagggccgagtggctggccgaggagaggacccaggtcgtcggcactttccctcccaggaagagagggtggaccggcttagtggagaaggacaccgccggccagaccaacatctattctgtcgagagaaaatccaccgggcagttgaagggagagaagc

SEQ ID NO: 43797 - DNA, 852 bp, Zea Mays
aatagggcgtctggatgatccttgtgttctttgtttcccgtcccgcggtgtgcgcgcgcacgtctgccgtctgccaagaggagtaggcagagatggcttgccctgcgcagtccatgctctccgccagcggctgcatcctcctgaggagcaagcctcgggcttcctcctcccacgtgcgagggggcatcatcggcggtggctgcagcagcaggccgttccagctaacctgcaacgcttcctcttccccgtctcctccctcgccggcgccggcgcaggaagaccccgactgcaacgacgaggagtgcgccccggagaaggaggtcgggagcttgagggccgagtggctggccgaggagaggacccaggtcgtcggcactttccctcccaggaagagagggtggaccggcttagtggagaaggacaccgccggccagaccaacatctattctgtcgagccggtggtgtacgtggccgagagcgccatcagctccggcgcggcgggcatgtcggcggagggtgccgagaacacggccgccatcgccgcggggctcgtcctcatcaccgtcgccgcggcctcgtccatcctcatccaggtgaacaagagccagccgcaggtgccggaagccgcctacaacggcccgccgctcagctattacgtggccaagttccagccggcgcagacccttgaggcccccgccccggcggaggcggtagaggcgcaggatggcgccgccactgtccaggactcggcggctccggaggcgcaggaagctgtcctcatcagctgattcggttttgtggcagcttacagatgagaattgataacgagctgacatgttcattccattgttc

SEQ ID NO: 43798 - DNA, 524 bp, Zea Mays
tttctgctcacgactgaaacagtaaacacacaaaatagggcgtctggatgatccttgtgttctttgtttcccgtcccgcggtgtgcgcgcgcacgtctgccgtctgccaagaggagtaggcagagatggcttgccctgcgcagtccatgctctccgccagcggctgcatcctcctgaggagcaagcctcgggcttcctcctcccacgtgcgagggggcatcatcggcggtggctgcagcagcaggccgttccagctaacctgcaacgcttcctcttccccgtctcctccctcgccggcgccggcgcaggaagaccccgactgcaacgacgaggagtgcgccccggagaaggaggtcgggagcttgagggccgagtggctggccgaggagaggacccaggtcgtcggcactttccctcccaggaagagagggtggaccggcttagtggagaaggacaccgccggccagaccaacatctattctgtcgagaattgataacgagctgacatgttcattccattgttc

SEQ ID NO: 43799 - DNA, 508 bp, Zea Mays
cgtctggatgatccttgtgttctttgtttcccgtcccgcggtgtgcgcgcgcacgtctgccgtctgccaagaggagtaggcagagatggcttgccctgcgcagtccatgctctccgccagcggctgcatcctcctgaggagcaagcctcgggcttcctcctcccacgtgcgagggggcatcatcggcggtggctgcagcagcaggccgttccagctaacctgcaacgcttcctcttccccgtctcctccctcgccggcgccggcgcaggaagaccccgactgcaacgacgaggagtgcgccccggagaaggaggtcgggagcttgagggccgagtggctggccgaggagaggacccaggtcgtcggcactttccctcccaggaagagagggtggaccggcttagtggagaaggacaccgccggccagaccaacatctattctgtcgagattttgcgaccactggtgtcccgccgtgtccgacgacctctagcggtctgactccctgcg

SEQ ID NO: 43800 - DNA, 1027 bp, Zea Mays
gtcgattccctggcaacagatcagggctcaccgccttggcgtacaatgcctcactgaccccgactgccgtcgtgcagtgaccgcacttgtacccaccataaccggaatgggagaccacgtctcaggtcgcgtgaggggtaaagtctacgggcaggttcactcaggtactaggcttaccgatttaccatatttctcggtatgtgtttagtacgttcaaacgcttgacacaggtatccgcacgttaatccttattccaattttcatctcgtagaccacgcgtccccatggacccgtgtccacagaccatcatcattctgttatcaaagtggatacaaccaattcctgacctcgcgcgagtgctagaaaaatcactcgtcttctaccgagatccctaattagcaaagcagctactcgacctagcatactagtatccatctcaaaaggagtcctgagttcatgcaactagggtttcagtcaactcctacacttaagtgcacagtacaagcctacaaacattaagtgcagtaaaatagcatatataacggttatgcataaaaccgaggcttgcctttcatttaacacttaagtagtgtttgctgggggaggtactcgcttggcgagcatccactggttaagtccaccatccttcagtacgtccaccaactgcatcttgtggttggcaccacatcacttgcacggtcgtcacctctcggtcctaaatgagatgtaggatgcatatgtatgaatacaatgaaaaatatcacaagctatataaatacatggtagcaaactaacatttaattgtaagacaacacaacgactatacgcaagcgctagctattcgtacgttatcggcgttcatcattaacaccattaacaagacgaccatattttatttatttacgcaacacaaatacgatatcacaggtacacacatttatttaattgttacgactttgcattagttctattgatcacacaaaagcatcacacacaagtttaacagaggaccgatgcatcaaagtcg

SEQ ID NO: 43801 - DNA, 4074 bp, Zea Mays
caccataaacaaacccaaacggcgtttgcaagaacgacggtgattccgatttgtgcatagcttcgccatcgacgagcgttgagcggcttgccttctcctcgcaaaacacggggtttctctcctccaccaaacacaacaaaacagcacacacacacacaattaatcataggaaaataataccgatgcggaattgaacaaggatttacgtggcctcaccgggggtgaacaacgacgacgacggggctgcgcaaaaacagcaaaccaccgacgggcgtcacggcgtgctgctcactgcgcaacaaaacagcaagccggcagcgcgcagagccgtcgaggctgctgcacattttgtcgagcacacagcgagcgtcaacggcgcactgcgcagcagcagagaggaggcatcggcagagggctcgcggccatgggcaactgcgagctcgctgcaatccatggacagggagccaaccgcgctacgtggaagaggaacagggagggcgtggctggaggaaaggggcgagctgcttgtggccatgggggagaagaaagggcgccgtcgagggagcttcaacagtggagcgctcggctgctgggctgctcaccgtggacagcagagaaaggcaggcgcagtggagaaagggtgctcaaaactgctggccggagctagggctcggccatgggaaagaagggggaaggaggaaggggagccggctggtggagatgggagagctcggctccatgcagatatggagcttgccatttggagcagtggcagggggcgtccttggctgctgggcgagctcggcatggagaagctgcttgctgccgtgatgcgggaggaagaaggggcgccctgctcttgcacgttgggaagaaggggaggacgccatgggaggagagggagctccctgctgcagccgctcgcaggaggagccgagagggcgccgggccatggctggccgaggggaggagctcctgccgtcaaccatgcacacgcagagaaagcagcggccaaggggagagcaggggggcgctaggcaaaggtccggctagaggtggaagaaggcttgggcgccatccatgggagtggctgctccctgctctggcgtgcgtgaaggagaaaggagaagagagtggcggctggaaatttttgaggggtgggagtggaaaatttccaagtgagcacccctatttatagaagatggctagggttagggtttccttagtgggccaaatgggctgggttgggctggcccaaacacgttatcgggttgcgctaatttattttcctgaataaaaatgctctcgcggaattcgtcgctacggaaaaatagagcgaaaagagttcggacgaacggaaggttgagcgattaattcggtcgagagtctaatttgatttcgctcgaaaataattacctacgcgtgattcgaaaataaatcgtcctgagattcgatcggttttggatttttagtcggataaggcgaatcgtgatattttaaaatcgctgtcgatacagggttttgagttcggttcggacatgaaatatttggccgagtcggataaaattgattagaggacaacatactgagtattccgtctgagagtatggactcggattaaaatagtcggacatcgatcgaggttcgaggaattagactcgggcttagatcaaataacagtcgtcgagagtttgattaaatgagtttcagatgagatttataattcgagaatgatttccgagtttgcattcgtcaagaataaaagttttaacaggctccaaatttggccttccgtgagactgattaacttcgaatttggtgagatgtgaatgagaaatctggataatcagagatagacacgatcgagaaatagaaatttttactgagcatccgagattaggataaatatcccgacataacgcgaaattgacacctgcggtgtcacagccttcccccttaaaaagaatctcgtcccgagattcgaatgaggatctttaagggtggagaagcatgtaactcccagactgaagatagatgcaaattcatgagagggtatctgacaagatactgaagacagatatgattagaatatcgcgacatatcgagacaaaatgcagcgatcattccgagagtgtccacaaaagataacacatcagtatagtctcgtaatggaccacgactattaaccgcgataccagcgcgtgccgagtagctcaaccatgtgtgcaccatagtaggctctcggtccgcggcaccatcagttgttagccataataccattaccaaacgcaaccaatgagaaatccacatagcacagatagatggagcccatgagagtatggctcagaaaataagaatgtgaccggagttgaagcagagattgctgacaaaagagcatcacatgagaattttctttaacccagagaaccatttgatgatcaacatggagattatcagatcagatattagcacgagatttgatatgaggacgaaccaaccatgagatcaagattgaagagcttgtatagacatgagagaactaaagacaagaatcaaatccattgaaccaaatggatatgccatttggagacaagttgataaaacaagcgtcatgatccttagagaaagagtatgagcaagatcagaaatgagagaacaggttatagcagataaccagataacggggcagagtcaataagggatctggagattcggatgataaagccaacatgatttacgagaaaaaggattaccagatccaggcaaaaggagagaaaggcaaacaggatcagctaggatgatcgacagagatgctatgaagttttaggggcaaggatttatggaaagaaacatgaccttgatagggtttgcgccactagacaccaacaacaaatatatattttttgacacaagtgcacaaggagacttgggttggtctagcggtcaaactgtgggggtctataagctgtgcaggtgtaacttcaaggataaaacactcaagggctaggaaatgccaacacaagcatgaatttttttttcctaaggaggtttcacttgctaagttcaaggttgtttgggcgggggtcttttcatgaggaaacaaacaacattttttttcaaaaaggggaacatttataataccacctagatagcaaggcaagagaaacacataacacgacctaacaagacttaccaatctgacacgaggtaaggcatttctaacatagcagtacatcacattattcataagtttttattattggaataaaggtgagagaagcaggttggtgcacaagagaccattataatgcgacaatcatgatgcatgctcattctagtcgtcttctcagacctaactaattattcggatgcttctacaacatccttattaatagtagtagtagcctttatggcctatataaatagccacctagctacccatctatttcctaaggcttcacgtcctaggtctatccttatcgtcctgatatctatccaactttggtttctagcaagttttacttttagaaaaggttggtaatcatgacttattgacttctctgtgatggtattcgctccgataccagctgtggcggaaccgcccgaattattccagcttaagtgcccaagtcgcacccttaagggcagcaacacacttaaacaggaataacccgtcagtccctcggatctagtccgataaagccactaatccaggatcgaataccactagctcacacgaaggtgaggcacagagaaatgcaataaaacataataccacaaatttaataagtatcattggtgattacataatcgaagtttcaaaaataataatcataaattttaatgcagcggaaataactgacagagaaaaccgagtaacatggcgaagcctggccacgctactactcctggtcctctcctgcggaagcaataaccctctcgaccgtctatcccggtggcagggatgaaggccaagtcacaccatcaaccaatcatcctaagggaacctgcaaaaattatgccacaagcaaggctgagtatactaatactcagctagacttacccggtgtgagg

SEQ ID NO: 43802 - DNA, 1335 bp, Zea Mays
gtaaagtctgcgggcaggttcactcaggtactaggcttaccgatttaccatatttctcggtatgtgtttagtacgttcaaacgcttaacacaggtatccgcacgttaatccttattccaattttcatctcgtagaccacgtgtccccatggacccgtgtccacagaccatcatcattctattctgttatcaaagtggatacaaccaattcctgacctcgcgcgagtgctagaaaaatcactcgtcttctaccgagatccataattagcaaagcagctactcgacctagcatactagtatccatctcaaaaggagtcctgagttcatgcaactagggtttcagtcaactcctacacttaagtgcacagtacaagcctacaaacattaagtgcagtaaaatagcatatataatggttatgcataaaaccggggcttgcctttcatttaacacttaagtagtgtttgctgggggaggtactcgcttggcgagcatccactggttaagtccaccatccttcagtacgtccaacaactgcatcttgtggttggcaccacatcacttgcacggtcgtcacctctcggtcctaaatgagatgcaggatgcatatgtatgaatacaatgaaaaatatcacaagctatataaatacatggtagcaaactaacatttaattgtaagacaacgcaacgactatacgcaagcgctagctattcgtacgttatcggcgttcatcattaacaccattaacaagatgaccatattttatttatttacgcaacacaaatacgatatcacaggtacacacatttatttaattgttacgactttgcattagttctattgatcacacaaaagcatcacacacaagtttaacagaggaccgatgcatcaaagtcgatggactcatctatcacaatcaactacagcaagcaagcatattaatcacggaacacatgttaacctaagtttagccatcacaagtctatgtccgttaagcgctaactaagcatttttagccaaaatggtgaactaaacattcatttgagcacgtgcagatttttaggacagcagcacagcagttacttgttttaatcataacttttcaaatattaatccaaaaatagtaaactatgactttctggaaagtttagaaagtgctctacaattttggtattttcatcacaacatgattcaacacttagcaaagtcgaattgtgctaacacagcagctctgtccagatttggacagattcaggcttgcaacttcaaaaattcacaactgaagattcagacatccaaacaaagtgattttagactttctggaaagctaattaaat

SEQ ID NO: 43803 - DNA, 1999 bp, Zea Mays
aataatcacataacattattcacatatctttattatataatcatggagaaataagaacaatattgaattacattggtaccttcggctcgacataaggtgtaagtacaagcgtgatgcatgagcgggtacaaatcagtgtgaacagtacgaggatactgtttatctatttataggcacagaacacagcctgtgtgaaattacattcatgtccttcatatttagtattaacttaagaacaatccgtcgaggactaaatagtcttttcctccttaagtcggttcctttttctgctattgagccgaagcttccttgtccacaacttcggcactggttcaaccttcatgctgaccctgctttccatatcgtgtacagcttcatcccatgtccgaaggattctgcacatatattatactttgggaaacattgttagtcacgtttttgaggaccttcggaagacgaaggcccccaacacccaagcatgagaaaacttcaaaagatatgagaaataatcctaagatatcctcttggagtgacttgagtggcatccaaaccctaaagtgctaaaaaccctgaaaagacccctataaaaccctaaattggaaccctagggggctaagtgtaaaattggtgcacttttggaccaaagtgcaaaaaccaaggtattagggcacctcaaatcatatgtttcacacatttgagtatttgcaaatcaaattatgagatttgggcttatttgcaaaaagacaccctatacctctcatatggctaagtctgaattcagttgaatagggctgactttagagctctatatttttaaagctacaaggaatttgtccagggtcaatacatcaaaattatagagctactaaaggagtataactttggttaagtcatcaggcataagtgctgtacacaaaatggagttaaatggaatccaagttctgctgtcagtcacccctatagcctaaatttttactgacagtaagatttgatcaactttggactcgattcaagctcaaaggagtgggcaaatgagccaggtctctatagtcgatttgtagctggattataggactacaactttgatgcagagagttggtcaggtcactacataaaatctgaagcaaatcacgctgcaaaatgctctgtcagaacaactgaggcaacctctaatggtacagtagcaaaaatatcccagggttcagtccccctcgccgccggtctgtggcggaaccgcccgaattattccagcttaagtgcccaagtcgcacccttaagggcagcaacacacttaaacaggaataacccgtcagtccctcggatctagtccgataaagccactaatccaggatcgaataccactagctcacacgaaggtgaggcacagagaaatacaataaaacataataccacaaatttaataagtatcattagtgattacattatcggagtttcaaaaataataatcataaattttaatgcagcgaaaataactgacggagaaaaccgagtaacatggcgaagcctggccacgctactactcctggtcctctcctgcggaagcaataaccctctcgaccgtctatcccggtggcagggatgaaggctaagtcacaccatcaaccaatcatcctaaggaacctgcaaaaattatgccacaagcaaggctgagtatactaatactcagctagacttacccggtgtgaggagtctactcctctacctctagacatgcagctgtttggctgaggggtttggtttgccaaaagcactagctgagtctaaaatcaagttttagcttttcaagttttagtatgatcctttttactagatgtgtacctagctattcatacatggtatcaaacattttatcaatcaacatcttttgccagtcacctcatttccactttttactcaatgcagtacaatggatcaagcagtctcattagctgcgagaagcagacgattcgaatcgagtttttatccttgcaaggtaaac

SEQ ID NO: 43804 - DNA, 643 bp, Zea Mays
cacaactgctgattctgcagtctatactgtcttccatacagggcttgatgctaaccttactgtactcatttcacaactgcaatattcatccttgacatggccaaagcctatgtgattcagctaatgccctagagaaacgatcaaaagacatcgcaaacaagacgttacttgaagagggtgtgctgcgccgttccacacgtgtccgggcccagccaaaggacaatccgtccatggcattcctcaagtatgtcaacaagtggagggataactgaggtactctgagctatgtaggcttttgctcggttaggtcgttgcagtgactcgccatactcatggctggtttactgacacctcattagctagtgaaacctgtatcagaacctacttttcttctctctctttttttttttaaattttaacttagctttcatgtgtgttcacaaatgaacccctcccccccctccgtaattgaactatgctaggctttaccgtttttagaacagtggccaaattttttgcatggatgatgtaaacgtgacaaggccggtgtggagatgcttcgatctgcaagggtgggccgcgggccaatgttggggatttttgacttaatactactgccttgaattttttagcaccattttcg

SEQ ID NO: 43805 - DNA, 578 bp, Zea Mays
gaaaaaacgaggaatcagtaggcaatggactaactcattcctcaaccaaacacccttaatgccctagagaaacgatcaaaagacatcgcaaacaagacgttacttgaagagggtgtgctgcgccgttccacacgtgtccgggcccagccaaaggacaatccgtccatggcattcctcaagtatgtcaacaagtggagggataactgaggtactctgagctatgtaggcttttgctcggttaggtcgttgcagtgactcgccatactcatggctggtttactgacacctcattagctagtgaaacctgtatcagaacctacttttcttctctctctttttttttttaaattttaacttagctttcatgtgtgttcacaaatgaacccctcccccccctccgtaattgaactatgctaggctttaccgtttttagaacagtggccaaattttttgcatggatgatgtaaacgtgacaaggccggtgtggagatgcttcgatctgcaagggtgggccgcgggccaatgttggggatttttgacttaatactactgccttgaattttttagcaccattttcg

SEQ ID NO: 43806 - DNA, 2486 bp, Zea Mays
cttctcccttcacaaccccaacctcgaaaacgaaggcgccaaaccattccccaaacgctctcgcgtccgcccgacagctcgcctgcctgcctctccgtcgtcgccgagtccctcgccggctctaccaggcggtggcgaaggcacttcggcggggacgctcaaccgccccgcgggcggcgtcgacggtcggttcccggcggcctcgcggaggttgcatcccgtgtcgaatcgaggatcctacgccaaatgcctctctttgataagaaacctttctccttgctggagccccctaaggacttggattcaaaggagaaggtgttccaaattcgattcacgaaggagatattccgagattatgaagaatacctgaagaggctaaacctttatcgtcaaagagtttggacatgtaatatatctggaaaatctaatttaacttttgaagaagctttggtatctgagcacaaagcgatggagaaggctcaaaatttgccaactgagctaatggctcaagttcttcggatgactcaatacagccctcttggtttatatgaacttgttgataagatatatgctagtctgctggaagaagtatttgagggaatagaattacatgctaataaggatggtaatgtggcaccttgcaagattttgaagattttagattctggtggcacaaagatgtgtgaagttggttggattcggaagggtaaggctataaccaacacatcagtaatcaaagctgcagatctgttttaccggagggcacctgttagcaggaatacgctgaagttttttattagagatgctacgtcacaaagtaatccatgggttatccatgagaatcttgccaaaaaatttggcataaccatcgagccccctgatagtgtaatgaagaaagggagaaaaagacaagagaatgaaactgttgaagatggaaggaaaaagctcaagacagatgaagaacatgcttatgtgctgattaagtatccaatagatgatctgctagtaaggcccaatgcagatgatccgtctttatttaagagacctcttctggctacagattttagagtaccaagatgttctgtgggagatctccttatggtatgggacttctgctcgtcttttgggagggctctgaatctgtccccatttccgctaacagatctggagaatgcaatttgccacaaagaaagcaatgttcttcttgtggaaatacatgcagctttgtttcacttgcttatgaaggatgaaggtgactatttcactgttccgcagaacaagaaacagaagttaaaggtaagttcagtaacatgggctgagtatctatgtgacttcttggaaatgacaaaaaatgaagaactatccactaacattgcaacagtaagaaggggatattatggtcttattgacactaatataaagcttaagatccttcgggaactagtggaagaagctattgaaacctctgccataagggagatactaagtgatcgtgtggaccagaaacaagtccttaatgcaacaaaaagagagaacaccagaaaggacaaaaaagagcaaaatctgaacactgaaattgccatgaaaaatgaggagaatcagacagatgctgtgcaaggtggccatgaaggtgtagatgagctggttaggagaaaagaagaaaatgacaagagtaatatttctcggggtaggacagaagtgaaacgacacatggtacagcaccttgagacggagatcgagaaattatccatccgttccagccctcttggtaaagacagacagtacagtaggtactggtttttcaagcgtgaaggaagactttttgttgaaactgcagattccagagaatggggttactacagcactaaggaagagcttgatgcgctcatggactcattgaatgtcaaaggtataagggagagagctttgaaacggcaactagagaagttctatagtaagataagtaatgccctagagaaacgatcaaaagacatcgcaaacaagacgttacttgaagagggtgtgctgcgccgttccacacgtgtccgggcccagccaaaggacaatccgtccatggcattcctcaagtatgtcaacaagtggagggataactgaggtactctgagctatgtaggcttttgctcggttaggtcgttgcagtgactcgccatactcatggctggtttactgacacctcattagctagtgaaacctgtatcagaacctacttttcttctctctctttttttttttaaattttaacttagctttcatgtgtgttcacaaatgaacccctcccccccctccgtaattgaactatgctaggctttaccgtttttagaacagtggccaaattttttgcatggatgatgtaaacgtgacaaggccggtgtggagatgcttcgatctgcaagggtgggccgcgggccaatgttggggatttttgacttaatactactgccttgaattttttagcaccattttcg

SEQ ID NO: 43807 - DNA, 2489 bp, Zea Mays
cttctcccttcacaaccccaacctcgaaaacgaaggcgccaaaccattccccaaacgctctcgcgtccgcccgacagctcgcctgcctgcctctccgtcgtcgccgagtccctcgccggctctaccaggcggtggcgaaggcacttcggcggggacgctcaaccgccccgcgggcggcgtcgacggtcggttcccggcggcctcgcggaggttgcatcccgtgtcgaatcgagtgcaggcaggatcctacgccaaatgcctctctttgataagaaacctttctccttgctggagccccctaaggacttggattcaaaggagaaggtgttccaaattcgattcacgaaggagatattccgagattatgaagaatacctgaagaggctaaacctttatcgtcaaagagtttggacatgtaatatatctggaaaatctaatttaacttttgaagaagctttggtatctgagcacaaagcgatggagaaggctcaaaatttgccaactgagctaatggctcaagttcttcggatgactcaatacagccctcttggtttatatgaacttgttgataagatatatgctagtctgctggaagaagtatttgagggaatagaattacatgctaataaggatggtaatgtggcaccttgcaagattttgaagattttagattctggtggcacaaagatgtgtgaagttggttggattcggaagggtaaggctataaccaacacatcagtaatcaaagctgcagatctgttttaccggagggcacctgttagcaggaatacgctgaagttttttattagagatgctacgtcacaaagtaatccatgggttatccatgagaatcttgccaaaaaatttggcataaccatcgagccccctgatagtgtaatgaagaaagggagaaaaagacaagagaatgaaactgttgaagatggaaggaaaaagctcaagacagatgaagaacatgcttatgtgctgattaagtatccaatagatgatctgctagtaaggcccaatgcagatgatccgtctttatttaagagacctcttctggctacagattttagagtaccaagatgttctgtgggagatctccttatggtatgggacttctgctcgtcttttgggagggctctgaatctgtccccatttccgctaacagatctggagaatgcaatttgccacaaagaaagcaatgttcttcttgtggaaatacatgcagctttgtttcacttgcttatgaaggatgaaggtgactatttcactgttccgcagaacaagaaacagaagttaaaggtaagttcagtaacatgggctgagtatctatgtgacttcttggaaatgacaaaaaatgaagaactatccactaacattgcaacagtaagaaggggatattatggtcttattgacactaatataaagcttaagatccttcgggaactagtggaagaagctattgaaacctctgccataagggagatactaagtgatcgtgtggaccagaaacaagtccttaatgcaacaaaaagagagaacaccagaaaggacaaaaaagagcaaaatctgaacactgaaattgccatgaaaaatgaggagaatcagacagatgctgtgcaaggtggccatgaaggtgtagatgagctggttaggagaaaagaagaaaatgacaagagtaatatttctcggggtaggacagaagtgaaacgacacatgcaccttgagacggagatcgagaaattatccatccgttccagccctcttggtaaagacagacagtacagtaggtactggtttttcaagcgtgaaggaagactttttgttgaaactgcagattccagagaatggggttactacagcactaaggaagagcttgatgcgctcatggactcattgaatgtcaaaggtataagggagagagctttgaaacggcaactagagaagttctatagtaagataagtaatgccctagagaaacgatcaaaagacatcgcaaacaagacgttacttgaagagggtgtgctgcgccgttccacacgtgtccgggcccagccaaaggacaatccgtccatggcattcctcaagtatgtcaacaagtggagggataactgaggtactctgagctatgtaggcttttgctcggttaggtcgttgcagtgactcgccatactcatggctggtttactgacacctcattagctagtgaaacctgtatcagaacctacttttcttctctctctttttttttttaaattttaacttagctttcatgtgtgttcacaaatgaacccctcccccccctccgtaattgaactatgctaggctttaccgtttttagaacagtggccaaattttttgcatggatgatgtaaacgtgacaaggccggtgtggagatgcttcgatctgcaagggtgggccgcgggccaatgttggggatttttgacttaatactactgccttgaattttttagcaccattttcg

SEQ ID NO: 43808 - DNA, 8951 bp, Zea Mays
tatcggcactgggcaacacccagtcatcatcatactggcttccacccattacaagttatgaggacaatgatttatgagaactgtttaggtaatcaagacattaggacttcaccaaggtaacaattatattatatgaccgaccacattcaggatatgtaacaaaactggcaaatgaactgatgaaagaaaagcccctacgggtcatatctagttatcaagtagtcaaggtttaaactgcatagatgtttttcaataaaactttctgaaattaatagccaatggccaaattcattgttttaagtttaaattagagaaaggttggattatattgcgaaaggcctctagcttgagttgattaggtggtctgagtagcactcctcaggccgatttcgaatcccagtgggagcgaatttcaggctggagttaaaaaggtcactcgttggttcctctggttgtgtacacacgagatgaactggcctataggggatccttgtatgtatgtttggagggctcagcacgagtaaagatttggtctataggggggcggacccttatgctgcacggaggcccaactttcgtgacctttctcgatcggggctccgaatgagcttcttattaatataataccgtgggacgatctttcctctatcgaccgagttttttaggtcgaattatattatctttctgaatggaaaggttcaattgaattgctatgaaaaaaatcatgttacctcacgaaaaacacttagctcaaaagtcatgtactcctgtgcaacagaaaataaaaaataagacacaaaatccaagattaatctctttacctctatttaagattgttaactggtaatatttaaataaaaaccatagcatgtcagaaagcagatctaactgatgactacttacaagttaaaagtgcaagaaaaagtggaatggtcatactgcctatgaataccaacaattcaaatctacatattttaatcatgtatggtcactaaagaatattatatgcaacggcacaggatatcgccaaagtatctatcagaaggttagaacaagttaccctaaaatgcaacttcgtataatatatcaataagaaaaggaaaaacatcagtatggcacacctatcccaatcagaaactgaaaccatcccaatctgaaccaaaacatacagcctttaccagattagacctatcgactgatattgactgtgaaccaccgaccatcagaccatgtttagtaaggagttagatcagatgtttcaaaacaaagaagatgcttgtagggaagaagaaaaaactgttccagcaaaaagagcaattaaatgtttttttgagggagaaaggctgtagggtaaacccctacagcgcgcttttattttatcttaaaaaaatacagagggaaacatagatagaaaaagaaatgaaaaagatagagaagaaagaaagaaaaggtatcgagagtttagccatgaaatcaagagcaattaaatgtgaaactatacaagatagaattgtaactcctggactaatttcatgttgttctctccctccattttcagagagctgcttatatcagcaagaaaatcctttgcggatatagcattgcaaagaatcgattatgtactaccagtgcacaagcaaagctgatcagcatagtggagtgcatcatcaactcaattttgactacctttaccctaaacgcatctatgatgcctaaacaaattcccagaatcaataatccagatgcctatatattgtgcaaaacccaatctactacagtactgccacagcaaagcagggcaccaaatgcacatggaaatagtgaaaagggcagtaagaaagattcttgaattggattgtaggtaagcccttccgttctaggagtcattgtgttaagactatctccaaccatatcatctatacctgagacatttaatttttgccatctttacggatggcactaaattaccaatcactgacagctgagtcaccgacatggtatttttgggtgtcatctgccccgtaaagatggcaaaaaattagattgtcctctatatccctcctttacataatccttcataagatttccttctttatatcccattcctctccaacagcgtcatctatatcccgtcctttatacataaatgttgttattagagacatattttgctcaagatttttgcacatacgttgttatgactggcaatgtgtacagtcggaggtctaaaaggccgactggccagcccattgtaagggacggcgcagataaaatatagagttattagcaatttctgttgcaaacagattagataagtcctagaagtaaggagttgttagagggagtttgttaggatatggagtttgttacagattagataagtcctagaaataaggagttgttagggagagtttgtttcaatcagggactatataagtcctatctctgtaaccaggatggtcagcgagaaattaatctaaagaagagattatttccttgcctctcattgtgcccaaccgtgcgacagcacggcgtcctctcgcccccgttcttccagcctgcgctctacccctaccactcatacaacctaaggagtagagatcataccaacctggtatcggagatgccagggtccaacaccggcgatagtttggcctccgccacggtgtcgccatcgttggagtcgatcaccacgatgctcgctgacatgcagcgccagctgggggagttcaactcccatatgtcctccatctcatctcgcgtcacggccatggaaaaaaatccaggaacctcagctgatacacctccatctggctgcccctacggcatgccagggtacggcggcctgccgccaaccacactagtccctgagggatccttacccccgcagcccatccacacctccgccgccgcatacacaaccaccaccacacccctgccaatccacctactgcccttgccgcactcgccatcacctctgccacaaatgccaaacattccacagcacatgcctagcaacccattcccaccatccatggtcggcgttccccgtttccaccgactagaatttgccacgtttgatggcgaggaccccatccagtggttaaaccggtgtgaccagttcttcgtttggaccgccacttcgcagcaatccattgggtgaactggcacgattaccctttcgcacgacagtggatgattatcaggaaagattttgggatctgctagcccaaacagcacctctctcccaggagcagcaggtgcaactattcactgcaggactaccggatcgaatcaagatcgatgtggagcttatggcgccacgagaccttaatcaagcgctgagcttagcgcgagcatatgaaaggagatcccaggccctggacatccatccaacagcaacacctagcaaggctctgcgacagccccagcgcccatcagtacctgtcccggcactacagccacaaattccaacagcagttagtacagcgccgcaatgaccattcaagaagctgacaccggctgagatggtcgagcgtcgacgtcaggggctctgttacaattgtggcgagtagtatgtcaaaggacaccgatgcccttaactgttctatctagaggtcactgattttgagggggaagccatggagaccgatcttgaggaaccagaaccagtgatatcactgcatgctttgactggtattcaatctgagggcacaatgcagctggaggtatctatcagaggacatgctctcacagcactactggacacgggttctactcacaactttatcaacttaggcactgcaagcactcttaaactggagtacaatcccagccaaggtctccatgctacggtggcaaacggtgacaaggtctcctgctgcaggttcccaaacagcattagcatgactatcggcctcgaggacttcctaatggaagcatatgccattccactggactccttcgatattatcctcggagtccagtttctgcgcaccctggggccaaccctttgggatctggaagacttgtgtcttgccttctggagacgaggcaagcggattctatggaaaggcatgggctcctcacgagatgacattcacatgcacccgacagttcgaacagtcaatgcagcaagtgaagattcaaaacctatgatggaccgcttgctacaacagttccaggaagtgtttacaacacctagtggccttcccccagctagaaggtgtgatcacaggatccatcttctgccaggaacagtaccagtagcagttcggccatataggtacccacagcttcaaaaggatgagcttgaggcacagtgcatgaccatgttagagcaaggcattatcagatatagcacctcagctttttcagcacttgtccttctaatgaagaaaccagataattcatggcgtttctgcattgactacaaggcactcaatgagaaaacagtcaaggataaattccctataccagtggtcgatgaactactcgatgagcttcgaggggcaaaaattttcactaagttggacctccgttctggttatcatcaggttcgggttcacccagatgatgtccacaaaactgccttccggacgcaccatgggcactttgagtttttggttatgccatttggcctctcaaatgccccagcaacattttaggctttaatgaatgaagtactgggagggtttctccgtcgttttgtcctcgtattctttgatgacattctcatatacagtgcaacatggacagaacacctaatacatgtcaaggcagtcctagaaacgctacacaccaacaagctctttgtcaaagagtccaagtgtaacttcggggctacatctgttgcttatttgggacacataatatcagccaaaggggtggccatggacagtagcaagattgaggcagtaacatcatggccaatcccaaaatcaccacgaggtctgcgaggatttttgggactagcaggctattaccggaaattcatcaaggattttggagtaatcgctgctccattaacaaagctcctcaagaaagaaggcttcaagtggtcaaccgacgcagactcagcattccaaacactcaaacaggcactctcctcagcgccagtactgcagctcccagatttcgagtgtccattcatagtggactgcgacgcgtcagggtcgggatttggtgctgtcctacaccaagaccagggacctatagccttcttcagccggccctttgcagcacgccatataaagctagcaacctatgaaagagagctcattggattggtacaagcagtacgccattggcgtccgtacttatggggtagatagtttgtggtgtgtactgaccattttagcctcaaatatatgttggaccaacgattgtcaacagtaccacaacatcaatggattagtaaactgtttggatttgacttcaaggtagaatatagagcaggaagacttaacacagtggcggatgcattatcgcgccgtgatacaaccaatgaatcagtttatgctctgacagcacccactttccaactgtacaaagatctagaagaagaatgtgcacacagtgaggaagggcagcagctcagtgcacagatcaaagaaggaagcttaggggatccatggcatacacaggagggactagtaatgcatggcaaccgggtgtttgtaccaggctcctccacactcattccagcaatactagaggccgcacattctgcaggacacggtggagtacaaaagacactacataagctcagatcagacttcttcatgcacaaagacagggcactagtaaaggattgggtgcgctcctgtgtcatctgccaaaagaataaaaccgaggctcttcaaccagcaggcctgcttcagcctttagaagtaccacgacaagtatgggcagatattgcaatggacttcattgagggtctgccaaaggtccatgaaaaatcggtaatattgacagtggttgatcggttttctaaatatgcacacttcattgccatgaatcacccatacaccgcagccacagtagctcgagccttctttgagggcatagtaagactacacggcttcccaagttccatagtcagtgatcgggatccggtgtttacaggaaacgtttggaaagatctcttcaaacttgcaggggtgaaattgaagatgagtacagcatttcatccccaaacagatggtcagtctgaagtagtcaacaaaaccattgccatgtatttgagatgcatcacgggggatcgacctagggcttgggtggactggctagcctgggctgagtattgctacaatacatcataccactcagcactgaaaacaactccatttcgtgtagtttatggaagagatcctccaccacttgttccatatcaacctaggactactgaaactcaaattgtggaccagatgctccaggaacgtggcctgttccttggggaggtcagagacaggctactacaagctcaagaacaagcacgcaggtttaatgatgggcgacaccgtgagctcgagttcagcattgatgattgggtttggctccgtctcctacatcgaaatgcccagtcactagtcgaccaccctaaagggaagctgggaccacgtatgcaggaccattccgtgtgattgaaagggtggccactgtggcgtacagattggagctgccaaaagggacacgcattcacgtcgtcttccatgtgggactcaagccatttcggggcagtccccccttactgccaccagccatgccaccgatggaaaacggtcgactgctgccatctccagagaagattatcagagcccgattgaagagaggacaatggcacgtgctaatgcagtggagtgaagcaaagccagaagatgcaacatgggagcccctgcagcagttcacagcttcataccctcaatttcagctcgaggacaagctgttcgtcgagggagggagagatgttatgaccggcaatgtgtacagccggaggtctaaaaggccgactggccagcccattgtaagggacggcgcagataaaacatagagagttattagcaatttctgttgcaaacagattaggtatgtcctagaagtaaggagttgttagagggagtttgttaggatatggagtttgttacagattagataagtcctagaaataaggagttgttagggggagtttgtttcaatcaaggactatataagtcctatctctgtaaccaggatggtcagcgagaaattaatctaaagaagagattatttacttgcctctcattgtgcccagccgtgcgacagcacggcgtcctctcgcccccgttcttccagcctgcgctctacccccaccactcatgcaacctaaggagtagagatcataccatacgtatttatcatatctttaaatatcttatacatattttagttttgcttaatccgttttctaaaatataaaaatagatagaggaaaggtgagaccttatatagagaggatggagaagcgtcctctatatttagaaaacgttgcaaagaataccgttagagcatatagaggacgaaatcttctctaaatatagaggggtagatgaccctttaggctgcctccaataagagcctatgaaggctcctctcctccaaatttaggtaattctctcctctatcccctccagcagggttccctaaatatagaggatgttcctctttcctctgcatatatggattctttctactctcctctatcatattaaacaaaactaagatatgtataaaacatttgagaataataacaaatatgtacgcataaaaatttaaaataaaatatgtctttaatatgggtatttatatataaaattgataacggtgttgaaaaggaacgagatataagaaaagaatcttttatagagaacctacatggatataaaagatgaatataaaggacgttgttaccaataggatggtaccaggagtcaatgtgcaaatgtgaagctacaagataggatggattcagaactccaagattaatttcacctatcttctcacgttctcagatggctgctaatcagctagaaaaggttaaacaaaaaaaatggcatgtatgtcccacagacgacaaaagcatcgaccagagtagagcgcatataaacgagttatattcaacaatcaacatgctgatatattgcccaaaaactcaatcgacagccgatatattgccccaaaactcgatcaacaacatcgccacaacaccagagctgacctcgattgctggtggaaataacgaggaggggcatacttcacaacaaagaaaagaacacccgatacacatccgaacttgatctaacatctcgccatcaaataagtgactggagaataaatccacagtagcccgaacaaaaaaaaccccaaaattggcgcactactcgtcattagatcaataacaatagaatccaccatacgcaccggcggaatttctatcgaaagctccaaaaattcatgatgggctacgcagattagacagaggaggaagaaaaggatagaggattaattacttgctcgagaagaaccggcggcgcttggccgcttgcgcggcgggcgggagcagctgcggcctgcgggttgaggacttgaggtcagggtgctgtcgatttatctcccggtgcaaaaaaggtcgcccaccgcggcacgccgtgtgcctatctcctcctcctgtgacgttttataacggcccaattgtgagggcgccgtatcgtagcggccgtgcggccgtgccgacttcggagttcttgcctgccgccgcgcgcgttgcgtggcctccccggagtgcccctaggccgtcggatctgcgtccgcgctcctgccgactgcggggacacgagccgcctggccggaacaaaaacggaagtgttggccacgtcacccgtacgatggttcttgtttttcggggactagcagat

SEQ ID NO: 43809 - DNA, 1372 bp, Zea Mays
attttcctgcattccattgtggggcttcaatggttgtcacttttctttttagatatttactctctcaatattcatcaatcaaccattttcatgggtggataaggacgattcacgctgcttcaattgtggttcttatagccatgctatgaaggattgcccaaagcctcgggacaatgttgcaattagcaatgcacgaaaacagcataatttgaaaagaaaccaatctaatgttaaccgtgtacaaaaccgatactaccagaaaacgcccggcaaatttgatgatttgaaagctggagtactgggacctgaaactagacagtgcttggggatcggggagaatgatcctcctccttggctgcacagaatgcgtgagttaggctatcctccgggctacctagatgtggttgacgatgaagatagaccttctggtatcaccatatttggagatggtgaggtgaaactagagtatgaggagggagagctttcagagcaaggcgaagcatctccgcctaagaaaaagatgacagtggaattccctggaataaacgcccccatcccagaaaatggtgatcagtggctgtggggtagcaccccgccccagtcctcaggccgccaccactcattggattcgagggatttccatgatagagggcctcctggcgctgatcattattcaccgagataccactcccacgattttggacctttgcgcccaagcatagggagatcacactcagacagggggtggagaagcccacctcgttatgataatccgcctgcagatgatggtgcctggaccccgcattcataccccagcaggcagcacttgggccattacagctcgagctctgagatgtcgtcacgccattccagggacaaagacagagataggcatgatagcaggcattaccaccaccgcagatgagtcaagcctgtagctgatttgtatcatattcttttgctgaagaatcctctacctgacgcattcgatctgacatagaaatcagtcctgctatagtttcttaagttacgaaatttcctttccttccaatatatttttgcagcagtgctcccaaacccatggtagagagtgaccttatctcgtctggtccgtgagctgtatctgaattatatgactgccttcctcacatatgcaactcttgctccttccttgactgttatgggcctgcttggttcagggactaactaatgtttagtcaggggactaaagttatacctgtttgattacagggactaaggtgctgtttggtttagtacttgaagtggtaacgggaatggagtgggctaccgccgctatctgatacattgtttggttaatgtggaaaacgtgatcaactccgtttacagcgtt

SEQ ID NO: 43810 - DNA, 886 bp, Zea Mays
gttctctactatgtgtaatctcatatcaagattaatgagtatcgtgatcatataattttgaatcttatcaacccatatggcaaggcaaaggaaatgacagtggacatcatcctagattttacaaaatcaaaggagcaatcagacatggctgtcatgatctaagatacttcaacgtgattggatcgaacccagacatatgactaggagaagctccaaggccactttgtcaagggtctctgcaatgcacttactggtgcatgatttactggaggttgtgtgcatgaatgtgccacgcattggtatgggggttggagttgaagcaggtaaatttcaccaacattggtatgtgaactggagttgaagcaggagacatgattgtcattcctatcctgtgcacactgcctcctcactgtctttcgtcgtccccctcgcagtcctgataccggagcatggttgccagggagagcagtccaaggcaaatttgccatgttggagcagtcacaggagccaaggggctgcagtcacaggtcctgctagccaggatggagcaatcataggacctcctagcagtccaaggcaaatttgcgaggtggagtagttgcaacttctgaaacccacgggataacatgctcaagcattcgtatgataaaaagaagatggcacataatcaaaagaagacctcatgttctgcgtttgtgaacctgtttgtattttttttgaacttgctttgtgaacctctatttgtaaacctgtaaaatctgaagttgtgaatatgtgagcttgtttttgtaaaatctgaatctggttttgtgaacttgttttgtgaacctctttgtgagcctgataaatgatggacttgagcctaaaatctgtgggtctgaatctg

SEQ ID NO: 43811 - DNA, 696 bp, Zea Mays
atggctgaggaagacgctgcgcggccgagtgccatggagatggcaggaccaagcgcgcagggagcacggcacagacagaggcccgcgtccggtgagctggagaccacggctgggcacgcgcaggaaagggagccgagcaggggcaagtgcgcagcgcccatggaagcagggaaggagctcgggcgagctgctcggcgggctggagcagaggagcgcggtgcggaggagaaaggagagcggctgagcgcgatgaaggggcttggctgggcgcagggaggagcgccgtcgagcaggaagcttcacgcacgcaaggattccatggcgccagaggagcaaaggccgagcagggagggtgcgccatggcagggagaactcgggggaagggaagtcgcgacgcgcaggagctccatggctggacgttgaagacgaactggcggccggcgcgcgcaggaaggagctacacgtctcgcagagaagaacgaggagcagaggcggcgcggacctgggcaggcgcacggcagggagggccaggggcgcgtggaggggcgagccagggaggagcgccggcgagcgcagggaactcgaccggcgcaggggcacacggccaggggatgtaagcagaagattctgggcaccaagagagagctgcaggggagaggacagagggagcaggggcgctcgccagggagctccgcg

SEQ ID NO: 43812 - DNA, 1152 bp, Zea Mays
cgcctattcaccccctctaggcgactttcaaatatcacttgctcactcgaaggtgagacatagagaaatacaataaagcataataccaaaaatttaaagaagtacttaagtgttattacagcatcggagttcaaaagtagtaaaccattatttttcatgcaacggaaatagctaacgaagataactgagtaacatggcaaagcctggccaattcactcctcctggtcctctcctgcaaaggcagcatcccactcggtcgtccaacccggtggcaaggtggaaggcaagtcacaccatcaaccatttcttgcaagatgcctgaaattttttgtgccacaagtaaggttgagtatactaatactcagctagacttacccggtgtgaggagtctactcctctacctctagactatgaagtcgtttggctgagtgatttggtttgccaaaaagcactagctgaatctaagtcaaattttagcttttcaagttttagaataatactttaaactagatgagtacctagctatccacacatggtatcaaacattaatcaatcaacatcttttgcaagtacctagttatccacttattactcaatgaagtacagtggatcaagtagtctcattatctgcgagaagtagacgattccaatcgagttttaaccttgcaacataaacctagacacacgacatgtaggaacactccatccccgcacacatcaatagtccctgtggcagaaccttccaagttattgggcccacatgcacctgcccttgtctccaagacctcagacgactatgcatgtgcaccagataacttaacaggatccatccgagtgtcccaaggaccccggataaaccacttacaaccaggatcgcaagattaagtaaacacaaatcacacaccatcaatttgcagcgaaaatcttattaccaaattttacaagttacaacaaatttacattatatgtatcagagtggttacaaaagtggttcaaagaataaactttgaaatgttataatttatttataagtttgaaatatatgctagctcagtgacaatcctcaataagaagtatagaagaagtacttaaacttataagaaggtcgtgcccaccggcgcttaacaccaatcacaatcaaagtgactcgta

SEQ ID NO: 43813 - DNA, 1401 bp, Zea Mays
gtcaccgtagggcacataggctctgggctctggcgctaatgttcgagcaaggcgctgctcctgttgctgtagaagggattttttgaccaaccctccaaccggtgcggcttcgatctttcctctcctatcacctgaatccctcgagtattcatcgccggcgcagcgcggtctcttcccttcgctggagaagggggaaggggacacgaacggagcagaaggccatggacacgatgcggggcgcgctggagcgggccaagatgctggtgggcatggaggtcgacgaggagtccgcgttgccaccgcccgaggagcagtccttcttcgacgacatcaatcggcactgcaccctcaacaccactcagaggctctatggtttcgcgatatgcttggctgccggactgacgtgcacattcttgtcaatgcttgtcttcttcaatccagtgaaatttggggtagcattcacccttggcaatttgatggcccttggaagtacagcatttctcataggccccaaaagacagtttgatatgatgcttgattctgtgcgaatatatgccactgctatatatattgcaagcatcataattgctctattctgtgctatctacgttcgcagcaagctgctgactctagtggccatcattttggaatttggtgcccttatttgaataattgaccgtcattcggagccagacaccatcccatgaggtatttctgtgtatttatagtgacgatatatttagcgaatgaaatttgaaagaattgtttgacatgtctctagggagtagggataaaagtgaaaaaatggaaattcccatccgggttttgttttttgtgggtttgcatcttagggtaatatggaaatggtaaccgaaaatatgaaaacaaaattatggaaaataaagctattttaggtctttaaaatcgtttccgagttctccatatttcaccaataattactgatggtaaatttcccttttttcccacccttattcaagagcctaagagggtaaaagactaaggctctgtttgtttccttccagtattatataatttagcttatggattatagaagcacctaatgagctgcttatgaattatcataatctagttatctagatcatataatccacctaataatctatgttgtttgtttgtaccttatttaagctggattatataatctagagagtaaacgaacagggcctaaaagacctagcccagccaaacccaacaggattcacttttctcaagtactttattgcattgctgtaatatgtgtatatatatgatgacttgaatatcgatcatgcattcattccttagtcgttcttatctatggtgatgcgatacggttttgtgttctgactaagaattatcagttccccaccaatatcaatc

SEQ ID NO: 43814 - DNA, 1398 bp, Zea Mays
ctgtcaccgtagggcacataggctctgggctctggcgctaatgttcgagcaaggcgctgctcctgttgctgtagaagggattttttgaccaaccctccaaccggtgcggcttcgatctttcctctcctatcacctgaatccctcgagtattcatcgccggcgcagcgcggtctcttcccttcgctggagaagggggaaggggacacgaacggagcagaaggccatggacacgatgcggggcgcgctggagcgggccaagatgctggtgggcatggaggtcgacgaggagtccgcgttgccaccgcccgaggagcagtccttcttcgacgacatcaatcggcactgcaccctcaacaccactcagaggctctatggtttcgcgatatgcttggctgccggactgacgtgcacattcttgtcaatgcttgtcttcttcaatccagtgaaatttggggtagcattcacccttggcaatttgatggcccttggaagcatttctcataggccccaaaagacagtttgatatgatgcttgattctgtgcgaatatatgccactgctatatatattgcaagcatcataattgctctattctgtgctatctacgttcgcagcaagctgctgactctagtggccatcattttggaatttggtgcccttatttgaataattgaccgtcattcggagccagacaccatcccatgaggtatttctgtgtatttatagtgacgatatatttagcgaatgaaatttgaaagaattgtttgacatgtctctagggagtagggataaaagtgaaaaaatggaaattcccatccgggttttgttttttgtgggtttgcatcttagggtaatatggaaatggtaaccgaaaatatgaaaacaaaattatggaaaataaagctattttaggtctttaaaatcgtttccgagttctccatatttcaccaataattactgatggtaaatttcccttttttcccacccttattcaagagcctaagagggtaaaagactaaggctctgtttgtttccttccagtattatataatttagcttatggattatagaagcacctaatgagctgcttatgaattatcataatctagttatctagatcatataatccacctaataatctatgttgtttgtttgtaccttatttaagctggattatataatctagagagtaaacgaacagggcctaaaagacctagcccagccaaacccaacaggattcacttttctcaagtactttattgcattgctgtaatatgtgtatatatatgatgacttgaatatcgatcatgcattcattccttagtcgttcttatctatggtgatgcgatacggttttgtgttctgactaagaattatcagttccccaccaatatcaatc

SEQ ID NO: 43815 - DNA, 2382 bp, Zea Mays
caacatggtattggaaccattgatccagtagacgccaaactcatccatcacatcttctcttatgtctttctctccccagatcaccatgaccgatacttcttcttccctgcccacatacagccattcgttgctggcacaaaaacgacgacagctacaacactgatcctccatcgacggctgtggcgcacacctcctcgtacacaattgatccaaactggtatgtcgacacaggtgccacagatcacatcaccagcgatcttgaccgactggcgctgcgtgaacgctatcacggtggtgagcaagtccaggaaccatacccaaggctatcgcaattggttacaggctctcctgaacattctggcgattcttctactgatatggctgacacgtctctaaaaaccatgtcgggacccggtgttcaaacagaatccgtctccggaaccgcagaacccgctgggtcggtggccttggagtctctgccaacatacgtgcttcatcctaatattcctcctcaacagctggcaggccaaactccaccagaacgtgtaccccatgcaacagccaacgtggaccatgagaacatgcatgcaccagctacatctccacgtatagaggatgatctggttccatcatctacgccatctgatgctaacacaggccatgctcatccatatggcaccagacttcgccacaatctgcgtcaaccaaaggtacggacggatggtacagtgacctattcagctattcgttcttcatcaagtgaacctacttcccatattgctgctatatatgaaacaccctctatggcgccaagctatgaacgatgaatttcatgcccttctcaaaaacaagacctggcaccttattccgcctagaccgggtcttaatgtaattgattgcaaatgggtatttaaactcaagcaaaaagctgatggctctattgatcgctataaagcccggctggtggcaaaaggatttaagcaacaatatggtattgattatgacgagacctttagtccggttgttaaaccaactactattcgtctgcttctttccctagcagtctcacgagattgggctattcgtcagattgacattcaaaatgcatttctccacggttttcttaatgaagacgtctatataaagcaaccaccaggttttgctgattctactcatccagattatctttgcaaattggataaatctctgtatggattaaaacaagcacctcgtgcgtggttttctcgtctcagcaagaaattaattgatcttgggttttcaccatcaaaggctgatgtctctctcttcatacttaataagggtggtgttcagatatatatgttgatttatgtagatgacataatcattattagctcgtcgtcagctaccgtggatagactccttagtcaacttcgtaatgattttgcagtcaaagattttggccctttggcatattttttgggcattgaatgtcagcacaccacgcatgggctcatcctgtcttagcacaaatatattcatgatcttctcactcggaccaacatgctgacatccaagccggttgctacgccaatgctaccagctgataaattgcaaatccagggtggcgcaccactctctgctgaagacgcaaccagatatcggagtgccattggggccctgcagtatcttcttctcactcggccagatattgctttctcggtcaaccaggtgtgccaattcatggttgcacctactgctgatcattggatggcagtcaagcggattttgagatatctacatggaactatcaacatgggtctctgtttcaccaagagtaattcctttcttctaagtgctttttctgatgcggattgggccggaaatattgatgatcggcgtagtactgggggttatgctatttatattggacctaaccttatttcttgggggtctcgcaaacagcctactgtctcgcgatctagcactgaggcggaatataaggccattgctgatggtacagcagaattaatatggcttcaagtattgctgcgagaacttggcatatcttcatctcgtgctgctgtcatgtggtgcaataatattggtgcgacatacttgtgtgctaatccagtatttcatcgacgatcaaaacatgtggaggtagactatcactttgtctgagaacgtgttgctacacatcaactagaggttcgtccaatctcgacaaaggaccaagttgcaaagtagggtaaactcagctttcagtcgctactagtgcctctacagcctaagtaatggtgcgttctatcattctatgtaacgagctgctaataaaatatatacgaggttattttttttagtagcgtcaattaataaaacacaacactaaatttgattacc

SEQ ID NO: 43816 - DNA, 2401 bp, Zea Mays
attcaacatggtattggaaccattgatccagtagacgccaaactcatccatcacatcttctcttatgtctttctctccccagatcaccatgaccgatacttcttcttccctgcccacatacagccattcgttgctggcacaaaaacgacgacagctacaacactgatcctccatcgacggctgtggcgcacacctcctcgtacacaattgatccaaactggtatgtcgacacaggtgccacagatcacatcaccagcgatcttgaccgactggcgctgcgtgaacgctatcacggtggtgagcaagtccaggtcggcaatggtgcaggaaccatacccaaggctatcgcaattggttacaggctctcctgaacattctggcgattcttctactgatatggctgacacgtctctaaaaaccatgtcgggacccggtgttcaaacagaatccgtctccggaaccgcagaacccgctgggtcggtggccttggagtctctgccaacatacgtgcttcatcctaatattcctcctcaacagctggcaggccaaactccaccagaacgtgtaccccatgcaacagccaacgtggaccatgagaacatgcatgcaccagctacatctccacgtatagaggatgatctggttccatcatctacgccatctgatgctaacacaggccatgctcatccatatggcaccagacttcgccacaatctgcgtcaaccaaaggtacggacggatggtacagtgacctattcagctattcgttcttcatcaagtgaacctacttcccatattgctgctatatatgaaacaccctctatggcgccaagctatgaacgatgaatttcatgcccttctcaaaaacaagacctggcaccttattccgcctagaccgggtcttaatgtaattgattgcaaatgggtatttaaactcaagcaaaaagctgatggctctattgatcgctataaagcccggctggtggcaaaaggatttaagcaacaatatggtattgattatgacgagacctttagtccggttgttaaaccaactactattcgtctgcttctttccctagcagtctcacgagattgggctattcgtcagattgacattcaaaatgcatttctccacggttttcttaatgaagacgtctatataaagcaaccaccaggttttgctgattctactcatccagattatctttgcaaattggataaatctctgtatggattaaaacaagcacctcgtgcgtggttttctcgtctcagcaagaaattaattgatcttgggttttcaccatcaaaggctgatgtctctctcttcatacttaataagggtggtgttcagatatatatgttgatttatgtagatgacataatcattattagctcgtcgtcagctaccgtggatagactccttagtcaacttcgtaatgattttgcagtcaaagattttggccctttggcatattttttgggcattgaatgtcagcacaccacgcatgggctcatcctgtcttagcacaaatatattcatgatcttctcactcggaccaacatgctgacatccaagccggttgctacgccaatgctaccagctgataaattgcaaatccagggtggcgcaccactctctgctgaagacgcaaccagatatcggagtgccattggggccctgcagtatcttcttctcactcggccagatattgctttctcggtcaaccaggtgtgccaattcatggttgcacctactgctgatcattggatggcagtcaagcggattttgagatatctacatggaactatcaacatgggtctctgtttcaccaagagtaattcctttcttctaagtgctttttctgatgcggattgggccggaaatattgatgatcggcgtagtactgggggttatgctatttatattggacctaaccttatttcttgggggtctcgcaaacagcctactgtctcgcgatctagcactgaggcggaatataaggccattgctgatggtacagcagaattaatatggcttcaagtattgctgcgagaacttggcatatcttcatctcgtgctgctgtcatgtggtgcaataatattggtgcgacatacttgtgtgctaatccagtatttcatcgacgatcaaaacatgtggaggtagactatcactttgtctgagaacgtgttgctacacatcaactagaggttcgtccaatctcgacaaaggaccaagttgcaaagtagggtaaactcagctttcagtcgctactagtgcctctacagcctaagtaatggtgcgttctatcattctatgtaacgagctgctaataaaatatatacgaggttattttttttagtagcgtcaattaataaaacacaacactaaatttgattacc

SEQ ID NO: 43817 - DNA, 2527 bp, Zea Mays
cattcaacatggtattggaaccattgatccagtagacgccaaactcatccatcacatcttctcttatgtctttctctccccagatcaccatgaccgatacttcttcttccctgcccacatacagccattcgttgctggcacaaaaacgacgacagctacaacactgatcctccatcgacggctgtggcgcacacctcctcgtacacaattgatccaaactggtatgtcgacacaggtgccacagatcacatcaccagcgatcttgaccgactggcgctgcgtgaacgctatcacggtggtgagcaagtccaggtcggcaatggtgcaggatcgtcggacaaggagaagactcctggaagggcggtgtaaaggcgggctctacccaatcccattttctgatcaacagatcctcaagcatgcactcataagtcgaccaatcagtcgcgatgactggaaccatacccaaggctatcgcaattggttacaggctctcctgaacattctggcgattcttctactgatatggctgacacgtctctaaaaaccatgtcgggacccggtgttcaaacagaatccgtctccggaaccgcagaacccgctgggtcggtggccttggagtctctgccaacatacgtgcttcatcctaatattcctcctcaacagctggcaggccaaactccaccagaacgtgtaccccatgcaacagccaacgtggaccatgagaacatgcatgcaccagctacatctccacgtatagaggatgatctggttccatcatctacgccatctgatgctaacacaggccatgctcatccatatggcaccagacttcgccacaatctgcgtcaaccaaaggtacggacggatggtacagtgacctattcagctattcgttcttcatcaagtgaacctacttcccatattgctgctatatatgaaacaccctctatggcgccaagctatgaacgatgaatttcatgcccttctcaaaaacaagacctggcaccttattccgcctagaccgggtcttaatgtaattgattgcaaatgggtatttaaactcaagcaaaaagctgatggctctattgatcgctataaagcccggctggtggcaaaaggatttaagcaacaatatggtattgattatgacgagacctttagtccggttgttaaaccaactactattcgtctgcttctttccctagcagtctcacgagattgggctattcgtcagattgacattcaaaatgcatttctccacggttttcttaatgaagacgtctatataaagcaaccaccaggttttgctgattctactcatccagattatctttgcaaattggataaatctctgtatggattaaaacaagcacctcgtgcgtggttttctcgtctcagcaagaaattaattgatcttgggttttcaccatcaaaggctgatgtctctctcttcatacttaataagggtggtgttcagatatatatgttgatttatgtagatgacataatcattattagctcgtcgtcagctaccgtggatagactccttagtcaacttcgtaatgattttgcagtcaaagattttggccctttggcatattttttgggcattgaatgtcagcacaccacgcatgggctcatcctgtcttagcacaaatatattcatgatcttctcactcggaccaacatgctgacatccaagccggttgctacgccaatgctaccagctgataaattgcaaatccagggtggcgcaccactctctgctgaagacgcaaccagatatcggagtgccattggggccctgcagtatcttcttctcactcggccagatattgctttctcggtcaaccaggtgtgccaattcatggttgcacctactgctgatcattggatggcagtcaagcggattttgagatatctacatggaactatcaacatgggtctctgtttcaccaagagtaattcctttcttctaagtgctttttctgatgcggattgggccggaaatattgatgatcggcgtagtactgggggttatgctatttatattggacctaaccttatttcttgggggtctcgcaaacagcctactgtctcgcgatctagcactgaggcggaatataaggccattgctgatggtacagcagaattaatatggcttcaagtattgctgcgagaacttggcatatcttcatctcgtgctgctgtcatgtggtgcaataatattggtgcgacatacttgtgtgctaatccagtatttcatcgacgatcaaaacatgtggaggtagactatcactttgtctgagaacgtgttgctacacatcaactagaggttcgtccaatctcgacaaaggaccaagttgcaaagtagggtaaactcagctttcagtcgctactagtgcctctacagcctaagtaatggtgcgttctatcattctatgtaacgagctgctaataaaatatatacgaggttattttttttagtagcgtcaattaataaaacacaacactaaatttgattacc

SEQ ID NO: 43818 - DNA, 1414 bp, Zea Mays
attcaacatggtattggaaccattgatccagtagacgccaaactcatccatcacatcttctcttatgtctttctctccccagatcaccatgaccgatacttcttcttccctgcccacatacagccattcgttgctggcacaaaaacgacgacagctacaacactgatcctccatcgacggctgtggcgcacacctcctcgtacacaattgatccaaactggtatgtcgacacaggtgccacagatcacatcaccagcgatcttgaccgactggcgctgcgtgaacgctatcacggtggtgagcaagtccaggtcggcaatggtgcaggatcgtcggacaaggagaagactcctggaagggcggtgtaaaggcgggctctacccaatcccattttctgatcaacagatcctcaagcatgcactcataagtcgaccaatcagtcgcgatgactggtatgcacggttggggcacccatctagtcaagttgtccactctattttacatcttaataaaattacttgtaccaaacagttagagtccgtaatttgtaatgcgtgtcaacttgccaagagtcatcaattaccttataattcttctattcatcgctctacttgtcctttagaacttcttttctcagatgtttgaggtcccgctccaacatctgttggtggttataaatactatattagcttcattgattatttcagtaaatttttctggatctatcttatgcatgatcgttctgaagctactagtgtgttcttacaattccaaactcatgtggaacgccttttgggcactaagattaaatgcattcaatctgattggggtggtgaatatcagaaaatacacaataccttttttcgctctcttggcattgctcatcgtgtgtcatgtcctcacacccatcaacaaaatggatccgcagaacgcaaataccgtcacatagttgaaactggtctagctcttcttgctcacgctcacgtgcccctcaaattttgggatgaagcttttctcgccgcagcctacctcatcaatcgaatgcctacttagggtcattgacaacaaaactcctatcgaacgtctttttggtaccactccaaattattctatgttgcgtattttcggttgtgcatgctggccaaacttgcatccatataataagcataaactttcttttcgctctaaggaatgcgtatttatcggctatagtgctttacataaaggatacaagtgtttagatattgattcagggcgtgtctatatttctagggatgttatatttgatgagggtgtttttcctttctcaaaaacattgacccaacaatcacagccaaatctatcctctccatcgcatgatttacgtatgttgcatttgggcaatggtggtaattttattggaaatgatcatgtg

SEQ ID NO: 43819 - DNA, 1458 bp, Zea Mays
cgctcgctatccatagttgttgactcacgcatcgtctctttccattcactcacgcgcttgctctcgtgcctgaccagcgacctcaggaacctccctatgggcaccgtctcctccatcggcctctctgtcttcgccaccttcagcgccgacgaggtggccatgctcgagacgcttgtcctgctccccggccaggacgccgaaattgcacgggaatcctccaggcgcagagcaaggtcttcatgctgcctagttccgcttccgcgggcgcaccgtcaccaccgcctggttctgtctccgtcgtcggtcagggtctgcgttcgtggccctgggactaggagcacatggtgcagacaacaagtgagaacattgctgaagccgacgcgtgcaaggtgcgggaggagaaggccatgagcttgcgctggagctaggagtaggagctgccaaaagagctgaacaagacaaccaaaagacacccgtgcaaccagaacatgtgcaggaagaagaagaagaggaagaaacatgcccatacagcgagtcacctgccgagctgagcctcatcggctgccctttgctgcctgcggcctcagcagaaatagggtccgtgaattcttcagaggtgtgcgtgcgacgaggatttggtgtggacgctgttctcgtggatggaggagacgcagcacaaggaagaccggctttgtcgacttcgttcttgccttcggagtttctcgttcggcggcaggctgatgatcaagaagctgctgcagaggatgaggagatgagtggggttggcgggggagcgaggaagaagctgaggctgtccaaggagcagtctgcgttcctggaggatagcttcaaggcgcacagcacactgaccccaaaacagaagagtgatttagcgaagcggctgaaacttcgaccgcgccaggtggaggtctggttccagaacagaagagcaagaagtaagctaaagcagacggaggtggactgcgagtacctgaagcgttggtgcgagaagctagcgcaggagaaccggaggctgcagagggaggtggcggagctgcggcgtctttgctccgccgcctacccgttttacggtgcagcagcagggttcggcgtggccacagcccgagtgtgccctagctcatgcgataacgacgtcagcgaggctgctatcagtggcgctccatcagcagcggcaccaccgccatccaccttgttcgccagctggcctcctcatttcggacccttcaccgtcgtcgtccccccactgctccgccggcagccgtcggcgacgacctcgtgatacgtacgtacgggtggtgccgatggaaaaaactagctctcacctcatcaatggcgtatagtgtactgtgcatgcatgcatgtatgtaaaaaggtaggtatatgcttaatttgtacgtaattaaaaaacgtagtggacaaacaaattgaacacgaatt

SEQ ID NO: 43820 - DNA, 2695 bp, Zea Mays
cacgcttcgccagggatcgaactaaaaggaatgtgcaactgagtgactgctgagctgtagataaatgtgaggagttgaggacattatttacaaacaaatggtatgtagtattccagatctgaagaactagacggagcatatacaacagaagtgatagtatatgaatagtaaggattttctccaacaaaaattcttccataatctctagatctatcacattaagttatgtcacatgttttgctgaaagcaatagtaacagactcatagtgtccttctggaagaatatgtcctgaagtaaactaatgtaaaagtcaacctttgtaattaattcgagcttagtagtggtcttgtagtgacagtactttagtactttattctcatgacttcttgtgcttactaagctttggcagtaagcttttaatttgcatcttccagcagaagctatatgttagagtcaatttgttctaactgtaaaccatcaaaataactcataactgtatctggtaatacacaaactaaaaattcttgttactctgtttgaaatatcgttatttactgtagttgtttctggtgttataatgtaataaaaaagacagatccagtatcagtggcttccacatgcgtgaagtttaggcgaaggaataaccgaggcaagctttgccctgtatcttgcagagagactacactgactgaatctaggacttctggattaatggaaaggcttctcaccactttgttagacttgtccttctctggtgttatactgtcatctgataaaataattcaatagcaagctaagcaacagtatacttcatacatggcagagctcaactttgacttctcagggcttaaaattgaatttatatgacatagcttgtttcatttcagatcatctgtttttcttaagtcatcgcttgtttgattgggttttcagttagcaacatcatagttagcagcccaagattaagaattgtagtatcttctgaagattaagacctcagtcattctccgaaagtatcaatacttggaagtatgaaactgtagatcatgaacacagtgtttcgtcaatgttttttgaacaacttatgttatgtgcttgatttttaaaggagtcagttgacaaccagtgttcatttcttttcagctttaatagtaaataactgatcattaggtgcaattttctattcaagcaaccatgttacatgatcagttggtatttatggcacatcaattttgttagttgcgatgctagcattctgaactgtgtcatcatggtttgcttttagaactattatacatagataataattgatttggagaacacttcaattcctgtaacaaacacgcaagttacgctagcatgtcatgtcatgtgcttattaattcaaaaacaataattgtgtgcatgaacaatagatctgtacggattgtttcaatcgtcaaatcatgaagcatccgctgccgtgatggaaatgcattgcattattcatttccgattctttgacatcatacattctatacgtgtatccttactgttttttattaaaagtggtgattatatagatcaaaatataagtagtgccgatatcatcatttgttgtcagctaacggatcattccttgtgccttctaaatatgattgaaattgtcaatagcaaaatgttgaatacctagctattgaaaatttgcattgtcaaggtttcacgcaacataaagatgtggtgctattttttttagttctgttcatttttcatagcaaagtttggagtacttttattttgttcccctttattcaccttaatctatgcagatttattatctatttatatgcagtaataactaaaaacgactgtgctgctatgttataaaatgattctttgtacaagttatttaatctatcatcacaatttatataaggtaatttatggtcatatagtcatgtctgtcagatacagtagtcatttcctcttttggcatatgatatttggttcttcaatagagaaccaatgatatgtatacttattaaccagtcatggctgccgctaggccgctagtactttgtttacttaggattgattttgaagaagattggcaatgcaagtaagcttccaacaggtctgagcatataaaatggacttgatgcatcactctttttagaaaggtaaaacctgagctcaccaaacactttctagctctgccttgagggaagaatagcaccattgaaaggacaatgcaaacaccaaacaaaaagggcgaagcgcagcaaaggggccggaaaagaagtcctcaacgattttctgttaattgaatgatatggcatcctagagtttgttgagaaacataggtgccattatatttgtctgaagtcccaaagctctcaatctattatgcctacaaggctagctgcatatgcatcattagccacttacacttcaattattcgtgactaagaattcaggaatctttttcttgattatatagacttctgtacaatctgtctcccttctcttatttacttggttgaaaagaccaataatggataagaatctattatttgagaggttaagatgtgatcacataagtccctgtaattgttgctccttgctaacgttcacttaatgagaaaaaatactaataacataaaatttctgccactttacttcactcattgctcattgaagtaaaaaatgttgtgg

SEQ ID NO: 43821 - DNA, 2482 bp, Zea Mays
gaggttgggcccagattgacagttcttcggcttcttgggctgggcctactctgaccgctcccgccccaccaccgattctcttcctccgctccgttccccacctccgttggtgcgtccaccgaggcggccgggtcggttcgcctccgccgcggtcgatcaatgaatccatgccggcctcgtggcctggttccttgctctccttattctaggaatgtgcaactgagtgactgctgagctgtagataaatgtgaggagttgaggacattatttacaaacaaatggtatgtagtattccagatctgaagaactagacggagcatatacaacagaagtgatagtatatgaatattgtttctggtgttataatgtaataaaaaagacagatccagtatcagtggcttccacatgcgtgaagtttaggcgaaggaataaccgaggcaagctttgccctgtatcttgcagagagactacactgactgaatctaggacttctggattaatggaaaggcttctcaccactttgttagacttgtccttctctggtgttatactgtcatctgataaaataattcaatagcaagctaagcaacagtatacttcatacatggcagagctcaactttgacttctcagggcttaaaattgaatttatatgacatagcttgtttcatttcagatcatctgtttttcttaagtcatcgcttgtttgattgggttttcagttagcaacatcatagttagcagcccaagattaagaattgtagtatcttctgaagattaagacctcagtcattctccgaaagtatcaatacttggaagtatgaaactgtagatcatgaacacagtgtttcgtcaatgttttttgaacaacttatgttatgtgcttgatttttaaaggagtcagttgacaaccagtgttcatttcttttcagctttaatagtaaataactgatcattaggtgcaattttctattcaagcaaccatgttacatgatcagttggtatttatggcacatcaattttgttagttgcgatgctagcattctgaactgtgtcatcatggtttgcttttagaactattatacatagataataattgatttggagaacacttcaattcctgtaacaaacacgcaagttacgctagcatgtcatgtcatgtgcttattaattcaaaaacaataattgtgtgcatgaacaatagatctgtacggattgtttcaatcgtcaaatcatgaagcatccgctgccgtgatggaaatgcattgcattattcatttccgattctttgacatcatacattctatacgtgtatccttactgttttttattaaaagtggtgattatatagatcaaaatataagtagtgccgatatcatcatttgttgtcagctaacggatcattccttgtgccttctaaatatgattgaaattgtcaatagcaaaatgttgaatacctagctattgaaaatttgcattgtcaaggtttcacgcaacataaagatgtggtgctattttttttagttctgttcatttttcatagcaaagtttggagtacttttattttgttcccctttattcaccttaatctatgcagatttattatctatttatatgcagtaataactaaaaacgactgtgctgctatgttataaaatgattctttgtacaagttatttaatctatcatcacaatttatataaggtaatttatggtcatatagtcatgtctgtcagatacagtagtcatttcctcttttggcatatgatatttggttcttcaatagagaaccaatgatatgtatacttattaaccagtcatggctgccgctaggccgctagtactttgtttacttaggattgattttgaagaagattggcaatgcaagtaagcttccaacaggtctgagcatataaaatggacttgatgcatcactctttttagaaaggtaaaacctgagctcaccaaacactttctagctctgccttgagggaagaatagcaccattgaaaggacaatgcaaacaccaaacaaaaagggcgaagcgcagcaaaggggccggaaaagaagtcctcaacgattttctgttaattgaatgatatggcatcctagagtttgttgagaaacataggtgccattatatttgtctgaagtcccaaagctctcaatctattatgcctacaaggctagctgcatatgcatcattagccacttacacttcaattattcgtgactaagaattcaggaatctttttcttgattatatagacttctgtacaatctgtctcccttctcttatttacttggttgaaaagaccaataatggataagaatctattatttgagaggttaagatgtgatcacataagtccctgtaattgttgctccttgctaacgttcacttaatgagaaaaaatactaataacataaaatttctgccactttacttcactcattgctcattgaagtaaaaaatgttgtgg

SEQ ID NO: 43822 - DNA, 3091 bp, Zea Mays
gaggttgggcccagattgacagttcttcggcttcttgggctgggcctactctgaccgctcccgccccaccaccgattctcttcctccgctccgttccccacctccgttggtgcgtccaccgaggcggccgggtcggttcgcctccgccgcggtcgatcaatgaatccatgccggcctcgtggcctggttccttgctctccttattctaggaatgtgcaactgagtgactgctgagctgtagataaatgtgaggagttgaggacattatttacaaacaaatggtatgtagtattccagatctgaagaactagacggagcatatacaacagaagtgatagtatatgaatagtaaggattttctccaacaaaaattcttccataatctctagatctatcacattaagttatgtcacatgttttgctgaaagcaatagtaacagactcatagtgtccttctggaagaatatgtcctgaagtaaactaatgtaaaagtcaacctttgtaattaattcgagcttagtagtggtcttgtagtgacagtactttagtactttattctcatgacttcttgtgcttactaagctttggcagtaagcttttaatttgcatcttccagcagaagctatatgttagagtcaatttgttctaactgtaaaccatcaaaataactcataactgtatctggtaatacacaaactaaaaattcttgttactctgtttgaaatatcgttatttactgtagttgtttctggtgttataatgtaataaaaaagacagatccagtatcagtggcttccacatgcgtgaagtttaggcgaaggaataaccgaggcaagctttgccctgtatcttgcagagagactacactgactgaatctaggacttctggattaatggaaaggcttctcaccactttgttagacttgtccttctctggtgttatactgtcatctgataaaataattcaatagcaagctaagcaacagtatacttcatacatggcagagctcaactttgacttctcagggcttaaaattgaatttatatgacatagcttgtttcatttcagatcatctgtttttcttaagtcatcgcttgtttgattgggttttcagttagcaacatcatagttagcagcccaagattaagaattgtagtatcttctgaagattaagacctcagtcattctccgaaagtatcaatacttggaagtatgaaactgtagatcatgaacacagtgtttcgtcaatgttttttgaacaacttatgttatgtgcttgatttttaaaggagtcagttgacaaccagtgttcatttcttttcagctttaatagtaaataactgatcattaggtgcaattttctattcaagcaaccatgttacatgatcagttggtatttatggcacatcaattttgttagttgcgatgctagcattctgaactgtgtcatcatggtttgcttttagaactattatacatagataataattgatttggagaacacttcaattcctgtaacaaacacgcaagttacgctagcatgtcatgtcatgtgcttattaattcaaaaacaataattgtgtgcatgaacaatagatctgtacggattgtttcaatcgtcaaatcatgaagcatccgctgccgtgatggaaatgcattgcattattcatttccgattctttgacatcatacattctatacgtgtatccttactgttttttattaaaagtggtgattatatagatcaaaatataagtagtgccgatatcatcatttgttgtcagctaacggatcattccttgtgccttctaaatatgattgaaattgtcaatagcaaaatgttgaatacctagctattgaaaatttgcattgtcaaggtttcacgcaacataaagatgtggtgctattttttttagttctgttcatttttcatagcaaagtttggagtacttttattttgttcccctttattcaccttaatctatgcagatttattatctatttatatgcagtaataactaaaaacgactgtgctgctatgttataaaatgattctttgtacaagttatttaatctatcatcacaatttatataaggtaatttatggtcatatagtcatgtctgtcagatacagtagtcatttcctcttttggcatatgatatttggttcttcaatagagaaccaatgatatgtatacttattaaccagtcatggctgccgctaggccgctagtactttgtttacttaggattgattttgaagaagattggcaatgcaagtaagcttccaacaggtctgaggtatgtgtctaatgaaagcgtctttcttccatttattggttgaatgcccttgtgtcaaagcatcctatgcatatcaacttgcacttactgaataaggggatataccttattacaattccatgtctaaattaatgacactaaatgaattttgatttatgtatcttagtttgtaaagttgccatgtcgctaatattcgacagctgtttttgttacagcatataaaatggacttgatgcatcactctttttagaaaggtaaaacctgagctcaccaaacactttctagctctgccttgagggaagaatagcaccattgaaaggacaatgcaaacaccaaacaaaaagggcgaagcgcagcaaaggggccggaaaagaagtcctcaacgattttctgttaattgaatgatatggcatcctagagtttgttgagaaacataggtgccattatatttgtctgaagtcccaaagctctcaatctattatgcctacaaggctagctgcatatgcatcattagccacttacacttcaattattcgtgactaagaattcaggaatctttttcttgattatatagacttctgtacaatctgtctcccttctcttatttacttggttgaaaagaccaataatggataagaatctattatttgagaggttaagatgtgatcacataagtccctgtaattgttgctccttgctaacgttcacttaatgagaaaaaatactaataacataaaatttctgccactttacttcactcattgctcattgaagtaaaaaatgttgtgg

SEQ ID NO: 43823 - DNA, 2583 bp, Zea Mays
gaggttgggcccagattgacagttcttcggcttcttgggctgggcctactctgaccgctcccgccccaccaccgattctcttcctccgctccgttccccacctccgttggtgcgtccaccgaggcggccgggtcggttcgcctccgccgcggtcgatcaatgaatccatgccggcctcgtggcctggttccttgctctccttattctaggaatgtgcaactgagtgactgctgagctgtagataaatgtgaggagttgaggacattatttacaaacaaatggtatgtagtattccagatctgaagaactagacggagcatatacaacagaagtgatagtatatgaataagagactacactgactgaatctaggacttctggattaatggaaaggcttctcaccactttgttagacttgtccttctctggtgttatactgtcatctgataaaataattcaatagcaagctaagcaacagtatacttcatacatggcagagctcaactttgacttctcagggcttaaaattgaatttatatgacatagcttgtttcatttcagatcatctgtttttcttaagtcatcgcttgtttgattgggttttcagttagcaacatcatagttagcagcccaagattaagaattgtagtatcttctgaagattaagacctcagtcattctccgaaagtatcaatacttggaagtatgaaactgtagatcatgaacacagtgtttcgtcaatgttttttgaacaacttatgttatgtgcttgatttttaaaggagtcagttgacaaccagtgttcatttcttttcagctttaatagtaaataactgatcattaggtgcaattttctattcaagcaaccatgttacatgatcagttggtatttatggcacatcaattttgttagttgcgatgctagcattctgaactgtgtcatcatggtttgcttttagaactattatacatagataataattgatttggagaacacttcaattcctgtaacaaacacgcaagttacgctagcatgtcatgtcatgtgcttattaattcaaaaacaataattgtgtgcatgaacaatagatctgtacggattgtttcaatcgtcaaatcatgaagcatccgctgccgtgatggaaatgcattgcattattcatttccgattctttgacatcatacattctatacgtgtatccttactgttttttattaaaagtggtgattatatagatcaaaatataagtagtgccgatatcatcatttgttgtcagctaacggatcattccttgtgccttctaaatatgattgaaattgtcaatagcaaaatgttgaatacctagctattgaaaatttgcattgtcaaggtttcacgcaacataaagatgtggtgctattttttttagttctgttcatttttcatagcaaagtttggagtacttttattttgttcccctttattcaccttaatctatgcagatttattatctatttatatgcagtaataactaaaaacgactgtgctgctatgttataaaatgattctttgtacaagttatttaatctatcatcacaatttatataaggtaatttatggtcatatagtcatgtctgtcagatacagtagtcatttcctcttttggcatatgatatttggttcttcaatagagaaccaatgatatgtatacttattaaccagtcatggctgccgctaggccgctagtactttgtttacttaggattgattttgaagaagattggcaatgcaagtaagcttccaacaggtctgaggtatgtgtctaatgaaagcgtctttcttccatttattggttgaatgcccttgtgtcaaagcatcctatgcatatcaacttgcacttactgaataaggggatataccttattacaattccatgtctaaattaatgacactaaatgaattttgatttatgtatcttagtttgtaaagttgccatgtcgctaatattcgacagctgtttttgttacagcatataaaatggacttgatgcatcactctttttagaaaggtaaaacctgagctcaccaaacactttctagctctgccttgagggaagaatagcaccattgaaaggacaatgcaaacaccaaacaaaaagggcgaagcgcagcaaaggggccggaaaagaagtcctcaacgattttctgttaattgaatgatatggcatcctagagtttgttgagaaacataggtgccattatatttgtctgaagtcccaaagctctcaatctattatgcctacaaggctagctgcatatgcatcattagccacttacacttcaattattcgtgactaagaattcaggaatctttttcttgattatatagacttctgtacaatctgtctcccttctcttatttacttggttgaaaagaccaataatggataagaatctattatttgagaggttaagatgtgatcacataagtccctgtaattgttgctccttgctaacgttcacttaatgagaaaaaatactaataacataaaatttctgccactttacttcactcattgctcattgaagtaaaaaatgttgtgg

SEQ ID NO: 43824 - DNA, 2666 bp, Zea Mays
gaggttgggcccagattgacagttcttcggcttcttgggctgggcctactctgaccgctcccgccccaccaccgattctcttcctccgctccgttccccacctccgttggtgcgtccaccgaggcggccgggtcggttcgcctccgccgcggtcgatcaatgaatccatgccggcctcgtggcctggttccttgctctccttattctaggaatgtgcaactgagtgactgctgagctgtagataaatgtgaggagttgaggacattatttacaaacaaatggtatgtagtattccagatctgaagaactagacggagcatatacaacagaagtgatagtatatgaataacagatccagtatcagtggcttccacatgcgtgaagtttaggcgaaggaataaccgaggcaagctttgccctgtatcttgcagagagactacactgactgaatctaggacttctggattaatggaaaggcttctcaccactttgttagacttgtccttctctggtgttatactgtcatctgataaaataattcaatagcaagctaagcaacagtatacttcatacatggcagagctcaactttgacttctcagggcttaaaattgaatttatatgacatagcttgtttcatttcagatcatctgtttttcttaagtcatcgcttgtttgattgggttttcagttagcaacatcatagttagcagcccaagattaagaattgtagtatcttctgaagattaagacctcagtcattctccgaaagtatcaatacttggaagtatgaaactgtagatcatgaacacagtgtttcgtcaatgttttttgaacaacttatgttatgtgcttgatttttaaaggagtcagttgacaaccagtgttcatttcttttcagctttaatagtaaataactgatcattaggtgcaattttctattcaagcaaccatgttacatgatcagttggtatttatggcacatcaattttgttagttgcgatgctagcattctgaactgtgtcatcatggtttgcttttagaactattatacatagataataattgatttggagaacacttcaattcctgtaacaaacacgcaagttacgctagcatgtcatgtcatgtgcttattaattcaaaaacaataattgtgtgcatgaacaatagatctgtacggattgtttcaatcgtcaaatcatgaagcatccgctgccgtgatggaaatgcattgcattattcatttccgattctttgacatcatacattctatacgtgtatccttactgttttttattaaaagtggtgattatatagatcaaaatataagtagtgccgatatcatcatttgttgtcagctaacggatcattccttgtgccttctaaatatgattgaaattgtcaatagcaaaatgttgaatacctagctattgaaaatttgcattgtcaaggtttcacgcaacataaagatgtggtgctattttttttagttctgttcatttttcatagcaaagtttggagtacttttattttgttcccctttattcaccttaatctatgcagatttattatctatttatatgcagtaataactaaaaacgactgtgctgctatgttataaaatgattctttgtacaagttatttaatctatcatcacaatttatataaggtaatttatggtcatatagtcatgtctgtcagatacagtagtcatttcctcttttggcatatgatatttggttcttcaatagagaaccaatgatatgtatacttattaaccagtcatggctgccgctaggccgctagtactttgtttacttaggattgattttgaagaagattggcaatgcaagtaagcttccaacaggtctgaggtatgtgtctaatgaaagcgtctttcttccatttattggttgaatgcccttgtgtcaaagcatcctatgcatatcaacttgcacttactgaataaggggatataccttattacaattccatgtctaaattaatgacactaaatgaattttgatttatgtatcttagtttgtaaagttgccatgtcgctaatattcgacagctgtttttgttacagcatataaaatggacttgatgcatcactctttttagaaaggtaaaacctgagctcaccaaacactttctagctctgccttgagggaagaatagcaccattgaaaggacaatgcaaacaccaaacaaaaagggcgaagcgcagcaaaggggccggaaaagaagtcctcaacgattttctgttaattgaatgatatggcatcctagagtttgttgagaaacataggtgccattatatttgtctgaagtcccaaagctctcaatctattatgcctacaaggctagctgcatatgcatcattagccacttacacttcaattattcgtgactaagaattcaggaatctttttcttgattatatagacttctgtacaatctgtctcccttctcttatttacttggttgaaaagaccaataatggataagaatctattatttgagaggttaagatgtgatcacataagtccctgtaattgttgctccttgctaacgttcacttaatgagaaaaaatactaataacataaaatttctgccactttacttcactcattgctcattgaagtaaaaaatgttgtgg

SEQ ID NO: 43825 - DNA, 1213 bp, Zea Mays
gaggttgggcccagattgacagttcttcggcttcttgggctgggcctactctgaccgctcccgccccaccaccgattctcttcctccgctccgttccccacctccgttggtgcgtccaccgaggcggccgggtcggttcgcctccgccgcggtcgatcaatgaatccatgccggcctcgtggcctggttccttgctctccttattctaggaatgtgcaactgagtgactgctgagctgtagataaatgtgaggagttgaggacattatttacaaacaaatggtatgtagtattccagatctgaagaactagacggagcatatacaacagaagtgatagtatatgaatagccgctagtactttgtttacttaggattgattttgaagaagattggcaatgcaagtaagcttccaacaggtctgaggtatgtgtctaatgaaagcgtctttcttccatttattggttgaatgcccttgtgtcaaagcatcctatgcatatcaacttgcacttactgaataaggggatataccttattacaattccatgtctaaattaatgacactaaatgaattttgatttatgtatcttagtttgtaaagttgccatgtcgctaatattcgacagctgtttttgttacagcatataaaatggacttgatgcatcactctttttagaaaggtaaaacctgagctcaccaaacactttctagctctgccttgagggaagaatagcaccattgaaaggacaatgcaaacaccaaacaaaaagggcgaagcgcagcaaaggggccggaaaagaagtcctcaacgattttctgttaattgaatgatatggcatcctagagtttgttgagaaacataggtgccattatatttgtctgaagtcccaaagctctcaatctattatgcctacaaggctagctgcatatgcatcattagccacttacacttcaattattcgtgactaagaattcaggaatctttttcttgattatatagacttctgtacaatctgtctcccttctcttatttacttggttgaaaagaccaataatggataagaatctattatttgagaggttaagatgtgatcacataagtccctgtaattgttgctccttgctaacgttcacttaatgagaaaaaatactaataacataaaatttctgccactttacttcactcattgctcattgaagtaaaaaatgttgtgg

SEQ ID NO: 43826 - DNA, 2368 bp, Zea Mays
gaggttgggcccagattgacagttcttcggcttcttgggctgggcctactctgaccgctcccgccccaccaccgattctcttcctccgctccgttccccacctccgttggtgcgtccaccgaggcggccgggtcggttcgcctccgccgcggtcgatcaatgaatccatgccggcctcgtggcctggttccttgctctccttattctaggaatgtgcaactgagtgactgctgagctgtagataaatgtgaggagttgaggacattatttacaaacaaatggtatgtagtattccagatctgaagaactagacggagcatatacaacagaagtgatagtatatgaataagagactacactgactgaatctaggacttctggattaatggaaaggcttctcaccactttgttagacttgtccttctctggtgttatactgtcatctgataaaataattcaatagcaagctaagcaacagtatacttcatacatggcagagctcaactttgacttctcagggcttaaaattgaatttatatgacatagcttgtttcatttcagatcatctgtttttcttaagtcatcgcttgtttgattgggttttcagttagcaacatcatagttagcagcccaagattaagaattgtagtatcttctgaagattaagacctcagtcattctccgaaagtatcaatacttggaagtatgaaactgtagatcatgaacacagtgtttcgtcaatgttttttgaacaacttatgttatgtgcttgatttttaaaggagtcagttgacaaccagtgttcatttcttttcagctttaatagtaaataactgatcattaggtgcaattttctattcaagcaaccatgttacatgatcagttggtatttatggcacatcaattttgttagttgcgatgctagcattctgaactgtgtcatcatggtttgcttttagaactattatacatagataataattgatttggagaacacttcaattcctgtaacaaacacgcaagttacgctagcatgtcatgtcatgtgcttattaattcaaaaacaataattgtgtgcatgaacaatagatctgtacggattgtttcaatcgtcaaatcatgaagcatccgctgccgtgatggaaatgcattgcattattcatttccgattctttgacatcatacattctatacgtgtatccttactgttttttattaaaagtggtgattatatagatcaaaatataagtagtgccgatatcatcatttgttgtcagctaacggatcattccttgtgccttctaaatatgattgaaattgtcaatagcaaaatgttgaatacctagctattgaaaatttgcattgtcaaggtttcacgcaacataaagatgtggtgctattttttttagttctgttcatttttcatagcaaagtttggagtacttttattttgttcccctttattcaccttaatctatgcagatttattatctatttatatgcagtaataactaaaaacgactgtgctgctatgttataaaatgattctttgtacaagttatttaatctatcatcacaatttatataaggtaatttatggtcatatagtcatgtctgtcagatacagtagtcatttcctcttttggcatatgatatttggttcttcaatagagaaccaatgatatgtatacttattaaccagtcatggctgccgctaggccgctagtactttgtttacttaggattgattttgaagaagattggcaatgcaagtaagcttccaacaggtctgagcatataaaatggacttgatgcatcactctttttagaaaggtaaaacctgagctcaccaaacactttctagctctgccttgagggaagaatagcaccattgaaaggacaatgcaaacaccaaacaaaaagggcgaagcgcagcaaaggggccggaaaagaagtcctcaacgattttctgttaattgaatgatatggcatcctagagtttgttgagaaacataggtgccattatatttgtctgaagtcccaaagctctcaatctattatgcctacaaggctagctgcatatgcatcattagccacttacacttcaattattcgtgactaagaattcaggaatctttttcttgattatatagacttctgtacaatctgtctcccttctcttatttacttggttgaaaagaccaataatggataagaatctattatttgagaggttaagatgtgatcacataagtccctgtaattgttgctccttgctaacgttcacttaatgagaaaaaatactaataacataaaatttctgccactttacttcactcattgctcattgaagtaaaaaatgttgtgg

SEQ ID NO: 43827 - DNA, 714 bp, Zea Mays
ccccaaccgagatcctaggagataaatcagagtcccggcgacctttttcccatatattaccctctcacaagccctgaccaccaaatcatctaccgtcgggtgctatcaccaccgcgaaatcgagatttagagagcggagatccgtcgttggcgagcttgcaaatcgcggttacctaggtcttggcgtggtgttctggtgcggtggcatggtgcctaggagcctcgactgccatcaattccgccgctggaccgttgaagcttgggcgattgctcgccggacttgggaattgtcgttgtgccgtgctgcgtcggggaccgagctcatctcaatcaaatcaccggtgtctggacaagcagcaacagtttctgtgatgactgactggtgtgccttttatggctgcagattcctcgactggcagttcgcattgatcttcggtccaacagtcattttgcccccaaaagagtcgacatatattttctactcgttgaggtttgttgctacttctttccttttaaagtatgcttctttccctcccaaatatatcaacttctatcgattcagtcattttttaagttttgcttggtgatataatattggtgctcctttaatgaatggtcaaatgtgtttgtttttagtcatactatgatgaaatgttggactaaattggcatgtgtttatattaaaaaattaattataatattcttttatgcgag

SEQ ID NO: 43828 - DNA, 1251 bp, Zea Mays
ggattatcgccgccgtcatcggggttgttatcgacctccctcttcccccaaccgagatcctaggagataaatcagagtcccggcgacctttttcccatatattaccctctcacaagccctgaccaccaaatcatctaccgtcgggtgctatcaccaccgcgaaatcgagatttagagagcggagatccgtcgttggcgagcttgcaaatcgcggttacctaggtcttggcgtggtgttctggtgcggtggcatggtgcctaggagcctcgactgccatcaattccgccgctggaccgttgaagcttgggcgattgctcgccggacttgggaattgtcgttgtgccgtgctgcgtcggggaccgagctcatctcaatcaaatcaccggtgggcggtcaacctgtttgcgatggttggagcatcatttgtgcgtagtcggatttgggccgttttctccgtcatcgtcgacgacgccgtcggggtgatgcctcgcaccgccgtgctagtagctgaggaggaagagggagtcctgaccatggatcatcttgtggagggcagggattaatgggtggcgtggtgcattgcgggccgttgatccccctctgggtggctcagattagaaggataggtacccctcgccacattcagtcaacaccggtgatctcgatccaacaggttgaaatagatctagggtagatattatccccaccgatgatctctgtaacaccctgaaatcctattctaggatttagtataacttttcaaatgatctaaaccaagatgtcttttaatagaatattcttacctttaaaaaatatttttttcctataacaaataaatggtaatgttaatctttgagtgttcaatttttttgaaactcagaaaataagtaatgaattaaaccttcattaattattggtctttttatgaatcgtgtattatagaagcaattatttaaataaaaaaaagtaagtaaataaaacatgtacttacatcacgtcgggtctttgagttgtgcatttggtgtgaatttaaatattaaaacccagttgaatttgaaaacttttagtacgacactgaacacaggaaataaagaaaaataggaatctctactaactattttaagggctcagtgtagaccgcccccgcccccgaaaaccacgcgcccgcctccgcctgcccgtacgccggaaaccgcggaggctgcaccgcgaacgccgcgaaccgcccaacaaacgcccgcacgccgcaa

SEQ ID NO: 43829 - DNA, 903 bp, Zea Mays
gctcctccttcactaccgtaaccgtaacaaacaaccagcgcaggattatcaccgccatcgtcagggttgttatcggcctccctcttcccccaaccgagatcctaggagataaatcagagccccagcgaccttttccccctctattaccctctcgcgagccctgaccagcaaatcatctaccgtcgggtgctatcaccaccgcgaaatcgagatttagagaggggagatccgccgctagtgagctcgcaaatcgcggttacccaggtcttggcatggtgttctggtgtggtggcacggtgcctaggagccatggctgccatcccgccgctggaccattggcgcttgggcgattgctcgccgggcttgggaattaccgttgtgccatgctatgtcggggaccaagctcacctcaatcaaatcaccggtgaagagcaggtggcccaggaggaggactactatgaggagtgttgggggtcttcttccctgccaaaggtcctcaaggaaaaaacaccttcggacaagacaatacaaaggcatacacgacatgatgacacggatggaagccgaagctatggctgaaggagcttcggcttagtaatatgacgaagccaaaggtcgtcaccgactcaagggaaaaagactgtttagtccttgatcactcacattatgattgcatgtaaatgttggggacataaatgtaattatttcccgggctgtgtcccgcgcttataaatagatgaatagtacccccgtactgttcacgctggattgtaatctctctcatgcaccatctttgcattctcatcttctagcgaaccgaaggtacaattgtattaaataccattaatgtcaattcttacatgtgaatatgaatatgaataaattgtgaggatctgatcatta

SEQ ID NO: 43830 - DNA, 2335 bp, Zea Mays
cccatggtaccgtctgcccctgtttatactgtgtattcagtttatttaggattttgctgtagtctttaggcgattgcttaatgaaatgttttagcctgacagactaaaccataccttaaagtaggaatactggatatcaagcgtagttgctatccggtctatacaacaacagcaaaaagtattttatcccaagcaagtttagaagtcaagattcggcacatggatatctatttttcatgcacccttcacatcctttcaaatctcctttaaatgtctcttcctatatcaactttggtcttgctcttcctctcctctcattacggcctcgtcttaggatccactacacactgatgtctctggaggtctccgttggacatatccaaaccatcttaaccgttgttggacaaacttttctgcaattggtgctaccctaccctatcacatatatcattgttccagacttgatctcttcatgtatgaccacagatccatcattcgggacttgatctcttcttgtacgaccacaaattcaatgaaacataggtattctaacacttatctgctgaacatgtcatctttttgtaggccaacattgtacaccatacaacataagcacatagcagttgacttggacagccagaactttggaaatggcaagatcaccaaaaggtaggaacctccaagctcgtcaacgtaggtcagcttcttcagatgtgcccttgagctcctgtgagacgaaaggaacaagcaaaggaaatgatgtgtcagtgacatctgagaagaatgaatggaaaggagcaacttgcccagtttgcttggagcatccacatgatgctgttctcctcctgtgtacctctcaccacaagggctgccggccatatatgtgtggtaccaactaccgtcattccaactgccttgaacactttaaaggagcttatgcaaaggaaaaaatggctcttggtgtttcagctgagtctgcatctggccttccattatcctcaaacacactgccatcaagcaaccagccatgtgtaatggaacttgcctgccctctgtgccgtggagaggttaaaggatggactgtggttgagcctgctcgtcagtatctgaaccggaaaaggagaaattgcatgcatgatgggtgctcattccatggctcgtataaggagctttgcaagcatgtgaaatcgaagcaccctacagcaaaacctcgtgaagttgatcctgctactgcagatgagtggaaaaggtttgaatgtgagagagagcggcaggatgccatcagcactatcaggtccatgaacccaggatctgtgatcatgggggattatgtccttgagttgaatggtggtggcaacaaccatttgctctcagatggagataactttgacttaggggaaaggctcaacttcttcacatccttagatcgtactttgaatgagagaattgacctgtacgactcgtcagatggtttggatgaggggtttgacttcttggcatccctgtttacccatggcaggagaatctctactggaggctcattgagcagggcttatagaagacacagggacaggcctagacgttcaacgaattctgctgatgcttctgacattcagcatgagtcagctagcactcaaaggggacagcgtgctgttcgggctacaggcaggacttcacggcgccaccaccacctacgcgaggcagctgagagatgaaatcatttttagaggcggggtgctttttcatgctatccatgtgcaggggacgcaaaataacacaccatggtatgttgctgctctagtggtcggaggtccgtcagattcttccttttttttgtcccattgttgagacagcaaccgaggatataagattggatggagatgaggtctctgtttggcttgtgctgatgcctgcatgatgtgctctgcgatgtgcatccagttttgggatcaagcagctccacttttccggtgctgcctttgcatggattttgtgaatgcccttgccttgagtttcctttccctttctgttgatcaaaggaaacttcaaacagattgttttggccgcaattgctattcgaaacttagatgtcagtctcatgaacagcgtacacattactgcttatgttctggtcttgtagttttgtatccatgcactgtggcttttggatggcttggttattcacttggtagtaatgaaactgtcagctgtgtctgtgtcagctattgcttatggaactgatacctgtagttctattcatgtgcttaaaatgtgtcacatttgtttggcagtataaaaatcgatcgtatattcaggctggcactacatttcgatc

SEQ ID NO: 43831 - DNA, 2255 bp, Zea Mays
cccatggtaccgtctgcccctgtttatactgtgtattcagtttatttaggattttgctgtagtctttaggcgattgcttaatgaaatgttttagcctgacagactaaaccataccttaaagtaggaatactggatatcaagcgtagttgctatccggtctatacaacaacagcaaaaagtattttatcccaagcaagtttagaagtcaagattcggcacatggatatctatttttcatgcacccttcacatcctttcaaatctcctttaaatgtctcttcctatatcaactttggtcttgctcttcctctcctctcattacggcctcgtcttaggatccactacacactgatgtctctggaggtctccgttggacatatccaaaccatcttaaccgttgttggacaaacttttctgcaattggtgctaccctaccctatcacatatatcattgttccagacttgatctcttcatgtatgaccacagatccatcattcgggacttgatctcttcttgtacgaccacaaattcaatgaaacatagttgacttggacagccagaactttggaaatggcaagatcaccaaaaggtaggaacctccaagctcgtcaacgtaggtcagcttcttcagatgtgcccttgagctcctgtgagacgaaaggaacaagcaaaggaaatgatgtgtcagtgacatctgagaagaatgaatggaaaggagcaacttgcccagtttgcttggagcatccacatgatgctgttctcctcctgtgtacctctcaccacaagggctgccggccatatatgtgtggtaccaactaccgtcattccaactgccttgaacactttaaaggagcttatgcaaaggaaaaaatggctcttggtgtttcagctgagtctgcatctggccttccattatcctcaaacacactgccatcaagcaaccagccatgtgtaatggaacttgcctgccctctgtgccgtggagaggttaaaggatggactgtggttgagcctgctcgtcagtatctgaaccggaaaaggagaaattgcatgcatgatgggtgctcattccatggctcgtataaggagctttgcaagcatgtgaaatcgaagcaccctacagcaaaacctcgtgaagttgatcctgctactgcagatgagtggaaaaggtttgaatgtgagagagagcggcaggatgccatcagcactatcaggtccatgaacccaggatctgtgatcatgggggattatgtccttgagttgaatggtggtggcaacaaccatttgctctcagatggagataactttgacttaggggaaaggctcaacttcttcacatccttagatcgtactttgaatgagagaattgacctgtacgactcgtcagatggtttggatgaggggtttgacttcttggcatccctgtttacccatggcaggagaatctctactggaggctcattgagcagggcttatagaagacacagggacaggcctagacgttcaacgaattctgctgatgcttctgacattcagcatgagtcagctagcactcaaaggggacagcgtgctgttcgggctacaggcaggacttcacggcgccaccaccacctacgcgaggcagctgagagatgaaatcatttttagaggcggggtgctttttcatgctatccatgtgcaggggacgcaaaataacacaccatggtatgttgctgctctagtggtcggaggtccgtcagattcttccttttttttgtcccattgttgagacagcaaccgaggatataagattggatggagatgaggtctctgtttggcttgtgctgatgcctgcatgatgtgctctgcgatgtgcatccagttttgggatcaagcagctccacttttccggtgctgcctttgcatggattttgtgaatgcccttgccttgagtttcctttccctttctgttgatcaaaggaaacttcaaacagattgttttggccgcaattgctattcgaaacttagatgtcagtctcatgaacagcgtacacattactgcttatgttctggtcttgtagttttgtatccatgcactgtggcttttggatggcttggttattcacttggtagtaatgaaactgtcagctgtgtctgtgtcagctattgcttatggaactgatacctgtagttctattcatgtgcttaaaatgtgtcacatttgtttggcagtataaaaatcgatcgtatattcaggctggcactacatttcgatc

SEQ ID NO: 43832 - DNA, 1556 bp, Zea Mays
gcgtttttttttcaaaaggtttatacatgtgtatacccatggtaccgtctgcccctgtttatactgtgtattcagtttatttaggattttgctgtagtctttaggcgattgcttaatgaaatgttttagcctgacagactaaaccataccttaaagtaggaatactggatatcaagcgtagttgctatccggtctatacaacaacagcaaaaagtattttatcccaagcaagtttagaagtcaagattcggcacatggatatctatttttcatgcacccttcacatcctttcaaatctcctttaaatgtctcttcctatatcaactttggtcttgctcttcctctcctctcattacggcctcgtcttaggatccactacacactgatgtctctggaggtctccgttggacatatccaaaccatcttaaccgttgttggacaaacttttctgcaattggtgctaccctaccctatcacatatatcattgttccagacttgatctcttcatgtatgaccacagatccatcattcgggacttgatctcttcttgtacgaccacaaattcaatgaaacataggtattctaacacttatctgctgaacatgtcatctttttgtaggccaacattgtacaccatacaacataagcacatagcaggtcttatcgccttcctataaaaacttttcttttagcttttgtgtatctgctgaacatgtcgtctttttgtaggctgaacataccatacaacatagcaggtctaatcgctgtcctataaaacttgcattttagcttttgtggtaccttgttgccaattgccatatcactattttttgacataatggtactaagggtctgtttggctgagctgtggctgtgaaaaaaaactgttgtgggttgtgagctgtgaaaaaactgttgtgggatatgagttgtgaaaaaagcagaaagcccgtttggttcgaacaactgtgaaactgtaggtttgctatgaaatgtctgtaatgcccctagccttgtaggagactgatgatattcaagttgattgtaaacctttattttctgcactaattgacaaggaaatttttttcataatagaaacttgttttttttataagttatgcattcaccattaacatacgtttcacataaataaatcgatatgatccacaatatcattcttcaacataactatatccctttcacactactcaaagcatcagctatcctattgcgaatggtattcatggtattctcattctttccctctggattgtcatctccttgtgcttgtgacgtggcactctgttgtagcaagtactcctcatcagcatcacatctaccagacaacatgtcttgtgaattgctgtcatgaataaaattgtgcaacaccatgcaaactagaattatatgcttctgtgtaagcgtagcaaaacttggaatgcctttcaaaatacaacacttctgcttcaagactccaaaagtccgcccaatgacttttcggagagattaatgtaagaaattgaacacctcatacttctcttgagaaggatggcca

SEQ ID NO: 43833 - DNA, 1715 bp, Zea Mays
atttgaagtctgaataagctcttggctcagccaatgatgttttgagatttgtttggagggaggttctggacagcaccggatagcagtaaccatatcatgtctcaaagccggaggcaagagcaagagctccaacttgtatcagaggattgcagcacaaagaggaagcatggggaagacaaggatataatgggagaggtaaccaagacccatgaagctatacaatcattggataagtccatctcaacgctgcagatggagcttgcagcaaagcggagcacacttgagctgctccgatctagtggttcaccagtaacctttgaaactagccaaccaaggaaaaaggcatttgttgtcattggagtcaatactgcattcagcagccgcaagcgccgtgattctgtccgggagacatggatgcctcaagtgctacatctgacagtatactggacaaagctatagattcagaggacgctcagcatcatgactttcttaggctggaccatgttgagggataccatgaactctcagctaagacaaaaatattcttctctactgctcttggcatctgggatgctgacttctacgtcaaggttgatgatgatgtgcatgtaaacttaggaatgcttgccactacccttgctcggcataaattgaaaccaagaacttatattggctgcatgaagtcaggcccagttctcgctgacaagaatgttaagtaccatgaacctgagtactggaaatttggggaggaaggaaataaatacttccgtcatgccacggggcagatatatgccatttcgaaagatctcgctacttatatttcaatcaaccagcctatcttgcacaaatatgcaaatgaagacgtgtcgcttggatcatggttcattggtttggaagttaatcacattgatgaaaggaacatgtgctgtggaactccaccagattgtgagtggaaagggcaagctggtaatgtctgtgtagcgtccttcgattggagctgcagtggcatatgcaagtctgttgagaggatcaaagatgtacatgctcgctgtggtgagggggattcagcagtttggagtgctcttttctagcgcataccttctttgcccgtaaatatgtagcatacttgctaagctctcgcggcggacacctgcataggcaactcaagtaaacttgacaaaaaccaaagatcgtggagtatgatctgaaactgcagaaacagtatgttgcttggaaatattctgcaacaacataattttgctccgtcactgttcgtggcttttggcggtgttagggactccaaagtagggttgcaactgatcttacatgtaggggggagagtttcccagctgatgacgcgtatggaagtaagagatcatgtagaggggcattgttttatgcaaattttgacattcttttgcgagtttcacacattcagtcgttcatgagggtgtaccatgatgtaacatatgagaagccgtggacggatgttggtttagcaaatcttgttccaaaagcagtgattagtgctacaaagcaaagggtactaacgtgccaagatcatgggttttgtaccgaatcactatattgagggcgcgtttggattggagggaaaacggaggaaaattacaggaatagcagttctttggcaagtctttcgcacagtacaggtcgtgacaaaaaatcagataggaaggtgtactttttgaggaaaa

SEQ ID NO: 43834 - DNA, 1801 bp, Zea Mays
ctgcagtctgcagagtttcaggcggccagcttcctcctccccactcgttcggctcaccacctcggtgaccgctgcccttgacgcctgcttcggacgcggcctggccctgaaatctccgtgcgtgtttggccgaaatccacgggagggtgctcgtctttgctgagctgctccggcctccggagcggagctctgcctacttgagttcaggcttgttccgccatccgaggacaagattcggagcgtcgccgaagggaggcgatgaaggggaaaggcggggcgatggaccgcaggtcctccgccaggtggagggtgttgctgctctgcgcattcagcttcggcctcggcatgctcttcaccgaccggttctggacagcaccggatagcagtaaccatatcatgtctcaaagccggaggcaagagcaagagctccaacttgtatcagaggattgcagcacaaagaggaagcatggggaagacaaggatataatgggagaggtaaccaagacccatgaagctatacaatcattggataagtccatctcaacgctgcagatggagcttgcagcaaagcggagcacacttgagctgctccgatctagtggttcaccagtaacctttgaaactagccaaccaaggaaaaaggcatttgttgtcattggagtcaatactgcattcagcagccgcaagcgccgtgattctgtccgggagacatggatgcctcaagtgctacatctgacagtatactggacaaagctatagattcagaggacgctcagcatcatgactttcttaggctggaccatgttgagggataccatgaactctcagctaagacaaaaatattcttctctactgctcttggcatctgggatgctgacttctacgtcaaggttgatgatgatgtgcatgtaaacttaggcctatcttgcacaaatatgcaaatgaagacgtgtcgcttggatcatggttcattggtttggaagttaatcacattgatgaaaggaacatgtgctgtggaactccaccagattgtgagtggaaagggcaagctggtaatgtctgtgtagcgtccttcgattggagctgcagtggcatatgcaagtctgttgagaggatcaaagatgtacatgctcgctgtggtgagggggattcagcagtttggagtgctcttttctagcgcataccttctttgcccgtaaatatgtagcatacttgctaagctctcgcggcggacacctgcataggcaactcaagtaaacttgacaaaaaccaaagatcgtggagtatgatctgaaactgcagaaacagtatgttgcttggaaatattctgcaacaacataattttgctccgtcactgttcgtggcttttggcggtgttagggactccaaagtagggttgcaactgatcttacatgtaggggggagagtttcccagctgatgacgcgtatggaagtaagagatcatgtagaggggcattgttttatgcaaattttgacattcttttgcgagtttcacacattcagtcgttcatgagggtgtaccatgatgtaacatatgagaagccgtggacggatgttggtttagcaaatcttgttccaaaagcagtgattagtgctacaaagcaaagggtactaacgtgccaagatcatgggttttgtaccgaatcactatattgagggcgcgtttggattggagggaaaacggaggaaaattacaggaatagcagttctttggcaagtctttcgcacagtacaggtcgtgacaaaaaatcagataggaaggtgtactttttgaggaaaa

SEQ ID NO: 43835 - DNA, 2059 bp, Zea Mays
cacgcgctccactgcagtctgcagagtttcaggcggccagcttcctcctccccactcgttcggctcaccacctcggtgaccgctgcccttgacgcctgcttcggacgcggcctggccctgaaatctccgtgcgtgtttggccgaaatccacgggagggtgctcgtctttgctgagctgctccggcctccggagcggagctctgcctacttgagttcaggcttgttccgccatccgaggacaagattcggagcgtcgccgaagggaggcgatgaaggggaaaggcggggcgatggaccgcaggtcctccgccaggtggagggtgttgctgctctgcgcattcagcttcggcctcggcatgctcttcaccgaccggttctggacagcaccggatagcagtaaccatatcatgtctcaaagccggaggcaagagcaagagctccaacttgtatcagaggattgcagcacaaagaggaagcatggggaagacaaggatataatgggagaggtaaccaagacccatgaagctatacaatggagcttgcagcaaagcggagcacacttgagctgctccgatctagtggttcaccagtaacctttgaaactagccaaccaaggaaaaaggcatttgttgtcattggagtcaatactgcattcagcagccgcaagcgccgtgattctgtccgggagacatggatgcctcaaggagaaaaactgcaacaattagaagaacaaaagggaatagtaatccgcttcactatcgggcacagtgctacatctgacagtatactggacaaagctatagattcagaggacgctcagcatcatgactttcttaggctggaccatgttgagggataccatgaactctcagctaagacaaaaatattcttctctactgctcttggcatctgggatgctgacttctacgtcaaggttgatgatgatgtgcatgtaaacttaggaatgcttgccactacccttgctcggcataaattgaaaccaagaacttatattggctgcatgaagtcaggcccagttctcgctgacaagaatgttaagtaccatgaacctgagtactggaaatttggggaggaaggaaataaatacttccgtcatgccacggggcagatatatgccatttcgaaagatctcgctacttatatttcaatcaaccagcctatcttgcacaaatatgcaaatgaagacgtgtcgcttggatcatggttcattggtttggaagttaatcacattgatgaaaggaacatgtgctgtggaactccaccagattgtgagtggaaagggcaagctggtaatgtctgtgtagcgtccttcgattggagctgcagtggcatatgcaagtctgttgagaggatcaaagatgtacatgctcgctgtggtgagggggattcagcagtttggagtgctcttttctagcgcataccttctttgcccgtaaatatgtagcatacttgctaagctctcgcggcggacacctgcataggcaactcaagtaaacttgacaaaaaccaaagatcgtggagtatgatctgaaactgcagaaacagtatgttgcttggaaatattctgcaacaacataattttgctccgtcactgttcgtggcttttggcggtgttagggactccaaagtagggttgcaactgatcttacatgtaggggggagagtttcccagctgatgacgcgtatggaagtaagagatcatgtagaggggcattgttttatgcaaattttgacattcttttgcgagtttcacacattcagtcgttcatgagggtgtaccatgatgtaacatatgagaagccgtggacggatgttggtttagcaaatcttgttccaaaagcagtgattagtgctacaaagcaaagggtactaacgtgccaagatcatgggttttgtaccgaatcactatattgagggcgcgtttggattggagggaaaacggaggaaaattacaggaatagcagttctttggcaagtctttcgcacagtacaggtcgtgacaaaaaatcagataggaaggtgtactttttgaggaaaa

SEQ ID NO: 43836 - DNA, 2085 bp, Zea Mays
gcacatcacgcgctccactgcagtctgcagagtttcaggcggccagcttcctcctccccactcgttcggctcaccacctcggtgaccgctgcccttgacgcctgcttcggacgcggcctggccctgaaatctccgtgcgtgtttggccgaaatccacgggagggtgctcgtctttgctgagctgctccggcctccggagcggagctctgcctacttgagttcaggcttgttccgccatccgaggacaagattcggagcgtcgccgaagggaggcgatgaaggggaaaggcggggcgatggaccgcaggtcctccgccaggtggagggtgttgctgctctgcgcattcagcttcggcctcggcatgctcttcaccgaccgcaccggatagcagtaaccatatcatgtctcaaagccggaggcaagagcaagagctccaacttgtatcagaggattgcagcacaaagaggaagcatggggaagacaaggatataatgggagaggtaaccaagacccatgaagctatacaatcattggataagtccatctcaacgctgcagatggagcttgcagcaaagcggagcacacttgagctgctccgatctagtggttcaccagtaacctttgaaactagccaaccaaggaaaaaggcatttgttgtcattggagtcaatactgcattcagcagccgcaagcgccgtgattctgtccgggagacatggatgcctcaaggagaaaaactgcaacaattagaagaacaaaagggaatagtaatccgcttcactatcgggcacagtgctacatctgacagtatactggacaaagctatagattcagaggacgctcagcatcatgactttcttaggctggaccatgttgagggataccatgaactctcagctaagacaaaaatattcttctctactgctcttggcatctgggatgctgacttctacgtcaaggttgatgatgatgtgcatgtaaacttaggaatgcttgccactacccttgctcggcataaattgaaaccaagaacttatattggctgcatgaagtcaggcccagttctcgctgacaagaatgttaagtaccatgaacctgagtactggaaatttggggaggaaggaaataaatacttccgtcatgccacggggcagatatatgccatttcgaaagatctcgctacttatatttcaatcaaccagcctatcttgcacaaatatgcaaatgaagacgtgtcgcttggatcatggttcattggtttggaagttaatcacattgatgaaaggaacatgtgctgtggaactccaccagattgtgagtggaaagggcaagctggtaatgtctgtgtagcgtccttcgattggagctgcagtggcatatgcaagtctgttgagaggatcaaagatgtacatgctcgctgtggtgagggggattcagcagtttggagtgctcttttctagcgcataccttctttgcccgtaaatatgtagcatacttgctaagctctcgcggcggacacctgcataggcaactcaagtaaacttgacaaaaaccaaagatcgtggagtatgatctgaaactgcagaaacagtatgttgcttggaaatattctgcaacaacataattttgctccgtcactgttcgtggcttttggcggtgttagggactccaaagtagggttgcaactgatcttacatgtaggggggagagtttcccagctgatgacgcgtatggaagtaagagatcatgtagaggggcattgttttatgcaaattttgacattcttttgcgagtttcacacattcagtcgttcatgagggtgtaccatgatgtaacatatgagaagccgtggacggatgttggtttagcaaatcttgttccaaaagcagtgattagtgctacaaagcaaagggtactaacgtgccaagatcatgggttttgtaccgaatcactatattgagggcgcgtttggattggagggaaaacggaggaaaattacaggaatagcagttctttggcaagtctttcgcacagtacaggtcgtgacaaaaaatcagataggaaggtgtactttttgaggaaaa

SEQ ID NO: 43837 - DNA, 1901 bp, Zea Mays
caaagtgtggggggcaagggcacatcacgcgctccactgcagtctgcagagtttcaggcggccagcttcctcctccccactcgttcggctcaccacctcggtgaccgctgcccttgacgcctgcttcggacgcggcctggccctgaaatctccgtgcgtgtttggccgaaatccacgggagggtgctcgtctttgctgagctgctccggcctccggagcggagctctgcctacttgagttcaggcttgttccgccatccgaggacaagattcggagcgtcgccgaagggaggcgatgaaggggaaaggcggggcgatggaccgcaggtcctccgccaggtggagggtgttgctgctctgcgcattcagcttcggcctcggcatgctcttcaccgaccggttctggacagcaccggatagcagtaaccatatcatgtctcaaagccggaggcaagagcaagagctccaacttgtatcagaggattgcagcacaaagaggaagcatggggaagacaaggatataatgggagaggtaaccaagacccatgaagctatacaatcattggataagtccatctcaacgctgcagatggagcttgcagcaaagcggagcacacttgagctgctccgatctagtggttcaccagtaacctttgaaactagccaaccaaggaaaaaggcatttgttgtcattggagtcaatactgcattcagcagccgcaagcgccgtgattctgtccgggagacatggatgcctcaaggagaaaaactgcaacaattagaagaacaaaagggaatagtaatccgcttcactatcgggcacagtgctacatctgacagtatactggacaaagctatagattcagaggacgctcagcatcatgactttcttaggctggaccatgttgagggataccatgaactctcagctaagacaaaaatattcttctctactgctcttggcatctgggatgctgacttctacgtcaaggttgatgatgatgtgcatgtaaacttaggcctatcttgcacaaatatgcaaatgaagacgtgtcgcttggatcatggttcattggtttggaagttaatcacattgatgaaaggaacatgtgctgtggaactccaccagattgtgagtggaaagggcaagctggtaatgtctgtgtagcgtccttcgattggagctgcagtggcatatgcaagtctgttgagaggatcaaagatgtacatgctcgctgtggtgagggggattcagcagtttggagtgctcttttctagcgcataccttctttgcccgtaaatatgtagcatacttgctaagctctcgcggcggacacctgcataggcaactcaagtaaacttgacaaaaaccaaagatcgtggagtatgatctgaaactgcagaaacagtatgttgcttggaaatattctgcaacaacataattttgctccgtcactgttcgtggcttttggcggtgttagggactccaaagtagggttgcaactgatcttacatgtaggggggagagtttcccagctgatgacgcgtatggaagtaagagatcatgtagaggggcattgttttatgcaaattttgacattcttttgcgagtttcacacattcagtcgttcatgagggtgtaccatgatgtaacatatgagaagccgtggacggatgttggtttagcaaatcttgttccaaaagcagtgattagtgctacaaagcaaagggtactaacgtgccaagatcatgggttttgtaccgaatcactatattgagggcgcgtttggattggagggaaaacggaggaaaattacaggaatagcagttctttggcaagtctttcgcacagtacaggtcgtgacaaaaaatcagataggaaggtgtactttttgaggaaaa

SEQ ID NO: 43838 - DNA, 2113 bp, Zea Mays
ggagtgaagaaaaagaaaagggaacgaaaatgctttcaaaagtgggaagaggaggatgacaacaaagtgtggggggcaagggcacatcacgcgctccactgcagtctgcagagtttcaggcggccagcttcctcctccccactcgttcggctcaccacctcggtgaccgctgcccttgacgcctgcttcggacgcggcctggccctgaaatctccgtgcgtgtttggccgaaatccacgggagggtgctcgtctttgctgagctgctccggcctccggagcggagctctgcctacttgagttcaggcttgttccgccatccgaggacaagattcggagcgtcgccgaagggaggcgatgaaggggaaaggcggggcgatggaccgcaggtcctccgccaggtggagggtgttgctgctctgcgcattcagcttcggcctcggcatgctcttcaccgaccggttctggacagcaccggatagcagtaaccatatcatgtctcaaagccggaggcaagagcaagagctccaacttgtatcagaggattgcagcacaaagaggaagcatggggaagacaaggatataatgggagaggtaaccaagacccatgaagctatacaatcattggataagtccatctcaacgctgcagatggagcttgcagcaaagcggagcacacttgagctgctccgatctagtggttcaccagtaacctttgaaactagccaaccaaggaaaaaggcatttgttgtcattggagtcaatactgcattcagcagccgcaagcgccgtgattctgtccgggagacatggatgcctcaagtgctacatctgacagtatactggacaaagctatagattcagaggacgctcagcatcatgactttcttaggctggaccatgttgagggataccatgaactctcagctaagacaaaaatattcttctctactgctcttggcatctgggatgctgacttctacgtcaaggttgatgatgatgtgcatgtaaacttaggaatgcttgccactacccttgctcggcataaattgaaaccaagaacttatattggctgcatgaagtcaggcccagttctcgctgacaagaatgttaagtaccatgaacctgagtactggaaatttggggaggaaggaaataaatacttccgtcatgccacggggcagatatatgccatttcgaaagatctcgctacttatatttcaatcaaccagcctatcttgcacaaatatgcaaatgaagacgtgtcgcttggatcatggttcattggtttggaagttaatcacattgatgaaaggaacatgtgctgtggaactccaccagattgtgagtggaaagggcaagctggtaatgtctgtgtagcgtccttcgattggagctgcagtggcatatgcaagtctgttgagaggatcaaagatgtacatgctcgctgtggtgagggggattcagcagtttggagtgctcttttctagcgcataccttctttgcccgtaaatatgtagcatacttgctaagctctcgcggcggacacctgcataggcaactcaagtaaacttgacaaaaaccaaagatcgtggagtatgatctgaaactgcagaaacagtatgttgcttggaaatattctgcaacaacataattttgctccgtcactgttcgtggcttttggcggtgttagggactccaaagtagggttgcaactgatcttacatgtaggggggagagtttcccagctgatgacgcgtatggaagtaagagatcatgtagaggggcattgttttatgcaaattttgacattcttttgcgagtttcacacattcagtcgttcatgagggtgtaccatgatgtaacatatgagaagccgtggacggatgttggtttagcaaatcttgttccaaaagcagtgattagtgctacaaagcaaagggtactaacgtgccaagatcatgggttttgtaccgaatcactatattgagggcgcgtttggattggagggaaaacggaggaaaattacaggaatagcagttctttggcaagtctttcgcacagtacaggtcgtgacaaaaaatcagataggaaggtgtactttttgaggaaaa

SEQ ID NO: 43839 - DNA, 1155 bp, Zea Mays
gtcccgtactcgtccaaattctcctcgtctcgtctcccatgtgacccatccaaccgccctctcctctcttcctcttcctcgcaccacctccaccaccaccctcctctcttctcgcctccaccaccaaaaggggtgagaggcacggggaccgcccgcctcgctcgctggcctgcacactggattcggcgccgcggcggtagttgcagcggcggcctggcagggagatgtcttcacgctcggggtactacaagctgaaggttcaatttaccatttatcctctgatcatcgatttgatgcaagtaaagaggaggttgatcgtgtaacaaaatgtggaggtgatgttggaaggctaaatgttgttggtggcgctgagattggtcctcttaggtgttggcctggaggtttgtgcctatctaggtcaataggagatcaagatgttggtgaatttattgttccagttcctcttgtgaagcaagtaaagctgtctactgcgggaggccgacttattattgcaagtgatggtgtttgggatgcattatctccagaagtagcttttaactgttcacgtgaacttcctccagtgcctgcagctgagcaaatcgttaaaactgctgtgcaatcaaaaggactgagggatgataccacctgtattgttgttgatataatagcagagaaaaccaacccttccatgccacttcctagaaggcaaccgggaattggtgtcttcaaaaatatgtttggcaagaaaaaatcatcggattcatcatcacattcccatgcagatagagaatatatggatccagatatcttggaggaaatatttgaggatgggtgtgcgcttctttctagacggctggattctgaataccctgttcgaaatatgttcaaactcttcatatgtgccgtttgtcaaatagagttaaagccaaaccaagggatatctgtacatgaagattcatcagaacctgggagcttgcgtcgctgggatggtccattcctttgccagagctgtcaggaaaagaaagaagcaatggagggaaagcgtcgttcacgaggttcatcaagaaacagtgggtcaagtgaatagctgccgtgtgtagagtgatcagttcataggttgcgaagaggattggactaaggcactgaggatgcaat

SEQ ID NO: 43840 - DNA, 1878 bp, Zea Mays
gtcccgtactcgtccaaattctcctcgtctcgtctcccatgtgacccatccaaccgccctctcctctcttcctcttcctcgcaccacctccaccaccaccctcctctcttctcgcctccaccaccaaaaggggtgagaggcacggggaccgcccgcctcgctcgctggcctgcacactggattcggcgccgcggcggtagttgcagcggcggcctggcagggagatgtcttcacgctcggggtactacaagctgaaggttcaatttaccatttatcctctgatcatcgatttgatgcaagtaaagaggaggttgatcgtgtaacaaaatgtggaggtgatgttggaaggctaaatgttgttggtggcgctgagattggtcctcttaggtgttggcctggaggtttgtgcctatctaggtcaataggagatcaagatgttggtgaatttattgttccagttcctcttgtgaagcaagtaaagctgtctactgcgggaggccgacttattattgcaagtgatggtgtttgggatgcattatctccagaagtagcttttaactgttcacgtgaacttcctccagtgcctgcagctgagcaaatcgttaaaactgctgtgcaatcaaaaggactgagggatgataccacctgtattgttgttgatataatagcagagaaaaccaacccttccatgccacttcctagaaggcaaccgggaattggtgtcttcaaaaatatgtttggcaagaaaaaatcatcggattcatcatcacattcccatgcagatagagaatatatggatccagatatcttggaggaaatatttgaggatgggtgtgcgcttctttctagacggctggattctgaataccctgttcgaaatatgttcaaactcttcatatgtgccgtttgtcaaatagagttaaagccaaaccaagggatatctgtacatgaagattcatcagaacctgggagcttgcgtcgctgggatggtccattcctttgccagagctgtcaggaaaagaaagaagcaatggagggaaagcgtcgttcacgaggttcatcaagaaacagtgggtcaagtgaatagctgccgtgtgtagagtgatcaggtaattactgatcaacaacaccccagcaccaccattttgcagcatttcttctgttgtgacactttcttgatcacatgtaatgtctgggagttctgatctagaactagattgaagtattgaaattgccattgtagaggtggctgctgcttatagctctcatcccaagcgaggagcatgtcttgtcctcagcaaggttcttgctgaggaatgtaggcagctctgctcagcccttgaccttgatggcacatacaggtttaaagattaacatgccaaaatgatatggcttgtctattctaaggtcaactgttgcaacacaaattactcttggtatagacttctgacaaatagcttggcactgtttctgaattaggcctaggtgcttacatcaattttctcttgttgaatccggctttaattcatgactagagactttagagtattatcagtccttgttgaggttcagcctttgctgacaccaatgtaattaacatctaaaaatattctttgaatcagcttgtgattcatcagcaagacgttagttgtcatgtacaatgtacaaaatcttgctaacaggacaggtgtactgatcctttttgtatatcttattttattttttcttagtaatgtatagtagtcctgagtatgaaatttgtttctgcatgggagattccccagccaaaagtatgctgtaatatgttgtccgtagttcagtcgaaaaaatactccatatgcagaatgatgccaagatgtctgttccttgcgtttgaag

SEQ ID NO: 43841 - DNA, 2407 bp, Zea Mays
gtcccgtactcgtccaaattctcctcgtctcgtctcccatgtgacccatccaaccgccctctcctctcttcctcttcctcgcaccacctccaccaccaccctcctctcttctcgcctccaccaccaaaaggggtgagaggcacggggaccgcccgcctcgctcgctggcctgcacactggattcggcgccgcggcggtagttgcagcggcggcctggcagggagatgtcttcacgctcggggtctacgagcggcgggagcaccggtggcggcagcagcgcagggggaggcgccgcggtgccgctggccttgctgctgaggcgggaggtggccagcgagcgcaccgcatcggagcgaccggagctgcactcgggcctcttcagccaggccaagaaagctgtttgatgggcacaatgggaacggggccgcaatttacaccaaagagaatctcttgaacaacatcttgaacgcggtccctgctgatctcaacagggaagactggcttgctgcactcccaagagcgctggttgctgcattcgttaaaacggataaagatttccagactaaagcacgttcttcagggacaaccgtgacatttgtcataatagatggattgttcatcactgttgcatcagttggcgattcccgttgtgtactacaagctgaaggttcaatttaccatttatcctctgatcatcgatttgatgcaagtaaagaggaggttgatcgtgtaacaaaatgtggaggtgatgttggaaggctaaatgttgttggtggcgctgagattggtcctcttaggtgttggcctggaggtttgtgcctatctaggtcaataggagatcaagatgttggtgaatttattgttccagttcctcttgtgaagcaagtaaagctgtctactgcgggaggccgacttattattgcaagtgatggtgtttgggatgcattatctccagaagtagcttttaactgttcacgtgaacttcctccagtgcctgcagctgagcaaatcgttaaaactgctgtgcaatcaaaaggactgagggatgataccacctgtattgttgttgatataatagcagagaaaaccaacccttccatgccacttcctagaaggcaaccgggaattggtgtcttcaaaaatatgtttggcaagaaaaaatcatcggattcatcatcacattcccatgcagatagagaatatatggatccagatatcttggaggaaatatttgaggatgggtgtgcgcttctttctagacggctggattctgaataccctgttcgaaatatgttcaaactcttcatatgtgccgtttgtcaaatagagttaaagccaaaccaagggatatctgtacatgaagattcatcagaacctgggagcttgcgtcgctgggatggtccattcctttgccagagctgtcaggaaaagaaagaagcaatggagggaaagcgtcgttcacgaggttcatcaagaaacagtgggtcaagtgaatagctgccgtgtgtagagtgatcaggtaattactgatcaacaacaccccagcaccaccattttgcagcatttcttctgttgtgacactttcttgatcacatgtaatgtctgggagttctgatctagaactagattgaagtattgaaattgccattgtagaggtggctgctgcttatagctctcatcccaagcgaggagcatgtcttgtcctcagcaaggttcttgctgaggaatgtaggcagctctgctcagcccttgaccttgatggcacatacaggtttaaagattaacatgccaaaatgatatggcttgtctattctaaggtcaactgttgcaacacaaattactcttggtatagacttctgacaaatagcttggcactgtttctgaattaggcctaggtgcttacatcaattttctcttgttgaatccggctttaattcatgactagagactttagagtattatcagtccttgttgaggttcagcctttgctgacaccaatgtaattaacatctaaaaatattctttgaatcagcttgtgattcatcagcaagacgttagttgtcatgtacaatgtacaaaatcttgctaacaggacaggtctgtttcctcctctacgttttgtcattacatggatgaaaattaattggtgtgccaattggaggaaagaatttgttctagtaaatgttgatggtagacgtgactttcactcactgcaggtgtactgatcctttttgtatatcttattttattttttcttagtaatgtatagtagtcctgagtatgaaatttgtttctgcatgggagattccccagccaaaagtatgctgtaatatgttgtccgtagttcagtcgaaaaaatactccatatgcagaatgatgccaagatgtctgttccttgcgtttgaag

SEQ ID NO: 43842 - DNA, 2269 bp, Zea Mays
gtcccgtactcgtccaaattctcctcgtctcgtctcccatgtgacccatccaaccgccctctcctctcttcctcttcctcgcaccacctccaccaccaccctcctctcttctcgcctccaccaccaaaaggggtgagaggcacggggaccgcccgcctcgctcgctggcctgcacactggattcggcgccgcggcggtagttgcagcggcggcctggcagggagatgtcttcacgctcggggtctacgagcggcgggagcaccggtggcggcagcagcgcagggggaggcgccgcggtgccgctggccttgctgctgaggcgggaggtggccagcgagcgcaccgcatcggagcgaccggagctgcactcgggcctcttcagccaggccaagaaaggcgaggacttcacattcctcaagctcgaatgcgagcgcgtccccggcgtcccgtcctcctccttctccgccttcggcctgtttgatgggcacaatgggaacggggccgcaatttacaccaaagagaatctcttgaacaacatcttgaacgcggtccctgctgatctcaacagggaagactggcttgctgcactcccaagagcgctggttgctgcattcgttaaaacggataaagatttccagactaaagattggtcctcttaggtgttggcctggaggtttgtgcctatctaggtcaataggagatcaagatgttggtgaatttattgttccagttcctcttgtgaagcaagtaaagctgtctactgcgggaggccgacttattattgcaagtgatggtgtttgggatgcattatctccagaagtagcttttaactgttcacgtgaacttcctccagtgcctgcagctgagcaaatcgttaaaactgctgtgcaatcaaaaggactgagggatgataccacctgtattgttgttgatataatagcagagaaaaccaacccttccatgccacttcctagaaggcaaccgggaattggtgtcttcaaaaatatgtttggcaagaaaaaatcatcggattcatcatcacattcccatgcagatagagaatatatggatccagatatcttggaggaaatatttgaggatgggtgtgcgcttctttctagacggctggattctgaataccctgttcgaaatatgttcaaactcttcatatgtgccgtttgtcaaatagagttaaagccaaaccaagggatatctgtacatgaagattcatcagaacctgggagcttgcgtcgctgggatggtccattcctttgccagagctgtcaggaaaagaaagaagcaatggagggaaagcgtcgttcacgaggttcatcaagaaacagtgggtcaagtgaatagctgccgtgtgtagagtgatcaggtaattactgatcaacaacaccccagcaccaccattttgcagcatttcttctgttgtgacactttcttgatcacatgtaatgtctgggagttctgatctagaactagattgaagtattgaaattgccattgtagaggtggctgctgcttatagctctcatcccaagcgaggagcatgtcttgtcctcagcaaggttcttgctgaggaatgtaggcagctctgctcagcccttgaccttgatggcacatacaggtttaaagattaacatgccaaaatgatatggcttgtctattctaaggtcaactgttgcaacacaaattactcttggtatagacttctgacaaatagcttggcactgtttctgaattaggcctaggtgcttacatcaattttctcttgttgaatccggctttaattcatgactagagactttagagtattatcagtccttgttgaggttcagcctttgctgacaccaatgtaattaacatctaaaaatattctttgaatcagcttgtgattcatcagcaagacgttagttgtcatgtacaatgtacaaaatcttgctaacaggacaggtctgtttcctcctctacgttttgtcattacatggatgaaaattaattggtgtgccaattggaggaaagaatttgttctagtaaatgttgatggtagacgtgactttcactcactgcaggtgtactgatcctttttgtatatcttattttattttttcttagtaatgtatagtagtcctgagtatgaaatttgtttctgcatgggagattccccagccaaaagtatgctgtaatatgttgtccgtagttcagtcgaaaaaatactccatatgcagaatgatgccaagatgtctgttccttgcgtttgaag

SEQ ID NO: 43843 - DNA, 1871 bp, Zea Mays
gtcccgtactcgtccaaattctcctcgtctcgtctcccatgtgacccatccaaccgccctctcctctcttcctcttcctcgcaccacctccaccaccaccctcctctcttctcgcctccaccaccaaaaggggtgagaggcacggggaccgcccgcctcgctcgctggcctgcacactggattcggcgccgcggcggtagttgcagcggcggcctggcagggagatgtcttcacgctcggggtactacaagctgaaggttcaatttaccatttatcctctgatcatcgatttgatgcaagtaaagaggaggttgatcgtgtaacaaaatgtggaggtgatgttggaaggctaaatgttgttggtggcgctgagattggtcctcttaggtgttggcctggaggtttgtgcctatctaggtcaataggagatcaagatgttggtgaatttattgttccagttcctcttgtgaagcaagtaaagactgctgtgcaatcaaaaggactgagggatgataccacctgtattgttgttgatataatagcagagaaaaccaacccttccatgccacttcctagaaggcaaccgggaattggtgtcttcaaaaatatgtttggcaagaaaaaatcatcggattcatcatcacattcccatgcagatagagaatatatggatccagatatcttggaggaaatatttgaggatgggtgtgcgcttctttctagacggctggattctgaataccctgttcgaaatatgttcaaactcttcatatgtgccgtttgtcaaatagagttaaagccaaaccaagggatatctgtacatgaagattcatcagaacctgggagcttgcgtcgctgggatggtccattcctttgccagagctgtcaggaaaagaaagaagcaatggagggaaagcgtcgttcacgaggttcatcaagaaacagtgggtcaagtgaatagctgccgtgtgtagagtgatcaggtaattactgatcaacaacaccccagcaccaccattttgcagcatttcttctgttgtgacactttcttgatcacatgtaatgtctgggagttctgatctagaactagattgaagtattgaaattgccattgtagaggtggctgctgcttatagctctcatcccaagcgaggagcatgtcttgtcctcagcaaggttcttgctgaggaatgtaggcagctctgctcagcccttgaccttgatggcacatacaggtttaaagattaacatgccaaaatgatatggcttgtctattctaaggtcaactgttgcaacacaaattactcttggtatagacttctgacaaatagcttggcactgtttctgaattaggcctaggtgcttacatcaattttctcttgttgaatccggctttaattcatgactagagactttagagtattatcagtccttgttgaggttcagcctttgctgacaccaatgtaattaacatctaaaaatattctttgaatcagcttgtgattcatcagcaagacgttagttgtcatgtacaatgtacaaaatcttgctaacaggacaggtctgtttcctcctctacgttttgtcattacatggatgaaaattaattggtgtgccaattggaggaaagaatttgttctagtaaatgttgatggtagacgtgactttcactcactgcaggtgtactgatcctttttgtatatcttattttattttttcttagtaatgtatagtagtcctgagtatgaaatttgtttctgcatgggagattccccagccaaaagtatgctgtaatatgttgtccgtagttcagtcgaaaaaatactccatatgcagaatgatgccaagatgtctgttccttgcgtttgaag

SEQ ID NO: 43844 - DNA, 2358 bp, Zea Mays
gtcccgtactcgtccaaattctcctcgtctcgtctcccatgtgacccatccaaccgccctctcctctcttcctcttcctcgcaccacctccaccaccaccctcctctcttctcgcctccaccaccaaaaggggtgagaggcacggggaccgcccgcctcgctcgctggcctgcacactggattcggcgccgcggcggtagttgcagcggcggcctggcagggagatgtcttcacgctcggggtctacgagcggcgggagcaccggtggcggcagcagcgcagggggaggcgccgcggtgccgctggccttgctgctgaggcgggaggtggccagcgagcgcaccgcatcggagcgaccggagctgcactcgggcctcttcagccaggccaagaaaggcgaggacttcacattcctcaagctcgaatgcgagcgcgtccccggcgtcccgtcctcctccttctccgccttcggcctgtttgatgggcacaatgggaacggggccgcaatttacaccaaagagaatctcttgaacaacatcttgaacgcggtccctgctgatctcaacagggaagactggcttgctgcactcccaagagcgctggttgctgcattcgttaaaacggataaagatttccagactaaagcacgttcttcagggacaaccgtgacatttgtcataatagatggattgttcatcactgttgcatcagttggcgattcccgttgtgtactacaagctgaaggttcaatttaccatttatcctctgatcatcgatttgatgcaagtaaagaggaggttgatcgtgtaacaaaatgtggaggtgatgttggaaggctaaatgttgttggtggcgctgagattggtcctcttaggtgttggcctggaggtttgtgcctatctaggtcaataggagatcaagatgttggtgaatttattgttccagttcctcttgtgaagcaagtaaagactgctgtgcaatcaaaaggactgagggatgataccacctgtattgttgttgatataatagcagagaaaaccaacccttccatgccacttcctagaaggcaaccgggaattggtgtcttcaaaaatatgtttggcaagaaaaaatcatcggattcatcatcacattcccatgcagatagagaatatatggatccagatatcttggaggaaatatttgaggatgggtgtgcgcttctttctagacggctggattctgaataccctgttcgaaatatgttcaaactcttcatatgtgccgtttgtcaaatagagttaaagccaaaccaagggatatctgtacatgaagattcatcagaacctgggagcttgcgtcgctgggatggtccattcctttgccagagctgtcaggaaaagaaagaagcaatggagggaaagcgtcgttcacgaggttcatcaagaaacagtgggtcaagtgaatagctgccgtgtgtagagtgatcaggtaattactgatcaacaacaccccagcaccaccattttgcagcatttcttctgttgtgacactttcttgatcacatgtaatgtctgggagttctgatctagaactagattgaagtattgaaattgccattgtagaggtggctgctgcttatagctctcatcccaagcgaggagcatgtcttgtcctcagcaaggttcttgctgaggaatgtaggcagctctgctcagcccttgaccttgatggcacatacaggtttaaagattaacatgccaaaatgatatggcttgtctattctaaggtcaactgttgcaacacaaattactcttggtatagacttctgacaaatagcttggcactgtttctgaattaggcctaggtgcttacatcaattttctcttgttgaatccggctttaattcatgactagagactttagagtattatcagtccttgttgaggttcagcctttgctgacaccaatgtaattaacatctaaaaatattctttgaatcagcttgtgattcatcagcaagacgttagttgtcatgtacaatgtacaaaatcttgctaacaggacaggtctgtttcctcctctacgttttgtcattacatggatgaaaattaattggtgtgccaattggaggaaagaatttgttctagtaaatgttgatggtagacgtgactttcactcactgcaggtgtactgatcctttttgtatatcttattttattttttcttagtaatgtatagtagtcctgagtatgaaatttgtttctgcatgggagattccccagccaaaagtatgctgtaatatgttgtccgtagttcagtcgaaaaaatactccatatgcagaatgatgccaagatgtctgttccttgcgtttgaag

SEQ ID NO: 43845 - DNA, 2389 bp, Zea Mays
gtcccgtactcgtccaaattctcctcgtctcgtctcccatgtgacccatccaaccgccctctcctctcttcctcttcctcgcaccacctccaccaccaccctcctctcttctcgcctccaccaccaaaaggggtgagaggcacggggaccgcccgcctcgctcgctggcctgcacactggattcggcgccgcggcggtagttgcagcggcggcctggcagggagatgtcttcacgctcggggtctacgagcggcgggagcaccggtggcggcagcagcgcagggggaggcgccgcggtgccgctggccttgctgctgaggcgggaggtggccagcgagcgcaccgcatcggagcgaccggagctgcactcgggcctcttcagccaggccaagaaaggcgaggacttcacattcctcaagctcgaatgcgagcgcgtccccggcgtcccgtcctcctccttctccgccttcggcggaagactggcttgctgcactcccaagagcgctggttgctgcattcgttaaaacggataaagatttccagactaaagcacgttcttcagggacaaccgtgacatttgtcataatagatggattgttcatcactgttgcatcagttggcgattcccgttgtgtactacaagctgaaggttcaatttaccatttatcctctgatcatcgatttgatgcaagtaaagaggaggttgatcgtgtaacaaaatgtggaggtgatgttggaaggctaaatgttgttggtggcgctgagattggtcctcttaggtgttggcctggaggtttgtgcctatctaggtcaataggagatcaagatgttggtgaatttattgttccagttcctcttgtgaagcaagtaaagctgtctactgcgggaggccgacttattattgcaagtgatggtgtttgggatgcattatctccagaagtagcttttaactgttcacgtgaacttcctccagtgcctgcagctgagcaaatcgttaaaactgctgtgcaatcaaaaggactgagggatgataccacctgtattgttgttgatataatagcagagaaaaccaacccttccatgccacttcctagaaggcaaccgggaattggtgtcttcaaaaatatgtttggcaagaaaaaatcatcggattcatcatcacattcccatgcagatagagaatatatggatccagatatcttggaggaaatatttgaggatgggtgtgcgcttctttctagacggctggattctgaataccctgttcgaaatatgttcaaactcttcatatgtgccgtttgtcaaatagagttaaagccaaaccaagggatatctgtacatgaagattcatcagaacctgggagcttgcgtcgctgggatggtccattcctttgccagagctgtcaggaaaagaaagaagcaatggagggaaagcgtcgttcacgaggttcatcaagaaacagtgggtcaagtgaatagctgccgtgtgtagagtgatcaggtaattactgatcaacaacaccccagcaccaccattttgcagcatttcttctgttgtgacactttcttgatcacatgtaatgtctgggagttctgatctagaactagattgaagtattgaaattgccattgtagaggtggctgctgcttatagctctcatcccaagcgaggagcatgtcttgtcctcagcaaggttcttgctgaggaatgtaggcagctctgctcagcccttgaccttgatggcacatacaggtttaaagattaacatgccaaaatgatatggcttgtctattctaaggtcaactgttgcaacacaaattactcttggtatagacttctgacaaatagcttggcactgtttctgaattaggcctaggtgcttacatcaattttctcttgttgaatccggctttaattcatgactagagactttagagtattatcagtccttgttgaggttcagcctttgctgacaccaatgtaattaacatctaaaaatattctttgaatcagcttgtgattcatcagcaagacgttagttgtcatgtacaatgtacaaaatcttgctaacaggacaggtctgtttcctcctctacgttttgtcattacatggatgaaaattaattggtgtgccaattggaggaaagaatttgttctagtaaatgttgatggtagacgtgactttcactcactgcaggtgtactgatcctttttgtatatcttattttattttttcttagtaatgtatagtagtcctgagtatgaaatttgtttctgcatgggagattccccagccaaaagtatgctgtaatatgttgtccgtagttcagtcgaaaaaatactccatatgcagaatgatgccaagatgtctgttccttgcgtttgaag

SEQ ID NO: 43846 - DNA, 475 bp, Zea Mays
agcaaagaaggatgatgcactttccaacctatgtagcacgttgggacaactcaagaaaatggcagtggatatggacatagaaattgacaggcaaaacaaagtgctggttcctttcagcgacgacgtcgatgaactgaattttagactgaaaggcgtgaatcagtgtggacgccagttgctgggcaagtgatatggagccagaattcgggcagtttggagactatcgcctcgattgcagaatttaagaacattgttgttttacatgttttttgcagtgaatcaggccacacatgttgtattagtgagagaatgatgatttattttgtattattaaggatttcatagattattttagttttccctgaactgcaatcgtttcaataacatagaggggactaccttgaatgacatttaggtgaatttttaaggtatgtccattattccattatagagcacaaagcctacttcgtacaac

SEQ ID NO: 43847 - DNA, 1504 bp, Zea Mays
cagtagcaatgatgcttcgaggctgacattctggctctccaacacagttgtcctcagggagataattgtacaaagttttggcatctcacatcaatttactccatccatgacgaatatgagcatgaatggtggtgccaaaaaacttgatgggaaatctatgacaatgctgtggagaaacaactacaatggcatgcaaggcagatgccagatgattggcacgaaacaagtacacttttgtctacattagagaagattgagtcttggatattttctcgcattgttgagacaatatggtggcaggtgatggagcagtgtgtagcccgtttggatgttgccatgtttaatgccatccttcatgaatcagcaagtgagataccaacagaccctatatctgacccaattgttgacccaaaagtcctaccaattccagctggtgatctaagctttgggtcacgcgcgcagctgaataactctattggaaactggtccagatggctgacagataagcttggcatagatcatgatgactttgaggacataggagatgttgaagacgaaagaagagctgcagctgaaacgaaatcatttcaacttctcaatgagctaagtgatcatctattttttagtttttcataattttcctttcatggcctccttacatgtttgatttcctatgatccatgagttgccaatcatgataacgcggtttcactatgtaggagatgaacaaggatgctgtcacaactgatgctatcggcagtatcagaacttgatgatgcttgtagactgttcatggtgcttgtagactgttcatggtgcttgtagggatgatgtatgtctatggcttactgagctccaaccaactatggaaggagcgttagctaggacagcagttagtctaacagttgtggacaaagttcagtataccatacactgaagcgcacccttgttgctaaaggtgtcaacagctttgctcagcagaatggaggatcattgtcactagcagcaagacctcaagcccaggcagagagcaaagaaggatgatgcactttccaacctatgtagcacgttgggacaactcaagaaaatggcagtggatatggacatagaaattgacaggcaaaacaaagtgctggttcctttcagcgacgacgtcgatgaactgaattttagactgaaaggcgtgaatcagtgtggacgccagttgctgggcaagtgatatggagccagaattcgggcagtttggagactatcgcctcgattgcagaatttaagaacattgttgttttacatgttttttgcagtgaatcaggccacacatgttgtattagtgagagaatgatgatttattttgtattattaaggatttcatagattattttagttttccctgaactgcaatcgtttcaataacatagaggggactaccttgaatgacatttaggtgaatttttaaggtatgtccattattccattatagagcacaaagcctacttcgtacaac

SEQ ID NO: 43848 - DNA, 1368 bp, Zea Mays
cagtagcaatgatgcttcgaggctgacattctggctctccaacacagttgtcctcagggagataattgtacaaagttttggcatctcacatcaatttactccatccatgacgaatatgagcatgaatggtggtgccaaaaaacttgatgggaaatctatgacaatgctgtggagaaacaactacaatggcatgcaaggcagatgccagatgattggcacgaaacaagtacacttttgtctacattagagaagattgagtcttggatattttctcgcattgttgagacaatatggtggcagattggaaactggtccagatggctgacagataagcttggcatagatcatgatgactttgaggacataggagatgttgaagacgaaagaagagctgcagctgaaacgaaatcatttcaacttctcaatgagctaagtgatcatctattttttagtttttcataattttcctttcatggcctccttacatgtttgatttcctatgatccatgagttgccaatcatgataacgcggtttcactatgtaggagatgaacaaggatgctgtcacaactgatgctatcggcagtatcagaacttgatgatgcttgtagactgttcatggtgcttgtagactgttcatggtgcttgtagggatgatgtatgtctatggcttactgagctccaaccaactatggaaggagcgttagctaggacagcagttagtctaacagttgtggacaaagttcagtataccatacactgaagcgcacccttgttgctaaaggtgtcaacagctttgctcagcagaatggaggatcattgtcactagcagcaagacctcaagcccaggcagttaaacatcggtttctttccttctttctttgggcctagagagcaaagaaggatgatgcactttccaacctatgtagcacgttgggacaactcaagaaaatggcagtggatatggacatagaaattgacaggcaaaacaaagtgctggttcctttcagcgacgacgtcgatgaactgaattttagactgaaaggcgtgaatcagtgtggacgccagttgctgggcaagtgatatggagccagaattcgggcagtttggagactatcgcctcgattgcagaatttaagaacattgttgttttacatgttttttgcagtgaatcaggccacacatgttgtattagtgagagaatgatgatttattttgtattattaaggatttcatagattattttagttttccctgaactgcaatcgtttcaataacatagaggggactaccttgaatgacatttaggtgaatttttaaggtatgtccattattccattatagagcacaaagcctacttcgtacaac

SEQ ID NO: 43849 - DNA, 1544 bp, Zea Mays
cagtagcaatgatgcttcgaggctgacattctggctctccaacacagttgtcctcagggagataattgtacaaagttttggcatctcacatcaatttactccatccatgacgaatatgagcatgaatggtggtgccaaaaaacttgatgggaaatctatgacaatgctgtggagaaacaactacaatggcatgcaaggcagatgccagatgattggcacgaaacaagtacacttttgtctacattagagaagattgagtcttggatattttctcgcattgttgagacaatatggtggcaggtgatggagcagtgtgtagcccgtttggatgttgccatgtttaatgccatccttcatgaatcagcaagtgagataccaacagaccctatatctgacccaattgttgacccaaaagtcctaccaattccagctggtgatctaagctttgggtcacgcgcgcagctgaataactctattggaaactggtccagatggctgacagataagcttggcatagatcatgatgactttgaggacataggagatgttgaagacgaaagaagagctgcagctgaaacgaaatcatttcaacttctcaatgagctaagtgatcatctattttttagtttttcataattttcctttcatggcctccttacatgtttgatttcctatgatccatgagttgccaatcatgataacgcggtttcactatgtaggagatgaacaaggatgctgtcacaactgatgctatcggcagtatcagaacttgatgatgcttgtagactgttcatggtgcttgtagactgttcatggtgcttgtagggatgatgtatgtctatggcttactgagctccaaccaactatggaaggagcgttagctaggacagcagttagtctaacagttgtggacaaagttcagtataccatacactgaagcgcacccttgttgctaaagctgcaggtgtcaacagctttgctcagcagaatggaggatcattgtcactagcagcaagacctcaagcccagttaaacatcggtttctttccttctttctttgggcctagagagcaaagaaggatgatgcactttccaacctatgtagcacgttgggacaactcaagaaaatggcagtggatatggacatagaaattgacaggcaaaacaaagtgctggttcctttcagcgacgacgtcgatgaactgaattttagactgaaaggcgtgaatcagtgtggacgccagttgctgggcaagtgatatggagccagaattcgggcagtttggagactatcgcctcgattgcagaatttaagaacattgttgttttacatgttttttgcagtgaatcaggccacacatgttgtattagtgagagaatgatgatttattttgtattattaaggatttcatagattattttagttttccctgaactgcaatcgtttcaataacatagaggggactaccttgaatgacatttaggtgaatttttaaggtatgtccattattccattatagagcacaaagcctacttcgtacaac

SEQ ID NO: 43850 - DNA, 1542 bp, Zea Mays
cagtagcaatgatgcttcgaggctgacattctggctctccaacacagttgtcctcagggagataattgtacaaagttttggcatctcacatcaatttactccatccatgacgaatatgagcatgaatggtggtgccaaaaaacttgatgggaaatctatgacaatgctgtggagaaacaactacaatggcatgcaaggcagatgccagatgattggcacgaaacaagtacacttttgtctacattagagaagattgagtcttggatattttctcgcattgttgagacaatatggtggcaggtgatggagcagtgtgtagcccgtttggatgttgccatgtttaatgccatccttcatgaatcagcaagtgagataccaacagaccctatatctgacccaattgttgacccaaaagtcctaccaattccagctggtgatctaagctttgggtcacgcgcgcagctgaataactctattggaaactggtccagatggctgacagataagcttggcatagatcatgatgactttgaggacataggagatgttgaagacgaaagaagagctgcagctgaaacgaaatcatttcaacttctcaatgagctaagtgatcatctattttttagtttttcataattttcctttcatggcctccttacatgtttgatttcctatgatccatgagttgccaatcatgataacgcggtttcactatgtaggagatgaacaaggatgctgtcacaactgatgctatcggcagtatcagaacttgatgatgcttgtagactgttcatggtgcttgtagactgttcatggtgcttgtagggatgatgtatgtctatggcttactgagctccaaccaactatggaaggagcgttagctaggacagcagttagtctaacagttgtggacaaagttcagtataccatacactgaagcgcacccttgttgctaaaggtgtcaacagctttgctcagcagaatggaggatcattgtcactagcagcaagacctcaagcccaggcagttaaacatcggtttctttccttctttctttgggcctagagagcaaagaaggatgatgcactttccaacctatgtagcacgttgggacaactcaagaaaatggcagtggatatggacatagaaattgacaggcaaaacaaagtgctggttcctttcagcgacgacgtcgatgaactgaattttagactgaaaggcgtgaatcagtgtggacgccagttgctgggcaagtgatatggagccagaattcgggcagtttggagactatcgcctcgattgcagaatttaagaacattgttgttttacatgttttttgcagtgaatcaggccacacatgttgtattagtgagagaatgatgatttattttgtattattaaggatttcatagattattttagttttccctgaactgcaatcgtttcaataacatagaggggactaccttgaatgacatttaggtgaatttttaaggtatgtccattattccattatagagcacaaagcctacttcgtacaac

SEQ ID NO: 43851 - DNA, 1484 bp, Zea Mays
cagtagcaatgatgcttcgaggctgacattctggctctccaacacagttgtcctcagggagataattgtacaaagttttggcatctcacatcaatttactccatccatgacgaatatgagcatgaatggtggtgccaaaaaacttgatgggaaatctatgacaatgctgtggagaaacaactacaatggcatgcaaggcagatgccagatgattggcacgaaacaagtacacttttgtctacattagagaagattgagtcttggatattttctcgcattgttgagacaatatggtggcagcaagtgagataccaacagaccctatatctgacccaattgttgacccaaaagtcctaccaattccagctggtgatctaagctttgggtcacgcgcgcagctgaataactctattggaaactggtccagatggctgacagataagcttggcatagatcatgatgactttgaggacataggagatgttgaagacgaaagaagagctgcagctgaaacgaaatcatttcaacttctcaatgagctaagtgatcatctattttttagtttttcataattttcctttcatggcctccttacatgtttgatttcctatgatccatgagttgccaatcatgataacgcggtttcactatgtaggagatgaacaaggatgctgtcacaactgatgctatcggcagtatcagaacttgatgatgcttgtagactgttcatggtgcttgtagactgttcatggtgcttgtagggatgatgtatgtctatggcttactgagctccaaccaactatggaaggagcgttagctaggacagcagttagtctaacagttgtggacaaagttcagtataccatacactgaagcgcacccttgttgctaaagctgcaggtgtcaacagctttgctcagcagaatggaggatcattgtcactagcagcaagacctcaagcccaggcagttaaacatcggtttctttccttctttctttgggcctagagagcaaagaaggatgatgcactttccaacctatgtagcacgttgggacaactcaagaaaatggcagtggatatggacatagaaattgacaggcaaaacaaagtgctggttcctttcagcgacgacgtcgatgaactgaattttagactgaaaggcgtgaatcagtgtggacgccagttgctgggcaagtgatatggagccagaattcgggcagtttggagactatcgcctcgattgcagaatttaagaacattgttgttttacatgttttttgcagtgaatcaggccacacatgttgtattagtgagagaatgatgatttattttgtattattaaggatttcatagattattttagttttccctgaactgcaatcgtttcaataacatagaggggactaccttgaatgacatttaggtgaatttttaaggtatgtccattattccattatagagcacaaagcctacttcgtacaac

SEQ ID NO: 43852 - DNA, 1602 bp, Zea Mays
cttctgcggacctggtagttgtttctccacatggttctgctgtcctgggtagcaaaaaacattgcttctggtcttgttcttgttgcaaagtccagtagcaatgatgcttcgaggctgacattctggctctccaacacagttgtcctcagggagataattgtacaaagttttggcatctcacatcaatttactccatccatgacgaatatgagcatgaatggtggtgccaaaaaacttgatgggaaatctatgacaatgctgtggagaaacaactacaatggcatgcaaggcagatgccagatgattggcacgaaacaagtacacttttgtctacattagagaagattgagtcttggatattttctcgcattgttgagacaatatggtggcaggtgatggagcagtgtgtagcccgtttggatgttgccatgtttaatgccatccttcatgaatcagcaagtgagataccaacagaccctatatctgacccaattgttgacccaaaagtcctaccaattccagctggtgatctaagctttgggtcacgcgcgcagctgaataactctattggaaactggtccagatggctgacagataagcttggcatagatcatgatgactttgaggacataggagatgttgaagacgaaagaagagctgcagctgaaacgaaatcatttcaacttctcaatgagctaagtgatcatctattttttagtttttcataattttcctttcatggcctccttacatgtttgatttcctatgatccatgagttgccaatcatgataacgcggtttcactatgtaggagatgaacaaggatgctgtcacaactgatgctatcggcagtatcagaacttgatgatgcttgtagactgttcatggtgcttgtagactgttcatggtgcttgtagggatgatgtatgtctatggcttactgagctccaaccaactatggaaggagcgttagctaggacagcagttagtctaacagttgtggacaaagttcagtataccatacactgaagcgcacccttgttgctaaagctgcaggtgtcaacagctttgctcagcagaatggaggatcattgtcactagcagcaagacctcaagcccaggcagagagcaaagaaggatgatgcactttccaacctatgtagcacgttgggacaactcaagaaaatggcagtggatatggacatagaaattgacaggcaaaacaaagtgctggttcctttcagcgacgacgtcgatgaactgaattttagactgaaaggcgtgaatcagtgtggacgccagttgctgggcaagtgatatggagccagaattcgggcagtttggagactatcgcctcgattgcagaatttaagaacattgttgttttacatgttttttgcagtgaatcaggccacacatgttgtattagtgagagaatgatgatttattttgtattattaaggatttcatagattattttagttttccctgaactgcaatcgtttcaataacatagaggggactaccttgaatgacatttaggtgaatttttaaggtatgtccattattccattatagagcacaaagcctacttcgtacaac

SEQ ID NO: 43853 - DNA, 2006 bp, Zea Mays
ttcatgactatgaatagcactgccactatgatgtgtatgcttgcgtcaggacaggagacccaaaagtacttcacagatgaatgtgacattttccacaagaacgagatacgaaatggccaaggactactgacgatgatgacgacatggccaccatcgccgccctcaggtaggccatcctccaagagctcaacctccacgcctctgttctaaaggctgacattctggctctccaacacagttgtcctcagggagataattgtacaaagttttggcatctcacatcaatttactccatccatgacgaatatgagcatgaatggtggtgccaaaaaacttgatgggaaatctatgacaatgctgtggagaaacaactacaatggcatgcaaggcagatgccagatgattggcacgaaacaagtacacttttgtctacattagagaagattgagtcttggatattttctcgcattgttgagacaatatggtggcaggtagaaggatcatcaactccaaagattggtagagtgctaggtcctactttgggtgatcagtagtagggcaccttttctgttaacctgtggaaggttgcgttttacgacgcattcaacagaatgtgccccctcagtattggcagacatgagtgtggttgtttaccaatattagcaaaactagtattttttaacatccttagtttcaaagaataacctgttctttttgttactacaaatatatttccgaactttgcgagttcttcattattaggtgatggagcagtgtgtagcccgtttggatgttgccatgtttaatgccatccttcatgaatcagcaagtgagataccaacagaccctatatctgacccaattgttgacccaaaagtcctaccaattccagctggtgatctaagctttgggtcacgcgcgcagctgaataactctattggaaactggtccagatggctgacagataagcttggcatagatcatgatgactttgaggacataggagatgttgaagacgaaagaagagctgcagctgaaacgaaatcatttcaacttctcaatgagctaagtgatcatctattttttagtttttcataattttcctttcatggcctccttacatgtttgatttcctatgatccatgagttgccaatcatgataacgcggtttcactatgtaggagatgaacaaggatgctgtcacaactgatgctatcggcagtatcagaacttgatgatgcttgtagactgttcatggtgcttgtagactgttcatggtgcttgtagggatgatgtatgtctatggcttactgagctccaaccaactatggaaggagcgttagctaggacagcagttagtctaacagttgtggacaaagttcagtataccatacactgaagcgcacccttgttgctaaagctgcaggtgtcaacagctttgctcagcagaatggaggatcattgtcactagcagcaagacctcaagcccagttaaacatcggtttctttccttctttctttgggcctagagagcaaagaaggatgatgcactttccaacctatgtagcacgttgggacaactcaagaaaatggcagtggatatggacatagaaattgacaggcaaaacaaagtgctggttcctttcagcgacgacgtcgatgaactgaattttagactgaaaggcgtgaatcagtgtggacgccagttgctgggcaagtgatatggagccagaattcgggcagtttggagactatcgcctcgattgcagaatttaagaacattgttgttttacatgttttttgcagtgaatcaggccacacatgttgtattagtgagagaatgatgatttattttgtattattaaggatttcatagattattttagttttccctgaactgcaatcgtttcaataacatagaggggactaccttgaatgacatttaggtgaatttttaaggtatgtccattattccattatagagcacaaagcctacttcgtacaac

SEQ ID NO: 43854 - DNA, 1885 bp, Zea Mays
ttcatgactatgaatagcactgccactatgatgtgtatgcttgcgtcaggacaggagacccaaaagtacttcacagatgaatgtgacattttccacaagaacgagctgtagatctaatttgattcttccgttcctcctgtggtgggatcaatcagatacgaaatggccaaggactactgacgatgatgacgacatggccaccatcgccgccctcaggctgacattctggctctccaacacagttgtcctcagggagataattgtacaaagttttggcatctcacatcaatttactccatccatgacgaatatgagcatgaatggtggtgccaaaaaacttgatgggaaatctatgacaatgctgtggagaaacaactacaatggcatgcaaggcagatgccagatgattggcacgaaacaagtacacttttgtctacattagagaagattgagtcttggatattttctcgcattgttgagacaatatggtggcaggtagaaggatcatcaactccaaagattggtagagtgctaggtcctactttgggtgatcagtagtagggcaccttttctgttaacctgtggaaggttgcgttttacgacgcattcaacagaatgtgccccctcagtattggcagacatgagtgtggttgtttaccaatattagcaaaactagtgatggagcagtgtgtagcccgtttggatgttgccatgtttaatgccatccttcatgaatcagcaagtgagataccaacagaccctatatctgacccaattgttgacccaaaagtcctaccaattccagctggtgatctaagctttgggtcacgcgcgcagctgaataactctattggaaactggtccagatggctgacagataagcttggcatagatcatgatgactttgaggacataggagatgttgaagacgaaagaagagctgcagctgaaacgaaatcatttcaacttctcaatgagctaagtgatcatctattttttagtttttcataattttcctttcatggcctccttacatgtttgatttcctatgatccatgagttgccaatcatgataacgcggtttcactatgtaggagatgaacaaggatgctgtcacaactgatgctatcggcagtatcagaacttgatgatgcttgtagactgttcatggtgcttgtagactgttcatggtgcttgtagggatgatgtatgtctatggcttactgagctccaaccaactatggaaggagcgttagctaggacagcagttagtctaacagttgtggacaaagttcagtataccatacactgaagcgcacccttgttgctaaagctgcaggtgtcaacagctttgctcagcagaatggaggatcattgtcactagcagcaagacctcaagcccaggcagagagcaaagaaggatgatgcactttccaacctatgtagcacgttgggacaactcaagaaaatggcagtggatatggacatagaaattgacaggcaaaacaaagtgctggttcctttcagcgacgacgtcgatgaactgaattttagactgaaaggcgtgaatcagtgtggacgccagttgctgggcaagtgatatggagccagaattcgggcagtttggagactatcgcctcgattgcagaatttaagaacattgttgttttacatgttttttgcagtgaatcaggccacacatgttgtattagtgagagaatgatgatttattttgtattattaaggatttcatagattattttagttttccctgaactgcaatcgtttcaataacatagaggggactaccttgaatgacatttaggtgaatttttaaggtatgtccattattccattatagagcacaaagcctacttcgtacaac

SEQ ID NO: 43855 - DNA, 1999 bp, Zea Mays
ttcatgactatgaatagcactgccactatgatgtgtatgcttgcgtcaggacaggagacccaaaagtacttcacagatgaatgtgacattttccacaagaacgagatacgaaatggccaaggactactgacgatgatgacgacatggccaccatcgccgccctcaggtaggccatcctccaagagctcaacctccacgcctctgttctaaaggctgacattctggctctccaacacagttgtcctcagggagataattgtacaaagttttggcatctcacatcaatttactccatccatgacgaatatgagcatgaatggtggtgccaaaaaacttgatgggaaatctatgacaatgctgtggagaaacaactacaatggcatgcaaggcagatgccagatgattggcacgaaacaagtacacttttgtctacattagagaagattgagtcttggatattttctcgcattgttgagacaatatggtggcaggcactaactcctcacatgcaaaaacaggtagaaggatcatcaactccaaagattggtagagtgctaggtcctactttgggtgatcagtagtagggcaccttttctgttaacctgtggaaggttgcgttttacgacgcattcaacagaatgtgccccctcagtattggcagacatgagtgtggttgtttaccaatattagcaaaactagtattttttaacatccttagtttcaaagaataacctgttctttttgttactacaaatatatttccgaactttgcgagttcttcattattaggtgatggagcagtgtgtagcccgtttggatgttgccatgtttaatgccatccttcatgaatcagcaagtgagataccaacagaccctatatctgacccaattgttgacccaaaagtcctaccaattccagctggtgatctaagctttgggtcacgcgcgcagctgaataactctattggaaactggtccagatggctgacagataagcttggcatagatcatgatgactttgaggacataggagatgttgaagacgaaagaagagctgcagctgaaacgaaatcatttcaacttctcaatgagctaagtgatcatctattttttagtttttcataattttcctttcatggcctccttacatgtttgatttcctatgatccatgagttgccaatcatgataacgcggtttcactatgtaggagatgaacaaggatgctgtcacaactgatgctatcggcagtatcagaacttgatgatgcttgtagactgttcatggtgcttgtagactgttcatggtgcttgtagggatgatgtatgtctatggcttactgagctccaaccaactatggaaggagcgttagctaggacagcagttagtctaacagttgtggacaaagttcagtataccatacactgaagcgcacccttgttgctaaagctgcaggtgtcaacagctttgctcagcagaatggaggatcattgtcactagcagcaagacctcaagcccaggcagagagcaaagaaggatgatgcactttccaacctatgtagcacgttgggacaactcaagaaaatggcagtggatatggacatagaaattgacaggcaaaacaaagtgctggttcctttcagcgacgacgtcgatgaactgaattttagactgaaaggcgtgaatcagtgtggacgccagttgctgggcaagtgatatggagccagaattcgggcagtttggagactatcgcctcgattgcagaatttaagaacattgttgttttacatgttttttgcagtgaatcaggccacacatgttgtattagtgagagaatgatgatttattttgtattattaaggatttcatagattattttagttttccctgaactgcaatcgtttcaataacatagaggggactaccttgaatgacatttaggtgaatttttaaggtatgtccattattccattatagagcacaaagcctacttcgtacaac

SEQ ID NO: 43856 - DNA, 2213 bp, Zea Mays
cccggcttcttcctgccagtttagccgaccactacttctccactgctgctcgccgtctcctcaaccaccgctgcgccacacaatcctcccgcggcgtgtctgactcaagtcaggatgtctcacaggagcagaagcagaagcccgaaccgaatccaaccgagtcatctcaacgactccgccagtttccaattgcccccttttttaggcgttcaagttccttcgagatggcgacaagtagaggagagagatagtgtttccttcaatccctctggcaccaccgacaacgtatccccgtggccatcctcgattctccttgccaaaggaggcgtcagccaagtcgtcgcgtcgcggccggcgatccactcgaggatgttcctggtgagtagcaccaccgcggtggggatcagggatgggggaggtgacaatggcgatggtggggtgcagctcgccgacaaccttaagatcttcaagactgacaacttcgatctcgacgtctacgtgcagtccaagtgccagactatgaacgagaagcactgccactatgatgtgtatgcttgcgtcaggacaggagacccaaaagtacttcacagatgaatgtgacattttccacaagaacgagctgtagatctaatttgattcttccgttcctcctgtggtgggatcaatcagatacgaaatggccaaggactactgacgatgatgacgacatggccaccatcgccgccctcaggctgacattctggctctccaacacagttgtcctcagggagataattgtacaaagttttggcatctcacatcaatttactccatccatgacgaatatgagcatgaatggtggtgccaaaaaacttgatgggaaatctatgacaatgctgtggagaaacaactacaatggcatgcaaggcagatgccagatgattggcacgaaacaagtacacttttgtctacattagagaagattgagtcttggatattttctcgcattgttgagacaatatggtggcaggtgatggagcagtgtgtagcccgtttggatgttgccatgtttaatgccatccttcatgaatcagcaagtgagataccaacagaccctatatctgacccaattgttgacccaaaagtcctaccaattccagctggtgatctaagctttgggtcacgcgcgcagctgaataactctattggaaactggtccagatggctgacagataagcttggcatagatcatgatgactttgaggacataggagatgttgaagacgaaagaagagctgcagctgaaacgaaatcatttcaacttctcaatgagctaagtgatcatctattttttagtttttcataattttcctttcatggcctccttacatgtttgatttcctatgatccatgagttgccaatcatgataacgcggtttcactatgtaggagatgaacaaggatgctgtcacaactgatgctatcggcagtatcagaacttgatgatgcttgtagactgttcatggtgcttgtagactgttcatggtgcttgtagggatgatgtatgtctatggcttactgagctccaaccaactatggaaggagcgttagctaggacagcagttagtctaacagttgtggacaaagttcagtataccatacactgaagcgcacccttgttgctaaaggtgtcaacagctttgctcagcagaatggaggatcattgtcactagcagcaagacctcaagcccaggcagagagcaaagaaggatgatgcactttccaacctatgtagcacgttgggacaactcaagaaaatggcagtggatatggacatagaaattgacaggcaaaacaaagtgctggttcctttcagcgacgacgtcgatgaactgaattttagactgaaaggcgtgaatcagtgtggacgccagttgctgggcaagtgatatggagccagaattcgggcagtttggagactatcgcctcgattgcagaatttaagaacattgttgttttacatgttttttgcagtgaatcaggccacacatgttgtattagtgagagaatgatgatttattttgtattattaaggatttcatagattattttagttttccctgaactgcaatcgtttcaataacatagaggggactaccttgaatgacatttaggtgaatttttaaggtatgtccattattccattatagagcacaaagcctacttcgtacaac

SEQ ID NO: 43857 - DNA, 2257 bp, Zea Mays
cccggcttcttcctgccagtttagccgaccactacttctccactgctgctcgccgtctcctcaaccaccgctgcgccacacaatcctcccgcggcgtgtctgactcaagtcaggatgtctcacaggagcagaagcagaagcccgaaccgaatccaaccgagtcatctcaacgactccgccagtttccaattgcccccttttttaggcgttcaagttccttcgagatggcgacaagtagaggagagagatagtgtttccttcaatccctctggcaccaccgacaacgtatccccgtggccatcctcgattctccttgccaaaggaggcgtcagccaagtcgtcgcgtcgcggccggcgatccactcgaggatgttcctggtgagtagcaccaccgcggtggggatcagggatgggggaggtgacaatggcgatggtggggtgcagctcgccgacaaccttaagatcttcaagactgacaacttcgatctcgacgtctacgtgcagtccaagtgccagactatgaacgagaagcactgccactatgatgtgtatgcttgcgtcaggacaggagacccaaaagtacttcacagatgaatgtgacattttccacaagaacgagctgtagatctaatttgattcttccgttcctcctgtggtgggatcaatcagatacgaaatggccaaggactactgacgatgatgacgacatggccaccatcgccgccctcaggctgacattctggctctccaacacagttgtcctcagggagataattgtacaaagttttggcatctcacatcaatttactccatccatgacgaatatgagcatgaatggtggtgccaaaaaacttgatgggaaatctatgacaatgctgtggagaaacaactacaatggcatgcaaggcagatgccagatgattggcacgaaacaagtacacttttgtctacattagagaagattgagtcttggatattttctcgcattgttgagacaatatggtggcaggtgatggagcagtgtgtagcccgtttggatgttgccatgtttaatgccatccttcatgaatcagcaagtgagataccaacagaccctatatctgacccaattgttgacccaaaagtcctaccaattccagctggtgatctaagctttgggtcacgcgcgcagctgaataactctattggaaactggtccagatggctgacagataagcttggcatagatcatgatgactttgaggacataggagatgttgaagacgaaagaagagctgcagctgaaacgaaatcatttcaacttctcaatgagctaagtgatcatctattttttagtttttcataattttcctttcatggcctccttacatgtttgatttcctatgatccatgagttgccaatcatgataacgcggtttcactatgtaggagatgaacaaggatgctgtcacaactgatgctatcggcagtatcagaacttgatgatgcttgtagactgttcatggtgcttgtagactgttcatggtgcttgtagggatgatgtatgtctatggcttactgagctccaaccaactatggaaggagcgttagctaggacagcagttagtctaacagttgtggacaaagttcagtataccatacactgaagcgcacccttgttgctaaagctgcaggtgtcaacagctttgctcagcagaatggaggatcattgtcactagcagcaagacctcaagcccaggcagttaaacatcggtttctttccttctttctttgggcctagagagcaaagaaggatgatgcactttccaacctatgtagcacgttgggacaactcaagaaaatggcagtggatatggacatagaaattgacaggcaaaacaaagtgctggttcctttcagcgacgacgtcgatgaactgaattttagactgaaaggcgtgaatcagtgtggacgccagttgctgggcaagtgatatggagccagaattcgggcagtttggagactatcgcctcgattgcagaatttaagaacattgttgttttacatgttttttgcagtgaatcaggccacacatgttgtattagtgagagaatgatgatttattttgtattattaaggatttcatagattattttagttttccctgaactgcaatcgtttcaataacatagaggggactaccttgaatgacatttaggtgaatttttaaggtatgtccattattccattatagagcacaaagcctacttcgtacaac
